United States Patent Application Publication US 2024/0327476 A1 - sequence listing, part 118

SEQ ID NO: 224795 - DNA, 2739 bp, synthetic construct
  misc_feature 1..2739: note = Description of Artificial Sequence: Synthetic coding sequence
  source 1..2739: mol_type = other DNA
atgccaggaaagcgtgggctgggctggtggtgggcacgactgccattgtgtctcctgctgagtctatacggaccctggatgccaagcagcctgggtaagcccaaaggacacccgcacatgaattctatcaggatagatggcgatatcacgctcgggggtttgttccccgtacacggaaggggctccgaaggcaaaccctgtggtgaattgaagaaagaaaagggtattcatcgactagaggctatgctcttcgccctcgacagaataaacaacgatcctgatcttttacctaacatcaccctgggagcccgtattttagacacttgctcaagggacacacacgcacttgagcagtcactgacttttgtccaagctcttattgagaaggacggtactgaagtgcgctgcggctccggcggacccccaatcatcacgaagcctgaacgagttgtgggcgtcattggagccagtggatcatccgtttcaataatggtcgccaatatcttgcgactttttaagatccctcagatctcttatgcctctaccgctcctgacttgagtgataactctcggtacgacttctttagccgagtagtaccaagtgacacatatcaggcccaagccatggtcgacatcgtcagggcattaaaatggaattacgtctcgaccgtggctagtgagggctcatatggggaatccggcgtggaggcctttatccaaaaatcacgcgaagatggtggagtgtgcattgcccagagtgtgaagattcccagggagcccaaggcaggggagtttgataagatcatccgcagattgcttgagacttctaatgccagggctgtgataatttttgcaaacgaggacgacatcaggagagtgctggaagcagccaggcgcgcaaaccagaccggccacttcttctggatgggatcagacagctgggggtcaaagattgcccctgttcttcatttggaggaagtggccgaaggcgctgttaccatactgccaaagcgaatgagcgtaagaggttttgatagatatttttccagtcggacactggataataacagacggaacatctggttcgctgaattttgggaagacaactttcattgcaagctatccagacacgcattgaaaaaaggatcccatgtcaagaagtgtactaaccgagagagaattgggcaggactccgcatacgagcaggagggtaaggtgcagtttgtgatcgatgccgtgtatgccatggggcacgccctccatgccatgcatagagatttatgccccggacgcgtgggattgtgtccaagaatggatcctgttgatggcacgcagttgctgaagtatatccgtaacgtgaatttcagtggtattgctggcaaccctgtgacttttaatgaaaatggggatgccccaggccgttatgatatctaccaataccaactgcgaaacgacagcgccgaatacaaagtgataggctcttggactgaccacctgcaccttcggatcgagcgtatgcactggccaggcagtgggcagcaattacctagatctatctgctcactgccctgccagccgggagaacgcaaaaagactgtgaaggggatgccctgctgctggcactgtgagccatgtacagggtaccagtatcaggttgacaggtatacttgtaagacttgtccttatgatatgaggcccaccgagaacaggaccggatgtcgccctattccaatcatcaagctggaatggggaagtccctgggctgtgttaccccttttcctcgccgtcgtaggtatcgctgccacgctgttcgttgtcataacatttgtgcggtacaacgatactccgatagtgaaagcatccggcagagagctgtcctacgtgctcctggcaggaattttcctgtgctacgccactacctttctcatgatcgcagaaccagacctggggacctgctctctgcggaggatctttctcggcctcgggatgtctataagctatgcagcactgcttactaaaaccaatcggatatatcggatctttgagcagggcaaacgctccgtctccgcccctcggttcatctctccggcaagccaactggccatcaccttttctctgattagcctgcagttgctagggatttgtgtctggtttgtggtagatccaagccattcagttgtggacttccaggaccaacgtaccctggatccacgcttcgcgcgtggggtgttgaagtgtgatattagtgacctttctctgatctgtctcctaggctatagcatgctccttatggtaacctgcaccgtgtatgccattaaaacgcgtggtgtgcccgaaacatttaatgaggccaagcccattggtttcactatgtatactacctgcatagtgtggcttgcctttattcccatttttttcgggacctcacagtctgccgacaagctatacatccagactacgaccctgacagtgtccgtgtcactctctgcgagtgtgtctctgggcatgttatacatgcccaaagtctatatcattctgttccatcctgaacaaaatgtccctaagcgtaagaggtcactcaaagctgttgtgaccgcagccactatgtcaaataagtttacacagaaaggcaactttcgacctaacggcgaagctaaatcagagctgtgcgagaacctcgaggcgcctgcactagctacaaaacagacgtatgttacgtacacaaatcacgcgatttag

SEQ ID NO: 224796 - DNA, 2232 bp, synthetic construct
  misc_feature 1..2232: note = Description of Artificial Sequence: Synthetic coding sequence
  source 1..2232: mol_type = other DNA
atgtcctgcaaaatacctcagatctcatatgcctcgacagccccagatctttccgacaactccaggtacgattttttctctcgggtggtcccatcggacacataccaagcccaggctatggtggatattgtccgagctcttaaatggaattacgtctctactgtggcatccgaaggttcctatggcgaatcgggggtcgaagctttcatccagaagagccgcgaagacggcggagtttgtatcgctcagtccgtgaagattccacgggagcccaaggcaggcgagttcgacaaaattatccgcagactgctggagacctcaaacgcgagagcagtgataatattcgcgaatgaagatgacatacggagggtcctcgaggccgctagaagggccaaccaaacaggtcacttcttttggatgggttctgatagctggggctccaagatcgctccagtcttgcacttggaagaggtagccgagggagctgttacaatcttgccgaaacgtatgagcgttcggggattcgatcgctatttttcatcaaggaccttagataataaccgtcgcaatatttggttcgccgaattttgggaggacaacttccattgcaagctgtcacggcatgccctgaaaaaggggtcccacgtgaagaaatgtactaatagggaacggatcggccaagatagtgcttatgagcaagaagggaaggtccagttcgtgatcgacgcggtttacgctatggggcacgccttgcacgcaatgcaccgcgacctctgtcctggccgagtcggtctgtgccccagaatggaccccgttgatgggacccagctgctcaagtacatacggaatgttaatttctctggtatagcaggaaacccagtcacttttaacgagaatggagatgctccaggcagatacgatatctatcagtatcagttaagaaatgatagcgccgagtacaaggttataggttcctggactgatcacctgcatttgcggatcgagagaatgcattggcctgggtccgggcaacagctccccagatctatttgcagcctcccctgccagcccggtgaacggaagaagacagtcaagggcatgccctgctgttggcattgtgaaccctgcacgggctaccagtaccaggtcgatcggtacacatgtaaaacttgtccctatgatatgcggccaaccgagaaccgaacaggctgccgtcccatccccatcatcaagctggagtggggatctccctgggccgtcttaccactgtttctagccgtggtgggaatcgcggcaacactgttcgtggtgatcacattcgtacggtacaatgacactcctatagtgaaagccagcggaagggagctaagttacgtgttgctcgccggaatatttctctgctacgccacaacgttcttgatgatcgccgaaccggacctgggcacctgtagcctcagacgcattttcctcggtctcggaatgagcatatcttatgccgctctgcttacgaagactaacaggatttaccgcatattcgagcagggaaaacgttcagtgtctgctccaagatttatctcaccagcaagccagctcgctataacttttagcctcatctcactacagctcctgggtatctgcgtgtggtttgtcgttgaccctagccactcggtggtggatttccaggatcagcgaaccctcgatccgaggttcgctaggggtgttctgaaatgtgatatcagcgatctttctctgatctgcctgctgggttacagtatgcttctgatggttacttgcacggtgtatgccattaaaactcgtggagtccctgagacttttaacgaggctaagccaatcggattcactatgtatactacgtgcattgtgtggttggcctttatacccattttctttggcacctcgcaaagcgcagacaaactgtacatccagacgactacgctgactgtgagcgtaagtctgtccgctagcgtcagtcttggtatgctttatatgcccaaggtttacattatcctgttccatcccgaacaaaacgttccgaaaaggaagaggtccctaaaggctgtggtcacagcggcaactatgtcaaataagtttacgcaaaagggtaattttcgcccaaatggagaggctaaaagcgagttatgtgaaaacctggaagccccagccctcgccaccaagcagacctatgttacttacacaaaccatgccatctag

SEQ ID NO: 224797 - DNA, 1776 bp, synthetic construct
  misc_feature 1..1776: note = Description of Artificial Sequence: Synthetic coding sequence
  source 1..1776: mol_type = other DNA
atgggatctgacagctggggatcgaagattgctcccgtgctgcatctggaggaggtggctgagggagctgtgaccatcctccccaagcgcatgtccgttcggggattcgatcgctatttctctagccggacccttgataataaccggaggaacatctggtttgccgaattctgggaagacaatttccactgtaaactgagtcgacacgccctgaaaaaaggtagtcacgtgaaaaagtgtactaatagggaacgcataggccaggactcagcgtacgaacaggagggtaaagtgcagttcgtcattgatgccgtctatgccatgggacatgctctgcacgctatgcatcgggatctttgccccggtcgtgttggactatgccccagaatggatcctgtagatggtactcagcttctcaagtatattagaaacgtaaacttcagcgggattgcaggtaaccccgtgacctttaatgaaaatggcgatgctcccggtagatatgacatctaccagtaccagctgagaaacgactcagccgagtataaggtgattggcagctggaccgaccatttgcacttgcggattgaacgcatgcattggcccggatctggacagcagcttcctagatcaatttgctcgcttccctgccagcctggggaaaggaagaaaaccgtgaagggcatgccttgctgctggcactgtgagccatgtacggggtaccagtaccaggtcgatcgctatacgtgcaaaacatgcccttatgatatgagacctactgagaaccggacagggtgtcgaccaatccctattataaagttggaatggggctcgccttgggctgtgttaccattgttcctggcagtcgtcggcattgctgcaaccctgttcgtggtgatcacatttgtccgctacaatgacactccaatagtcaaggccagcggccgtgaattgtcgtacgtgctcttggctgggatcttcctgtgttatgcaactacttttctcatgattgcagagccagatctaggcacatgctcactgaggcgcatcttcctcggcctggggatgagtatctcttatgccgcattgttaaccaaaaccaataggatctaccggattttcgaacagggcaagcgtagcgtgtctgcaccccgattcatctcaccagccagccaacttgctatcacgttcagcctaatctccctccagctcttaggcatatgtgtgtggtttgttgtagacccctcccattcagttgttgactttcaggatcagcggacactggaccccaggttcgccagaggagtgcttaaatgtgacatctctgacctgagcttaatttgccttttgggctactccatgcttctgatggtgacgtgcactgtgtatgctatcaaaacccggggagtccctgagacatttaatgaggctaaaccaatcggattcaccatgtatactacgtgcatcgtgtggctggccttcatcccaatattcttcggcactagtcagtcagctgacaaactgtacatccagactactacactgactgtgagtgtcagcctcagtgccagtgtgagtttaggcatgttgtatatgcctaaggtgtacatcatcttgtttcatcctgagcaaaatgtgcccaagaggaagcggagcctgaaggcggtcgtgacagccgctactatgtcaaacaaatttacccagaaaggaaatttccgccctaacggcgaggccaagtcggagctttgcgagaaccttgaagccccaggttcctcctag

SEQ ID NO: 224798 - DNA, 2364 bp, synthetic construct
  misc_feature 1..2364: note = Description of Artificial Sequence: Synthetic coding sequence
  source 1..2364: mol_type = other DNA
atggagcccgcaggagagcggtttcctgagcagcgacaggtgctgatccttctgctgctgctcgaagttacactggcaggctgggaaccgaggagatacagtgtgatggaagaaaccgaacgcggtagctttgtagcaaatcttgccaacgatttaggactgggcgtgggcgagcttgcagagaggggagcacgcgtcgtgtcagaggacaatgaacaaggtctccagcttgacctgcaaaccggacagttgatcttgaatgaaaagctcgatagagagaaactgtgcggtcccacagagccttgcattatgcacttccaagttctcctcaagaaacctctggaggtttttagagctgagctcttggtgactgacataaatgaccactctcccgagttcccggaacgcgagatgactttgaagatcccggagacttcaagcctggggaccgtgttcccattgaaaaaagctcgcgatctggacgttggctccaacaacgtccagaactataacatctctcccaatagccatttccacgtgagcacccgcacccgaggggatggtcgaaagtatccagaattggtcctcgacaccgagttagaccgcgaggagcaagcagaacttagacttacgctgactgcagtcgatggtggcagccccccaaggtccggaacggtccagattctaattctggtgctggacgccaacgataatgctccagaattcgtgcaggctctgtatgaagttcaggtccccgaaaatagccccgtagggagtctggtggttaaggtgagcgcgagagatcttgacaccggcaccaacggcgagatctcttacagcctgtactattcttctcaggagatcgacaaaccttttgaacttagttctctgtctggagagatccgcctcattaagaaactggacttcgagaccatgtcgagctacgacctggacatagaggccagcgatgggggtggtctgagcggcaagtgcagcgtgtctgtgaaagttctggacgttaacgacaattttcctgagctctcaatatcttccctcacctcccccatccctgagaactccccggagaccgaggtagccctgttccgaattagagatagagattcaggagagaatgggaagatgatttgctctatccaagatgacgtcccctttaaacttaagcctagcgtggagaacttctatagattggtgaccgaaggtgcactcgatcgggagacccgcgctgagtataacatcaccatcaccattaccgacctggggacacccagactgaagactgagcaatcaatcaccgttcttgtttccgatgtaaatgacaacgcaccagcgttcacgcaaaccagctacaccctatttgtaagggagaacaatagtccggcactgcacatagggtcagtgagcgctacagacagggattcgggcaccaatgcgcaggtcacatattccctgcttcctcccagggacccccaccttcccctgactagtctggtctctataaacaccgacaacggtcacctctttgcgctccaaagcctggattatgaggctctgcaggccttcgagtttcgagttggggcaactgacagggggttccccgcattgagtagcgaggctctggtacgagtgcttgtgctcgacgctaatgataacagcccctttgtgttgtaccccctccagaacggctccgcaccatgcacagaactggtgcctcgggcagcggagcccggatacctggtaacaaaggttgtggccgtcgacggagatagcggacaaaacgcctggctcagctaccagctgctgaaagccactgagcctggcctttttggagtgtgggcccataacggggaggttcgcactgcacggctcttgtccgagcgtgacgtggcgaagcaccgtttagtggtgcttgtcaaggataacggagaaccgccacggtccgccactgcgacccttcaagtcctcctggtggatggatttagccaaccttacctgccactgccagaagctgccccagcacaagctcaggctgatagtcttactgtgtacttggttgttgctctggcttccgttagctcactgtttctgtttagcgtgtttctgtttgtcgctgtccgactctgccgaaggtcccgtgcggcttctgtcgggcgatgctcagttcccgaaggccctttccccggacacctggtagatgtgagcggaaccggtaccttatcacaatcctaccaatacgaggtgtgcctgactggcggatcagagtcgaatgattttaagtttctgaaacccatcttccccaatattgtttctcaggatagcagacgaaaaagcgagttcttagagtag

SEQ ID NO: 224799 - DNA, 3276 bp, synthetic construct
  misc_feature 1..3276: note = Description of Artificial Sequence: Synthetic coding sequence
  source 1..3276: mol_type = other DNA
atgcagcttgatggactgcaagcgctttgttggggctcactgttcaggacgcagctggttccagtgtacgtggctgtgctgccttctcctcaaccttgtattccgccaacctgcacggcgttcaccgagttctctggcccactcgctaagcaccattcgtttcagccttttcaagtcgctgctcccgcagggcctcgttcccctccacagccattccacctgccctctgtctctcaggtgcatgcgacccacctgctatgtcccgtgagagtgctcggaccaccatatccgccttcactggagctgctgacatcaattcatagccccgctgtcctaccagcaccccagatcccccagattagctacgcaagcacagcacccgaactaagcgacagcaccaggtatgatttcttttcacgagttgtgccacccgatagctaccaagctcaggctatggtggatattgtgagggccctaggctggaactatgtgagcaccctagcatccgagggcaactatggcgaaagtggagtggaagccttcgtccagatcagcagagaagcaggggaactcggtgcccctcgccatcaaggtgtgtacatcgtgtgggctagaggcccacagctgggtcaaaagcagaaggacgggggaccgagaagcatgcttggccgtggttgcctggctggcgcaccttgtggccgtgacctgttcgttcttgacgattcagccctgcctcaggcctggcgacgggtgcaggctcggctccacccctgccgcccttttagccagcctactcagagttccgccgcagtggctaggtggtccattaagatacctcgggagccaaaacctggcgagtttagtaaggttatccggcgattgatggaaacccccaacgcgaggggcattatcatttttgcaaacgaagatgacattagtccagcccctactaggcgtgtgttggaagctgccagacaagccaatcttaccgggcactttctttgggtggggtccgacagttggggtgcgaaaacatcccctatcttatcccttgaggacgtggccgtgggggcaataaccatcttgcccaagagggccagcatcgatggatttgatcagtactttatgacccgcagcttggagaacaaccgtcggaacatttggttcgctgagttttgggaggagaactttaattgtaaactcacctcaagcggcacccagagcgacgactccacacgcaagtgtactggagagagctgcccaggctggacgggcgaggagcgcattggaagggacagcacatatgagcaagagggcaaggtgcaattcgtcattgacgccgtctacgctatcgcccatgccctgcatagtatgcatcaggcgctgtgtccaggccacactgggctctgccccgctatggagcccacagatggtaggatgctactccaatatattagatgtcccttacagtggttgaataggataccattgtgtgaatggccaaggagggtccggcctttcttctgccagtggacacttgggttactctcttcttgcggctatgtgaataacgccgctgtaaatgtggctgtccaggcgttcctggctacactgctgtcgagtctgtcttccatctatccaggggtcgagctgctcgggcatgtcttcaatctgttgcgcagactgcataccgtgttttgttccggctgttccttattccccccaacggtgcataagggcagtgccggaacacctgtgatgttcaatgagaacggggacgcacccggaagatacgacatattccagtaccaagccaccaatggttccgcgtcgagcggtggttaccaagcagtcggccaatgggccgaaacactgcgacttgacgtcagtgtgcaaactgaaccccaggttggcatgggccctggatcgcgtaggcaaacaccacaacccgtgttctgtgcctctcaggtggaagcgctgcagtggtccggggatccacacgaagtgccgtccagcctttgtagcctcccttgcggcccaggagaaagaaagaagatggtgaagggagtgccgtgctgctggcattgtgaggcgtgcgacggctacagattccaggtcgacgagttcacttgtgaagcgtgccccggtgacatgagacccacgccaaatcacacaggatgtagaccaactcctgtcgtccgtctaagttggtcttccccctgggccgcaccacccttgctgctagctgtgttgggcattgtagccaccaccaccgtggttgcaaccttcgtaaggtacaacaacactcctatcgtcagggcctccggccgagagctctcgtacgtgctcctgactggaatcttcctgatatacgccattacgttcctgatggtggcagaaccaggcgctgccgtgtgcgccgctagacgcctgttcttaggcctgggcaccactctgagctacagtgctttactcacaaagactaatcggatctatcgaattttcgaacaagggaagcgttcagtcacgccacctccctttatctccccgacgagccagctcgttatcacgtttagcctgacatctttacagataaacgccgtattcagagtgaccctgttttacttcggctcccttcaatggcactacctctcctccctccaggcactgccaagtggcgacctcagcgtgcagcatctgtctgcctcagtgtcactcgggatgttatatagtaagtcaaaaacccctgtggatctggaggtcggctccgagccatggggttacctaggcgatggtgttcttcaggccgagcattggggtgaaggaaggggcgattggccccacgtgaaggtcatggtcgtagtgtaccagtctagcctggtgtattatatgaagcaggcccaagccggtagggtgaagacagagctgttaaaagtagctcaccatcaggtcgccaagtcagtccccgaagagtctcagatcgtggtgctgcatttggtgaccgcaggctatgtggacatggccatccgcacaaccagggcctccctgcatttgatgcccctaactctcgtacctggtgctgcagccgaagttaatgaaactcaggttgcggcacgtcttggtcctggctccactgtgggaacctaccaggtcgtcgttgtcctaatgaggtcattacagatagataagaccaccaatcaattgtctcttgaaacctgttttagcgggattcaaggcttcctcgccagcgtaaacagcctcgtgatggataagtag

SEQ ID NO: 224800 - DNA, 2634 bp, synthetic construct
  misc_feature 1..2634: note = Description of Artificial Sequence: Synthetic coding sequence
  source 1..2634: mol_type = other DNA
atggcacgcccacggcgagccagggagccacttctcgtcgccctcttacccctggcctggctggcccaggcaggactagccagggcagccggatctgtgcgcctggctggagggttgaccttgggcggtctgtttcccgtacatgcccgaggcgctgccggacgcgcatgcgggcaactcaaaaaagaacagggcgtccaccgcctggaggcaatgttgtacgctcttgaccgggtcaacgccgatccggagctgctccccggagtgaggctgggggctcgcctgctggacacctgctcccgggatacttacgccctggaacaagccctaagttttgtgcaggcccttatcagaggccgaggtgacggcgatgaagtcggcgtgcgttgtcccggaggggtccctccccttcgaccagcccctccagaaagggtggtcgccgtggtgggagcttccgcatcctccgtatctataatggtggctaacgtgctccgcctgtttgctatcccgcaaatttcttacgcaagcacagccccagaattgtcagatagtacccggtacgacttttttagccgagtggtccccccagactcctaccaggctcaggccatggttgacatagtgcgggcactgggctggaattacgtgtccacacttgcgtccgaaggaaactatggagaaagcggagtagaggccttcgtccaaatctccagagaggcaggaggggtgtgtattgcccaatccatcaaaattccgagagaacccaaacccggtgagtttagcaaggtgatacggagactgatggaaacccccaacgccaggggcattatcattttcgccaatgaggatgacattaggcgagtccttgaagctgccagacaggcgaacctgactggccacttcctatgggttggctccgactcgtggggggctaaaaccagccccatccttagtctggaggatgtggccgtaggagcaatcacgatactccctaagagggcaagcatcgatggtttcgaccagtacttcatgactcgcagcctggagaataatagaagaaatatctggtttgccgaattttgggaggaaaattttaattgcaagctgaccagctcagggacgcaatctgacgatagcacgagaaagtgtaccggcgaagaacggattggcagggattcaacatatgaacaagaaggtaaggtgcagttcgtgattgatgcagtgtacgccattgcacacgctctgcactccatgcaccaggcgctctgcccagggcatacaggactgtgcccagcgatggagcctacagatggacgaatgctcttacaatatataagggccgtgaggtttaatggcagtgctgggacgccagttatgttcaatgagaacggtgatgcgccaggacgatacgacatatttcaatatcaggctacgaacggatccgctagctctggaggctatcaggccgtgggtcagtgggcggagacccttcgtctggacgtcgaagctttgcagtggagcggtgacccccatgaagttccgagcagtttatgcagcctgccatgcggcccaggggagagaaaaaaaatggtgaagggagtcccgtgttgctggcactgcgaagcctgcgacggatataggtttcaggtcgatgaatttacctgtgaggcctgtcccggagatatgcgacccacccctaaccatacgggttgtaggccaacacccgtggtcaggttgtcttggagttcgccctgggctgcccctcctctacttttggctgtcttgggcattgttgctacgacaaccgtggtagccacatttgtaaggtacaataatactcccattgtcagagcttcaggcagagaactctcttacgttctgctcacaggtatctttcttatttacgcaattacttttttgatggtggccgaaccgggtgccgctgtctgcgccgcacgcagactttttctagggcttgggacaacgttgtcctatagcgcactactgacgaaaacaaatcgcatctaccgcatttttgaacagggcaagcgtagcgtgacgcccccacccttcatcagccccactagtcagttagttataactttttctttaaccagcttgcaggttgttggaatgatcgcgtggctcggcgctcgacccccacacagcgtgattgactatgaagaacagaggacggttgaccccgagcaagccaggggagtgctcaagtgcgacatgtcagatctgtcactgatcggctgtcttggctactccctgttattaatggtgacgtgcactgtctatgctattaaagcgcgtggtgttcccgaaacgttcaatgaggcaaagccaattggcttcacgatgtacaccacctgcatcatttggttggcattcgtgcctattttcttcggcaccgctcaatcagccgaaaaaatatatattcagactacaacgctgaccgttagccttagcttgtcagccagtgtcagtctgggcatgctatatgtcccgaagacttatgtgatcctcttccatccagagcagaatgtgcagaagagaaaacgcagtctgaaagctacctcaactgtcgcggcacctcctaagggcgaagacgccgaagcacataaatag

SEQ ID NO: 224801 - DNA, 2748 bp, synthetic construct
  misc_feature 1..2748: note = Description of Artificial Sequence: Synthetic coding sequence
  source 1..2748: mol_type = other DNA
atggtgcaactcaggaagcttctcagagtactaacgttgatgaaattcccgtgttgcgtgctggaggtactgttatgcgctctggctgctgctgcacgcggacaggagatgtacgcccctcattctataagaattgagggcgacgtgacattgggaggactgttcccagtccacgccaagggtccatcaggcgtgccttgtggagatataaaaagagagaatggtatacaccggctggaagctatgctctatgcccttgaccagattaacagcgacccgaatttattacctaatgtgacattaggggctcggatactcgacacctgctcgcgtgacacgtatgcactggagcaatccttgacctttgtgcaggccctgatccaaaaagatacctccgacgtgagatgtacaaatggagagcccccagtgtttgtgaaacctgaaaaagttgtcggagtgattggagcctccggttctagcgtgtctatcatggtggccaatatcctgcggctgttccaaatcccccagatctcctacgcatcaacagccccagagctgtccgatgacagacggtacgattttttttccagggtcgtcccgcctgacagcttccaggctcaggccatggtcgatattgtgaaggccctcggatggaattacgtttctaccctggcctcagaagggagctacggggaaaagggtgtggaatcttttacccagatctcaaaagaggccggaggcctctgtatcgctcagtcagtaaggattccccaggaacgaaaggatcgcactatcgattttgaccgcattatcaagcagctgctggacacacctaacagtcgcgcagtagtcatcttcgccaatgacgaagacattaaacagattcttgccgctgcaaagcgggcagatcaagtaggccactttctttgggtcggttccgattcttggggctctaaaatcaacccactccaccagcacgaggacatcgctgagggcgctatcaccatccagccaaaaagggccaccgttgaaggcttcgatgcttatttcacctcccgaactctcgaaaataaccggcgtaacgtgtggtttgcagagtattgggaggagaacttcaattgtaaactaacaatttctgggagcaagaaggaagatacggaccgcaagtgcaccgggcaagagcggatcgggaaggactcaaattacgagcaggaaggcaaggtgcagttcgtcattgatgctgtttacgcgatggctcacgctttgcaccatatgaacaaagacctttgtgccgactatcgaggggtgtgccccgagatggagcaggcaggaggcaagaagctgctgaagtacatcaggaatgtcaatttcaatggtagtgctggtacccctgtgatgtttaataagaacggcgatgcacccggtaggtacgatatcttccaatatcagacaaccaataccagcaatccaggctaccgcctgatcgggcagtggaccgacgaactgcagctgaatatcgaggatatgcaatggggtaagggcgtgcgggagattccagctagtgtgtgcactttgccttgtaagcctgggcagcgcaagaagacccaaaagggcacaccttgttgctggacctgcgaaccttgcgatggctaccagtatcagtttgatgaaatgacgtgtcagcactgcccgtatgatcagagacctaatgagaacagaaccggctgccaggacattcccatcataaaattagaatggcactctccatgggcagtgatccctgtgtttctggccatgcttggcatcatcgccaccatttttgtcatggccacctttatccgctacaacgacacccctatagtgcgcgcatcagggcgtgagttatcttacgtactactaacagggattttcctttgctacatcatcacttttttgatgatcgccaaaccggatgtggcagtgtgttctttccgaagggttttcctaggccttggaatgtgtatctcatatgctgccctgctgacaaagacgaaccgaatttatagaatcttcgagcaggggaaaaagagcgttaccgcacccaggctgatttcccccacttcccagttggctatcacgtcaagcctgattagcgtacagctcttgggcgtgttcatatggttcggggtagatcctcctaacatcatcatcgactatgacgaacataagacgatgaatcccgaacaggccagaggggtgttaaagtgtgatatcactgaccttcagataatctgtagtcttggctattcaatcctgctgatggttacatgtacggtttatgccattaaaacaagaggggtgcctgagaattttaacgaggccaaacctatcgggttcactatgtacactacatgcattgtttggctggcctttattcctatcttcttcggaacagcccaaagtgccgagaaactgtatatccagacaacaaccctgactattagcatgaacctgtccgcctccgtggcattaggcatgctgtatatgcccaaggtttacatcattatctttcatccagaactgaatgtccagaagaggaagaggagctttaaagccgtcgtgacagcagctacaatgtcctccagactctctcacaagccaagcgaccggccaaatggagaggctaaaaccgaactctgtgagaacgtggatccgaattccccggcagccaagaagaaatacgtcagttacaataacctggtgatctag

SEQ ID NO: 224802 - DNA, 2721 bp, synthetic construct
  misc_feature 1..2721: note = Description of Artificial Sequence: Synthetic coding sequence
  source 1..2721: mol_type = other DNA
atggtccagctgagaaaactcctgcgcgttctcacccttatgaagttcccttgttgtgttttggaagtgctgctgtgtgcgttggcagccgctgccagaggccaggagatgtatgcccctcacagtataagaatcgaaggagatgtgactctggggggtctgtttccagtccacgccaagggcccttctggggtgccttgtggggacatcaagcgggaaaatggtattcacaggctcgaagcaatgctgtatgctcttgaccagatcaattccgatcccaatctgctgcccaatgtcactttgggcgcacggattctggacacttgttctcgagatacttacgcattggagcagagtttaacctttgtgcaggcgctgatccaaaaagacacatctgacgtccggtgtacaaacggtgagccgcctgtattcgtgaagccagaaaaggttgtcggggtgatcggggcaagtggcagctcggtcagtatcatggtggctaatatcctgaggctgtttcaaattccccagatcagttatgcctctaccgcgccagaattgtctgatgacaggaggtacgatttttttagcagagtggtcccacctgactcattccaggcccaggctatggtggatatcgtgaaggcactgggttggaattacgtaagcacattagcgtctgagggatcatatggtgagaagggagtggagtctttcacacagatctctaaggaggcaggcggactgtgcatcgctcagtcagtccgaatccctcaggagcgcaaggataggaccatcgacttcgatagaataatcaagcagctgctagatactcctaattctcgggctgttgtcatctttgctaatgatgaggacataaagcaaattttggccgctgccaagcgggctgaccaggtggggcattttttatgggtgggcagtgattcctggggctccaaaattaacccactgcatcaacacgaggacatagcggagggagctatcaccatacagccaaaaagagctaccgtagaaggcttcgatgcatactttacctcaaggacactggagaataaccggagaaacgtctggttcgctgagtactgggaggagaatttcaattgcaaactcaccattagcggatctaagaaggaggacacggatcgcaagtgtacaggccaggagaggatcgggaaggattcaaattacgaacaggagggcaaagttcagtttgttatcgacgctgtctatgctatggcccacgcgcttcaccacatgaacaaggacctttgtgccgattatcgaggcgtatgccctgagatggaacaggcgggagggaagaaactgctcaaatatattaggaacgtgaactttaatggctctgctggcaccccagttatgttcaacaagaatggggacgccccaggccgttacgacattttccagtatcagactacaaacacgagtaacccagggtacaggctgatcggacagtggaccgatgaactacagttgaatatagaagatatgcaatggggcaagggtgttagggagattcctgccagcgtgtgcaccctgccatgcaaaccgggtcaaagaaagaagacccagaaaggaaccccatgctgttggacttgtgaaccgtgcgacggataccagtaccagtttgacgaaatgacctgccagcactgcccatatgaccagcgacctaatgagaaccgtacgggatgtcaggatatacctataattaagctggagtggcattccccatgggcagtcatccccgtcttcctggctatgcttggcatcatcgccacgatcttcgtgatggccacattcattagatacaacgatactccaatcgtccgagcatctggtcgggaactctcctacgtgctgcttaccggtatcttcctttgttatatcatcaccttccttatgattgcaaagccagacgtggcggtgtgcagcttccgcagagtctttctgggtctcggaatgtgtatcagctatgccgcactgctgactaaaaccaatcggatctaccggattttcgaacaggggaaaaaaagcgtgaccgctccaaggcttatctcccctacatcccagctggctattacttcctcgctgatttctgtgcagcttctcggcgtgttcatctggttcggtgtcgaccccccaaacattatcatcgattacgatgagcacaaaacaatgaaccctgagcaagcacgcggagtgctgaagtgcgacattactgatctccagattatttgttctctcggttactccattttgctcatggtcacatgtacggtgtatgcaataaaaacgagaggtgtgcctgaaaacttcaatgaggccaaacctatcgggttcaccatgtacaccacgtgcatcgtttggctggcatttataccaattttctttggcactgcccagagtgctgaaaagttgtatattcagactacgacccttaccatctcgatgaacctctctgcctcagtggctttgggcatgctttatatgcccaaagtgtatatcattattttccaccccgagctcaacgtccagaagaggaagcgcagctttaaagctgtcgtgaccgcagcaacaatgtcaagcaggctttcgcataaaccctccgacaggccaaacggggaggccaagacagaactgtgtgagaacgtggatcccaattccgaaaagtgtaattgttattag

SEQ ID NO: 224803 - DNA, 2769 bp, synthetic construct
  misc_feature 1..2769: note = Description of Artificial Sequence: Synthetic coding sequence
  source 1..2769: mol_type = other DNA
atggttcagctgcgtaaactgctaagggtgttgaccctcatgaagtttccctgctgcgtgctcgaggttctgttgtgcgcattggcggctgccgctagaggtcaggagatgtacgcaccccattctatcaggatcgaaggcgatgttacgcttggagggctgttccccgtgcacgccaagggccctagtggcgtgccatgcggggacatcaaaagagagaatggcattcatcggctggaggctatgctttatgccttagaccagatcaatagcgacccaaacctattgccgaatgtgactctgggggcacgcatcctggatacatgctctcgcgacacatatgccctcgagcaaagtctcacattcgtgcaggctctgatccaaaaggacacaagcgatgttagatgcactaacggtgaacctcccgtttttgtcaaaccggaaaaagtggtgggagtcatcggcgcaagtggctcttcagtttccataatggtggcaaacatcctgcgcttatttcagattccacagatatcttatgccagcactgccccagaactgtcagacgacaggcggtatgattttttctctcgggtcgtgcctccagactctttccaagcacaggcgatggtggacattgtgaaggccctgggatggaactacgtgagcactctggcctccgagggcagctacggtgaaaagggggttgaaagtttcacacagatcagtaaggaggctgggggtctgtgtatagctcagagcgtcaggattccgcaggagcgcaaggacagaacaatcgatttcgaccggatcataaagcagctgctggacacccctaactcgagagccgtggtcattttcgcaaatgatgaggatattaagcaaattctggcagccgctaagagggccgaccaggtggggcattttctctgggtagggagcgacagctgggggagcaagatcaaccctctacaccagcatgaagatattgcggaaggagcaatcacgattcagccaaaacgggctacagtcgaaggcttcgatgcctactttacatctcggaccctggagaacaatcgcagaaacgtttggtttgcggaatattgggaagagaactttaattgtaagctcaccattagtggctccaaaaaagaagatacggaccggaagtgtaccggccaggaacggattgggaaggacagcaactacgagcaggaagggaaggttcagttcgtaatcgatgcggtctacgcaatggcccacgcccttcaccatatgaacaaggacctgtgcgccgattacaggggtgtttgccctgaaatggaacaagccggtggtaaaaagctgttaaagtatattcgcaatgtcaatttcaacggcagcgctgggacccccgttatgttcaacaaaaacggagacgctcccggacggtacgatatctttcagtatcagaccacaaacacttcaaacccgggttaccgccttatcggacaatggacagacgagctgcagctgaatatcgaagacatgcagtgggggaaaggcgtcagagagatacccgcatctgtctgtacactgccatgtaaacctgggcagaggaagaaaacccagaaagggacaccgtgctgttggacttgtgaaccttgtgatggttaccagtatcagttcgacgagatgacatgtcagcattgcccatatgatcaacgcccaaacgaaaatagaactggctgccaagacatccccattatcaagctggaatggcattctccatgggccgttatcccagtcttcctcgccatgctgggcataatcgccaccatctttgtgatggcgacgtttataaggtacaatgacacccccatcgttagagcaagcggcagggagttgagttacgtcctgttgactggcatctttctgtgctacattattaccttcttaatgattgctaagccagatgtggccgtctgcagttttagacgggtgtttctgggcttggggatgtgcatttcctacgccgcactccttacgaagaccaatcgtatctaccggatttttgaacagggcaaaaagtcagtcactgctcccagactgattagcccgacatcccagctggccattacctcaagtctgatctctgtccagttgctgggcgttttcatttggtttggagttgacccacctaatatcattatcgattatgatgaacataaaacgatgaatccggaacaagcccgaggcgtgctgaagtgcgacatcaccgatcttcagatcatctgctctctggggtattctatactcttaatggtcacctgtaccgtttacgccatcaaaacacgtggcgtgccagagaacttcaatgaagcgaagcctattggttttaccatgtacactacgtgtatcgtgtggttagcctttattcccatatttttcggtactgcccagtccgcggaaaagctgtacattcagacgacaacacttaccatctccatgaacctctctgcaagcgttgcccttggcatgctgtacatgcctaaggtctatataattatctttcaccccgaactgaacgtgcagaagagaaaaagaagcttcaaagcagtggtaacagctgctactatgtcaagccgcctgagccacaaaccttcagatcggcctaacggagaagccaagacagagttgtgcgagaatgtcgatccaaataactgtatccctcctgtgcggaagagtgtgcagaagtcggttacatggtataccataccccctacagtgtag

SEQ ID NO: 224804 - DNA, 2736 bp, synthetic construct
  misc_feature 1..2736: note = Description of Artificial Sequence: Synthetic coding sequence
  source 1..2736: mol_type = other DNA
atggtccagctgcgcaagttactccgtgttcttaccttgatgaagttcccatgttgcgttttggaagtgctgttgtgcgcactggcggctgctgcccgtggacaggagatgtacgctccccattcaatcaggatcgagggggacgtaacgttgggcggactgttccctgtacacgctaaaggaccaagtggtgtcccctgtggggatattaagagagagaacggcatccatcggctagaggccatgctgtatgcactggatcagattaatagcgacccgaaccttctccccaatgtaaccttgggagcgcgaatcctggacacttgctcccgggatacatatgctttagaacaaagcttgacgttcgtgcaagcactaatccagaaggataccagtgatgttcgctgcaccaatggggaaccccctgtgttcgtcaaacctgagaaggtcgtcggggttatcggagcctcaggctcctccgtgagcattatggtggctaacattctgaggctcttccagattcctcaaataagctatgcctccactgcgcctgagttgtccgacgatcgacgatacgactttttttccagggtcgtaccgcctgactcttttcaggcccaggccatggtggacatcgtaaaggccttgggctggaactatgtttccactctggctagcgagggctcatatggcgagaagggcgtggaatccttcacccaaatatcgaaggaagccggaggtctgtgtattgcccaatccgtccggataccccaagaacggaaggatagaacgattgacttcgatagaatcatcaaacaactcttggacacgcctaacagccgcgcagtggttatcttcgcgaatgacgaggacatcaaacagattctagcggcagccaagagagccgatcaggtgggacattttctatgggtagggagcgattcttggggcagtaagataaatcctctacatcagcatgaagacattgctgaaggcgcaatcaccattcagcccaagagagctacagttgagggttttgacgcctacttcaccagccgcacactcgagaacaaccggaggaatgtgtggtttgccgagtattgggaggaaaacttcaactgtaagctgacgatctctggaagcaagaaagaggataccgaccgaaaatgtacaggccaggagagaattgggaaggacagcaactatgagcaggaggggaaggtgcagttcgtcatcgacgcggtgtacgcgatggctcacgcactgcaccatatgaataaagatttgtgtgccgattacagaggggtgtgccccgagatggagcaggctggtggaaagaaactgctcaagtacatcagaaacgtgaactttaacggaagtgccggtactcccgtaatgtttaacaagaatggagacgccccagggcgatacgatatctttcagtaccagactactaatacctctaatccagggtacaggcttatcgggcagtggacggatgagctgcaacttaatattgaggacatgcagtggggcaaaggggtacgggagatacccgcatctgtgtgtactctcccttgtaaacccggtcagcggaaaaagacacagaaaggtaccccatgttgctggacctgcgagccatgcgacggctaccaataccaattcgacgaaatgacatgtcagcactgtccctacgaccaaagacccaacgagaataggaccggctgccaagacatccctattattaagttagagtggcattctccatgggccgtaatcccagtctttctggccatgcttggtatcattgccacaatctttgtgatggcaacttttatccgatacaatgacaccccaattgttcgtgcttccgggcgtgagttgagttacgttctgcttaccggcatttttctgtgttacataataacctttctgatgatagccaaaccagacgtcgctgtttgtagtttccgccgtgtgtttctgggccttggaatgtgtattagctatgcagcattgttgaccaaaaccaatcgcatctatagaatttttgagcagggtaaaaaaagtgtgacagcccctcgtctgatcagccctaccagccagctggcaatcacctcctctttaatttccgtccaacttctaggcgtgttcatttggtttggtgtggatccccctaacatcatcatcgactacgacgagcacaagaccatgaatcctgaacaggctcggggtgtactgaaatgtgacattacagacctccagattatttgtagtttaggttatagtattctacttatggttacctgtacggtgtacgccatcaaaacgcgcggagtgcccgaaaattttaacgaagccaagcccatagggttcaccatgtacacaacctgcattgtctggttggcgttcatacccatttttttcggaacagcccagtctgcagaaaaattatatatccagaccacaaccctgactatctccatgaatctatctgcctcggtcgcgctgggcatgctgtacatgccaaaggtttatatcataatcttccaccccgagctgaatgtgcagaagcgaaagcgctcattcaaggccgtggtcaccgccgctactatgtcctccaggctcagccacaagcccagcgaccgaccgaacggggaagccaagacagagctctgcgagaacgtcgaccccaacattacctcggaggacctgagcctgcataaagaggactag

SEQ ID NO: 224805 - DNA, 2475 bp, synthetic construct
  misc_feature 1..2475: note = Description of Artificial Sequence: Synthetic coding sequence
  source 1..2475: mol_type = other DNA
atggtccagctaagaaaattattgcgagtgctgacacttatgaaatttccctgttgtgttctggaggtgctcctctgcgccttggccgctgcagcccgagggcaagagatgtacgcgcctcacagcatccgcatcgagggggatgtgacccttggcggactgttccctgtacacgccaagggcccaagcggggtgccatgtggagatattaagagagaaaacggaatccaccggttagaagccatgttgtacgccctggatcaaatcaatagtgaccctaaccttttgccgaacgtcaccctcggggcaaggatactggatacttgctctcgcgacacttacgccctggagcagtcgctgacgtttgtgcaggccctgattcaaaaggatacctccgacgtccggtgcaccaatggcgagccacctgtgtttgttaagccagagaaagtggtcggcgtgatcggggcttccgggtctagtgtaagtattatggtggccaatattctgagactgttccaaatccctcagatctcctatgccagcacggcaccggaactgtctgacgacaggagatatgattttttttccagagtcgtcccacccgatagcttccaggcccaggctatggttgacatcgtgaaagcactggggtggaattatgtttcaactctggcctctgagggaagctacggtgaaaagggagtggagtcttttacccagataagcaaggaggccggtggtttgtgtattgcacagagcgtgcgcattcctcaggaaagaaaggatcgaactatcgactttgatcgtattatcaaacagctcctggatacccctaatagcagagccgtggtgattttcgcgaatgatgaggatattaagcagattctggcggcagcgaagagggctgatcaagtcggccacttcctgtgggtcggctcagactcctggggaagtaaaatcaaccctttacatcagcacgaagatatcgcagaaggcgcaatcactatccagccgaagcgagcgaccgtggaaggttttgacgcttactttacaagcagaaccctggagaataaccgcaggaacgtctggttcgcagagtattgggaagagaacttcaattgtaaactgactatcagcgggtccaagaaggaagacacagaccgcaagtgtaccggtcaggagcggattggtaaagattctaactatgagcaggagggtaaggtccagtttgtgattgacgctgtctacgccatggcccacgcgctacatcacatgaacaaggatctttgcgcggattatcggggtgtatgcccagaaatggaacaggccggaggcaagaagctgctcaagtacattcgaaacgtgaacttcaatggggacgccggtacccccgtgatgtttaataagaacggcgatgcgcctggaaggtacgatatctttcagtatcaaaccacgaacacatcaaaccccggatatagactcatcggacaatggaccgacgagcttcagctcaacattgaagatatgcagtggggcaagggcgtccgtgaaatccctgcttcggtgtgtactctgccttgcaaacccggtcagcgaaagaagacccaaaaaggaaccccctgctgttggacctgtgaaccatgcgacggctatcaatatcagtttgacgaaatgacctgccagcactgcccctacgaccagcggcctaatgaaaacagaaccggatgccaggacatccctataatcaagctcgaatggcactctccgtgggcggtgattccagtttttcttgctatgttaggcattattgccacaatcttcgtcatggccacttttatcagatataacgacacccctatcgtgcgagctagcgggagagaactaagctatgtgctgctgacaggcatctttttgtgttacatcataacgttcctgatgatcgcaaaacccgatgtggccgtgtgttcatttaggcgggtgtttttgggactgggtatgtgtatctcgtatgcagcactgttaacgaagacaaatcgtatataccgcatttttgaacaaggtaagaaatccgtgacagcgcctcgcctgattagtcccacctcacagctggcaattacatctagtttgatcagtgtccagttgctaggcgtgtttatctggtttggggtggatcccccaaatataattatcgattacgacgagcataaaaccatgaacccagaacaagccagaggagtactgaagtgcgacattaccgatctgcaaataatctgttcgttaggctacagtatcctactcatggtcacctgcaccgtatacgctatcaagaccaggggcgtccccgagaatttcaatgaggcaaaacctatcgggttcaccatgtacactacttgcattgtctggctggcctttattccaatctttttcggaacagctcaatccgccgagaaagtgatcttgtgctgcatctcttag

SEQ ID NO: 224806 - DNA, 2775 bp, synthetic construct
  misc_feature 1..2775: note = Description of Artificial Sequence: Synthetic coding sequence
  source 1..2775: mol_type = other DNA
atggtgcagttgagaaagttgctcagagttctgacactgatgaagtttccatgttgtgttctggaggtgctgctgtgtgcccttgccgctgccgcaaggggacaagagatgtacgcaccgcacagtatccgaattgaaggagatgtcactctgggcggactgttccccgtgcatgctaaaggcccatcaggggttccatgcggcgacatcaagagagagaatggcattcaccgtctggaagcaatgctctacgccctggaccaaataaactctgaccccaacctactgccaaatgtgacactgggggcaaggattctggatacctgtagcagggatacctatgcactggaacagagtcttactttcgtccaagctcttatccagaaggacacatccgacgtccgctgcaccaacggggaaccccctgtgttcgtcaaacctgaaaaagtcgtcggagtgataggagcctcgggctcctcagtgtctataatggtggccaatatcttgaggttattccagatccctcaaatctcttatgcttctacagctccagagctgagtgacgataggcggtatgatttcttcagtagggtcgtccctcccgattcctttcaagcacaggcgatggtggatattgtgaaagcattgggctggaactacgtgtctacgctcgctagcgaaggaagctacggcgagaagggggtggaatctttcacccagatatcgaaagaggccggtggtctgtgtatcgctcagagtgtcaggatcccacaggaaagaaaggacaggaccatcgatttcgacagaattatcaaacagctgctagacactcctaatagcagagccgtagtcatctttgcgaatgacgaagatattaagcagattctcgccgctgcgaaacgggcagaccaagtcggacattttctgtgggttggctcagacagctggggttctaagatcaatccgctgcaccagcacgaagatatagctgaaggggcaatcacaatccagcctaagagagcaaccgtggagggatttgacgcctacttcactagccgaactctggagaataatcggagaaatgtctggtttgccgaatactgggaggagaatttcaattgcaagctgactatctcaggctctaagaaagaggatacagacagaaaatgtacaggccaggaacgaattgggaaggattccaactacgagcaggaaggcaaggtgcagtttgtgatcgatgccgtgtacgccatggcgcacgccttgcatcatatgaataaagacttatgtgccgactatcggggagtctgcccagaaatggaacaggccggtgggaagaagctgcttaaatacatcagaaatgtcaactttaatgggagtgccggaaccccggtgatgttcaacaaaaatggtgacgcccctggaagatatgatatttttcagtatcagaccaccaatacctctaaccctgggtatagattgattggccaatggaccgatgagctccagttgaatatcgaggacatgcagtggggaaaaggggtgagggaaattcctgcatcagtgtgcactttgccctgtaaaccaggccagaggaagaagacccagaagggtaccccttgctgctggacttgcgaaccttgcgacgggtaccagtatcagtttgacgagatgacctgtcagcactgcccctatgatcagcgtcccaatgaaaatcgtaccggctgtcaggacatccccattatcaagctggagtggcattctccctgggccgtgatcccggtgttcctggcaatgctgggaattatagccacaatctttgtgatggcaacgttcattcggtataatgacactcctatcgttcgcgctagcggacgagagctttcctacgtcctgttgaccggtatcttcctgtgctatatcattacctttttaatgatagccaaacccgacgtagctgtttgctcattccgcagagtcttcctgggcctaggaatgtgcatatcatacgcagcgttattgacaaagacaaaccgtatttacaggatcttcgagcaaggaaagaagtccgtcacagcccctagactaatttcaccaacctcccagctggcaatcacgtccagtttaatctctgttcaactgctaggcgtgtttatttggtttggtgttgatcccccaaatattatcatcgactacgacgagcacaagacaatgaatcccgagcaggcacgcggtgtcctgaagtgtgatatcacggatctccagattatctgtagtctcggatactcgatccttcttatggtaacttgcaccgtatatgctatcaaaacccgcggtgtcccggaaaacttcaacgaggctaagccaataggattcactatgtacacaacatgtattgtatggttggccttcatccctatcttcttcggcaccgcccagtctgccgaaaaactctatattcagaccaccaccctaaccatcagtatgaatctgagtgcctctgttgccctgggaatgttatacatgcctaaagtgtacattattatcttccacccagaacttaacgtgcagaagagaaaaaggtcatttaaggctgtggtgaccgcagccaccatgtcttctcgactgagccacaaaccatctgaccgcccaaatggagaggctaagacggaattgtgcgaaaacgttgacccaaacattttttttttcgggtgtactgttgagctcggcctgcactttaagctgacctttagccggaaccagtccaacctgtag

SEQ ID NO: 224807 - DNA, 2727 bp, synthetic construct
  misc_feature 1..2727: note = Description of Artificial Sequence: Synthetic coding sequence
  source 1..2727: mol_type = other DNA
atggtgtgcgaaggaaaaaggtcggcgagctgtccttgtttcttcttactaactgctaaattttattggattctgacgatgatgcagaggacacacagccaggagtacgctcactcaatcagggtggatggtgacatcatactcggcggtttgttcccggtgcacgccaagggggaaaggggcgtgccctgcggagagcttaagaaggagaaagggatccacagactagaggctatgttatacgctattgaccagattaataaagatcctgatctcctgtctaacattactctgggagtgcgcattctggacacatgcagccgcgatacatacgcattggagcagagtttgacatttgtgcaagcactgatcgaaaaagacgcatccgatgtgaaatgcgcgaacggtgacccgccaatatttacgaagcccgacaagatatcaggggtcatcggagccgctgcaagcagtgtgtcaattatggtcgctaatatattgcggctctttaagataccccagatcagttacgcgtcaaccgcccctgagctcagcgataacacaaggtacgacttcttcagccgtgtagtccccccagattcctatcaggctcaggccatggtggacattgtcaccgcgttaggctggaattatgtgtcaacactggccagcgaaggcaattacggagaatctggtgtagaggctttcacccaaatctcccgcgagattgggggagtttgcattgctcagagccagaagattccgcgagaacccagacccggagagtttgagaagatcatcaagaggctgcttgaaactccaaacgcgcgagcggtgatcatgttcgccaacgaggacgatatacgcaggatcttggaagctgcaaaaaaactgaaccagagcggccatttcttatggatcgggagtgattcatgggggtctaaaatcgcacctgtctatcagcaggaggagatagcagagggagccgtcacaattctccctaaacgggcttccatagatgggtttgatagatattttagatctcgcacactggccaacaacaggaggaacgtctggttcgctgaattctgggaggaaaatttcggttgtaagcttgggagccatggaaaacggaactcccacattaaaaagtgcacagggcttgagcgcatagctcgtgactcaagctacgagcaagaaggcaaggtgcagtttgtgatcgacgccgtttattctatggcctatgctctgcacaacatgcataaagatctgtgccccggatatatcgggctttgccctaggatgtcaacaatcgatggcaaagagttgctcggttacatccgcgcagtcaattttaatggctccgcaggcactcctgtgaccttcaacgaaaatggagacgccccaggaagatacgacatcttccagtatcagataacaaacaagtctaccgagtataaagtgattggtcattggaccaatcagctccacttaaaggttgaagatatgcagtgggcgcatagggagcatacacaccccgctagtgtatgctccctgccttgtaaacccggtgagagaaagaagacggtcaagggagtaccatgttgttggcactgtgaacgctgtgagggttacaactatcaggtagatgaactttcctgtgagctgtgccctttagatcagagaccaaacatgaaccgtaccggatgccagcttatccctatcattaaattagaatggcattcgccttgggccgtcgttcctgtgttcgtggcaatcctgggaatcatcgccactaccttcgttattgtcacatttgtgcgctacaacgacacaccaatcgtaagagctagcggcagagaactttcgtacgtcctgctaaccggcatatttctatgctattccattacctttctaatgatcgcggctcctgataccattatctgttcttttaggagggtatttctcggtctgggtatgtgcttctcatatgcggctctgttgaccaagaccaatcgaatccaccgcatctttgaacagggcaagaaaagtgtcacagcccctaaattcattagtccagccagccaacttgtaataacattcagcctgatttccgtgcagctgcttggcgtgtttgtatggtttgtggtggacccgcctcacatcatcatcgattacggagaacaaagaacgctggacccagagaaagcaaggggcgtgctcaagtgtgacattagcgacctttccctgatctgcagtctggggtacagtatcttgcttatggtcacctgcacagtgtacgccataaagactcgcggagtgcctgaaactttcaatgaggccaagccaatcggtttcaccatgtataccacgtgtataatatggctcgcctttatccctatattcttcgggacagcacaatccgccgaaaagatgtacatccagaccaccaccctcaccgtttcaatgtccttatcagcctccgtttctctcggcatgctctacatgccaaaagtatacattataatctttcaccctgagcagaatgtgcagaaaaggaagcgttcttttaaggctgttgtgaccgcagccactatgcaaagcaaactcatacagaagggcaatgatcggcctaatggggaggtcaaatccgaactctgcgaatcactggagaccaacacctcctctactaaaactacttacatcagttattccaaccacagtatctag

SEQ ID NO: 224808 - DNA, 2727 bp, synthetic construct
  misc_feature 1..2727: note = Description of Artificial Sequence: Synthetic coding sequence
  source 1..2727: mol_type = other DNA
atggtctgcgaaggaaagcgctctgcctcatgcccatgcttttttcttcttaccgctaagttctattggatcctcaccatgatgcagcgaacacactcccaggaatacgctcactctattagggtggacggggatataattcttggcggactgtttccggtgcatgcaaagggcgagcgtggtgtgccatgcggcgaactgaaaaaagagaagggaatacacagactagaagccatgctgtacgcaatcgaccagattaataaggacccagaccttttgagtaatattacactgggagtgcgcattcttgacacctgttctcgggacacttatgctctggagcaaagcctcaccttcgtccaggcactgatcgaaaaagatgcctctgacgtcaagtgtgcgaatggcgatccccctatttttaccaaacccgacaagatatccggcgtgatcggcgcagcagccagctcggtctccatcatggttgcaaatatattgcgcctgtttaaaattccgcaaatttcctacgcttctaccgcccctgagctgtccgacaatactcgttacgattttttctcccgggtggtcccccctgattcttatcaggctcaagccatggtagatattgtgacagccttaggatggaactacgttagcactctcgcctcagagggcaattatggggagtcaggtgtcgaagcctttacgcagatatctcgagagattgggggtgtgtgcatagctcagtcccagaagataccacgagagccacgccctggtgagttcgaaaaaatcatcaagcgactgctggagactcctaacgccagagccgtcattatgtttgccaacgaggatgacatcagacggatccttgaagctgcaaagaaactaaaccagagtggccacttcctgtggatagggagcgactcgtggggatctaaaattgctcccgtataccagcaggaggagattgcagagggtgccgttacaattctgccaaagagagcctcaatcgacggtttcgataggtatttcagaagcaggacacttgctaataacaggagaaatgtgtggttcgcggagttttgggaagagaatttcggctgtaagctcggttcacatggcaaacggaatagccacataaaaaagtgtacgggactggagagaatcgctcgcgactcatcctatgaacaggagggaaaggtccagttcgtgattgatgccgtctattcaatggcctacgcactgcacaacatgcataaagacttgtgtcctggctatattggactgtgcccacgaatgagcactatcgatgggaaggagttactggggtacattagagcggtgaattttaatggctctgccggaactccagtgacctttaacgagaatggggatgccccagggaggtacgacatctttcaataccagattaccaataaatccacagaatataaagtaatcggccactggaccaatcagctgcatcttaaagtggaagacatgcaatgggctcaccgcgaacatactcatcccgcatccgtgtgcagtttaccatgcaagccaggcgaacggaagaagaccgtcaaaggtgttccgtgttgctggcactgcgagcgctgcgaaggatacaattatcaagtagacgagctgagctgcgaactctgtcctttagatcagcgacccaatatgaacaggactgggtgccaactcatcccaatcatcaaactggaatggcactccccctgggccgtcgtgcctgtgttcgtagcaatcctcggaattatagcaacgactttcgtgattgtcacttttgtgcgctacaacgacactcccatcgtgcgggctagcgggagggaactgtcatacgtgcttttgaccggtattttcctgtgttattcgatcacgtttttaatgatcgcagcaccagataccatcatttgcagctttcgtcgcgtatttctgggactagggatgtgcttttcttacgcagccctgcttaccaaaactaaccggatccaccggattttcgagcaggggaaaaagtccgtgacggcccctaagttcatttcaccagcttcccagctggtgatcaccttctctctgatctcagttcagcttcttggagttttcgtttggtttgtagtggacccgcctcatatcataatagattacggggagcaaagaaccctggaccccgaaaaggccagaggggttctgaagtgtgatatttctgatctttcactgatctgctcactgggttacagcatacttttgatggtgacctgcacagtgtacgccattaagacacgtggagtgcccgagacttttaacgaggccaaaccaatcggtttcaccatgtacaccacctgtatcatctggctggcgttcatccccatctttttcgggacagctcagtccgctgagaagatgtacatccagaccacaactctgaccgtgagtatgtccctaagcgctagcgtatccctggggatgttgtacatgcccaaagtgtatataattatcttccacccggagcagaatgtgcaaaaacgcaagcgatccttcaaggctgttgtaactgcagccactatgcagagcaagctcatacagaagggtaacgaccgtccaaacggtgaggtgaaatccgagttatgcgagagtttagaaaccaattcgaagagctcagtcgaattccccatggtgaaatccggttctacatcttag

SEQ ID NO: 224809 - DNA, 1506 bp, synthetic construct
  misc_feature 1..1506: note = Description of Artificial Sequence: Synthetic coding sequence
  source 1..1506: mol_type = other DNA
atggtgtgtgaaggcaagcggtctgcatcttgtccctgcttctttcttttaacagccaagttttattggatactaacaatgatgcaaagaacgcactctcaagagtatgctcattccataagggttgacggtgatataattctggggggtctgtttcccgtgcacgcgaagggtgagcgtggagtgccttgcggggaactcaaaaaagagaagggcatccataggttagaggccatgttgtatgcaattgaccagatcaacaaagatccggacctcctaagcaacattacccttggcgttcgtatcctggacacgtgttcacgcgatacttacgcattggaacagtcccttacctttgttcaggcgctgatcgagaaagacgccagtgacgtcaagtgcgcaaacggtgatcctcccatttttactaagcctgacaaaattagcggcgtcattggagccgcagcaagtagcgtaagtatcatggtggctaacatcctccgtctattcaaaattcctcagatttcctacgcaagcacagctcctgaactgtctgacaatacacgctacgactttttcagtcgagtggtacctccagattcctaccaagcccaggccatggtggacatcgttactgctctcggatggaactatgtctcgacactagctagtgaaggtaattatggtgagtctggcgtggaggcgttcacacaaatctctagggagattggaggcgtctgcattgctcagtcacaaaaaatccccagagagcccagacccggtgaatttgaaaaaatcataaagcgactcctagaaacacctaatgccagagccgttatcatgttcgccaatgaggatgatattcgaaggatcttggaagctgccaaaaaactgaatcagagcgggcattttctttggataggcagtgacagttgggggtctaagattgcaccagtgtaccaacaggaggagatcgccgagggggctgtgacaatccttccaaagcgcgctagtattgacggattcgataggtactttagaagccgcacactggccaacaaccgcagaaatgtttggttcgcggagttctgggaagaaaactttgggtgtaaactcggctcccatgggaagaggaactctcatataaagaagtgcaccggactcgaacgaattgcacgagattccagttatgagcaggaaggtaaagtgcaatttgtgatcgacgcagtttacagtatggcctacgccctacataacatgcacaaggatctgtgccccggttatatcgggctctgcccgaggatgagtacaatcgatggcaaggagctgttgggttatataagagcggttaacttcaacggctgtcgtcgcggtattcaaatgagccttccttggcccaccttattcacacccagttttagcagtagctgggccgtactggccctgttgtccctgctgatgaaaacagagatgctcctggacgtaatgatttcctcatcaatcaaatag

SEQ ID NO: 224810 - DNA, 63 bp, synthetic construct
  misc_feature 1..63: note = Description of Artificial Sequence: Synthetic coding sequence
  source 1..63: mol_type = other DNA
atggtatgcgagggtaaaagaagcgcgagttgcccttgcttcttcctgctgacagccaagtag

SEQ ID NO: 224811 - DNA, 2727 bp, synthetic construct
  misc_feature 1..2727: note = Description of Artificial Sequence: Synthetic coding sequence
  source 1..2727: mol_type = other DNA
atggtgtgcgaaggaaagcggagtgcctcatgtccttgcttctttttgctgacggccaaattttattggatcctgactatgatgcagcgcacacatagtcaggaatatgcccatagcatccgcgtcgacggggatataattctggggggactgtttcccgttcacgccaagggagagcggggagtaccctgtggagagttgaaaaaagaaaaagggatccaccgattggaggctatgttgtatgcgatcgaccaaataaataaggaccctgatcttctgtctaatatcactctcggagtgcgaatcctagacacttgttctcgagacacctatgcactagagcagtcactgaccttcgttcaggccctgatcgagaaagacgcatcggatgttaagtgcgccaacggtgacccccctatcttcactaagcctgataaaatcagcggagtgatcggagcagccgctagctctgtttcaattatggtggcaaacatcctccggttatttaaaatcccccagatttcctatgccagtactgcgcctgagctcagcgacaatacaaggtacgactttttcagtcgcgttgtgccaccagactcatatcaggcccaggcaatggtggacattgttactgcccttggttggaattatgtcagcaccctcgcctcagagggtaattacggcgagtcaggcgtcgaagctttcacccagatctctagggaaatcgggggtgtgtgtatagcacaaagtcagaagatccctagagaacccaggcctggcgagttcgagaaaataatcaaacgtcttttagaaactcccaatgccagggcagtcattatgtttgcaaacgaagatgatataaggcgtatactggaggcagccaaaaaactgaaccaatcagggcactttttatggattgggtcagactcatggggaagcaagattgccccagtctatcagcaagaggagattgccgaaggcgcagtgactatccttcccaaaagagcctcaattgatggatttgatcggtacttcagatcgagaactttggccaacaaccgaaggaatgtctggttcgctgaattttgggaagaaaacttcggatgcaaacttggctcacatggtaagcgcaactctcatatcaaaaagtgtactgggttagaacgcatcgcacgagattccagctacgaacaggaaggcaaagttcagttcgtcatagacgccgtttattccatggcttacgcactgcacaacatgcacaaggatctgtgtccaggatatataggcctctgcccacgcatgtcaacaattgatggcaaagaactcctggggtatattcgggctgttaacttcaacggatctgcaggcacccccgttaccttcaatgaaaacggcgatgctccaggccgttacgacatcttccagtaccagattacgaacaaaagcacggaatacaaggttatcggacactggacgaatcaattacacctgaaggtagaagacatgcagtgggcccatcgggaacacactcaccctgcctccgtatgttccctaccctgcaaaccgggtgagcgcaaaaaaaccgtgaagggcgtgccctgttgctggcactgcgaaaggtgcgaggggtacaattaccaggtggacgagctgagttgcgagttatgtccactggaccagagaccaaacatgaatcggaccggttgccagctgatccctataatcaaactcgagtggcacagtccctgggccgttgtccccgtattcgtggctattttgggaattattgccaccacattcgtgatcgtcacttttgtgcggtataacgatacccccatcgttagggctagcggtagggagctctcttatgttctcctcacagggatctttctttgctacagtatcactttcctgatgatcgcggctcctgacaccatcatctgctcatttagacgggtgtttcttggattgggaatgtgttttagttacgctgctctccttaccaaaacgaaccgaatacaccgtatattcgagcagggaaaaaagtctgttaccgctcctaaatttatttcaccagccagccagctcgttataacattcagtttgatttcagtccagctgctgggcgtgttcgtttggttcgtggtcgatcctccacacatcattatcgactacggagaacagcgaacccttgacccagagaaggctaggggagttctgaagtgcgacatctccgacctgagtttaatttgcagccttggttactcgatcttattgatggtaacctgcactgtgtatgctattaaaacccgaggagttccagaaacgtttaacgaggcgaagcccatcggattcacaatgtacactacatgcattatatggctggcatttatccctatctttttcgggacggcccagtcggctgagaagatgtatattcagactaccaccctgacagtaagtatgtcacttagtgccagtgtgtccctcgggatgctgtacatgcccaaagtttatatcatcattttccatccagagcaaaatgtgcagaagcgtaaaagatcttttaaggcagttgtgactgccgctacaatgcagagtaagctcatacaaaagggtaacgaccgtcctaacggagaggtgaagagtgaactgtgcgaatcactggagaccaacacctcctccaccaagactacctacatttcttattccaatcactcgatctag

SEQ ID NO: 224812 - DNA, 885 bp, synthetic construct
  misc_feature 1..885: note = Description of Artificial Sequence: Synthetic coding sequence
  source 1..885: mol_type = other DNA
atggtttgcgaaggaaaaaggagcgcctcatgtccttgcttctttttgctgacagcaaagttttattggatccttacaatgatgcaaagaacccactcacaggagtatgctcatagcatacgagtagacggtgacataattctggggggactgtttcctgtgcatgctaagggagagcgcggagtcccatgcggcgaactgaagaaggagaaagggattcacagacttgaggccatgctgtacgcgattgaccagattaataaagaccccgatttgctttctaatattactctgggagtgagaatcttagacacctgctctagggacacttatgccttagagcagtctcttacttttgttcaggcgctcattgagaaggacgcctcagacgtcaaatgcgcaaacggggatccgcctatctttacaaaacccgacaaaatttccggcgtgatcggcgcagcagcaagtagcgtctctattatggtggccaatatcctgcggcttttcaaaatacctcagattagttatgcatcaacagccccagaactatcagataacaccaggtatgacttcttctctagagtggtgccaccagacagctatcaagcccaggctatggtagacattgtgactgccctagggtggaattacgtgtctacactcgcctctgaaggaaattacggtgaatctggtgtagaggcatttacccagatctctcgtgagatagggggagtctgtatcgctcaatcccagaagatcccacgagagcctaggccaggtgaatttgagaagatcattaagcgcttgctcgagacaccaaatgcacgtgccgtcattatgttcgctaatgaagacgacataaggcggattttagaggccgcttag

SEQ ID NO: 224813 - DNA, 1122 bp, synthetic construct
  misc_feature 1..1122: note = Description of Artificial Sequence: Synthetic coding sequence
  source 1..1122: mol_type = other DNA
atgacaacctccgcatcaagtcacctaaacaagggaataaaacaagtgtacatgtccctgccgcaaggtgaaaaggtgcaggccatgtacatctggattgatggaacgggggaaggacttaggtgcaaaactagaacactggatagcgaaccaaagtgcgtagaagaactcccggagtggaatttcgacggctcctcaacactccaatctgaggggtcaaatagcgacatgtacttagttcccgcagccatgttcagggatccttttcgtaaagatcccaacaagctggtgctgtgtgaggttttcaaatacaatcggcgtccagccgagaccaatctcagacacacatgcaaacgaatcatggatatggtgtccaatcagcatccatggtttggaatggagcaagagtacaccttaatgggcaccgatggtcacccctttggctggccctccaacggtttcccgggtccacaggggccttactattgtggcgtcggagctgatagagcatatgggagggatatagtggaggcccactatcgggcatgcctgtatgccggagttaagatcgccggaacaaatgccgaagtcatgccggcacagtgggagttccagatcgggccatgcgagggaatcagcatgggcgaccacctgtgggtcgcgaggtttatcctgcatagagtctgtgaagatttcggggtaatcgcgacatttgatcctaaacccattcctggcaattggaatggcgcaggctgccacactaacttctccaccaaggcgatgagggaggaaaacgggctgaagtacattgaggaagcaatcgaaaaactgtctaaaagacaccagtaccacattcgcgcatacgatcccaaagggggtctcgataatgccaggaggcttactggcttccacgaaacttcaaatattaacgacttctccgccggagtggccaaccggtcagcctcaatcaggataccgagaaccgtcggacaggagaaaaagggctatttcgaggacagaaggcctagcgccaactgtgatcccttctcagttacagaggccttgatacggacttgtttgctcaacgaaactggcgatgagccatttcagtataagaactag

SEQ ID NO: 224814 - DNA, 1122 bp, synthetic construct
  misc_feature 1..1122: note = Description of Artificial Sequence: Synthetic coding sequence
  source 1..1122: mol_type = other DNA
atgaccacgtcagcgagttcccacttaaataaaggcatcaaacaggtgtatatgagcttgccacagggcgaaaaagttcaagctatgtatatatggatcgacggcaccggcgaaggcctccggtgcaagacccgaacactcgacagcgagcccaaatgcgtggaggagctgcccgaatggaactttgacggatcgtccaccctgcagagcgagggttctaattcggacatgtacctggtgcccgctgctatgtttagagatcctttccggaaggatccgaataaactcgtgctgtgcgaagtgtttaaatacaatcgcaggcccgctgaaacgaaccttaggcacacatgcaagcgcataatggacatggtgtctaatcagcatccctggttcggcatggaacaggagtatacgctaatgggtacagatggacacccattcgggtggccttccaacggattccctggaccccaggggccatactactgcggtgtcggggcagatagggcttacggcagagacattgtggaagcacattacagggcgtgtttatacgccggagttaagatcgccggtacaaacgctgaggtaatgcctgcccagtgggaattccagatcggcccatgtgaagggatcagcatgggcgaccatctgtgggtggccaggtttatcctccacagggtgtgtgaggatttcggggtgattgcaacgttcgatcccaagcccatcccgggaaattggaacggcgcagggtgtcatacaaatttctcaactaaggccatgcgcgaagaaaatggcctgaagtacatcgaggaagcgattgaaaagttatctaagagacaccagtatcacatacgcgcatacgatcctaaaggaggcctagacaatgcaagacgcctcaccggcttccacgagacatctaatataaatgacttcagcgctggcgtcgcaaacaggagcgcgagcatacgcataccaagaactgtcggtcaggagaagaaaggatacttcgaagaccggagaccatccgctaattgtgacccctttagcgttaccgaagcactcattaggacctgtctactaaatgagaccggcgatgagccatttcagtataagaattag

SEQ ID NO: 224815 - DNA, 1122 bp, synthetic construct
  misc_feature 1..1122: note = Description of Artificial Sequence: Synthetic coding sequence
  source 1..1122: mol_type = other DNA
atgaccacttctgccagctcccatctgaacaagggcataaaacaagtctacatgagtttaccccagggagagaaggtgcaagccatgtacatctggatcgacggcaccggggagggactgcgatgcaagacacggacactggacagcgaaccaaaatgcgtggaggaattgcctgagtggaattttgatgggagtagtaccttgcagagtgagggaagcaattcggacatgtatctagtccctgcagcgatgtttagggatcctttcaggaaggatccaaacaaactggtcctatgtgaggtttttaagtacaatcggcgtcccgcagaaaccaatctgagacacacgtgtaagaggattatggacatggtgagcaatcaacacccctggttcggaatggagcaagaatacactctcatggggacagacggacacccattcggctggccttcaaatgggtttcctggccctcagggtccttactactgcggagttggggcagatcgtgcctacggacgcgatattgtggaggcgcactaccgcgcttgcctatacgcgggagtaaagatcgccggaaccaacgccgaggtgatgcctgcgcagtgggagtttcagattggcccatgtgaagggatttctatgggagaccatctgtgggtggcccgtttcatccttcaccgtgtgtgcgaagattttggagttatcgccacctttgatcccaagccaataccgggtaactggaacggcgcagggtgtcataccaacttcagcaccaaggccatgcgagaagagaacggtctgaaatatatagaggaagccattgagaaactctcaaagcgccaccagtaccacattcgcgcatatgaccctaaaggaggactcgataacgccaggcgtttgaccggtttccatgaaacttccaatatcaacgatttctcagctggcgttgctaatagatcagccagcatccgtattccaaggaccgtgggccaagaaaaaaaagggtacttcgaggatagaagacctagtgccaactgtgacccattttccgttaccgaggctctgattcggacatgtctgctcaatgagaccggtgatgaacccttccaatacaagaactag

SEQ ID NO: 224816 - DNA, 1122 bp, synthetic construct
  misc_feature 1..1122: note = Description of Artificial Sequence: Synthetic coding sequence
  source 1..1122: mol_type = other DNA
atgacgacctctgctagtagccatctgaacaaaggaatcaagcaagtgtacatgtccttgcctcagggtgagaaagtccaagcaatgtacatctggatcgatgggaccggcgagggacttaggtgtaagacaagaacattggacagcgagcccaagtgcgtggaagaattgcccgaatggaattttgatggatctagcaccctgcagtcagaggggagtaacagtgatatgtacctggttcctgccgctatgtttcgggatccgtttcgtaaggatcccaacaagttagtcttatgcgaggttttcaagtacaaccgacgccctgccgaaactaacctccggcacacatgtaaaaggatcatggacatggttagtaatcagcacccatggttcggaatggaacaggagtacactctaatgggcaccgacgggcatccattcggttggccatctaacggtttccctggacctcagggaccttactactgtggtgtgggcgctgatcgtgcatacggcagggatatcgtggaagctcactatcgtgcatgcttgtatgccggagtgaagatcgctgggactaacgccgaggtcatgcctgctcaatgggagtttcaaatcggcccttgtgagggtatcagcatgggcgatcatctttgggttgcgagatttatcctccaccgcgtgtgtgaggactttggcgttatagcaacttttgaccctaagcctattccaggtaactggaacggggctggctgtcacacaaacttcagcaccaaggccatgcgggaggagaatggcctcaagtacatagaggaggcaattgaaaagctgtctaaacgacaccagtaccacattagagcctacgatcccaaggggggattggacaatgctcgaaggctgaccggctttcacgagactagtaacatcaatgattttagcgcaggcgtggccaatcgctcagccagcattcggattccacggacggttggccaggaaaagaagggatacttcgaggataggcgaccctccgccaattgcgaccctttctccgttacggaagccctgatccgcacctgcttacttaacgaaacaggcgatgagcccttccaatacaagaattag

SEQ ID NO: 224817 - DNA, 702 bp, synthetic construct
  misc_feature 1..702: note = Description of Artificial Sequence: Synthetic coding sequence
  source 1..702: mol_type = other DNA
atgacaacctccgcaagttcccatctcaacaaagggatcaaacaagtatacatgtccttaccacagggcgaaaaggtgcaggccatgtacatctggatagatgggactggggaaggcttacgctgcaagactaggactcttgattcagagccaaagtgcgttgaagagctgcctgagtggaactttgacggatcaagcacactacagtctgagggcagtaattcagatatgtatctcgtgccggctgctatgttccgtgatcctttcagaaaggaccctaataaactggtgctctgtgaggtcttcaagtataacagacgacctgcggaaacaaacctgagacacacgtgtaagagaataatggacatggtaagtaatcagcatccatggttcggaatggagcaggagtatacactcatgggcaccgatggacatccctttggctggcccagtaacggtttccagggcccaagagtgcatatcaccgtcgtttgggaacagacagagccaatggccggaaccagctggcgaccaattactggacccgcttgcatgctagagagtagactcagagggctgatgccccgttcctgtctcccatctgggaactttcggctcgacctggtcaaggagtccgcatgggagatcatatcagggtggccggtaagctcttgtatcgtctgcgtcaagactctcgagtag

SEQ ID NO: 224818 - DNA, 678 bp, synthetic construct
  misc_feature 1..678: note = Description of Artificial Sequence: Synthetic coding sequence
  source 1..678: mol_type = other DNA
atggaccagcaagcgatctatgcagagttgaacttaccaacagatagtgggcctgaatctagttcaccaagctcactccctagggacgtgtgccaggggtccccatggcatcagtttgcactgaagctcagctgcgccggaatcatcctcctggttcttgtggttacaggtctttctgttagcgttactagcctaattcagaagtcgtctatagaaaaatgctctgtggacatccagcagtcaagaaataagacgaccgaaagaccgggtctccttaactgcccgatctactggcagcagctgcgggagaaatgcttattgttctctcacactgtgaatccttggaataacagtctcgctgactgttctacaaaggaatccagcctgctcctaattcgtgacaaggacgaattgattcacacgcaaaacctgattcgagacaaagctatcctgttttggatcggcttaaatttctctctctctgaaaaaaactggaagtggattaatgggtcattcctcaattctaatgatctggagattcggggagatgcaaaggagaattcctgcatttccatctcccaaacttcagtgtactctgaatactgttccactgaaattcggtggatctgccagaaggagctgacccctgtccgcaataaggtgtaccctgattcgtag

SEQ ID NO: 224819 - DNA, 825 bp, synthetic construct
  misc_feature 1..825: note = Description of Artificial Sequence: Synthetic coding sequence
  source 1..825: mol_type = other DNA
atggggaccgacagtcgtgcagcgaaagccctgctcgcaagagctcgaaccttacatctgcagaccggaaacctgctgaactggggcagactaagaaaaaaatgtcccagcacacactcagaagagctccatgactgtattcagaagacactgaacgaatggtcatcccagatcaaccctgacctggtgagagaattccctgacgtactcgaatgtacagtctcacacgctgtcgaaaagattaacccggatgaaagagaggagatgaaggttagcgcaaaactcttcatcgttgaatcaaattctagctcatccacccgctctgcagtggatatggcttgcagtgtgctcggtgtcgcccagctcgactcagtaataatcgccagtcctccaatagaggatggtgtcaatctctcgctcgaacacctgcagccgtactgggaggaactggaaaacttagtgcagtctaaaaaaattgtggcgattggcacttctgatctggacaagactcagctggaacagctttatcaatgggcccaagtcaaacctaatagtaaccaggtcaaccttgcatcctgttgcgtgatgcccccagacctcacagctttcgcaaagcagttcgacatccagctgctgacacacaatgatcccaaggagctcctctccgaagcctcgttccaggaggcactccaagagtcaattcctgacatccaggcacatgaatgggtcccactgtggttactccggtatagcgtcatcgtaaaatcgcgcggaattatcaaaagtaagggatacatcctccaggctaagagaagaggctcatag

SEQ ID NO: 224820 - DNA, 1341 bp, synthetic construct
  misc_feature 1..1341: note = Description of Artificial Sequence: Synthetic coding sequence
  source 1..1341: mol_type = other DNA
atggctgccaggaagggaagacgacggacctgcgaaaccggagagccaatggaggcagagagtggcgatacctcatccgagggtcctgcacaagtgtaccttcctggcaggggcccacctctgcgggagggcgaggaacttgtgatggatgaggaagcttatgtgctgtaccatagagcacaaacaggcgctccctgtctgagctttgatatcgtcagggatcatttaggagacaacagaacagagcttccattaacactatacctgtgcgcagggacccaggccgaatcagcgcaaagtaatcgtttgatgatgctcagaatgcacaatctccatggtacgaaaccacccccaagtgaaggctcagacgaggaggaagaggaagaggacgaagaggatgaggaggaacgcaagccccaactggagctggctatggtcccgcattacggaggaatcaatcgagtgagggtatcctggcttggagaggagcctgtcgcaggcgtgtggtcagaaaagggacaggtcgaggtgttcgctctgagaagactgcttcaggtggttgaggagccccaggccctcgctgctttccttcgggacgaacaggcccagatgaaacccatcttcagctttgcaggacacatgggagaaggctttgccctggattggtcccccagggtcaccgggagactcctgacaggtgactgccagaaaaacattcacttatggacccctaccgacggtggctcatggcacgtagatcagagaccttttgtgggccacacccgttctgttgaagacctgcagtggagccccaccgaaaacaccgtctttgctagctgcagtgctgacgcctcaattcggatttgggacattcgagccgcaccgtcaaaggcgtgcatgctgactacagctactgcgcatgacggcgatgtgaatgtcatctcatggtcccgcagggagcctttcctgttgtccgggggtgatgacggtgcactcaagatctgggacctacgccagttcaagtccgggtcacctgtggccactttcaagcaacacgtggcccctgtgaccagcgtcgagtggcacccccaagactccggagtgtttgctgcatccggggcagaccatcagatcactcagtgggacctggccgtggaacgagacccagaggccggagatgttgaagccgatcccggtcttgccgatctcccccagcagctcctcttcgttcatcagggcgaaacagaactgaaggagttgcactggcatccccagtgccccggactgctggtttcaacggccttaagtggcttcactatctttaggactattagtgtttag

SEQ ID NO: 224821 - DNA, 1572 bp, synthetic construct
  misc_feature 1..1572: note = Description of Artificial Sequence: Synthetic coding sequence
  source 1..1572: mol_type = other DNA
atgcaaagagcagccgctctggtacgcagagggtgcgggcctagaacccccagctcatggggaaggtcccagtcaagtgcagccgctgaagcctccgccgtgttaaaagtccggccagaacgatcccgccgtgaacggattctcaccttggaaagtatgaacccccaggttaaggccgtagaatatgccgtcagaggaccaatcgtgcttaaagcaggggagatcgaacttgagctgcagcggggaatcaagaagcccttcacagaagtcatccgggcaaatatcggcgacgcccaggctatgggacagcagcctattacgttcctgcggcaggtcatggccctatgtacctatccaaatctgctggacagcccttcattccccgaggacgccaagaaaagagcacgaagaattctgcaagcctgcggtggcaattccctggggtcctactctgctagccagggagtaaactgcataagagaggacgtggctgcatacattacccggcgagatggcggagtcccggcagatccagataatatctaccttactaccggagcatcggacgggattagcacaattcttaaaatactggtttcaggcggaggaaagagtcggaccggggttatgatcccgattcctcagtaccctctctattccgcggtcataagcgaacttgacgcgattcaggttaattactatctggacgaagaaaattgctgggccttgaacgtcaacgaactcagaagagccgtacaggaggccaaggaccattgcgatcctaaggtgttgtgtatcataaatcctgggaacccgactggtcaggtgcagagcaggaagtgtatcgaagacgtcatccacttcgcatgggaggagaagttattcctgctggctgacgaggtttatcaagacaatgtatactctccagattgtagatttcatagcttcaaaaaggtgctgtatgaaatgggaccggaatacagctctaatgtggaacttgctagcttccattctacctccaaaggctacatgggagagtgtggctaccgcggtggctatatggaagtgataaacctccacccagagatcaaggggcagctcgttaaacttttgtccgttaggctctgccccccagtgtcaggccaggctgcaatggacatagttgtgaaccctccggtggcaggcgaggagagtttcgagcaattttcccgagaaaaagagtctgtgctcggtaatttggctaagaaagctaagctaactgaagacctgttcaatcaggttcccggaatccactgtaacccactacagggagcgatgtatgctttccctcgaatctttattcccgctaaggcggttgaggcggcacaggctcaccagatggcgcctgacatgttttattgcatgaaactacttgaagagaccggcatctgtgtggtaccgggtagtgggttcggacagcgagaagggacttatcatttcagaatgacgatcttgccaccagtcgagaaactgaaaacagtattacagaaagtgaaggacttccacattaattttctcgagaagtatgcctag

SEQ ID NO: 224822 - DNA, 1272 bp, synthetic construct
  misc_feature 1..1272: note = Description of Artificial Sequence: Synthetic coding sequence
  source 1..1272: mol_type = other DNA
atgggccaacaaccgatcactttcctgagacaggtaatggcgctgtgtacttaccctaacctcctggattccccatcgttcccagaggacgctaaaaaaagggccaggcggattctccaggcttgcggaggcaacagtctcggttcttatagcgcgtcacagggggtgaactgtattagggaggacgtcgctgcttatatcacccgtcgcgatggcggagtgcctgcagaccctgataacatatatcttacaaccggggctagtgacggtatctcaacaattttaaaaatccttgtgtcagggggaggcaaaagcaggaccggggtgatgattccaatcccccagtacccactgtattccgctgtaatctccgagttggacgctatccaggtgaactactacctggacgaggagaactgctgggccttaaatgtcaacgagctgcgcagagccgtgcaagaggccaaagatcactgcgatccaaaagtgttatgtatcattaaccccggtaacccgaccggccaggttcaatcccgcaaatgcatcgaagatgtcatccatttcgcctgggaagaaaagcttttccttttggccgatgaggtctaccaggataatgtgtactcgccggattgccggtttcacagcttcaaaaaggtgctctatgagatgggccctgaatatagttcaaacgtagagttagcctcctttcacagtacttctaaagggtacatgggggagtgcggttatcggggagggtatatggaggtcatcaacctgcatccagagatcaaggggcagttggtgaagcttctgtcggtgcgactttgcccaccagtgtctggacaggctgccatggacattgtggtgaatccccctgtggccggtgaggaaagttttgagcagtttagtcgcgaaaaggagtcggtcctgggcaatctcgccaagaaagcaaaactaactgaagatttattcaatcaggtgcctggcatacactgtaaccctctacagggtgcaatgtacgccttcccacggatcttcataccagctaaagccgtggaggccgctcaggcgcatcagatggcaccagatatgttttattgtatgaagctcctggaggaaactgggatatgtgtagtgcccggtagtgggttcggccagagggaaggcacatatcacttccgaatgactatcctgccccctgttgaaaaactgaaaactgtgctgcagaaagtgaaagatttccacatcaattttctagaaaaatacgcatag

SEQ ID NO: 224823 - DNA, 1242 bp, synthetic construct
  misc_feature 1..1242: note = Description of Artificial Sequence: Synthetic coding sequence
  source 1..1242: mol_type = other DNA
atggccccaccttcagtgtttgctgaggtgcctcaggcgcagccggtgctggtattcaagctcactgcggattttagggaggaccctgatcctaggaaagtcaatctcggagtgggggcatacaggactgacgattgccacccgtgggtcctgcctgtggttaaaaaggtggaacagaaaatcgctaacgataattctctgaaccacgagtacctccccatccttggcctcgccgagtttagatcttgtgccagccggctagccctcggtgatgacagtccagctttaaaggaaaaacgagtcggaggggtccagtctctcggtggcactggagccttgagaatcggagctgacttcctggccagatggtacaatggtacgaataacaagaatacacctgtgtacgtgtcatcacctacctgggagaatcacaatgccgtcttctccgccgctggctttaaagatatccgctcctatagatactgggacgctgaaaagcgtggcctggatctgcagggattcctgaatgacttagaaaatgcccctgaattttctattgtggtcctccatgcatgtgcccataaccccacgggaatcgatcccacccctgagcagtggaagcaaatcgcctctgtgatgaagcatcgcttcttgttcccgttcttcgatagcgcctaccagggatttgcatccggaaatctggaaagggacgcgtgggcgataaggtatttcgtgagcgaggggtttgaatttttttgcgcacaaagcttctccaagaacttcgggctgtataacgagagagttgggaatctgaccgtggttgggaaggaaccagagagcatccttcaggtactgagtcaaatggagaaaatcgttagaatcacatggtccaatcctcctgctcagggcgctagaatcgtggcgtccacattaagtaatcctgaactgttcgaagaatggaccgggaacgttaaaaccatggccgatcgcatcctcaccatgaggagtgagctcagggcacggctggaagcattgaagacgcccggaacatggaatcacatcaccgatcagatcgggatgttttctttcaccggactcaacccaaaacaggtcgaatacctcgtgaacgagaagcatatctacctgcttccttccggcagaatcaatgtctctgggctgacaacaaagaacttagactatgttgcgacatctatacatgaggctgtaacaaaaatccagtag

SEQ ID NO: 224824 - DNA, 1101 bp, synthetic construct
  misc_feature 1..1101: note = Description of Artificial Sequence: Synthetic coding sequence
  source 1..1101: mol_type = other DNA
atggcgcctcctagtgtcttcgctgaggttccccaggctcaacccgtgctggtgtttaagcttacggcggactttcgcgaggatcctgatccaagaaaagtgaatcttggggttggtgcttacaggacagatgattctcctgcccttaaggagaagcgggtggggggagtgcaaagcctgggcggtaccggcgctcttcgcatcggggctgattttctggcacgctggtataatggcaccaacaataaaaacactcccgtttacgtaagctcccctacctgggagaatcacaacgctgtttttagcgccgcaggcttcaaggatattcgttcatatcgctactgggacgccgaaaagcgtggccttgatttgcaaggttttctgaacgatctcgaaaacgcaccagagttcagtatagtagttttacacgcctgcgcccacaatccaaccggaattgatccaacccccgagcagtggaagcagattgcgtctgtgatgaaacaccgattcctgttcccattcttcgactctgcctatcagggattcgcttctggaaacctggagagagatgcctgggccattaggtatttcgtaagtgaaggtttcgaatttttttgcgcccagtccttcagcaaaaactttggcctctacaatgagcgggtgggcaacctcaccgtggtgggtaaggaacccgaatctatactgcaggtgctgtcccagatggagaagattgtacgcatcacttggtctaacccacccgctcagggcgctcggattgtcgctagcacactcagtaacccggagctatttgaggagtggaccggtaatgtcaaaacaatggcggataggattctcactatgcgctctgagctgagagccaggctcgaagccctcaagaccccaggaacttggaaccatattactgaccagataggcatgttttcttttaccggcctaaatcccaaacaggtcgaatacctggttaatgaaaaacacatttaccttctcccatccggtaggattaatgtgtccggactgactaccaagaatctcgattacgtggcaacatcaattcatgaagcagttaccaagatccagtag

SEQ ID NO: 224825 - DNA, 1179 bp, synthetic construct
  misc_feature 1..1179: note = Description of Artificial Sequence: Synthetic coding sequence
  source 1..1179: mol_type = other DNA
atgcaggtctggtccccctggaagggggcaatgtgtccacgaccacataaaccagcctatcgcactgacgactgtcatccatgggtgctgcccgtggttaagaaagtcgaacaaaagatcgctaatgataacagcctcaatcacgagtacttgccaatcctgggcttagctgagtttcgctcctgtgcgtcacgcctggccctgggagacgatagtccagcactcaaagaaaagcgcgtcggcggagtacagagcctcggcggaacaggcgcacttcggattggagccgacttcctcgccagatggtacaacggcaccaataataaaaacacgcctgtgtatgtgagcagcccgacgtgggagaatcataacgccgtgtttagcgcggcaggctttaaggacatccggagctataggtactgggacgctgaaaaaaggggcctcgacctgcaaggatttttgaatgatctcgaaaatgccccagagttctcgattgtcgtgctgcacgcatgtgcacataatcctaccggcattgaccccacacccgagcagtggaaacagatcgcttctgttatgaaacatcgctttctgtttcctttctttgactcagcctatcagggattcgcttcgggcaatctggagcgggacgcttgggctatccggtacttcgtttctgagggcttcgagttcttctgcgcccagtcgttctccaagaattttggcctgtataacgagagagtcgggaatctgaccgtcgtgggcaaggaaccagaaagcatcctccaggtgctctcgcagatggaaaaaatcgtcagaataacgtggagcaatcctcccgctcaaggcgcaagaatcgtagcgtccaccctgagcaatccagagctgttcgaggagtggacaggaaacgtgaaaactatggcagacagaatcctcacaatgcgatcggagctgcgcgctcgactcgaggccttgaagactccaggcacctggaatcacatcacagaccagattggtatgttctcctttaccggcctgaacccgaaacaggtagagtacctggtcaatgagaagcacatatacctgctgcctagtgggagaatcaatgtgtctggactgaccacaaaaaaccttgactacgtggctaccagcatccacgaggcagtgactaaaatccagtag

SEQ ID NO: 224826 - DNA, 1293 bp, synthetic construct
  misc_feature 1..1293: note = Description of Artificial Sequence: Synthetic coding sequence
  source 1..1293: mol_type = other DNA
atggctctactacactcgggacgggttttgcccggtatcgcagctgccttccacccaggactcgctgcagctgcttccgctcgggcttcttcctggtggacccacgtcgagatggggccacccgacccaatcctgggagttacagaagctttcaaaagagatactaatagcaaaaaaatgaaccttggggtaggcgcttatcgagatgacaatggcaagccctatgttttgccaagcgtcagaaaggccgaggctcagattgccgctaagaatctggacaaggaatacttgccgattggaggacttgccgagttctgtaaagcctctgccgagctggcgctgggggaaaacagtgaggttctaaaatcgggcaggttcgtgacagttcagaccatttcggggaccggtgcactgcgtatcggggctagcttcctgcagcggtttttcaagtttagccgcgacgttttcctgccaaaacccacatgggggaatcacacacccatttttcgagatgccggtatgcaactgcagggctacaggtactacgacccgaaaacatgcgggtttgatttcactggagctgtggaggatatttcaaaaattccggaacagagtgtcctcctcctacatgcctgcgctcataacccaacaggtgtggacccccgacccgaacagtggaaagagatcgctactgtggtgaagaaaaggaacctcttcgccttttttgatatggcctaccaagggtttgcctccggggacggcgacaaagatgcttgggccgtcaggcacttcatagaacaaggtatcaatgtgtgtctgtgtcagtcttatgctaagaacatggggttgtatggcgaacgagtaggcgctttcactatggtttgcaaggacgccgatgaggccaagcgtgtcgagtctcagttaaaaatactgatccggccaatgtattcgaaccctcccttgaacggggcacgaatagctgcggctatactgaacactccggatctgcgaaaacaatggctccaggaggttaaggtaatggccgaccgaatcatcgggatgcggactcaactcgtaagtaatttaaagaaagaaggttctactcataattggcagcacatcacggaccagattgggatgttctgctttaccggccttaaacctgagcaggtagaacgcctgattaaagaattttcgatctatatgactaaagatggccgaatctccgtggctggagtcacaagttccaatgtcgggtacctggcccacgctatccatcaggttactaaatag

SEQ ID NO: 224827 - DNA, 570 bp, synthetic construct
  misc_feature 1..570: note = Description of Artificial Sequence: Synthetic coding sequence
  source 1..570: mol_type = other DNA
atggcgctcctgcacagcgggcgagtgctgcctggtatcgcggctgctttccacccgggactcgccgctgccgcaagtgctagggcctcctcctggtggacgcacgtagagatgggccctcccgacccaatactcggggtcacggaagcctttaagagggatacaaattctaagaaaatgaatctaggagttggagcatatagagatgataacggcaaaccatacgtgttgcccagcgtcaggaaggcagaagcacagatcgcggctaagaacttggacaaggaatatctgccaattgggggtttggccgagttctgcaaggacttcctctccagtgcagagatgagtttctgtcccaaccagcccggtgagacaacccacccatcctctggcatgctggcctgctcctacaaagtcatcggaattatgacaccgaggctggccgtgctgactagtcaggccctttggaggattttccaaaagtatcaatcacgcgtctttttcttttgtatgccagcccctactattcctcgcgagtggacgagagttaggaatagcggccgaaagtag

SEQ ID NO: 224828 - DNA, 1164 bp, synthetic construct
  misc_feature 1..1164: note = Description of Artificial Sequence: Synthetic coding sequence
  source 1..1164: mol_type = other DNA
atggccttactccattcgggcagagtgcttccaggaattgctgctgcttttcatcctgggctggctgccgcagctagcgcacgggcatcctcttggtggactcatgtggaaatgggacctccagatcctattttaggggtaactgaagctttcaaacgggacaccaacagcaagaagatgaacttgggcgtgggagcctaccgcgacgacaatgggaagccctacgtgttacccagcgtccggaagttcgtgacagtgcagacaatatctgggaccggagccctcagaattggagccagcttccttcaaaggtttttcaagtttagcagggacgtgtttctgcctaagccaacctggggaaaccataccccaatttttagagatgccggtatgcagctgcagggctaccgttactacgacccaaagacatgcggattcgacttcacaggcgcagttgaagacatctcaaagatccctgagcaatcagtgctgctgcttcacgcgtgcgcacataaccccactggagtcgatccaaggcctgagcagtggaaagaaatcgccacagtggtgaagaagagaaatctgtttgccttttttgacatggcatatcagggcttcgcctccggcgacggagataaagacgcgtgggccgtgcgacactttattgagcaagggatcaatgtatgcctttgccaatcgtacgctaaaaacatggggttatacggcgagagagtgggggcttttacaatggtctgcaaggacgcagacgaagcaaagcgcgttgagtcgcagcttaaaatattaatcagacctatgtactccaaccctcctctgaacggtgccaggatagctgctgctatcctgaatacaccagatctgagaaagcagtggttgcaagaggtgaaagtcatggccgacagaattatcggcatgcgaacccaattggtgtcaaaccttaagaaggaaggctccacgcataattggcaacatattacagatcagattgggatgttctgctttacagggctcaagccagagcaggtggaaaggctgatcaaagaatttagtatctacatgacaaaagacggtagaatctctgttgctggcgtcacttcatctaacgtgggctacctggctcacgccattcatcaggtaactaaatag

SEQ ID NO: 224829 - DNA, 1491 bp, synthetic construct
  misc_feature 1..1491: note = Description of Artificial Sequence: Synthetic coding sequence
  source 1..1491: mol_type = other DNA
atggccagcagcaccggcgaccgatcacaagccgtgagacacggattgcgagccaaagtgctcactcttgatggaatgaatccgagagtgcgcagagtggaatacgcggtccggggaccgattgtgcaacgggctctcgaactagaacaggaacttcgacagggtgtgaagaaaccctttacagaagtgatcagagcgaatatcggtgacgctcaagctatgggtcagcgccctatcacctttctacgccaggttttagcactctgcgtgaacccagatcttctgtcctcgccaaatttcccagatgacgctaaaaagcgcgctgaaaggattctgcaagcctgtggcggacattctcttggtgcctattctgtgagcagtgggatccaacttatccgggaggatgtagcaaggtatatagagaggagggatggtggaatccctgccgacccgaataacgtctttctcagcacaggggctagcgatgccatcgtcacggtgcttaaactgctggttgctggtgagggccacacaaggaccggtgtgctcatacctattccccaatatccgttatattcggcaacactggctgagctaggcgctgtgcaggtggattattatttagacgaagagcgcgcttgggctttggatgtcgcagaactgcaccgagctctgggccaagccagagatcattgcagaccgagggccctgtgcgtcatcaatcccggaaatcccactgggcaggtacagactagagagtgtattgaggcggttatcaggttcgcattcgaggaacgcctgtttttactagccgatgaggtatatcaggataatgtctatgcagccggatcccagttccactcttttaagaaagtgctgatggaaatgggaccaccctatgcgggacagcaagagctagcaagtttccattccacctcgaaaggttatatgggtgaatgtgggttcagggggggatatgtggaagtggttaacatggatgccgctgtgcagcaacaaatgctgaaattgatgtcagttcgactgtgtcctccagtgcccggtcaggctctgctcgacctcgtggtgagtcccccagctccgactgacccctccttcgcccaatttcaggcagagaagcaagccgttcttgcagaactcgcagctaaagccaagctgaccgagcaagtattcaatgaggccccaggcatcagctgcaatccagttcagggagctatgtactcctttccccgtgtgcagttgccaccccgagcagttgaacgggcacaggagctgggtctggctcccgatatgttcttttgcctgaggcttctcgaggagacaggcatatgcgtcgtgcccggttctggttttggtcagagagaaggcacgtaccatttccgcatgactatactccctcccctggagaaactgcggctcctactggagaaacttagccgttttcacgcaaagttcaccttagagtattcctag

SEQ ID NO: 224830 - DNA, 1491 bp, synthetic construct
  misc_feature 1..1491: note = Description of Artificial Sequence: Synthetic coding sequence
  source 1..1491: mol_type = other DNA
atggctagttctacaggtgatcgctcgcaggccgtaaggcacggactgagggccaaagtcctgactcttgacggcatgaaccctcgggtccggcgagtggagtacgccgtgcgcggaccgatcgtccagcgggctttagaactcgagcaagaactgaggcagggtgtaaagaagccatttacagaagtgattagggcaaatataggagacgcacaggctatggggcaaaggcccatcacatttctaagacaggtactggccctctgcgtgaatcccgacttgctgagctccccaaatttccctgatgatgccaaaaaacgggcagagcggattctacaggcgtgtggaggtcatagcctgggggcatatagcgtgtctagcggcattcagttgattcgggaagacgtcgcacgatacatcgagaggagggatggcggaatccctgccgaccctaataacgtgtttctgtctacaggtgccagcgacgcaatcgtgacggtcctcaagctgttggtggctggcgaaggccacaccaggactggggttctgattcccatccctcagtatccactgtattccgctacactggcggaactgggagctgttcaggttgactactacttagatgaagaacgggcatgggccctcgatgtggctgagctgcatagagctctgggacaagctcgggaccactgcagacctcgcgcattgtgcgtcattaatccaggtaacccaacagggcaagtacaaactcgggaatgcatcgaggccgtgatcaggttcgccttcgaagagagactctttcttcttgccgacgaggtctaccaggataacgtgtatgcggctggctctcaattccactcctttaaaaaagttctgatggaaatggggccaccgtacgcaggccagcaggagctggctagtttccactctacaagcaagggctatatgggggagtgcggcttccgcggaggctatgtggaggtggtgaatatggacgccgctgtgcaacaacagatgctgaagctgatgagtgtacgattgtgccctcccgtgccgggacaggctctgctggacctggtagtatctcctccagcgccaaccgatcccagcttcgctcagttccaggcagaaaagcaggcggtgctcgccgagctggccgcaaaggccaagttaaccgagcaggtgttcaatgaggctccgggtatttcgtgcaatcctgtgcagggtgctatgtacagcttcccccgtgtgcagctcccccctagagccgtcgagagagcccaggagcttggtcttgcccctgacatgtttttctgtctgaggcttcttgaggagacgggcatctgtgtcgtacccggaagtggctttgggcaacgcgagggaacctatcattttcggatgaccatcctaccacccttggagaagttgagactgcttctggaaaaactctcgcgattccacgccaagtttactctagaatatagctag

SEQ ID NO: 224831 - DNA, 2010 bp, synthetic construct
  misc_feature 1..2010: note = Description of Artificial Sequence: Synthetic coding sequence
  source 1..2010: mol_type = other DNA
atgatgaggctgagaggctccggaatgttgcgtgaccttctcctccgatcaccagctggcgtctctgccactctacggagggcgcaacccctcgtgaccctatgtcgcagacccaggggaggtggaagacctgccgcaggccctgcagcagcagctcggctccacccatggtggggcggtgggggttggcctgctgaacctctggcaaggggcctctcttcatctccctcagagattttacaggagctcggtaaagggtcaacacacccccaacccggtgtgagtccacccgctgcccctgctgctcctggtcccaaggacggtcctggcgagacagacgcatttggcaactcagaggggaaggagctagtggccagcggagagaataaaatcaagcagggtctgctgccatcactcgaagacctcctattctacaccatcgccgagggccaggagaaaatccctgttcataaatttattacagcactcaaaagcaccggactgagaaccagcgaccccagactgaaggagtgtatggatatgcttaggctaacgctgcagacaacttcagacggagttatgctcgataaggatctgttcaagaagtgcgtgcagagtaacattgtcctcctcacccaagcatttaggagaaaatttgtgattcctgatttcatgtcctttacctcccatatcgatgaactgtacgaatccgcaaagaaacagtccggagggaaggttgcagattacattccacagttggccaaattcagccccgacctctggggtgtgagcgtatgcactgtggatgggcaacggcactcaaccggggatactaaggtgcccttctgtctgcagagttgtgtaaagcccctgaagtatgccattgcagtgaatgacctcggcaccgagtatgtccacagatatgtgggtaaggaaccctctggccttcgctttaacaaattgtttcttaacgaggatgataagccacacaacccgatggtgaacgcgggagctatcgtggtgacgagtctgatcaagcaaggggtaaataatgctgaaaagtttgattatgtcatgcagtttcttaacaaaatggcgggaaatgaatacgtgggtttctccaatgctacctttcagtcagaaagagagtccggtgaccgtaactttgctatcggctattatctgaaggaaaagaaatgtttccccgagggcaccgatatggtaggaattctggatttttacttccagctgtgtagcatcgaggtcacgtgtgagtccgccagtgtaatggccgctaccctcgctaatggtgggttttgtccaatcactggcgaacgggttctctcacccgaggccgtacgaaacacgctgagccttatgcattcttgtggtatgtatgatttttcgggccagttcgcgttccacgtcggtctgccggctaagtccggagtcgccggtggcattctcctggtggtacccaacgttatggggatgatgtgctggtctcctccactagacaagatgggaaattccgtcaaagggatccatttctgtcacgatctggtctcgttgtgcaacttccataactatgacaatcttcgtcactttgctaaaaaactggaccctcgcagggagggcggtgaccagagagttaaatctgttatcaacttgctttttgctgcttacaccggggatgtgtcagcactgcggcgatttgctctcagcgccatggacatggagcagagagactatgatagccgaacggcactgcacgttgcagccgcagagggccacgtagaagtggtgaagtttctgctcgaagcctgcaaggtaaatccatttcccaaggaccgatggaataacaccccaatggatgaagcgctgcacttcggtcaccacgatgtttttaagatcctgcaggaatatcaggtacaatatacaccacaaggggacagcgataatgggaaggagaatcagacagtacataagaatctggatggtctgctgtag

SEQ ID NO: 224832 - DNA, 1797 bp, synthetic construct
  misc_feature 1..1797: note = Description of Artificial Sequence: Synthetic coding sequence
  source 1..1797: mol_type = other DNA
atgatgagattgcggggttccgggatgctgagggaccttctgttacggtctcccgcaggcgtttctgccacgctgcgtcgggctcagcccctcgtgacactgtgccgtcgcccaaggggcggagggagaccagcggctggcccagccgcagccgcaaggctgcatccatggtgggggggaggtgggtggccagctgaaccgttggccagagggctctcttcctctccgagcgagatccttcaggaactgggtaagggctcaacccaccctcagcccggagtcagcccaccagctgctcccgctgcaccaggacctaaggatggccctggggagacagatgcattcggcaactccgaggggaaggagttggtcgcaagtggagagaataagatcaaacagggactactcccgtctctcgaggaccttttattttacacaatcgctgagggacaagagaagatccccgtccacaaattcatcacagctctgaaaagtacgggactacggacgagcgatcccagactgaaagagtgtatggatatgctgcgcctgactctgcaaactacctcggacggggtaatgctggataaggacctgttcaagaagtgtgtgcaaagtaacattgtgctccttacgcaggcctttagacggaagttcgtgattccagatttcatgtctttcaccagccacattgatgaactctatgagtctgcaaaaaaacagagcggtgggaaggtggccgattacataccccagcttgctaagtttagccccgatctgtggggcgtctctgtttgtaccgtggacggccaacggcactccaccggggacactaaagtgcccttttgtttacagagttgtgtaaagcctttgaaatatgcgatagcagttaacgatcttggcactgaatacgtccacaggtacgtcgggaaggagccaagtggcttgcggttcaataaactgtttcttaatgaggatgataaaccccataaccccatggtgaatgctggtgccatagtcgtaaccagtttgattaagcagggcgtcaacaacgccgaaaaatttgattatgtgatgcagtttttgaataagatggctggcaatgagtatgtcggattcagcaacgcaacctttcaaagcgagcgcgagtcgggagataggaatttcgctatcgggtactatctcaaggagaagaagtgttttccagaggggaccgacatggtagggattctagatttttacttccagttatgctccatagaggtgacatgtgagagtgcttctgtgatggctgcaactctcgctaatggaggattttgcccaatcaccggagagcgagttctgtcacccgaagctgtgagaaacacactcagcctcatgcattcttgtgggatgtatgacttcagtggccagttcgctttccatgtggggctgcccgcaaagagtggggtcgccggtgggattctgctggtggtacccaatgtgatgggcatgatgtgttggagcccaccgcttgacaaaatgggcaattctgtgaaagggatccacttctgtcatgaccttgtttccttgtgcaacttccataattacgacaatctacgccattttgccaagaagctcgatcctcggagggaaggtggtgaccaaagacattccttcgggcctctagactatgagagtttgcagcaggagctggcactcaaagagaccgtttggaagaaggtgtcccctgaaagcaatgaggatattagtacgacagtggtgtatcggatggaatctctgggagagaagtcttag

SEQ ID NO: 224833 - DNA, 525 bp, synthetic construct
  misc_feature 1..525: note = Description of Artificial Sequence: Synthetic coding sequence
  source 1..525: mol_type = other DNA
atgggtatgatgtgctggtctccaccccttgataagatgggtaatagcgtcaagggtatacacttttgtcatgatctagtgtccctctgcaactttcacaattatgataatttgcggcacttcgccaaaaagcttgaccccaggcgtgaggggggagaccagcgcgtgaaatccgttatcaatctgctcttcgccgcttataccggcgacgtatctgctctgagacgcttcgcactgtcggccatggatatggaacaacgtgattacgattctcggacagcactgcacgtcgccgcagccgaaggccacgtggaggtagtgaaattcttgctcgaagcttgcaaggtcaatccctttccaaaggaccggtggaacaataccccgatggatgaggctttgcactttgggcatcacgatgtttttaagatactacaagagtaccaggttcaatacacaccccagggcgactccgataacgggaaggaaaaccagacagtgcacaagaatctggacggcttgctgtag

SEQ ID NO: 224834 - DNA, 1809 bp, synthetic construct
  misc_feature 1..1809: note = Description of Artificial Sequence: Synthetic coding sequence
  source 1..1809: mol_type = other DNA
atgcggagtatgaaggccttacaaaaggccctgtcgagagccggttcccactgtggaaggggtggatggggacacccgagcagatctcccctgctcggcggaggggtcaggcatcacctgtctgaagcggctgcccaggggcgagaaaccccccacagccaccagcctcagcaccaggatcatgattcgtcagaatctggaatgttgtcacggttaggggacctgctgttctataccatcgccgagggacaggagaggattcctatacataagtttacaacggccctgaaggctaccggactgcaaacctccgatcctcggttgagggattgtatgagcgaaatgcacagagtggtgcaggaatcatcaagtggcggtttattggatagggatctgttccggaagtgtgtcagtagcaatatagtgcttctgacccaggcctttcgcaagaaatttgtgatcccagattttgaagaatttactgggcatgtcgataggatcttcgaggacgtgaaagagctgaccggaggcaaggtcgcggcatacatcccgcagctcgccaaaagcaacccagatctgtggggcgtctcactttgcacggtggatgggcaacggcacagtgtaggccatacaaaaatacccttttgtcttcagtcatgcgtcaaacccctgacttacgcgattagcatttccacgctcgggacggactacgtgcataagtttgtggggaaggagcccagtggactgcggtacaataagctgtccctcaatgaagaagggatccctcataaccctatggtcaatgcaggagccatcgtcgtgtcctccctcatcaaaatggattgtaataaggctgagaagttcgacttcgtgttacaatacctcaataaaatggcagggaacgagtacatgggcttttccaacgccacattccagtcggagaaagagacaggagatagaaactatgctatcggctactatttaaaagaaaagaagtgttttccaaaaggggtggacatgatggcagcacttgatctgtattttcagctttgctccgtagaagtaacctgcgagagcgggagcgtcatggcagctactttggctaatggaggcatttgtcctattactggcgagtcagttctctctgccgaagcggtgcgcaacaccttgtccttgatgcattcttgcggaatgtacgatttctccgggcaattcgcattccatgtggggctccctgctaaatccgcagtcagcggagccatcttgctggtcgtgcctaatgttatgggaatgatgtgcttatcgcctccgctggataagctcgggaatagccacagaggcacttccttttgccaaaagctagtgtctctgttcaacttccacaactacgataaccttagacattgcgcgaggaaactggaccccaggagggagggggctgaaatccggaataagacggtcgtaaacctgctctttgcagcctatagcggcgatgtcagtgcgctgagacgcttcgccttgagtgcgatggacatggaacagaaggattatgacagcaggacagccttgcatgtcgccgcagccgagggtcacatcgaagtcgtgaagttcttgatcgaggcctgtaaagtgaatcccttcgccaaggataggtggggtaacatcccactcgatgatgccgtccagtttaatcatttggaagtcgtaaagctgctgcaagactatcaggatagctatactctctctgagactcaagccgaagctgctgccgaggccctgtcaaaagagaaccttgagagcatggtttag

SEQ ID NO: 224835 - DNA, 534 bp, synthetic construct
  misc_feature 1..534: note = Description of Artificial Sequence: Synthetic coding sequence
  source 1..534: mol_type = other DNA
atgaggtccatgaaagcactacaaaaagccttgtcacgtgctgggtcgcactgcgggagggggggatgggggcatccaagcagatcaccgttactcgggggaggagtgcgccatcatctgtctgaggccgctgcacaggggagagagacaccgcacagtcaccagccacagcatcaggatcatgacagctccgaaagtggcatgttgtcacggcttggggatttactgttctacacaatcgctgaagggcaggaacgcatccccatccacaaatttaccactgcattgaaggcaacgggcctgcaaacgtccgatcctcggctccgcgactgcatgtcagagatgcaccgcgttgttcaggaatcaagttcggggggtctcctggatcgcgaccttttcaggaagtggcaaccaacgtcactgtcttggcctagtcaaactcagacttgtggggtgtccccgtgtgcgctgtggatggtgaatggaaccttatgggccacacaacgaagccctagcgcctgcagccccgtgtag

SEQ ID NO: 224836 - DNA, 2049 bp, synthetic construct
  misc_feature 1..2049: note = Description of Artificial Sequence: Synthetic coding sequence
  source 1..2049: mol_type = other DNA
atgtgtgggatctttgcctacatgaactatcgcgtgccaagaactaggaaggaaatcttcgaaaccctgataaagggcctccagcgtctggaatacaggggatatgattccgccggagtggccatagacggcaataatcatgaggtgaaggaaagacatattcaacttgtcaaaaaacgaggaaaggtgaaggcactggacgaagaactgtataaacaagacagcatggatctgaaggtggagtttgagacccatttcggaatcgcacacaccaggtgggccactcatggtgtgccttccgcggtgaattctcacccgcaaagatccgataagggcaacgagttcgtcgtgatacataacggcatcatcaccaactataaggatctccgcaaattcttggagagtaaaggctacgaatttgagtccgagaccgatactgagaccattgccaaattgatcaaatacgtattcgataatcgagagacggaggatattacattcagcacacttgtcgaacgcgtgattcagcaactggaaggtgcttttgctctagtctttaagagcgttcattatcccggagaagctgtggctactagacgcggttctcctctgctgattggcgttaggtctaagtacaagctgtcaactgagcaaatccccatcttgtaccgtacttgtacactcgagaacgtcaaaaatatctgcaagacacggatgaaacggctggactctagtgcttgtcttcatgccgttggagataaggcagtagagttctttttcgcatccgacgccagcgccataatcgagcacacgaatagggtgatattcctggaggacgacgacatagcggctgtggccgacgggaagctgtcgattcaccgggtcaagcggagcgcatctgatgacccatccagagccatccagaccctgcagatggaactgcagcagattatgaaaggcaatttttctgcatttatgcaaaaagagattttcgaacaaccggagtccgtatttaatacaatgcgcggtagagtgaacttcgagaccaatacagtcctactgggcggacttaaggatcatctgaaggaaatccgcagatgtcggcgactgattgttataggctgcggaaccagttaccacgccgctgtcgcaactcgccaggtgcttgaagagttgacagagctgcctgttatggtggaattggcttccgatttcctcgaccggaacacacccgtttttcgagacgacgtgtgtttctttatttcacagtccggggagactgcagatacactgcttgccctgcgatactgtaaggacagaggggcacttaccgttggagtaaccaacacagtagggagcagtatctcccgggaaacagactgcggtgtacatatcaacgcgggaccggaaattggagtcgccagtacaaaagcttatacaagtcaatttatatccttagtaatgttcggactgatgatgagcgaagacaggattagtctgcagaaccggagacaggaaatcatccggggactccgaagcctgcccgaactcattaaggaggttctgtccctggaagagaaaattcacgacctggctctggaactgtatacgcagcgctcactgctggtgatggggcgagggtacaattacgccacctgcctggagggagcgctcaagataaaagagattacctatatgcatagcgaggggattctggcgggtgagctgaaacatgggcctttagcccttatcgataagcaaatgcccgtgatcatggtgattatgaaggatccatgctttgcgaaatgtcaaaatgcactgcagcaggtcacagcccgtcagggaaggcctatcatcttgtgctctaaggatgatacagagagttccaaatttgcctacaaaactatcgagctcccgcacacagtagactgcctgcagggcatcctgagcgtgatccccctgcagcttctgagctttcacctggccgttctgcgcggttatgatgtagactttccgcgtaatctcgctaaatccgtgaccgtggaatag

SEQ ID NO: 224837 - DNA, 1086 bp, synthetic construct
  misc_feature 1..1086: note = Description of Artificial Sequence: Synthetic coding sequence
  source 1..1086: mol_type = other DNA
atggctggaggaagacatcgtagggtggtgggcaccctacatctcctgctgttggttgctgccttaccctgggcaagtagaggagtctcgccctccgctagtgcctggcccgaggagaaaaattaccaccagccagcaatcctgaattctagtgctcttcgacagattgctgagggcacatctatttccgagatgtggcagaacgacctccagcctctccttattgaacggtatcccggttccccgggatcctatgcagcacgccagcacatcatgcagcgaattcagcggcttcaggccgactgggtcctcgaaatcgacactttcttatcacagactccatatggctatagaagtttttccaatataatcagcactctgaatcccactgccaaaagacatcttgttcttgcctgtcactatgacagcaagtatttcagccattggaataacagagtcttcgttggcgctacggacagtgcagtgccttgcgccatgatgttggaacttgctagggcccttgacaaaaaattactgtctctgaaaacagtgtcagattcaaaacctgacttgtcactgcagctcattttttttgacggggaagaagcatttctacactggtcaccacaggactcactgtacggctcgcggcatttagccgctaaaatggcgtccacacctcacccacccggtgcgaggggaacttctcagctccatgggatggatctcctggtgctgctcgatctgatcggggcaccaaatcccaccttcccgaacttttttccgaatagtgccaggtggtttgaacggctgcaggccatcgagcacgagttgcatgagctgggtctcctgaaggatcacagcttagagggtaggtatttccagaactattcctatggcggagttatccaggatgaccacatccctttcctgcggagaggagttcctgtgttacacttgattccgtcgcccttccctgaagtctggcacaccatggatgataatgaagaaaacctcgacgaaagcaccatcgacaaccttaataagatcctgcaggtcttcgtactggagtacctgcatctgtag

SEQ ID NO: 224838 - DNA, 939 bp, synthetic construct
  misc_feature 1..939: note = Description of Artificial Sequence: Synthetic coding sequence
  source 1..939: mol_type = other DNA
atggctggcggtcgccatagaagggtggtaggtactctacaccttctgctgttagtggctgctttaccctgggctagccgcggagtgagcccctccgccagtgcctggccggaggaaaaacacattatgcagcggatccagagattacaggcagattgggtcctggagattgacacctttctgagtcaaactccttatggctatagatcctttagtaatattattagcactcttaatccaaccgccaagcgtcacctggttttagcctgtcactacgattccaaatatttctctcattggaataatcgtgtttttgtcggagccacggatagcgccgtgccgtgtgctatgatgctcgagctcgctcgggcattggacaagaaacttctaagcctcaaaactgtttctgattcaaaaccagacctaagcttgcaactgatctttttcgacggggaggaagcattcttacattggtctccccaggactccttgtacggatctagacaccttgcagctaagatggcttcaactccccacccacccggtgccagggggacaagtcagctgcatggaatggatttgcttgttttgttggacttaataggtgctccaaatccgactttcccaaatttcttccccaacagcgcccgttggttcgagcggctgcaggccatcgaacatgagcttcatgagttagggcttttaaaggatcattcccttgaagggcgatattttcagaactactcctatggcggagtgatccaggatgaccacataccctttctcaggcggggagtccccgtcctacacctaattccatctccctttcccgaggtctggcacacaatggacgataacgaagagaatctggatgagtccaccattgacaatttaaataagatactgcaagtgttcgtattggagtacctgcatctgtag

SEQ ID NO: 224839 - DNA, 2328 bp, synthetic construct
  misc_feature 1..2328: note = Description of Artificial Sequence: Synthetic coding sequence
  source 1..2328: mol_type = other DNA
atggcagcacttgatagcctgtccctgtttaccagtttgggcctgtcggaacagaaagctagggaaacgctgaagaattcagccctgagtgcgcagcttcgtgaagctgccacccaggcgcagcagacgctcggctccactattgacaaggccacagggattctcctatatggtctggcctcccgtctgagagacacccgccgactgtctttcctggtcagctacatcgctagcaaaaaaatacacacggagccacaactttcagcggcactggaatacgtgcgttctcaccctctggatccgattgacactgtggattttgaaagagaatgcggagtgggcgtcatcgtcactccagagcaaatcgaggaggccgttgaggcagccatcaaccgacaccggcctcaactactggtggaacggtaccacttcaatatgggcctgctcatgggagaggcgagggctgtgttgaagtgggctgatgggaagatgatcaagaacgaagtagacatgcaggtgctgcacctgttggggccaaagctggaggccgatttggaaaagaaattcaaggtcgcaaaagctcgcctggaggagaccgatagaaggactgctaaagatgtggtcgagaacggggagacagcagaccagacgttatccctaatggaacagctacgaggcgaggccttgaagtttcacaaaccaggggaaaactacaagacacccggatacgttgtcaccccccacacgatgaatctactgaaacagcacttggagatcaccggtggccaggtccgtacccgattcccgccagaacccaatggcattctgcatattggccacgccaaggcgattaatttcaattttggctatgcgaaggccaacaatggtatctgtttcctcaggttcgacgacaccaaccccgaaaaagaagaagccaagttcttcacagcaatctgcgacatggtggcctggctggggtatactccttacaaggtcacatacgcgtcagattatttcgaccagctgtacgcatgggccgtggaacttatccgcaggggtttggcgtacgtatgccaccagcgaggagaagagctgaagggacacaacacacttccgtctccttggagagacagaccaatggaagaatcgcttctactgttcgaggcaatgcgcaagggcaagttttccgaaggcgaagctaccctacgaatgaaactagtcatggaagatggcaaaatggacccggtcgcataccgcgttaaatacacccctcatcatcgcactggagataagtggtgtatctatcctacctatgattacacccattgtctctgcgattctattgaacatattacacatagcctctgtactaaggaatttcaggcccgacgtagctcttatttttggctttgtaatgcgctggatgtgtattgtccagtccaatgggaatatgggaggctgaaccttcattatgccgtggtaagcaaaaggaagatcctgcagctggttgctacgggcgcagttagggattgggatgatccccgactgtttaccctaactgccctccgacgtaggggtttccctccagaggctattaacaatttctgcgccagggttggggtgaccgtggctcagacgaccatggagccacatctacttgaagcttgcgttcgggacgttctgaacgacaccgccccaagggccatggcagtgcttgagtcactccgcgtgatcatcacaaattttcccgcagcgaagtccttagacattcaggtaccaaatttcccagctgacgagacaaagggcttccaccaggttccttttgcaccgattgtgtttatcgaacggacagattttaaggaggagccagagcccggtttcaaaaggctggcctgggggcaaccagtcggcctgcgccacactggatatgtgatcgagctccagcacgtcgtgaaagggccatccggctgcgttgagtcgctcgaggtcacctgccgcagagcagatgctggcgaaaagccaaaggcttttatccactgggtctctcagccccttatgtgtgaagtccggctgtacgagagactcttccaacacaaaaatccagaagatcccacagaggtgcccggaggctttctgtcagacctcaacttggccagtctgcatgtggtagatgccgctctggtggactgctctgtggccctagccaaaccatttgataaatttcagttcgaacgcttagggtacttttctgtcgaccctgactcacaccagggcaagctcgtgtttaaccgcactgtgacccttaaggaagatcccggtaaggtgtag

SEQ ID NO: 224840 - DNA, 2295 bp, synthetic construct
  misc_feature 1..2295: note = Description of Artificial Sequence: Synthetic coding sequence
  source 1..2295: mol_type = other DNA
atggccgcactggatagcctcagcttgttcacatccctggggctgtctgagcagaaggcgagagagaccctgaagaacagtgccctgagcgcccaactccgtgaggcagcgacccaggcacagcagaccctagggtctaccatagacaaagctactgggatcctgctgtacgggctggcatccaggctgcgggatacccgtagattaagcttcctggtttcttacatcgcgactgccttggaatatgtgaggtcacatcctctcgacccaatcgatactgtggacttcgagagggagtgcggagtgggcgttatagtgacccccgaacaaattgaagaagcggtagaagcagccattaacaggcaccggcctcaactgcttgtggaaaggtatcatttcaacatgggtctactgatgggcgaggcccgtgctgtgctgaaatgggcggacggtaaaatgatcaagaatgaggtagacatgcaggtgttgcacctgctgggtcccaaactcgaggccgatctggagaagaaattcaaggttgccaaagccagactggaggagactgacagacgtaccgcaaaagatgtcgtcgaaaacggcgaaacggcagaccagaccctgtcattgatggagcaacttcgaggcgaggcactcaaatttcacaaaccaggcgagaactacaagacccctgggtacgttgtgacccctcacacaatgaaccttctgaaacagcacctagaaattacaggtgggcaggtacgcactcgatttcctccagagcccaatggtatcttgcacattggacatgctaaggcgataaactttaatttcggttatgctaaggctaacaatggtatttgcttcctccgcttcgacgacactaatcccgagaaggaggaggccaaatttttcaccgcgatctgtgacatggtggcctggctgggttacacaccctataaagtgacttacgctagcgactatttcgaccagctttatgcctgggctgtcgaattgattaggcggggtctggcatatgtgtgccatcaacggggagaggagctgaagggtcacaatacgcttccctctccatggcgggaccggcctatggaggagtctctcctcctatttgaggctatgagaaaggggaaattttctgagggggaagcaactctgaggatgaagctcgtcatggaagatggcaaaatggaccctgtagcctacagggtgaagtatacgccacaccaccgtaccggcgacaaatggtgcatctatccgacatacgactacactcactgtctgtgcgacagcatcgagcacatcacacacagcctgtgtacaaaggaatttcaggctaggcgaagttcatacttctggctgtgtaatgctctagatgtttactgtccggtgcagtgggagtatggcagactgaatctgcattacgccgtggtaagcaagcgaaaaatattgcagctcgtggccactggcgcagttagagattgggatgatccccgtctcttcactcttaccgctctgaggcgcagaggcttccccccagaagctattaacaacttctgtgctcgggtcggtgtgactgtggcacagacgaccatggagccacacctactggaagcatgcgtccgcgatgttttaaacgatacagctccccgtgcgatggccgtgctcgaaagcctccgagtcatcatcacgaactttccagcggcaaaaagcctcgacattcaggtaccaaactttcccgcagacgaaaccaaaggttttcaccaggtcccattcgctcccatcgtttttatcgaacggacggacttcaaggaagagccggagcccggattcaagaggctggcttgggggcagccggtcgggttgcgccatactggatatgtcattgagctccagcatgttgttaaggggcctagcggttgtgtcgagtctctggaagtcacttgccgaagggccgacgccggagaaaagccaaaagccttcattcattgggtgagccaaccccttatgtgcgaggtccggttgtacgagaggcttttccagcataaaaaccccgaggacccgaccgaagtgccgggaggctttctcagcgacctgaacctcgcgagcttgcatgtggtagatgccgcactcgtcgattgctccgtcgcccttgctaaaccgttcgacaagtttcagttcgagcgcctcggctatttctccgtcgacccagactctcaccagggcaagctagtgttcaacaggactgtgaccttgaaggaggatccaggcaaagtctag

SEQ ID NO: 224841 - DNA, 849 bp, synthetic construct
  misc_feature 1..849: note = Description of Artificial Sequence: Synthetic coding sequence
  source 1..849: mol_type = other DNA
atgcctacctgccggctgggccctaaattccttctcgtgagcggagttagcgccatggctgcgcttgactctttgagcctatttacaagtttgggattatccgagcagaaagctcgcgagaccctgaagaatagcgccctgtccgcgcagctgcgcgaagctgccactcaggcccagcagactctgggctcaaccatcgataaagcaacagggatcctgctgtacggcttggcttcgcgcctccgggacactcgaaggctatctttcctggttagctatattgcgtccaaaaagatccataccgagccccagctgagtgcagcattagagtatgtgcgtagccatcctcttgatcctattgacacagtcgacttcgagagagagtgtggtgtgggcgtgatcgttactcccgaacaaatagaggaagcagtggaagccgcaattaaccgtcatagacctcagctgctggttgaacgctatcatttcaacatgggcctcctcatgggcgaagcccgagccgtcctgaagtgggcggatggcaagatgatcaaaaatgaagtcgacatgcaggttttgcatctcctggggccaaaactggaggcagatttagagaaaaagttcaaagtagctaaggcccgactggaggagacagatcgacgcaccgccaaggatgtagtggagaacggcgagactgccgatcaaactctctcactgatggagcagttaaggggcgaagctctgaaatttcacaagccgggaacctatcccgtacctgctcgtacccagtggaatcccgcatactggacgtgccaatcccatcagtttcagttatggctgtgtcaagtgtag

SEQ ID NO: 224842 - DNA, 2874 bp, synthetic construct
  misc_feature 1..2874: note = Description of Artificial Sequence: Synthetic coding sequence
  source 1..2874: mol_type = other DNA
atgaacttcgcagaacgtgagggtagcaaacggtactgtatacagaccaagcatgtagccattctttgcgccgtagtggttggagttggcctgattgtgggactcgccgtggggctgacaagatcttgcgattcctccggggacggcggacccggtaccgcacccgcaccatcacacctgcccagttcaacagctagccccagcggacctcccgcacaggaccaggacatttgccccgcttcagaggacgagtcaggccaatggaaaaactttagactgcccgattttgtgaatccagtgcattatgatcttcatgtcaagcccttactggaggaagatacatacaccggaactgtcagtatttccatcaacctctcggcacctacgaggtacctctggctgcatctgagggagacgcggatcacacggttgcctgagcttaagcgtccctctggggaccaggtgcaggtgagaaggtgttttgaatacaaaaagcaggagtatgtcgtcgtggaggctgaagaggaacttactccctcctccggtgatggcctgtacttgcttactatggaatttgctggatggctgaacggttccctggtgggcttttaccgaacgacgtatacggaaaacggccaggtcaagagtattgtagccactgatcatgagcctaccgacgcaaggaagagcttcccttgctttgacgagcccaataaaaaggccacttacacaatttctataacccatccgaaagaatacggggcactttctaatatgcccgtggcaaaagaagagtccgtggacgacaagtggacccggactaccttcgagaagtcagtgcccatgagcacatacctggtgtgttttgcagttcatcaatttgactccgtcaagcggatctcaaactccggcaagccactcacaatttatgtccaacccgagcagaagcataccgcagagtatgccgctaacattacgaagagcgtgtttgattatttcgaagagtacttcgccatgaactacagtctgcccaagctcgacaaaatagcaattcccgattttggtacaggcgctatggagaattggggcctgattacttatagggagaccaacctcctgtatgatcccaaagagagcgctagtagtaaccagcagcgagttgccaccgtcgtggcccacgaactcgtgcatcagtggtttgggaatatagtgacaatggattggtgggaagacctctggttaaacgagggctttgcatcctttttcgagttcctcggggtaaatcacgctgaaacagattggcagatgagagatcagatgctgctagaggatgtcctgcccgttcaggaggatgactctttaatgagctcccatcctatcattgtgacagtgaccacccctgacgagatcacctcagtattcgacggtatctcctactccaaggggtcctctatcctccgtatgctggaagattggatcaagcccgagaatttccagaaaggatgtcagatgtacttggagaagtatcaatttaagaacgctaaaacatcggacttttgggcagcgctcgaggaagcgtcgagattacccgtgaaagaggtcatggacacatggacacgacagatgggatatcctgtactgaacgtgaacggggtgaagaacattactcaaaagaggtttctgctcgatccacgggcaaatccaagtcaaccaccatctgacttaggttatacctggaatattcctgtgaagtggaccgaagataatataacaagctctgtgcttttcaacagaagcgagaaggaagggatcacccttaacagcagcaacccatccggcaatgcctttctgaagatcaatccagatcacatagggttctaccgcgtcaactacgaagtggcaacatgggacagcatcgccacggccctgtctctcaatcataaaacatttagctctgctgacagggcctcccttatcgacgacgccttcgccctggcccgagcgcagctgcttgactacaaggtggccctgaacttgaccaagtacctgaaaagggaggaaaacttcttaccctggcagcgggttatctccgccgtcacatatattatatctatgttcgaggacgataaagaattgtatccgatgatcgaggagtactttcaagggcaggtaaagccaatcgcagattctcttggctggaacgatgccggagaccacgtcaccaagctgttgcgaagctctgtcttgggcttcgcctgcaagatgggcgatcgtgaggccttaaacaatgctagctctcttttcgagcagtggcttaacggaaccgtctctttgccagttaacttacgcttgttggtgtatcgttatggcatgcagaattccgggaatgagatctcttggaactacaccctagagcagtaccagaagacctccttggcccaagaaaaagagaagctcctctacgggttagcatctgtcaagaatgtgacgcttttaagccggtacctcgacctattgaaggatacaaacttaattaagacacaagatgtattcacggttattaggtacatttcatacaattcctatggcaagaacatggcctggaattggatccagcttaactgggactatttagttaaccggtacacacttaataaccggaacctggggagaatcgtgactatcgctgaaccttttaataccgagctgcagctctggcagatggaatcatttttcgcgaagtacccccaggcaggcgctggggaaaagcctagggagcaggtgctagagactgtgaaaaataacatagagtggctgaagcagcatcggaacacaatcagggaatggttcttcaatctgctcgaaagcggatag

SEQ ID NO: 224843 - DNA, 4539 bp, synthetic construct
  misc_feature 1..4539: note = Description of Artificial Sequence: Synthetic coding sequence
  source 1..4539: mol_type = other DNA
atggccacactgagcctgactgttaactcgggcgacccacctctgggagccctgctcgcagtcgagcatgtcaaggacgatgtgagtatctctgtcgaagaaggaaaagaaaacatcttacatgtttctgagaacgtgatcttcaccgacgtaaatagtatactgagatatttggcacgagtcgccacaactgctggcctgtatggttcgaatttgatggagcacacggagattgaccactggctcgaattcagcgccaccaagttgagtagctgcgatagctttacatccaccataaacgagctgaaccattgtttaagccttaggacatatctggttggcaactccctgtctctggcagacctgtgcgtatgggctacattgaaggggaacgcagcgtggcaggagcagttgaagcaaaaaaaggcacctgtgcacgtgaaaagatggtttggctttctggaggctcagcaggcatttcagtcagtcgggacgaagtgggatgtctctacaacaaaagctagggtggcccctgagaagaagcaagatgtggggaaattcgtcgagctccccggtgcagagatggggaaggttacagtacggtttcccccagaagcctctggctacttgcacatagggcatgccaaggcagcactcctgaaccagcactaccaagtgaattttaagggtaagttgattatgcgattcgacgacacaaacccagagaaagaaaaggaggattttgagaaggtaatactcgaagatgtggcaatgctgcacattaagccagaccagttcacatatacaagtgaccacttcgagactattatgaaatacgccgaaaaattaatccaggaagggaaggcttatgtggatgacacacccgcagagcagatgaaggcagaacgcgagcagagaatcgactccaagcatagaaagaatcccatcgaaaaaaacttgcaaatgtgggaagagatgaagaaaggctctcagttcggacagagctgctgcctgagagctaaaattgatatgtcctccaacaatggttgcatgagggacccaactttatacagatgcaaaatccagccacatccaaggaccgggaacaagtataacgtgtatcccacttatgattttgcgtgcccaatagtggactccattgaaggggtgactcacgctttaagaacaactgagtatcatgaccgagatgagcaattctattggataatcgaagccttggggatccgcaagccctacatttgggagtatagtcgtctcaatcttaataataccgtcttgtctaagaggaagctcacttggtttgtgaatgaagggcttgtggacggttgggacgatccaagattcccaacggtgcggggtgtattgaggcgcggaatgactgtggagggactaaaacagttcatagcagctcaagggtcttcacgaagtgttgtgaacatggagtgggacaagatctgggcttttaacaaaaaggtgatagaccctgtagccccaaggtatgtggcattattgaagaaggaagtcatcccagtcaatgtccctgaagcacaggaagagatgaaagaagtggccaagcaccccaaaaacccagaggtaggccttaagcctgtgtggtactccccaaaggttttcattgagggagccgatgcagagaccttctcagaaggagagatggttaccttcatcaactgggggaacctcaatatcaccaagatccataagaacgctgacggtaagatcatcagcctggacgccaagctcaatttggaaaacaaggactacaagaagaccacaaaggtgacctggttagcagaaactacccatgcacttcctatcccagtgatttgcgtgacgtacgaacatctgattaccaaaccagtgctgggaaaagacgaggacttcaaacagtacgtgaacaaaaatagcaaacacgaggaactgatgctgggagacccatgtcttaaggatttgaagaagggagatatcattcagctgcagagacgtggattcttcatttgtgaccagccttacgagcccgtgagtccttacagttgcaaagaggcgccatgcgtcctcatctatatcccagatgggcacactaaggaaatgcctacatctggctctaaggaaaagacgaaagtggaggccacaaaaaacgagacctccgctccatttaaagagcgccctaccccctctttgaacaacaattgcaccacgagcgaggactccctcgtgctttacaacagggtggccgttcagggtgatgtggtgcgcgagttaaaagctaagaaagctcctaaagaagacgtggacgcagcagtgaagcagcttctgtctctgaaagccgaatataaggagaagacagggcaggagtacaaaccaggcaaccccccagcggaaattggccagaacattagtagtaatagttccgcctccatattggaatccaaaagtctgtatgacgaagtggccgctcagggcgaggtagtaaggaagctgaaggcagaaaagtcaccaaaggccaaaattaacgaggcagttgagtgccttctctccctaaaggcgcagtacaaggaaaaaacgggaaaggagtacataccaggacagccacccttgagccagtcaagtgattcatctcccacccgaaattccgagcctgccggtcttgagactcccgaggcaaaggttctgtttgataaagtcgcttcgcagggagaggtggtgcgcaaactgaaaaccgaaaaggctcccaaagaccaggtggacattgcggtgcaggagttactccaactcaaggcccagtacaagtctctcatcggcgtcgaatacaaacctgtgtccgcgactggtgcagaagacaaagataagaaaaaaaaagagaaagaaaataagtcagaaaagcagaacaaaccacagaaacagaatgacggccaacggaaagatccctccaagaatcagggtggcggactttccagctcaggagctggggaaggccaaggccctaagaagcagacaagactgggactcgaggctaaaaaggaggagaacttagcagattggtactcgcaggtgattactaagtctgaaatgatagaatatcacgacattagcggctgctatattctccggccttgggcctatgctatctgggaggcgattaaggattttttcgatgcagaaattaaaaaactcggtgtcgaaaactgttatttccctatgtttgtctcacagagcgcgcttgaaaaagagaagacccacgtggcagatttcgcacctgaggtcgcctgggtaactagatccgggaagaccgaattggccgagccgatcgccattaggcccacctccgaaacagtcatgtaccccgcttacgctaaatgggtccagagccacagagatttgccaatcaaactgaatcagtggtgcaacgtggtccgatgggaattcaaacacccacagccctttctccggactcgggagttcctctggcaggaaggtcatagcgcgtttgccaccatggaggaggcggcagaggaggttctccagatcctcgatttgtacgcccaagtgtacgaggagttgctggcgatccccgtggttaaagggcgaaagaccgaaaaagagaaattcgccggtggcgattacacaacaacaatcgaggcttttatttccgctagcgggcgagcaatccagggcggaaccagccaccacctgggccaaaacttcagcaagatgtttgaaatcgtcttcgaggaccccaaaattccaggcgaaaaacagttcgcttaccagaattcttggggccttactacccgcaccattggagtgatgacaatggtgcatggagacaacatgggtttggtgctccctcctagggtagcttgcgtgcaggtagttattatcccctgcggtattactaatgctctgagcgaagaggacaaggaagccctaatcgccaagtgtaacgattacaggcggagacttctgagcgttaatattcgggtgcgggctgatctccgggataactacagtcctggctggaagtttaatcattgggagttgaaaggggtcccaatccggctggaggttgggcctagagatatgaaaagctgtcagtttgtcgccgtacgacgcgacaccggagagaaactgacagtggctgagaacgaggctgaaacaaagctgcaggccattttggaggacattcaggtgacacttttcaccagggcatccgaagacttgaaaacccatatggtcgtggccaatacaatggaggactttcaaaaaatactggatagcgggaaaattgtgcagattccattctgtggggagatcgattgtgaagactggatcaagaagacaactgccagggaccaggacctcgaaccaggcgctccttcaatgggggctaagagtctgtgtattccattcaagcctctctgcgaattacagcccggagctaagtgtgtctgtggaaaaaatccagcgaagtattatactcttttcggacgaagctattag

SEQ ID NO: 224844 - DNA, 2964 bp, synthetic construct
  misc_feature 1..2964: note = Description of Artificial Sequence: Synthetic coding sequence
  source 1..2964: mol_type = other DNA
atggcaacgcttagtttgactgtgaatagcggcgatccccctctgggggcactgttggcggtagaacacgtgaaggacgacgtgtccatctcagtggaagaaggaaaggaaaacatcttacacgtgtctgagaatgtgatattcaccgacgtcaactctattttacgatatctggcccgtgttgccaccaccgccggactatacggctccaacctgatggaacacactgagatagatcactggctggagttttcggctactaaacttagctcgtgcgacagcttcacatctactattaacgaattgaaccattgcctaagtctgagaacgtatctcgtaggaaatagcctgtccttagccgacctctgcgtctgggctacactgaagggaaacgcagcttggcaggaacaactcaagcagaaaaaggctcccgtgcacgtgaaacggtggtttggctttcttgaagcacagcaggcctttcagtccgtcggtactaagtgggacgtttcaaccaccaaggccagggtcgctcctgagaagaagcaagatgtcggaaagttcgtcgagctgccaggagctgagatggggaaggtcaccgtccgttttcccccagaggctagtggataccttcacatcgggcacgctaaggctgcccttctgaaccagcattatcaagtgaatttcaaaggaaagctaattatgaggttcgacgatacaaaccccgaaaaggaaaaagaagacttcgagaaagttatcaagtccgtcgtcatgacactgtgtcagaagtccatcaaggtgacaggactgcccaacacttttatggttatcctggaagatgttgccatgctgcatattaaaccagatcagtttacctatacttccgatcactttgagactataatgaaatatgccgagaaactgattcaagagggcaaggcgtacgtggatgatactccagcagaacaaatgaaggcagaacgggagcagcgcatcgactccaaacaccgaaagaatccaatagaaaagaatttacagatgtgggaagaaatgaagaagggtagtcaatttggccagagctgttgcttacgcgctaagattgacatgtcgagcaataacggctgcatgcgggatcctacgctttaccggtgcaagattcaacctcatcctagaactgggaataagtataacgtctaccccacgtatgatttcgcatgcccgattgtggacagcatagagggagttacccacgccctgaggaccaccgagtaccatgatcgggatgagcagttttattggatcatcgaggccctcggtattcgaaagccatacatatgggagtactcacggctgaatctcaataatacagtgttatccaaacgcaaactgacctggtttgtcaacgagggcctggtcgacgggtgggacgatcctcggtttccaacggtcaggggagtcctaagacgtggaatgacagtggaagggttaaagcagttcatcgccgctcaagggagcagtcgaagcgtggtcaacatggaatgggacaagatctgggcgttcaacaagaaagtgatcgatccagtggctcccagatatgtcgcactgctgaagaaagaagtaattcctgtcaacgtacctgaggcacaagaagagatgaaggaagtagctaagcatccaaagaacccggaagtcggcctgaaacccgtttggtattcaccaaaagttttcattgaaggtgccgacgccgaaacattctccgagggtgagatggttactttcatcaattggggtaacctcaacattacgaaaatccataaaaacgccgacgggaagatcatatcgctggatgcaaagctgaacctggagaacaaggactacaagaagactacgaaggtaacatggcttgctgagaccacccatgccttgccaatacccgtaatctgtgtcacatacgagcatctgattaccaagccagttttaggcaaagacgaagactttaagcagtacgttaataagaacagcaaacacgaggaactgatgctcggagatccttgtcttaaggatcttaaaaagggtgacataatccagctccagaggcgcggtttctttatttgtgaccagccatacgaaccagtctcgccctattcttgcaaggaagcaccctgtgtcctcatctatattccagatgggcacaccaaggaaatgccgacttctggtagcaaagaaaagacaaaggtggaagccacaaagaatgaaacctccgcacctttcaaggagcggccaaccccatccctgaataataattgcacgacttccgaggatagccttgtgctgtataaccgagttgcagtgcagggggacgttgttcgggaactgaaagccaagaaagcaccgaaagaggacgttgacgccgctgtgaaacagctcttgtcactgaaggcagaatacaaagaaaaaacaggccaagaatataaacccggtaaccccccagcggaaataggccaaaacatttcatcaaatagttctgcgtccatcctggagagtaaaagcctgtatgacgaggttgccgcacagggtgaggtcgttcggaagttgaaggcagagaagagccctaaggctaagatcaacgaagccgtggagtgtctcctgagcctgaaagcccagtacaaggagaagaccggaaaggagtacatccccggacagcccccactttcacagtcaagcgactccagccctaccaggaattccgaacctgcaggactggagacccctgaggctaaggtgctcttcgacaaagtcgcctcacagggcgaggtggtgcgcaaacttaaaacagaaaaagctccaaaggaccaggtggacattgccgttcaggagcttctccaactgaaggctcaatacaaatctctgataggcgtagagtacaagcccgttagcgccactggcgcagaagacaaggacaaatag

SEQ ID NO: 224845 - DNA, 2928 bp, synthetic construct
  misc_feature 1..2928: note = Description of Artificial Sequence: Synthetic coding sequence
  source 1..2928: mol_type = other DNA
atggcgactctgtcgctgacagtcaatagcggagatccacctctgggcgctttgttggctgtcgagcacgtgaaggatgatgtctccatctccgtcgaagagggtaaggagaacatcctccacgtgtcggaaaacgtgatatttaccgacgtgaacagcattctgcggtaccttgccagggtggccactacggcgggtctctacggcagcaatctgatggagcatacagagatcgaccattggctggaattttccgctacgaaactatcatcatgtgactcatttaccagtaccattaacgaacttaaccactgcctgtctctaagaacttatctcgtcggcaattcactgtcattagctgacttgtgtgtgtgggcgacactgaagggcaacgcagcttggcaggagcagctcaaacaaaagaaggccccagtgcatgtgaaacgctggttcgggttcctggaagcccagcaggctttccagtctgttggaaccaagtgggacgtatccacaacaaaagcccgtgttgcccctgaaaagaagcaagacgtaggtaaattcgttgagctgccgggtgcagaaatgggaaaggtcactgttaggtttcccccagaggcaagcgggtacttgcatattggccacgcaaaggccgctctgcttaaccagcattaccaggttaacttcaaaggaaagttgatcatgcgatttgatgacactaaccccgagaaggaaaaggaggacttcgaaaaggtaatactggaagacgtcgccatgctgcacatcaagcccgatcagtttacatacaccagcgaccactttgagacaattatgaagtatgcggagaagctaattcaagagggaaaagcatatgtagatgatactcccgctgagcagatgaaggctgagagagagcagcgcattgactctaagcaccgtaagaatcccatcgagaaaaacctccagatgtgggaggagatgaaaaagggcagccagtttggtcaatcctgctgcctgcgggcaaaaatcgacatgtccagcaataacggttgcatgcgggatcctaccctttatagatgcaagattcagccacacccccgaaccggtaataaatacaatgtgtaccctacatacgattttgcgtgtccgatcgtcgattcaatcgagggggtgacacacgctctacgcactactgagtaccacgaccgagatgagcagttctactggatcattgaggcactaggcattcggaagccatacatttgggagtactccagactgaacctcaacaatacagtgctcagcaagcgcaaactgacctggttcgttaacgaggggcttgtggatggatgggacgaccctcgtttccccactgtccgcggagtactgcggcgtgggatgacagtggagggccttaagcaattcatcgccgctcagggatcgtcccgcagtgtggttaatatggagtgggataaaatctgggctttcaataagaaactgagagccttatgcaaaaaggttattgaccccgtcgctcctaggtacgtggccctgttgaagaaggaagtgattccggttaacgttcccgaagctcaggaggagatgaaagaagttgcaaagcaccctaagaaccccgaagtggggttgaagcccgtgtggtatagccctaaagtgtttattgagggagcggacgccgaaactttctccgaaggagagatggttacttttattaattggggcaatctgaacatcacgaaaatccacaaaaacgccgacggtaagattatcagtctcgacgccaagttaaacttggagaataaagactacaagaaaacaaccaaagtgacctggctggcggagactacccatgcgttgcccatccccgtgatctgcgtaacatacgaacacctaataaccaagccagtcctcggaaaagatgaagactttaagcagtacgtgaacaagaatagcaaacacgaagaattgatgctaggagatccctgtctgaaagacctgaagaaaggagacatcattcaacttcaacgacgaggattctttatctgtgaccaaccctacgagcctgtgtctccatactcctgcaaggaggcaccctgcgtgctgatctatatccccgacgggcacactaaagagatgccgaccagcgggtccaaagaaaagaccaaggtcgaagctacaaagaacgagacatctgcccctttcaaggagagacccacacccagtctgaacaataactgcaccacaagtgaggatagcctggtgctttacaatcgagttgccgtacagggtgatgtggttagagaactcaaagctaagaaggcccctaaagaagacgttgatgcagcagttaaacagctactgtccttgaaagcagaatataaagagaagactggccaggaatataaacctggcaatccaccggctgagatcgggcagaatatatctagtaattcctctgcctctatcctggagagtaaaagcctttatgacgaggtcgctgcccagggagaagtggtgcggaaacttaaagcggagaagtcaccgaaagccaagatcaatgaggcagtggagtgtctgttgtctcttaaggcgcagtataaagaaaaaactggtaaagagtatatcccgggacagcctcccctgtcccagtcatctgattcctcccctacacggaatagcgaacctgccggactggaaacacccgaagccaaagtattattcgacaaagtggctagtcagggagaggtcgtgcgcaaactcaagaccgaaaaagccccaaaggatcaggtagacatcgccgtgcaagaactacttcaactgaaagcccagtataaaagcctgataggtgtggagtataaaccagtctccgcgacaggtgcagaagataaagacaaaaagaaaaaagagaaatag

SEQ ID NO: 224846 - DNA, 1572 bp, synthetic construct
  misc_feature 1..1572: note = Description of Artificial Sequence: Synthetic coding sequence
  source 1..1572: mol_type = other DNA
atggccgctctcctgaggcgcttactccagagggagaggccgagcgcagctagcggcagaccagtcggaagacgcgaggctaacctcggaaccgatgcaggtgtggccgtccgagtccgtttcgctccttctcctacagggtttcttcacttaggcggactgcgcactgctctgtataactacatctttgcgaagaagtaccagggctcctttattctgcggctagaggatactgaccaaaccagggtggtccctggtgccgctgagaatattgaagatatgctagaatgggccggaatcccgccagatgagtcaccccgacgtggagggccagcaggaccatatcaacagtcccagagactggagctgtacgcgcaggccaccgaggccctgctgaaaaccggagctgcttacccatgcttctgcagtccacagaggcttgaactgctaaagaaggaagctctgcgcaaccaccagacaccaaggtatgataaccgctgccgcaacatgtctcaggaacaggtggcccagaagctggctaaggatcctaaacccgcaataagatttcgcctggaacaggtggtcccagcgtttcaggacttagtttacggctggaataggcacgaggttgcatccgtggagggcgatcccgtaatcatgaaatcggacggtttcccaacgtaccatctggcctgtgtagtcgacgaccatcatatggggataagtcacgtgttgagaggctctgagtggctggtgtccacagccaaacatcttcttttgtatcaagccctggggtggcagcccccacattttgcccatctccctctgttactgaacagggacggcagtaagctcagcaaacggcagggagacgtcttcctggaacatttcgcagcggatgggtttctgcccgactcactacttgacataattacaaattgcggatcgggctttgcagagaatcaaatgggccgtacacttccagagctgattacacagttcaacctaacgcaggtgacctgccacagcgctctgctcgatctggaaaagctgccagagttcaatcggctgcacctgcagcggctggtttccaacgaatcccaaaggcgtcagctggtagggaagctccaagtgctggtggaggaagcctttgggtgccaactgcaaaatcgggatgtgctgaatccagtctacgtcgagcggattctgctgctccgacaggggcatatctgccgactccaggatttggtgtcccccgtctactcttacctgtggacccgccctgctgttggtcgtgcgcaactggatgctatcagtgagaaggttgatgtcatcgccaaacgtgtgctggggctgctggagcgttcctctatgtcgctcactcaggatatgctgaacggtgagctgaaaaagttgtccgaaggtctggagggcaccaaatattctaatgttatgaagttgctccggatggccctatcaggacagcagcagggtcccccagtcgcagagatgatgctggccttagggcctaaggaagtgcgcgaacgtattcagaaggtcgtgtcttcttag

SEQ ID NO: 224847 - DNA, 1572 bp, synthetic construct
  misc_feature 1..1572: note = Description of Artificial Sequence: Synthetic coding sequence
  source 1..1572: mol_type = other DNA
atggccgcactgcttagacgacttttgcaacgtgaaagaccaagtgccgctagcggcagacccgtcggacgccgtgaggctaacctgggaactgacgccggtgtggccgtgagggttaggtttgcaccgtcgcctactggattcctgcacttgggaggtttgcggaccgcactgtacaactacatttttgccaagaagtatcaggggagttttatcttgcggctggaggataccgatcagaccagagtggtccccggtgctgccgagaacatagaagacatgcttgagtgggctggaatcccacctgatgaatctccacgacgcggaggacctgcagggccataccaacaaagtcaacgactggagctttatgcgcaggccaccgaggccctgctgaaaacaggagccgcttacccttgcttttgcagtcctcagcggctcgaactcctgaagaaggaggcccttaggaatcaccagacaccgagatatgacaaccgttgccgcaacatgtctcaggaacaggtggcacagaaactcgcaaaagatcctaagcccgctattcggtttagactcgaacaggttgtgcccgctttccaggacctggtgtatgggtggaaccgccacgaggtggcttctgtggagggagaccctgtgattatgaaatcagacggcttcccgacatatcatctggcctgtgttgttgatgatcatcacatgggaattagccacgtacttcggggaagcgaatggttagtctctactgctaagcacctgctactttaccaagcattgggttggcagccgccacactttgcccatctgcctctgctgcttaaccgggatggtagcaaattatcaaagcgacagggagacgtttttcttgaacattttgccgcagacggttttctcccagacagcttgcttgatattattacaaactgcggctctgggttcgcagagaatcaaatggggcgtacacttccagagctgattactcagttcaatttaacccaggtgacatgtcattcagccctgctggacctagagaaactgcctgagttcaatcggctacacttacaacgcttggtatctaatgaaagccagcgaaggcagctcgtaggaaaacttcaggtcctcgtggaagaggctttcggctgccagttacagaacagagacgtgttaaaccccgtgtatgtggagagaatcctcctgctcagacagggccatatatgtaggttgcaagatctggtttcaccagtgtacagttatctgtggactagacccgctgtggggagggcccagctcgatgctatctctgagaaagtcgatgtaattgcaaagcgggtactcgggctattagagaggagcagtatgagcctcacgcaggacatgctgaacggggagcttaagaagttgtcagaaggccttgaaggcacaaagtactctaacgtaatgaaactcctgagaatggcgctgtccggccagcagcagggccctccagtcgctgagatgatgctcgcgctggggcctaaagaggtgagggagaggattcaaaaggtggtgagctcctag

SEQ ID NO: 224848 - DNA, 321 bp, synthetic construct
  misc_feature 1..321: note = Description of Artificial Sequence: Synthetic coding sequence
  source 1..321: mol_type = other DNA
atggctcaggaattcgtgaactgtaaaatacagcctggcaaagtggtggtgttcatcaagcctacgtgtccgtattgccgccgtgcccaagaaatactgtctcaactgcctatcaaacaggggttgctcgagtttgtcgacatcaccgccacaaatcacacaaacgaaatccaggactaccttcagcagctgacaggtgctcggactgtaccacgggttttcattggaaaggattgtattggcggatgctcagaccttgtcagtctccagcagagcggcgaattgcttaccaggttgaaacagatcggggcacttcaatag

SEQ ID NO: 224849 - DNA, 321 bp, synthetic construct
  misc_feature 1..321: note = Description of Artificial Sequence: Synthetic coding sequence
  source 1..321: mol_type = other DNA
atggcccaggagtttgttaattgtaagatacagccaggaaaagtggtggtcttcatcaagccaacgtgtccgtattgtcggagggcccaggaaatcctgtcacagctgcccatcaagcagggcctgctggagttcgtggatatcaccgcaaccaatcatactaacgagatccaggattacctacagcagctgaccggcgctcgtacagtgcccagggtgtttattggaaaagactgtatcggcggatgctctgacctagtctctctgcagcaaagcggggagctgttgactcgcctcaagcaaattggcgcactgcaatag

SEQ ID NO: 224850 - DNA, 321 bp, synthetic construct
  misc_feature 1..321: note = Description of Artificial Sequence: Synthetic coding sequence
  source 1..321: mol_type = other DNA
atggcccaggagttcgtcaactgtaagatccaaccagggaaggtggtggttttcattaagccaacttgcccttattgtcgcagggcccaggagattctgagccagttaccaattaagcaggggctgttggagtttgtggacatcactgcaactaaccataccaatgagattcaggactacctgcagcagctgactggagcacgcaccgtccctcgcgtgttcataggaaaagattgtattggcggttgtagcgatttggtgtcactgcaacaatccggggaactgctgactaggttaaagcagattggcgcactgcaatag

SEQ ID NO: 224851 - DNA, 321 bp, synthetic construct
  misc_feature 1..321: note = Description of Artificial Sequence: Synthetic coding sequence
  source 1..321: mol_type = other DNA
atggctcaggagtttgttaactgtaagatccagcccggaaaggtcgtcgtgtttattaagcctacctgcccctactgtagaagagcccaggagatattgtcccagctaccaatcaagcagggactgcttgaattcgtggatattacagccactaaccatactaacgaaatacaagattatctgcagcaactgaccggagcgagaactgtacccagggtgtttattggcaaagattgtatcggcggatgtagcgacttggtgtccctgcaacagagtggagagctgttaacccgcttgaagcaaatcggcgctttgcaatag

SEQ ID NO: 224852 - DNA, 321 bp, synthetic construct
  misc_feature 1..321: note = Description of Artificial Sequence: Synthetic coding sequence
  source 1..321: mol_type = other DNA
atggcccaggagttcgtgaattgcaaaattcagccgggtaaggtggtggtgttcatcaaacccacatgcccttactgtcgcagggctcaagagatccttagccagctccctataaaacagggattgctggagttcgtagatattactgctaccaatcacactaacgaaattcaggattacctgcagcaacttaccggggcaagaactgtcccacgagtgtttattgggaaggactgcattggtggttgctcagacttagtgtcccttcagcaaagcggcgagctgttgaccaggctgaagcagatcggggctttgcagtag

SEQ ID NO: 224853 - DNA, 495 bp, synthetic construct
  misc_feature 1..495: note = Description of Artificial Sequence: Synthetic coding sequence
  source 1..495: mol_type = other DNA
atgatctggagaagggccgctctggcaggcactcggcttgtgtggagtcgctccggtagcgccggttggctcgaccgagcagctggggcagctggcgctgccgcagcagcagcctccggtatggagtctaacacaagcagctcattggaaaacctcgcaactgcgccagttaaccagatacaggagacaatttcagataactgcgtggtcatcttctccaagactagctgttcttactgcaccatggccaaaaaattgtttcacgatatgaatgtgaactacaaagtggtcgagctggatctcctggaatacggaaatcaattccaggacgctctgtataagatgacgggcgagcgcaccgttccaaggatttttgtcaacggtacattcatcggcggtgcaaccgatactcaccgtctccataaggaaggaaaactcctccccctagttcatcaatgctatctcaaaaagagcaagagaaaggaattccaatag

SEQ ID NO: 224854 - DNA, 498 bp, synthetic construct
  misc_feature 1..498: note = Description of Artificial Sequence: Synthetic coding sequence
  source 1..498: mol_type = other DNA
atgaacccaagagataagcaggtcagtcgcttttcccccctgaaagacgtttatacgtgggtggccctggccggaattcagaggtcaggatcacctggacgcacccgctcagccgcacgcaggatggagagtaatacttccagcagtttagaaaaccttgccaccgcgccagtgaatcaaatccaggagactattagcgacaattgcgtggtcatcttctcaaaaactagctgcagctactgtacgatggccaagaagctatttcatgacatgaacgtgaattataaggtggtggagctggacctgctggagtatggcaaccagtttcaagacgccttgtacaagatgacgggggagcgtacagtacctagaatcttcgttaatggaacctttattggcggagcaaccgatacccacaggttgcacaaggaaggcaagctattgccattggtacatcaatgctatctcaagaaaagcaaacggaaagagttccaatag

SEQ ID NO: 224855 - DNA, 1008 bp, synthetic construct
  misc_feature 1..1008: note = Description of Artificial Sequence: Synthetic coding sequence
  source 1..1008: mol_type = other DNA
atggcagctggggcagccgaggccgcagtagcagcagtagaggaagtaggcagcgcagggcagttcgaggaattgctccggttaaaggcaaaaagtctattggtggtccacttctgggccccatgggccccacagtgcgcccagatgaacgaggttatggccgaacttgcaaaagaactgcctcaggtgagctttgttaaactggaagcggagggtgtgcccgaagtctctgagaagtacgagatcagttcagtgcccacatttctcttttttaaaaattcgcagaaaatagatagactggatggcgcacacgcacccgagctgacaaaaaaagtgcagagacacgcatcatcagggtcatttctgccctccgcaaacgagcacctgaaggaggatctgaacttgcgactcaagaagctgactcacgcggctccctgcatgctgttcatgaagggcactccccaggaaccaaggtgcggcttctctaagcagatggtggagatcctgcacaagcacaatattcagttctcttcctttgatatcttctctgacgaggaggtccgccagggcctgaaagcctattccagttggccaacttatcctcaactctacgtgagtggtgagttaatcggaggactggacattattaaggaactggaggcaagcgaagagctcgacacgatctgcccgaaggctcctaagctcgaagagagattaaaagtactaacaaacaaagcctccgtgatgttgttcatgaagggcaacaaacaagaagcaaaatgcggcttttctaagcagatcctcgagatcttaaactctaccggtgttgaatacgagacatttgacatcttggaagatgaggaagttcggcagggtttgaaggcctactcaaactggcctacatatccccagctgtacgtgaaaggcgaactggtggggggtctggatatcgtcaaggaacttaaggagaacggggagctactacctatcttacgcggagagaactag

SEQ ID NO: 224856 - DNA, 1008 bp, synthetic construct
  misc_feature 1..1008: note = Description of Artificial Sequence: Synthetic coding sequence
  source 1..1008: mol_type = other DNA
atggccgctggagccgctgaggctgccgttgcggcagtcgaagaagtcggctcggccggacagttcgaagagctcctgaggctgaaggctaaaagtcttcttgtcgtgcacttctgggcgccttgggcccctcagtgtgctcagatgaatgaggttatggctgaactggccaaagagctcccccaggtgtcatttgtgaagctcgaggcagaaggggtccctgaggtgagcgaaaagtatgagatatcttcagtacccacattcctgttttttaagaatagtcagaagattgataggttggatggggctcacgcgccagagttaaccaaaaaggtgcagcgccacgcctcctcaggttccttcctaccttccgctaatgagcacctgaaggaggatttgaacctacggttgaagaaactgacccatgctgccccatgtatgctgttcatgaagggcacacctcaggaacctcggtgtggtttctcaaaacagatggttgagatcctgcataagcacaatattcaattttcttctttcgacattttcagtgacgaggaggtaaggcaggggctgaaggcatactcctcctggcccacttatcctcagttgtatgttagcggcgagcttataggcggactcgacatcatcaaagagctggaggcaagcgaggaactggacactatttgcccgaaggctcccaagctggaggagagattgaaggtcctgaccaataaggcctctgtaatgctgtttatgaaaggaaacaaacaggaggccaaatgcgggttctctaagcagatcttagagatcctcaactctacaggcgtagaatatgaaacgttcgatattcttgaggatgaagaggtccggcaaggcctgaaggcgtattccaattggcccacctatcctcaactgtacgttaagggcgaactggtgggaggcctggacatcgttaaggagcttaaggaaaatggggaactcctaccgatcctgcgcggtgaaaactag

SEQ ID NO: 224857 - DNA, 1008 bp, synthetic construct
  misc_feature 1..1008: note = Description of Artificial Sequence: Synthetic coding sequence
  source 1..1008: mol_type = other DNA
atggctgccggtgcagcagaggcggctgtcgctgcagtcgaagaggtgggtagcgcaggtcagttcgaagaactcttgagacttaaagccaagtccctactggtggtgcatttctgggctccatgggcgccacaatgcgcacagatgaatgaggttatggccgaacttgcgaaagaattgcctcaggttagcttcgtgaagcttgaggccgagggggttcccgaagtgtctgaaaagtatgagatatcctcggtccctacgttcctgttcttcaagaatagtcagaagatcgacaggctcgatggagcacatgccccagaattgacgaagaaggtgcaaagacacgcctcttcaggatccttcctccctagtgccaatgagcacctcaaggaggatctgaatctacggttgaaaaagttgacccacgcggcaccttgtatgttatttatgaaggggactcctcaggaacctagatgcgggtttagcaaacagatggtcgagatcctccacaaacataacatccagtttagttccttcgacatctttagcgacgaggaggtgcggcaaggcctcaaggcttatagctcctggcccacctatccacaattgtatgtgagcggggaactgatcggaggcctcgacatcattaaagagctcgaggcaagcgaggaactagataccatttgccctaaagctccaaaactggaagagcggcttaaagttctgaccaacaaggcctctgttatgctctttatgaaagggaataagcaggaggccaagtgtggattttctaagcagatcctggaaatactaaatagcaccggtgtggagtatgaaacatttgacatcctggaggatgaagaagtaaggcagggtctgaaggcctatagtaactggccgacatatccacagctgtacgtaaagggagagctggtcggcggtctagacattgtaaaggagctgaaagagaatggcgagctgctgcccatcctcagaggcgagaactag

SEQ ID NO: 224858 - DNA, 474 bp, synthetic construct
  misc_feature 1..474: note = Description of Artificial Sequence: Synthetic coding sequence
  source 1..474: mol_type = other DNA
atgtctggttcacttggacgggctgcagctgcattgctgcgttggggccgaggcgcaggaggaggaggcctctggggcccaggtgtgagggcagccggatcgggcgcaggcggtggcggatcggccgagcaactggatgctctcgttaaaaaggacaaagtcgtggtgttcctgaaagggacgccagagcagccacagtgtggcttcagcaatgccgtggtgcaaattcttcggctccatggagtgcgtgattacgcagcctataacgtgctggatgatcccgagttacggcagggcatcaaagattattccaattggccaacgataccccaggtctatttgaacggtgagttcgtaggcggatgcgacatcctgctccaaatgcatcaaaacggggatctggtggaggagttgaagaagcttggaattcacagcgcacttttagatgagaaaaaagaccaggattcaaagtag

SEQ ID NO: 224859 - DNA, 873 bp, synthetic construct
  misc_feature 1..873: note = Description of Artificial Sequence: Synthetic coding sequence
  source 1..873: mol_type = other DNA
atgctaaaacgagaaatgaaaccagaatcggaccgtcccagaaaagtgcgcttccgtatcgcttccagccacagcggcagggtcctgaaagaggtttatgaggacggccagccatccggcagcctcgactcggagtgtgcatcaatctgcgggattgacggcctgggcgattccgatgggcagcagaatgggcatatagaaagtgaaggagacgaaaacgaaaacgaccaggacagtctgctggtgctcgcccgagccgcttccgagaaaggattcggcactaggagggtcaacattctgtcaaaaaacggcacagtcagaggggtgaaatacaaagtatccgctggccaagcactttttaataacctcactaaagtcctacagcagccctcgactgacctcgagttcgatcgagtcgtgatatatactacttgtctccgggtagtgaggacaactttcgaacgctgtgaactagtacgcaagatcttccagaaccaccgggtgaagtttgaagagaagaacatcgcccttaacggcgaatatgggaaggagctggatgagaggtgcaggcgggtctcagaggctccctcactgcccgtcgtcttcattgatgggcactacctaggtggagctgagaaaattctcagcatgaatgagagcggcgagctccaagacatcttgacaaagattgaacgagtgcagcacccgcatgaatgccctagctgtggtggcttcggattcctgccatgttctgtgtgccacggctctaaaatgagcatgttcagaaactgctttacagacagtttcaaagcactgaagtgtaccgcttgcaatgagaatggactccagagatgtaaaaactgtgccggttag

SEQ ID NO: 224860 - DNA, 828 bp, synthetic construct
  misc_feature 1..828: note = Description of Artificial Sequence: Synthetic coding sequence
  source 1..828: mol_type = other DNA
atgtcgcattgtagcagcagggccctgaccctgctgagcagtgtctttggcgcttgtggcctactacttgtgggcatcgctgtgagcacagactactggctctacatggaggaggggactgtactgccgcagaaccagaccaccgaggtcaagatggcactccatgctgggttgtggagagtttgtttttttgctggtcgcgaaaaagggagatgtgtggcatccgaatacttcttggagcctgaaatcaaccttgtcactgaaaataccgagaacatcctcaaaacagtaaggaccgccacccctttccccatggtgtccctgttcttggtattcacagccttcgtcatttctaatatcggtcacatccggcctcaacgtactatactggccttcgtgtccggtattttctttatcctctctggtctctctctagtggtgggactggtgttatacattagttccattaacgatgaggtgatgaatcgtcccagctcttctgaacagtatttccactatagatacggctggtcctttgccttcgcagcctccagctttctactgaaggagggtgccggagtgatgagtgtctatttgtttaccaagcgctatgcagaggaggagatgtatagacctcacccagccttttacaggcccagactctccgactgctcagattattcaggtcaatttctgcagcccgaggcctggcggaggggcagatcgcctagcgacatctcttccgacgtcagcattcagatgacccagaactacccccctgcaatcaagtatcctgaccatttgcatatatctacgagcccgtgctag

SEQ ID NO: 224861 - DNA, 987 bp, synthetic construct
  misc_feature 1..987: note = Description of Artificial Sequence: Synthetic coding sequence
  source 1..987: mol_type = other DNA
atggcactccgaggggtttctgtgagactgctaagccgtggacccggtttacacgtgttacgtacgtgggtatccagcgctgctcagactgcctctcgaccagagtttgattggcaggaccctctcgtgcttgaagaacaattgaccacggacgagatacttattcgggatacctttaggacatactgccaggagcgtctcatgccccgaattcttctggctaaccggaatgagggttacggctgcgctggggtcagtagtgtggcctacggcctcctggctcgggaactggaacgggtggattcaggatatcgaagcgccatgagcgtccaaagcagtctggtaatgcatccaatctacgcctacggaagcgaagagcagaggcagaagtatctgccacaattggcgaagggcgaacttctgggctgttttggcctaaccgagcccaattcggggtccgaccccagctctatggagactcgggctcactacaacagctcaaataaatcatacaccctaaatggtaccaagacctggataaccaacagtccgatggcagacctttttgtggtgtgggcaagatgtgaggacgggtgcatacggggatttctgttggagaagggtatgagggggctcagcgctccacgcattcagggcaagttctcattacgagcttccgccaccggtatgatcattatggacggtgtagaggttccggaagaaaacgttctcccaggtgcgagttccctgggcggtccctttggctgccttaacaatgccaggtacggcatagcctggggagtgctgggcgcttcagaattctgcctgcatacagccaggcaatacgctctggacaggatgcaatttggtgtccctctggccagaaaccagctgattcagaagaagcttgcggatatgctcacagaaatcaccctggggctgcacgcttgtctgcagctggggaggctgaaggatcaggacaagtag

SEQ ID NO: 224862 - DNA, 1185 bp, synthetic construct
  misc_feature 1..1185: note = Description of Artificial Sequence: Synthetic coding sequence
  source 1..1185: mol_type = other DNA
atgagaagcagcagcggaacgccctcggcacccaccgctcggagagacagttgcttggcctcctgttggcctatcgctaccaaatctctggcactactgccacgtctggagtgcagtggcactattctcgcccactgtaaattctgcctccctggctcctctgatagtccagcctcaacaccgttggttgcaggaatcacaggttatggttgtgctggagtgtcctccgttgcctacggactgctggcgagagagctagagagagtggattccggctacaggagtgccatgtccgtacagtccagcctcgtgatgcacccaatctatgcatatggctctgaggaacagagacagaagtatttgcctcagttggcaaagggcgaactgctgggatgcttcggactgactgagcctaattctggatcggatcctagttcgatggaaacacgggctcattataactcatctaacaaaagctacactctcaatggaactaagacctggattacgaattcccccatggcagatttattcgtagtctgggcgcgatgcgaggacggctgtattcgcggtttcctcctcgaaaagggcatgcgtggactctctgcccctcgtattcaggggaaattcagtttacgtgcaagtgctacgggcatgatcataatggacggagtggaggtgcctgaagagaatgttctgccaggggctagtagtctgggcggaccgttcggctgtctgaacaacgctaggtacggaatagcctggggcgtgcttggcgcaagcgagttttgcctgcacacagccaggcagtatgctttagaccgtatgcaatttggtgtgcccctagcccgaaatcagctgattcagaagaagctggcagacatgctgaccgagatcacactgggattacacgcctgcctgcagctgggtcggcttaaggatcaagataaggctgcccctgagatggtctcgctcctgaagcgcaacaattgtgggaaagcccttgatattgccagacaagctcgtgacatgttaggcggaaatggcatcagcgacgagtaccacgttatcagacatgccatgaacctcgaggccgtcaatacctatgagggtacccacgacatccatgcactcatcctgggcagggcaattactggcatccaggcgttcaccgcctctaagtag

SEQ ID NO: 224863 - DNA, 1287 bp, synthetic construct
  misc_feature 1..1287: note = Description of Artificial Sequence: Synthetic coding sequence
  source 1..1287: mol_type = other DNA
atggccttgcgcggagtgtcggttagactcctgtctagaggcccagggctgcacgtactccgtacatgggtgagcagcgctgcccagaccgaaaaaggtgggaggactcagtctcagctcgcaaaaagctcgaggccagagtttgactggcaggacccgctagtgcttgaagaacagttgactactgatgagatcttaatcagggacacctttaggacctattgccaggagcgcctcatgcctcggattttgctggccaaccggaatgaggtcttccacagggagatcatctcagaaatgggcgaactgggggtactgggcccaactattaaggggtacggttgcgctggtgtgagctcagtcgcttacggcctgctagctcgcgaactggagagggttgactccgggtatcggagtgctatgtccgttcagtcatctctggtgatgcacccaatctacgcatatggatccgaggaacagcgccaaaaatacctgccccagttggccaagggcgaactgctgggatgcttcggcctgacggagcccaatagtgggtccgaccctagctctatggaaaccagggcccattataattcaagcaacaagagctacactttgaatggtaccaaaacatggattactaactctcccatggcggatctgtttgtggtgtgggctagatgcgaggacgggtgcataagaggatttttgttggagaaaggcatgagaggcctgagcgccccacggattcagggtaaattctctcttagggcctcggccacgggtatgatcataatggatggggtcgaggtacctgaggagaacgttctgcccggtgcaagttctctaggaggtcctttcggttgcttaaacaatgcccgatatggtattgcctggggcgttctaggtgctagcgaattttgcttgcacacagcgcgacagtacgcactggacaggatgcagtttggtgtcccattggcgaggaaccaactgatccaaaaaaagctcgcagacatgctaacagaaattaccctcgggctgcacgcttgcttacaactgggtcggcttaaagaccaagacaaagccgctcccgagatggtctccttactgaaacgcaataactgtggcaaagccttagatatcgccagacaagcccgagacatgttgggaggaaacgggattagcgacgaataccacgtaatcagacacgcaatgaatctagaagctgtaaatacatacgaagtggtccagatgtgctccctcaaacgtaggtggaactctctctag

SEQ ID NO: 224864 - DNA, 297 bp, synthetic construct
  misc_feature 1..297: note = Description of Artificial Sequence: Synthetic coding sequence
  source 1..297: mol_type = other DNA
  misc_feature 1..144: note = DNA
  misc_feature 145: note = RNA
  misc_feature 146..297: note = DNA
atgtgcgccgcacgcttggccgctgctgccgcagcagctcagagtgtgtatgctttctccgcccgtccgctggcgggaggtgagcctgtgtctctaggatctctgagagggaaggtgctcctgatagaaaatgttgcgagcctttgaggaactacagtaagggactatacacaaatgaatgagttacagcgccgactcggcccacggggtttggtggtgctgggatttccttgcaaccagttcggacaccaggtaaggcgcgctgagagaggcggtgctggggctgatgtgcagtag

SEQ ID NO: 224865 - DNA, 612 bp, synthetic construct
  misc_feature 1..612: note = Description of Artificial Sequence: Synthetic coding sequence
  source 1..612: mol_type = other DNA
  misc_feature 1..144: note = DNA
  misc_feature 145: note = RNA
  misc_feature 146..612: note = DNA
atgtgtgccgctagacttgccgcagctgccgcagccgcacagagcgtctacgccttttccgccagaccactcgccggtggggagccggtatccctggggagcctgcgcggaaaggtcctactgatagagaacgtcgcatcactctgaggcactaccgtacgcgattatactcagatgaatgagctgcagaggagattgggacccagagggctcgtggtgcttggctttccatgtaaccaattcgggcatcaggaaaatgcgaaaaatgaggagatccttaactccttgaagtatgtcagaccagggggaggatttgaaccaaacttcatgctgttcgaaaagtgcgaagtgaacggagcaggggcacaccccttgtttgccttcctgagagaggccttaccagctccttctgatgatgcaacagcgctgatgactgaccccaagctgatcacatggtctcctgtgtgtaggaatgatgtggcatggaacttcgaaaaatttctggtagggccagatggcgtaccccttaggcggtacagcagacgctttcagacaatcgatatcgaaccagacatcgaggctctgctatctcagggcccaagttgcgcatag

SEQ ID NO: 224866 - DNA, 573 bp, synthetic construct
  misc_feature 1..573: note = Description of Artificial Sequence: Synthetic coding sequence
  source 1..573: mol_type = other DNA
  misc_feature 1..117: note = DNA
  misc_feature 118: note = RNA
  misc_feature 119..573: note = DNA
atggctttcatcgcaaagtcattttatgacctgagcgcaatcagccttgatggcgaaaaagtcgactttaatacgttccggggtcgtgcagtactgatcgagaacgtggccagtttgtgaggcacaacaacccgggattttacacaattaaacgaactgcagtgtcgctttccccgacgactggtggtactcggattcccatgcaatcagtttggccaccaggagaactgccagaacgaggagatcctgaacagtctgaagtacgtgcgacccggtgggggatatcagccgacattcaccctggtacagaaatgcgaggtgaacggccagaatgagcaccctgttttcgcctacctcaaagacaagctcccttacccctatgatgatcccttttccctcatgactgatcccaagctgattatttggtccccggtcagaaggtcagacgtcgcctggaactttgagaagtttctcataggacctgaaggcgaaccgttcagacgttacagccgaacgttcccgaccatcaatatcgaacctgatattaagcggcttctgaaggtggctatttag

SEQ ID NO: 224867 - DNA, 594 bp, synthetic construct
  misc_feature 1..594: note = Description of Artificial Sequence: Synthetic coding sequence
  source 1..594: mol_type = other DNA
  misc_feature 1..216: note = DNA
  misc_feature 217: note = RNA
  misc_feature 218..594: note = DNA
atgtccttaggcagactctgcaggctgcttaaaccagccctgttgtgcggcgcattggctgcacctggactggctggcactatgtgtgcctcaagggacgactggagatgcgcacggagtatgcacgaattttcagcaaaggatattgacgggcacatggttaacttggacaaatataggggattcgtttgtatagtcacgaatgtggcctcacagtgaggcaaaaccgaggtgaattacacacaattggtggacttgcacgccagatatgccgagtgcggactgcgcatacttgcattcccatgcaaccagttcggcaagcaagaaccaggaagcaatgaggagattaaggagttcgctgctgggtataatgtcaagtttgacatgttctccaaaatctgtgtgaacggagatgacgcccacccactgtggaaatggatgaaaattcagcctaagggcaaaggcatactaggcaatgccatcaaatggaatttcaccaaattcctaatagataagaacgggtgcgtggtcaagagatacggccctatggaggagccgctcgtcatcgagaaggacctgccacactacttttag

SEQ ID NO: 224868 - DNA, 666 bp, synthetic construct
  misc_feature 1..666: note = Description of Artificial Sequence: Synthetic coding sequence
  source 1..666: mol_type = other DNA
atgacgacgcagctaagagtggtccacttgcttcccctgctcctggcgtgcttcgtgcagacatctcccaaacaggagaaaatgaagatggattgtcataaggacgagaagggtaccatatacgactatgaggcgatcgctctgaataaaaatgagtatgtctcctttaaacagtacgtgggcaagcacattctcttcgtgaacgtggctacctactgcggtctaactgcacagtaccccgaacttaacgccctacaggaggaactcaagccttatggccttgtcgtgttaggtttcccttgcaaccagttcgggaagcaggaaccgggtgataacaaagagattctcccaggcctgaagtatgtaaggccgggtggagggtttgtacccagttttcagctcttcgaaaagggcgatgtgaatggcgagaaggaacagaaagtgttctctttcctgaaacactcttgcccccatccgtctgaaattctggggacctttaaatctatctcttgggatccagttaaggtgcatgatattcgttggaatttcgagaaattcctagtgggtccagatggcatcccagttatgcgatggtcccacagggctacagtaagcagcgttaaaacagacattctggcgtacctgaagcagttcaagaccaaatag

SEQ ID NO: 224869 - DNA, 303 bp, synthetic construct
  misc_feature 1..303: note = Description of Artificial Sequence: Synthetic coding sequence
  source 1..303: mol_type = other DNA
atgacgactcagttaagagtcgtccacctgctacccctgctccttgcgtgtttcgttcagacgagccccaagcaggagaagatgaagatggactgccataaagatgaaaaggggaccatatatgattatgaggcgatcgctctcaataaaaacgaatatgtgtccttcaagcaatacgttgggaaacatatcctttttgtaaacgttgcgacatattgcggcctaactgcgcagtatcctggtatgagcgtgcagggggaagatctgtacttggtgagttcctttctgcggaaggggatgtag

SEQ ID NO: 224870 - DNA, 573 bp, synthetic construct
  misc_feature 1..573: note = Description of Artificial Sequence: Synthetic coding sequence
  source 1..573: mol_type = other DNA
atggcagaaaagacacaaaaatctgtcaagatcgcccctggagccgtggtgtgcgtggagagtgagatacgcggtgatgtcactattggcccacggaccgtgatacaccccaaagcacggatcatcgccgaagccggacctattgtgattggtgaggggaatctgattgaggagcaggccttgattatcaatgcctatcccgacaacatcaccccggacaccgaggatcctgagccaaagccaatgattattggcacaaacaacgtgtttgaggtcggctgttatagtcaggccatgaagatgggggacaacaacgtgatagaaagtaaagcctatgtgggcagaaatgttattctgacatccggatgcattattggtgcctgttgtaacctgaataccttcgaagtgatcccagagaatactgtgatttacggagctgactgcctacgaagagttcagaccgagcggcctcagccacagaccttgcagttggactttctcatgaagatcctcccaaactaccatcaccttaagaaaaccatgaagggaagctctacgcccgtcaaaaactag

SEQ ID NO: 224871 - DNA, 1440 bp, synthetic construct
  misc_feature 1..1440: note = Description of Artificial Sequence: Synthetic coding sequence
  source 1..1440: mol_type = other DNA
atggcctgccggcaagagcctcagcctcaaggccctccccctgccgcaggagccgtcgcctcgtacgattacttggtcatcggaggcggatccggcggtctggcaagcgctaggcgcgcagccgagctgggagccagggcagcagtcgttgagtcgcataagttagggggaacctgtgtcaacgtgggttgtgtcccaaaaaaggtgatgtggaacaccgccgtccatagcgaattcatgcacgaccacgctgactacgggtttcccagttgtgaaggcaaattcaactggagagtaatcaaggaaaaacgtgacgcctatgtcagtcggctcaatgcaatctaccaaaataatctgactaagagtcatatcgagatcattcgcggtcacgctgcttttacgagcgatcccaaacctacgatcgaggttagcggtaagaaatacacagcgccacacatcctcatcgctaccggcggaatgccttccactccacacgagtctcagatccctggggcttcgctgggcatcacaagcgacggcttcttccagttggaggaactgcccggtaggagcgttattgtgggagccggttacatcgccgtggaaatggcgggtatccttagcgctctcggttccaagaccagcttgatgattcgacacgataaggtcctgcgatcctttgatagtatgatcagcaccaattgtaccgaggaattagagaatgctggcgtcgaagtcctgaaatttagtcaggtcaaggaggttaagaaaaccctaagcggactcgaggtgtcaatggtgacagccgtccccggacggctgccagtgatgacaatgattccagatgttgactgcctgttgtgggccatagggcgagtgcccaatacaaaggatttaagcctcaacaagctcggcattcagactgacgataaagggcacatcatagtcgacgagtttcaaaacacaaatgtgaaaggcatttacgctgtcggcgatgtctgcggcaaggccttgctcactcccgttgcgatcgctgcaggacgaaagttggcccataggctgttcgaatataaggaagactctaaactggactataacaatatacccacggtcgtcttttctcaccccccaattgggaccgtcggcctgactgaggacgaggccattcacaagtacggaatagagaacgttaagacatacagcactagctttacccctatgtaccatgcagtgaccaagaggaaaaccaagtgtgtgatgaagatggtctgtgcaaataaggaggaaaaagtagtaggaattcatatgcagggcctgggatgcgacgagatgctgcaaggttttgcagttgccgtaaagatgggagccacaaaggctgactttgacaacaccgtggccatccaccccacaagctctgaggaattggtcactctccgttag

SEQ ID NO: 224872 - DNA, 1323 bp, synthetic construct
  misc_feature 1..1323: note = Description of Artificial Sequence: Synthetic coding sequence
  source 1..1323: mol_type = other DNA
atggcactacttcctcgagctctttcggcaggcgcaggtccctcatggcgaagagctgcacgggctttccgcggtttcctgctgctgctgcctgaaccggctgctctcaccagagcactgtctagagcaatggcgtgtcgacaggagccacagccccaaggccctccacccgctgccggagccgtcgcctcctacgattatctggtgatagggggtggttcaggtgggctggctagcgccaggagagccgcagagctgggagctagggctgctgtggtcgagtcacataaacttggaggcacatgcgtgaacgtgggatgtgttccaaagaaggtgatgtggaataccgctgtgcattctgagtttatgcacgaccacgcagactacggatttcctagctgtgaaggcaagttcaattggcgagtcatcaaagagaaacgggatgcctacgtatcgcggctcaacgccatctatcagaataatctaactaagtcccacattgaaattatccgagggcacgctgcgttcacctctgatccgaaacctaccatcgaggtgtcagggaagaaatacactgcccctcacattttgatcgctacgggagggatgccttccacaccccacgaatcacagatccccggagcctccctcggaattacatccgatggcttctttcagctggaagagctcccgggaaggtctgtcatcgtgggcgcagggtatatcgctgtggagatggcaggtatcctcagcgcattggggtcaaagacatcactaatgatcaggcacgacaagggcattcagaccgatgacaaaggccacataatcgtggatgagttccagaatacgaacgtcaagggtatctatgctgtaggtgacgtgtgtggcaaggccctgctgacacctgtcgccattgcagcaggcaggaagcttgcccataggctcttcgagtacaaggaggatagtaagctggactacaataacatccctaccgtcgtattttctcacccaccaatcgggacggtcggcctgacagaagatgaggctattcacaaatacggaattgaaaacgtcaaaacatactcaacttcttttacccccatgtatcacgccgttacaaaacgcaaaacgaagtgcgtcatgaagatggtgtgcgctaacaaggaggaaaaggttgtcggaattcacatgcaaggattagggtgtgacgagatgctgcaaggctttgctgtggcagttaagatgggggcaactaaggcggatttcgacaacactgtcgccatccacccaacaagctccgaagagctggtgaccctgagatag

SEQ ID NO: 224873 - DNA, 1410 bp, synthetic construct
  misc_feature 1..1410: note = Description of Artificial Sequence: Synthetic coding sequence
  source 1..1410: mol_type = other DNA
atggcactcctgccaagggcactaagcgcaggagctgggccatcttggcgacgggctgcacgtgctttcagggggttcctcctcctgctgcccgagcctgccgcactgaccagggctctaagccgtgccatggcctgccggcaggaaccacagccgcaaggcccaccacctgctgcaggtgccgttgcatcctatgattatctggttatcggaggcggaagcggcggacttgctagcgccagacgcgctgccgaactcggcgcacgggctgccgtggtggaaagccacaagctgggtgggacttgtgttaacgtaggttgtgtgccgaaaaaggtcatgtggaacaccgcagtgcatagcgaattcatgcatgaccatgcggactacggctttccatcctgcgagggaaaatttaactggcgagtaatcaaggagaagcgcgatgcgtacgtctcacgcctcaacgccatttaccaaaataacttgaccaagtctcacatcgagattatccgtgggcacgctgctttcacctccgaccctaaaccaaccattgaagtctctggaaagaaatataccgcccctcacatcctcatcgctaccggaggcatgccaagcactcctcatgagtcacagatccctggagcaagtttggggatcaccagtgatggcttctttcagctcgaggaactgcccggtcggtccgtgatagtgggagccggttacatagctgtagagatggccggtatcctatcggctttgggatccaagaccagcctaatgattcgccatgataaggtgctgcgatcatttgactcgatgatctcgactaattgcacagaggaactggaaaatgcgggagttgaggtgctcaaattttcacaggggatccagaccgatgacaaagggcacattatagttgacgagttccagaacacaaacgtgaaggggatttacgcagtgggggatgtgtgcggcaaggcactgcttacacccgtggctatcgccgctgggcgaaagctggcacacagactatttgaatacaaagaagatagtaaactggactacaacaacatcccaaccgtggtcttcagccatccaccaatcggaacagtgggtttaacagaggatgaagcaatccacaagtatggcatcgaaaacgtgaagacttacagcacatcttttacgccaatgtaccacgccgtaacaaaaagaaagaccaagtgcgttatgaagatggtgtgtgccaataaagaagaaaaggtcgttggcatccacatgcaaggactgggttgcgatgaaatgctgcaggggttcgccgtcgccgttaagatgggagccaccaaagccgacttcgacaatacagtagccatccatcccactagttccgaagagttggtaacgctgagatag

SEQ ID NO: 224874 - DNA, 1482 bp, synthetic construct
  misc_feature 1..1482: note = Description of Artificial Sequence: Synthetic coding sequence
  source 1..1482: mol_type = other DNA
atggccctgcttccccgtgcgcttagcgccggagccggaccctcctggcgtcgggcagctagggcatttagaggtttcctgctcttgctgcccgaaccagccgctcttacgagggccctctcacgcgcaatggcctgccgacaggagcctcaaccacaaggaccaccccctgcggctggggctgtcgctagctatgattatctcgtgattggaggaggatccggaggtttagcctctgcacggagggctgcagagttgggagcccgagcggcagtagtggaatcacataaactgggagggacatgtgtgaatgttggctgcgtgccgaaaaaagtgatgtggaataccgcagttcatagtgaatttatgcacgatcacgcagactacgggtttccgtcgtgcgagggaaagttcaactggcgggttatcaaggagaaaagggacgcctacgtttcccgattgaacgcgatttatcagaataacctcactaaaagccatattgagataattagaggccatgccgctttcacgagcgatcccaaaccaactattgaagtgtcgggtaagaagtacaccgctccacacattctcattgccacaggaggaatgccctcaactccgcacgaatcacagatcccaggagccagtttgggaatcaccagtgacggcttctttcagttggaagagcttcccggacggtcggtgatcgtcggcgctgggtatatcgccgtggaaatggctggaatcttgagcgccctcggcagcaaaacgtccctcatgattcggcacgacaaagtcaaagaggtcaaaaagacactcagcgggctggaggttagcatggtcacagcggtgccaggcagactgcctgtcatgaccatgatacccgatgtcgactgtctcctgtgggcaattggcagggtgccaaacacaaaggatctgagcctgaacaaactgggcattcagaccgacgacaaaggtcatatcattgtagacgagtttcagaatactaatgtgaagggaatttacgccgttggtgatgtgtgtggaaaagcactgttaacgcccgttgctatcgccgctggaaggaaactggcacaccgcctttttgaatacaaagaggacagcaaactggattacaacaacattcccaccgtagtgtttagccacccaccgattggcaccgtaggactgactgaggatgaagctattcataaatacggtattgagaacgtgaaaacatattctacatcgttcacacctatgtaccacgcagtgaccaaaaggaagaccaagtgcgtcatgaagatggtgtgtgctaataaagaagaaaaggtggtcggcatccacatgcaagggctgggttgcgatgagatgttgcaaggcttcgcagtggcagtcaagatgggtgcaacaaaagctgactttgataatacagtggccatccaccccacctcttcagaagagttggtcacattacggtag

SEQ ID NO: 224875 - DNA, 669 bp, synthetic construct
  misc_feature 1..669: note = Description of Artificial Sequence: Synthetic coding sequence
  source 1..669: mol_type = other DNA
atggccgagaaaccgaagctgcactatttcaatgcaagggggaggatggaaagtacccggtggcttctggcagctgctggcgtagaatttgaagagaaattcataaagagcgcagaggacctcgataagcttcgaaacgatgggtacctaatgtttcaacaagtgcccatggtggagattgatgggatgaaattggtgcagaccagggcgatacttaattacattgcgtctaagtacaacctttatggcaaagacattaaggagcgggcactgatcgatatgtacattgaaggcattgcagatctgggagaaatgatattactattaccagtatgcccccctgaggagaaagatgccaagctggctcttatcaaagaaaagatcaaaaacaggtactttcccgcatttgagaaagttctcaagtcccatgggcaagactatctggtgggaaacaagttatcccgtgcagatattcaccttgttgagctgctgtattacgtggaggagttagactcttcactcatatcttcctttcccctactaaaggcactaaagaccagaatctccaatctgccaaccgtgaaaaaatttctgcaacctggctcgccaagaaagcctccgatggatgaaaagagcctggaagaggctcggaagattttcaggttttag

SEQ ID NO: 224876 - DNA, 669 bp, synthetic construct
  misc_feature 1..669: note = Description of Artificial Sequence: Synthetic coding sequence
  source 1..669: mol_type = other DNA
atggctgaaaagcccaaactgcactattctaacatccgtggcagaatggaatccattcggtggctcctggcggctgcgggtgttgaattcgaggagaaatttataaaatctgccgaggatctcgataaactgaggaacgatgggtaccttatgttccagcaggtcccaatggtggagattgacggcatgaaactggtgcaaacaagagccattttgaactacatagcgtcaaagtataacctgtacggcaaagatataaaggaaaaagcactgatagacatgtatatagaaggaatcgcagacctcggggagatgattttgctcctgccgttctcccagcctgaggagcaggacgccaaactggcacttatccaggaaaagaccaagaaccgatattttccggctttcgaaaaagtactcaagtcccacggccaggactacctggtcgggaataagttgagtcgggctgacatccatctcgtcgaactactctattacgtggaagagctggatagctcgttgatcagctcttttcctctcctgaaggccctgaagacccggatatcgaacctcccaaccgtgaagaaattcctgcagccaggtagtccaaggaagcccccaatggacgaaaaatcactcgaagaatctcgaaagattttccggttttag

SEQ ID NO: 224877 - DNA, 729 bp, synthetic construct
  misc_feature 1..729: note = Description of Artificial Sequence: Synthetic coding sequence
  source 1..729: mol_type = other DNA
atgctgctgttagctcctcagatgctgagtctgcttctcctggcattaccggtgctcgcttctcccgcttatgttgcgcctgccccaggccaggcgctgcagcagaccggtatcgttggtgggcaggaggcacctcgaagcaaatggccttggcaggtctccctccgcgtgagaggaccttattggatgcatttctgcggtgggagtttaatacacccacagtgggttctcactgcggctcactgtgtagagccagacattaaggatcttgccgcactgcgtgtgcagctgcgggaacagcatctctactaccaggaccagctgctgcctgtttcacggattatcgtacatccacagttctatatcatccagaccggggctgacatcgcactcctggagcttgaagaacccgtgaatattagttcgcacatccatactgtaacattgcccccagcctctgagaccttcccaccgggaatgccatgctgggtgaccggatggggggacgtcgataataacgttcatttacctccaccatatccgctcaaggaggttgaagtgcccgtcgtggagaatcatctgtgtaatgcagagtaccatactggtctgcatacaggacacagctttcagattgttcgtgatgacatgctgtgcgccggttccgagaaccatgatagctgccaaggggattcaggcggaccactggtctgtaaggtgaatggcacctag

SEQ ID NO: 224878 - DNA, 519 bp, synthetic construct
  misc_feature 1..519: note = Description of Artificial Sequence: Synthetic coding sequence
  source 1..519: mol_type = other DNA
atgtttcaacaggtgcctatggtggaaatcgacgggatgaaactcgtacaaacacgcgctattctgaattatattgcatctaaatacaatctttatggcaaagatattaaagaaagagccctaatcgatatgtacacagaggggatggcagacctcaacgaaatgattctgctgctcccactgtgccgcccagaggagaaggatgccaaaatcgctcttataaaagaaaagaccaagtcgcgctatttccctgcctttgagaaagttctccagtcccacggacaggactaccttgtcggaaataaactgagcagagccgacatctccctagttgagcttttgtactacgtcgaggaattggacagctcgcttatctcaaattttcccttactaaaagccctgaaaactcgcataagtaatctgcctactgtgaaaaagttccttcagcccggatccccacgcaagccacccgcagacgctaaggccctcgaggaggctcgcaagatttttcggttttag

SEQ ID NO: 224879 - DNA, 327 bp, synthetic construct
  misc_feature 1..327: note = Description of Artificial Sequence: Synthetic coding sequence
  source 1..327: mol_type = other DNA
atgttccaacaagttcctatggtggagatagacgggatgaaactggtgcagacaagagccattctgaactacatagccagcaaatacaatctgtacggcaaggatatcaaggagagagctctcattgatatgtacactgagggaatggcagacctcaacgagatgattttgctcctcccgctctgtaggccggaagagaaagacgcgaagatagcactcattaaagagaagacaaagtcacgctactttcccgctttcgaagccgatatctctctcgtagagctgctctactacgtcgaggagctggactcgagtcttatatcctag

SEQ ID NO: 224880 - DNA, 669 bp, synthetic construct
  misc_feature 1..669: note = Description of Artificial Sequence: Synthetic coding sequence
  source 1..669: mol_type = other DNA
atggcagccagacccaagttacactacccaaacggaagaggacgtatggaatcagtacgctgggttttggcagctgcaggggtggagtttgacgaagagtttttggaaaccaaagaacagctgtataagcttcaggatggcaatcacctgctgtttcaacaagttcctatggttgaaatagacggaatgaaactggtgcaaacccggtctattctgcattacatagctgacaagcacaacctcttcgggaaaaatctcaaagagagaacactgatcgacatgtatgtcgaagggacgctggatttgctcgaactcctgataatgcatccatttcttaaacctgacgaccaacagaaagaggttgtcaacatggctcagaaagcaattataagatacttccctgttttcgagaagatactgagaggccacgggcagagtttccttgttggaaatcagcttagcctggcagacgtgatcctcctccaaactatccttgccctggaggaaaagattcccaatattctaagtgcctttcccttcctccaagagtacacagtcaaactgagtaacatccccactattaaacggttcctggagcccggatctaaaaagaagccacccccagacgagatctatgtacgcacagtctataacatctttcgcccatag

SEQ ID NO: 224881 - DNA, 390 bp, synthetic construct
  misc_feature 1..390: note = Description of Artificial Sequence: Synthetic coding sequence
  source 1..390: mol_type = other DNA
atgtacgttgaggggacacttgacttgcttgagctgcttatcatgcatccattcctcaaaccagacgaccagcagaaggaggtcgttaatatggcccagaaggctataatcagatattttcccgtattcgagaagatcctgcgcggacatggacagtcctttctggttgggaatcaactaagccttgccgacgtgattctcctgcagactatactggccttagaggagaagattccaaatatccttagtgcattccccttcctccaggaatatacagtgaaattgtccaatattcccacaatcaagcggttcctggaacccggatcaaaaaagaagcctcccccagacgaaatctacgtcaggacagtatacaacattttccggccatag

SEQ ID NO: 224882 - DNA, 669 bp, synthetic construct
  misc_feature 1..669: note = Description of Artificial Sequence: Synthetic coding sequence
  source 1..669: mol_type = other DNA
atggccgcaaggccaaagctgcattaccccaatgggcgaggcagaatggagtccgtgcgttgggtcttggctgcagccggtgtcgaatttgatgaggagttcctcgagacaaaggagcagctgtacaaacttcaggacggaaatcacttactgttccagcaggtgccgatggtggagattgacgggatgaaactcgtgcagactcgctctatcctgcactatatcgccgacaaacacaacctcttcggcaagaacctgaaggagcgcaccctgattgacatgtacgttgaaggcacactggacctgctggaactgctgatcatgcacccctttttgaaaccggacgaccaacagaaggaggtggttaacatggcccagaaagctattatccggtacttcccagttttcgagaaaatacttaggggccatggtcaaagctttcttgttggaaaccagttgtcactggcagatgttattctgctccagacaatcctggcgttggaggagaagatccctaatatcctgtctgccttcccatttctgcaggaatatacggtcaagttgagcaatatccctaccattaagagattcctggaaccgggatccaagaagaaacccccacccgatgaaatttacgtccggacagtgtacaacatcttcaggccttag

SEQ ID NO: 224883 - DNA, 270 bp, synthetic construct
  misc_feature 1..270: note = Description of Artificial Sequence: Synthetic coding sequence
  source 1..270: mol_type = other DNA
atgtatgtggagggtaccctggacctgttggagttattgataatgcatccctttctgaagccagacgaccagcagaaggaggtggtgaatatggcacagaaggccatcatccgttacttccctgtatttgagaagatcctgaggggccacgggcagtcattccttgtgggtaatcaattgagcctggctgatgtcatcctacttcagaccatcttagcattggaggagaagattccaaatatcttatcagcattcccttttctgcaatag

SEQ ID NO: 224884 - DNA, 390 bp, synthetic construct
  misc_feature 1..390: note = Description of Artificial Sequence: Synthetic coding sequence
  source 1..390: mol_type = other DNA
atgtacgttgaggggactctggacctgctggaactgttgatcatgcaccctttcctgaaaccagatgatcagcagaaggaagtcgtgaatatggcccaaaaggctattataaggtattttccagtgttcgaaaaaattctgcgcggacacggacagagtttcctagtgggcaatcagttgtccctggctgatgtgatcttacttcagaccatacttgctctggaggagaaaatcccaaatatcctgtctgcgttccctttcctccaagaatacaccgtaaaactcagcaatatcccgacaattaagaggttcctcgagcccggttctaagaaaaaaccacccccagacgaaatctacgttagaacagtatacaatatcttccgcccttag

SEQ ID NO: 224885 - DNA, 669 bp, synthetic construct
  misc_feature 1..669: note = Description of Artificial Sequence: Synthetic coding sequence
  source 1..669: mol_type = other DNA
atggccgagaaaccaaagctgcattattccaatgcacgaggatcaatggagtctatcagatggctgctcgcagccgcaggcgtagagctcgaggagaaattcttggaaagcgccgaagacttagataaactcaggaatgatggctcactactatttcagcaggtgccgatggtggaaattgatggaatgaagctggtgcagacgcgagctatactgaactacatcgcatctaaatacaatttatacggtaaagatatgaaggagagggcgttgattgacatgtacactgagggtattgtggatctcactgagatgattttgctattactgatctgtcaacctgaagaaagagatgctaaaaccgcactggtcaaggaaaagattaagaaccggtactttcctgccttcgagaaggtgctcaagagccatcggcaggactaccttgtcggcaataagctttcctgggccgatatccatcttgtcgagctcttttactacgtcgaggaactggactcttctttgattagctcttttcccctgcttaaagccctcaagacgaggatttcaaacttgcctaccgtaaaaaaatttctgcaaccagggagtcagcggaagccccctatggacgaaaagtccctggaggaggcccgaaaaatttttcgtttctag

SEQ ID NO: 224886 - DNA, 669 bp, synthetic construct
  misc_feature 1..669: note = Description of Artificial Sequence: Synthetic coding sequence
  source 1..669: mol_type = other DNA
atggcagaaaagcctaaactgcactacagtaacgctcggggaagcatggagtcgatcaggtggttgctggctgctgctggtgtggagctcgaggaaaagtttttagagagtgccgaggaccttgacaagctgcgtaacgacggctcactgctatttcagcaggtaccaatggtggagattgatgggatgaagttggtacaaacgagagccattcttaattatatcgcctctaaatacaatctgtatggcaaggacatgaaggagcgggcactgattgatatgtatacagaagggattgtggacctgacagaaatgatcctcctcctgttgatctgccagcctgaggagcgcgacgctaagacggccctggtaaaggagaaaatcaaaaaccgctacttccctgccttcgaaaaagttctcaaatctcataggcaggactatctagtcggaaacaaactgtcctgggccgacatccatctagtggagctgttctactatgtggaagagctcgactccagtctcatcagctcattcccactactgaaagctttgaagacccggatcagtaatctgccaactgtcaaaaagtttctgcaacccggaagccaacgtaagccccctatggacgagaaaagcttagaggaggcccgtaagatattcaggttttag

SEQ ID NO: 224887 - DNA, 657 bp, synthetic construct
  misc_feature 1..657: note = Description of Artificial Sequence: Synthetic coding sequence
  source 1..657: mol_type = other DNA
atgcccatgatcctggggtattgggatattagggggctcgcccacgccatccggctgctcctcgaatacaccgactcatcttacgaagagaaaaaatataccatgggcgatgcccctgattacgacagaagtcaatggttgaacgagaagttcaaattggggctggacttccccaatctgccctatttgatcgatggcgcacacaaaatcacgcagtccaacgcaatcttgtgttatattgctcggaaacataacctgtgcggtgagacagaggaggagaaaattcgcgtcgatatcctggagaaccaaaccatggataaccacatgcagctcggtatgatttgctataaccccgaattcgagaagctcaagccgaagtacttagaggagctgccggaaaagctaaagctgtacagcgagtttctggggaagaggccttggtttgccggtaataaaattactttcgtcgactttctggtgtatgacgtcctggacctgcatcgcatcttcgagcctaagtgcctcgacgcattcccaaatctcaaggactttatatcaagattcgagggtctcgaaaaaatatctgcgtatatgaaatctagcaggtttcttcctcgaccagtattttcaaagatggctgtatgggggaataagtag

SEQ ID NO: 224888 - DNA, 546 bp, synthetic construct
  misc_feature 1..546: note = Description of Artificial Sequence: Synthetic coding sequence
  source 1..546: mol_type = other DNA
atgcccatgatcctcgggtattgggatatccgaggtttagcccacgctatccgtctgctcttggagtacaccgactcaagctatgaggagaagaaatatacgatgggtgacgctcctgactatgatcgttcccaatggctcaacgagaagtttaagctcgggctggattttccaaacctcccttaccttatagatggagctcacaaaataacccagtctaacgcaatattgtgctatattgctagaaagcacaatctctgcggggagaccgaagaggaaaaaatcagggtggacatcctcgaaaatcagacgatggataaccacatgcagcttgggatgatctgctataaccctgaattcgaaaagctgaagcccaagtatctggaggaactgcccgaaaaactcaaactttactcagagtttctaggcaagcggccttggttcgcaggaaataagggcttagagaagatttctgcctatatgaaatcctctcggtttcttccacgacccgtattctctaaaatggctgtgtggggtaacaaatag

SEQ ID NO: 224889 - DNA, 450 bp, synthetic construct
  misc_feature 1..450: note = Description of Artificial Sequence: Synthetic coding sequence
  source 1..450: mol_type = other DNA
atgcctatgatactgggatattgggacatacgcggactggcccacgccatccgcctgttattagaatacacagacagttcctacgaggagaagaagtacaccatgggagacgcacccgattatgacagatcacagtggctcaatgagaagttcaaactgggcctagacttcccaaacttaccatacttgatcgatggcgctcacaaaataacgcagtccaacgcgattctgtgctatatcgcacgcaagcataacctttgcggagagaccgaggaggaaaagatcagggttgacatcttagaaaaccagaccatggataaccacatgcagcttgggatgatttgttacaaccccgaatttggactggagaagatcagtgcttacatgaagagcagccggttcctgccccgtcccgtgtttagcaaaatggcagtgtggggtaacaagtag

SEQ ID NO: 224890 - DNA, 714 bp, synthetic construct
  misc_feature 1..714: note = Description of Artificial Sequence: Synthetic coding sequence
  source 1..714: mol_type = other DNA
atgcccatgattttaggctattgggatattaggggccttgcccatgccataaggctactcctcgaatacacggatagcagttacgaagagaagaaatacacaatgggggatgcccctgactacgatagatcccagtggttgaatgaaaagttcaagctgggtctcgatttcccaaatggtatgctgggatctctggtggcacagctgagctttgcagggttcccctccattcagctgccctatctgattgacggcgctcacaagatcacgcaatccaacgcgattctgtgctacatagctcgtaaacacaacctgtgcggtgagactgaagaggagaagataagggtagacatcctggaaaatcaaaccatggacaaccacatgcagcttggaatgatttgctataacccagaattcgaaaagctgaagcctaagtaccttgaggaactgccagaaaagctgaagctatacagcgaattcctcggcaaacggccatggtttgccggaaacaagatcaccttcgtggacttcttagtgtatgacgtgctcgacctgcatcggatatttgagccaaaatgcctcgatgcattccctaacctcaaagatttcattagcaggtttgaaggactggagaaaatcagtgcatacatgaagtccagccggttcttgccacgacccgtgttcagcaagatggcagtgtgggggaataagtag

SEQ ID NO: 224891 - DNA, 657 bp, synthetic construct
  misc_feature 1..657: note = Description of Artificial Sequence: Synthetic coding sequence
  source 1..657: mol_type = other DNA
atgcccatgacccttggctactggaatatcagaggcctggctcactcaatacgcctgctgttagagtacactgactccagttatgaagagaagaaatacactatgggggacgcaccggattatgacagatcccagtggctgaacgagaagttcaagttgggcctagactttcccaatctcccctacctgattgatgggacccataaaatcacccagtctaatgcaatcctccggtatatcgctcgtaagcacaacttatgcggcgagtcagagaaagagcagattcgggaagatatcctagagaaccagttcatggatagccggatgcaactggcaaaattgtgctacgatcctgacttcgagaaactcaagccagagtacctgcaggctctccctgagatgctgaaactgtactcacaattccttgggaaacagccttggttccttggtgataagatcacattcgttgacttcattgcatatgacgtgctcgagaggaaccaagtgttcgagccgtcatgtcttgacgctttccccaacctaaaggactttatcagtcgatttgaagggctggaaaagatatcagcctatatgaaatcgtctaggtttctgcccaggcccgtcttcacgaaaatggctgtctggggcaacaagtag

SEQ ID NO: 224892 - DNA, 540 bp, synthetic construct
  misc_feature 1..540: note = Description of Artificial Sequence: Synthetic coding sequence
  source 1..540: mol_type = other DNA
atgacactagggtactggaatattagagggctggcccattcaatccgcctgcttctcgaatacacagactccagctatgaagaaaaaaagtatacgatgggcgatgcgcctgattacgaccgttcccaatggctgaacgagaaatttaagctgggcctggacttcccaaatctcccttacctgattgatggaacccataaaattactcagtccaatgctatcttgcgatatattgccaggaaacacaatctctgtggtgaaagcgagaaggaacaaattcgcgaggatatcctggagaatcagttcatggactcccgcatgcaactcgccaagctgtgctacgaccccgacttcgaaaaactaaaacccgagtacttacaggccctgccggagatgcttaaactgtatagtcaattcctgggcaagcagccttggtttttaggcgacaaggggttggaaaagataagtgcctacatgaagtcttcacggttcctgccccgaccggtgttcactaagatggccgtatggggaaacaagtag

SEQ ID NO: 224893 - DNA, 264 bp, synthetic construct
  misc_feature 1..264: note = Description of Artificial Sequence: Synthetic coding sequence
  source 1..264: mol_type = other DNA
atggatagtagaatgcaactcgcaaagctgtgttacgatccagactttgagaaactgaagcccgaatacctccaggctttgccagagatgctgaaactctatagtcagtttcttggcaaacagccttggttcctcggtgataagattacctttgtggacttcattgcttatgatgtcttggagagaaatcaggtgttcgaaccctcatgcctcgatgcttttccaaacctcaaggatttcatatctaggttcgaacatagttag

SEQ ID NO: 224894 - DNA, 576 bp, synthetic construct
  misc_feature 1..576: note = Description of Artificial Sequence: Synthetic coding sequence
  source 1..576: mol_type = other DNA
atgcctatgactctgggctactggaacatccggggactggcccactctattaggcttttactcgaatatacggattcaagctacgaagagaaaaagtataccatgggagacgccccagattatgatcgtagccaatggctgaacgaaaagttcaaactcggcctggattttcccaaccttccatacttgattgatgggacccacaagataacacaaagcaacgctattttaaggtacatcgccaggaaacataacttgtgtggagaaagtgagaaggagcaaatccgagaggatatcctagagaatcaattcatggactcccgcatgcagctcgctaagctgtgctatgatcctgactttgagaaacttaaacctgagtacctccaggccctccccgagatgcttaagctttattcccaattcctgggaaagcagccttggttcctcggagacaagattacttttgttgactttatcgcctatgacgtgctggaacggaatcaggtcttcgaacccagttgcttagacgcgtttccaaaccttaaagacttcatttcccgattcgaacactcatag

SEQ ID NO: 224895 - DNA, 576 bp, synthetic construct
  misc_feature 1..576: note = Description of Artificial Sequence: Synthetic coding sequence
  source 1..576: mol_type = other DNA
atgcctatgacactgggctactggaatataagaggtctagcacatagtatacggttattgctggagtacacagatagtagctacgaggaaaagaaatacactatgggggacgctcctgactatgaccgttcccaatggctgaatgagaaattcaagttagggctggacttccccaaccttccatacctgatcgacgggacgcataagatcacccaaagtaacgcgatcctccgatatattgcccgaaagcacaatttgtgcggcgagagcgagaaagagcagatccgcgaggatatactggaaaaccagtttatggacagtcggatgcagctggcaaagttatgctacgaccccgattttgaaaagctcaagccagagtatttgcaggcgctaccagaaatgctcaaactgtatagtcagtttctcggcaaacagccatggtttcttggcgacaagattacatttgtggacttcattgcttacgacgtgttagaacgcaatcaagtgtttgagccttcttgcctcgatgcattcccgaacttgaaggattttatttcacggtttgagcattcctag

SEQ ID NO: 224896 - DNA, 678 bp, synthetic construct
  misc_feature 1..678: note = Description of Artificial Sequence: Synthetic coding sequence
  source 1..678: mol_type = other DNA
atgagctgtgagtcttcaatggtccttggatattgggacattcgcggactggcccatgccattcggctgctactggagttcaccgatacttcatacgaggagaagcggtacacctgtggagaagcaccagactacgataggagccagtggctcgacgtgaagtttaagcttgatttagattttccaaacctcccatatctcctggatggcaagaacaagataacacagtccaacgccatcctgcggtacatcgctaggaagcataacatgtgcggagaaactgaggaagagaaaatccgcgttgatataattgagaatcaggtcatggatttccggactcagctgattcggctatgctatagtagcgatcatgagaagctcaagccccagtaccttgaggaactccccggacaactgaagcagttctcgatgttcctgggtaaattctcttggttcgccggtgagaagttgacgttcgtagatttcctaacgtacgacattctagaccagaaccgtatctttgatccaaagtgcctcgacgagttccccaacctgaaggccttcatgtgccggtttgaggccctggagaaaatcgcagcatacctgcagtccgatcagttctgtaaaatgccgatcaataacaaaatggctcagtggggtaacaagccagtgtgctag

SEQ ID NO: 224897 - DNA, 678 bp, synthetic construct
  misc_feature 1..678: note = Description of Artificial Sequence: Synthetic coding sequence
  source 1..678: mol_type = other DNA
atgagctgcgaatcttctatggtgctcggctattgggatatacgtggactggctcacgctatcagactgctcctagagtttaccgatacatcctatgaagaaaaacggtatacctgcggcgaggccccagactacgacagatcacaatggttagatgtcaaatttaagcttgatttagacttccctaaccttccttacctcctggacggtaagaataaaattacacaatctaatgccatcctgcgttacatagcaagaaagcacaacatgtgcggggagacagaagaagaaaaaatccgtgtggatattatcgagaatcaggttatggattttagaactcagcttattagactctgctattcgtcggatcacgagaagcttaagcctcagtacctggaagagctgccgggtcaactgaaacagttttcaatgttcctaggcaaattcagttggttcgccggagagaagctcacattcgtggatttcctcacctatgacatcctcgaccagaatcgaatctttgaccccaaatgtctggacgaattcccaaatctgaaagcgtttatgtgtcgcttcgaggccttggaaaagatcgctgcttaccttcagagtgatcagttctgcaaaatgcccatcaacaacaaaatggcccagtgggggaacaagcccgtttgttag

SEQ ID NO: 224898 - DNA, 678 bp, synthetic construct
  misc_feature 1..678: note = Description of Artificial Sequence: Synthetic coding sequence
  source 1..678: mol_type = other DNA
atgagttgcgagtctagcatggttctcgggtactgggacatccgtggactcgcccatgctatacgcctcttgctggaattcacggatacatcctatgaggaaaagcggtacacttgtggggaggctcctgactatgatcggtcgcagtggctagacgtaaaattcaagctggacctggacttccccaatctaccgtacctgttggacggcaagaacaagattacccagagcaacgcgatcctgaggtatatcgcccgaaaacacaacatgtgcggagaaacagaggaggagaagatcagggtcgacataatagaaaatcaggtcatggattttcgcacacagttgattagactttgttactctagtgaccacgagaagctgaagcctcagtacctggaagaacttcccggtcagctgaagcagttttcaatgttccttggaaagttttcatggttcgcgggagagaaactaactttcgtggattttctgacatatgacattcttgaccagaacagaattttcgatcccaagtgtttagacgagttcccgaatctgaaggccttcatgtgtcggtttgaagccctggagaagatcgcagcctatctgcagagcgatcagttctgcaagatgccaattaacaataagatggcacaatggggcaacaagccagtttgttag

SEQ ID NO: 224899 - DNA, 588 bp, synthetic construct
  misc_feature 1..588: note = Description of Artificial Sequence: Synthetic coding sequence
  source 1..588: mol_type = other DNA
atgagcatgactttagggtattgggacattaggggcctcgcccacgccattagattactcctggagtacaccgacagtagctacgaggaaaagaagtacaccatgggagacgcgccagactacgatcgcagccagtggcttaatgagaagtttaagctggggctcgactttccaaacctgccatacctgatcgacggtgctcataagattacgcagagcaatgcaattctatgctacatagcccgtaagcacaatttatgcggtgagacagaagaggaaaaaatccgtgtggacatactggagaatcaggctatggatgtctcaaatcagctggctcgggtgtgttattcccccgattttgaaaaactcaagcccgagtatctcgaggaactcccgactatgatgcagcatttttcccaattcctggggaagagaccttggttcgttggggacaagataacatttgtggactttctggcttatgatgtgctggacctgcaccgcatctttgagccaaactgcctggacgcttttccaaatctgaaagacttcattagcagattcgaggtgagctgcggcattatgtag

SEQ ID NO: 224900 - DNA, 474 bp, synthetic construct
  misc_feature 1..474: note = Description of Artificial Sequence: Synthetic coding sequence
  source 1..474: mol_type = other DNA
atgtctatgacgttaggttactgggatattaggggcctggcacatgcaattcgactgttactggaatacaccgatagtagctacgaagagaaaaaatatacaatgggcgacgcgccagattatgacaggtcacagtggctcaatgaaaagtttaagttgggccttgattttcccaatgaaaagctgaaaccggagtacctcgaggaattgccaaccatgatgcaacatttcagccagtttctcggaaaaaggccttggttcgttggcgataaaatcaccttcgtggacttcctggcctacgacgttctggatttgcatcgcatttttgaaccgaactgtctggatgccttccccaacctgaaagactttattagccggttcgagggcctggaaaaaatttccgcctacatgaaaagtagccggttcctccccaagcccctgtacactagagtcgccgtgtggggtaacaaatag

SEQ ID NO: 224901 - DNA, 609 bp, synthetic construct
  misc_feature 1..609: note = Description of Artificial Sequence: Synthetic coding sequence
  source 1..609: mol_type = other DNA
atgctcggttctctgctcgcccagctctcctttccaggattcccctcaatacagctgccctacctgatcgatggagcccacaaaatcacccagtccaacgccatcttgtgttacatcgccaggaagcacaacctgtgcggcgagacagaggaagaaaagattcgggtagatatcctggagaaccaggctatggacgtatctaatcagttggccagggtgtgttattcccccgactttgagaaattaaagcctgagtatctcgaagaactaccgacaatgatgcagcatttcagtcaatttctggggaagcggccttggtttgtgggagataaaatcacgttcgttgatttcctcgcatacgatgtgctcgacttacatcgtatattcgagcctaattgcctggacgccttcccaaacctcaaagattttatttcacggttcgaagtgatgcctccctcatcgtttttgtttgacgctccctgtagcgtgacctcgtttcaaatgctgagccagtcttggtcatacattaagaataatctacatctgctgagcgccggatttatgcccggtaccctgccttcaacactttacctcagttgcggcatttag

SEQ ID NO: 224902 - DNA, 657 bp, synthetic construct
  misc_feature 1..657: note = Description of Artificial Sequence: Synthetic coding sequence
  source 1..657: mol_type = other DNA
atgtcaatgacgctgggttattgggatatccgcggtctggcccacgccattcggctgcttttggagtatactgactcctcctatgaagagaagaaatacacaatgggcgacgcccctgattacgatcgaagtcagtggctgaacgagaaattcaaactcggcctggacttccctaaccttccctacctgattgatggcgcacacaagatcactcagtctaatgccatattgtgctacatcgccaggaaacataacctgtgtggcgagactgaagaggagaagatacgcgttgacatcctggaaaatcaggctatggacgtgagcaatcagctggccagagtttgctatagccccgactttgagaaattgaagcctgagtaccttgaagaacttcccaccatgatgcagcatttctcgcaattcttgggaaagaggccttggtttgtgggcgataagattacgttcgtcgactttttagcctacgatgtgttggacttacaccgaattttcgaaccgaattgtttagacgcctttcctaacctaaaagactttatatcacgctttgagggcttggaaaagatctccgcgtacatgaagagtagtcgtttcctgccaaagcctctgtatactcgggtggctgtgtggggcaacaagtag

SEQ ID NO: 224903 - DNA, 657 bp, synthetic construct
  misc_feature 1..657: note = Description of Artificial Sequence: Synthetic coding sequence
  source 1..657: mol_type = other DNA
atgccaatgactttgggatactgggacattcgcggtctggcacatgctattcggctactcttagagtacactgacagctcatatgttgaaaaaaaatacaccttaggagacgctcccgattacgatcggtcgcaatggttgaatgaaaaatttaaactgggcctcgactttccaaatcttccttatctcatcgatggcgcacacaagatcactcagtctaatgcaatcctgcgctacatcgccaggaagcataatctctgcggtgaaaccgaagaggaaaaaataagggtggacatcctcgagaaccaggtgatggacaatcacatggagctggtgcgcctttgttacgacccagacttcgagaagcttaagccaaaatacctggaagaactcccagagaagctcaagctgtatagcgagtttctagggaaacggccatggtttgctggggataaaataacctttgtggacttccttgcttacgatgttctggatatgaaaagaatctttgagccaaaatgcctggatgcctttttgaatctgaaggactttatttccaggtttgaaggcttgaagaaaatctcagcatatatgaaaagtagccagttcctcagggggttgctgttcggaaaaagcgcaacgtggaatagcaaatag

SEQ ID NO: 224904 - DNA, 714 bp, synthetic construct
  misc_feature 1..714: note = Description of Artificial Sequence: Synthetic coding sequence
  source 1..714: mol_type = other DNA
atgcccatgacattggggtactgggatatccgtggcctggcacatgctattcgcctgctgctggagtacaccgacagctcctacgtcgaaaagaaatatacgctaggtgatgccccagactatgatagaagccagtggctgaatgagaagttcaaactcggcctcgacttcccgaacggtatgcttggaagtctggtagctcagctctcctttcctggctttccaagtattcagcttccatacttgatcgatggtgcgcataaaattactcaatccaatgccatcctgaggtatatcgctcggaagcacaacctgtgcggcgaaaccgaagaggagaagattcgtgtggacattttagagaaccaggtgatggacaatcatatggagttagttagactgtgctatgatcccgattttgagaaactcaagcctaagtacctcgaggagttgcctgagaaattaaagctctattctgagtttctcgggaagcgaccctggttcgcaggggataagatcacgtttgttgactttctggcttacgatgtgctggacatgaaacgaatcttcgagcccaagtgtctggatgctttcctgaaccttaaagacttcatcagcagatttgagggattaaaaaagatctccgcctacatgaaatcctcacagtttcttcgcggactattgtttggaaaaagcgctacctggaatagtaaatag

SEQ ID NO: 224905 - DNA, 609 bp, synthetic construct
  misc_feature 1..609: note = Description of Artificial Sequence: Synthetic coding sequence
  source 1..609: mol_type = other DNA
atgctgggcagtctcgtggctcagctgtcctttcctggttttcctagcatccaactcccctatctcattgacggtgctcacaagatcacccagtctaacgctatccttcggtacattgccagaaaacacaacctgtgtggtgagacggaagaagaaaagattagagtggatatccttgaaaaccaggtgatggataaccatatggagctcgtgcgcttgtgttatgatcccgatttcgagaagctgaagcccaaataccttgaggagctgcccgagaaactgaagttgtattctgagttcctgggcaagcgcccatggttcgccggtgataagattaccttcgttgatttcttagcctacgatgtgttagacatgaagagaattttcgagccaaaatgcttggacgccttcttgaatctaaaggacttcatcagtcgttttgaagtcatgcctccttcaagctttctgtttgacgctccttgttcatttctgagcttccagatgctgtctcaaagttggtcatacactaagaataattcttatgtgttgtcaaccggatttatgccaggtatcatgccctccactctgtatttgagctgcaggatctag

SEQ ID NO: 224906 - DNA, 627 bp, synthetic construct
  misc_feature 1..627: note = Description of Artificial Sequence: Synthetic coding sequence
  source 1..627: mol_type = other DNA
atgtctggcgagagcgcgagatctctggggaaaggaagcgctcccccaggacccgtgcccgaaggaagcattaggatttactctatgaggttttgcccatttgcggagagaacccgcctggttttaaaggccaaaggaatcagacatgaagtcattaatattaacttgaagaacaagccagaatggttttttaagaaaaaccccttcggcctcgtgccagtgctagagaattcgcaaggtcagctgatttacgagtccgccatcacctgcgagtatcttgatgaggcctacccaggcaaaaagcttctccctgacgatccttacgagaaggcctgccagaagatgatacttgagctgttcagtaaagttctgaccaataagaagaccaccttctttggaggaaatagtattagcatgatagattaccttatctggccttggtttgagaggctcgaggcgatgaagcttaatgagtgtgttgatcacacccccaaactgaagctgtggatggcagccatgaaggaggacccgactgtgtctgcattactgacatcagaaaaagattggcagggattcctggaactgtatctccagaattcccctgaagcttgcgattatggactgtag

SEQ ID NO: 224907 - DNA, 726 bp, synthetic construct
  misc_feature 1..726: note = Description of Artificial Sequence: Synthetic coding sequence
  source 1..726: mol_type = other DNA
atgagcggagagtctgctcgctcactcggaaaaggatccgccccaccaggccctgttcccgagggctccattagaatctactcaatgcgtttctgtccgtttgccgaacgaacaaggctggtgctgaaagcaaagggcatccggcacgaggtgattaatatcaacctgaagaacaaaccagagtggttctttaagaaaaacccattcgggcttgtgccagtattggagaactcacagggacaactgatctacgagagtgccatcacctgtgaatacctcgacgaggcatatccaggtaaaaagctcctgcccgacgacccttatgaaaaagcctgtcaaaagatgatcttggagctctttagcaaggtgccctcattagtggggtccttcatacgctcacagaacaaagaggactacgctggactcaaagaagagtttcggaaggaatttaccaagctggaagaggtgcttaccaacaaaaaaacaacattttttggagggaactctatcagcatgatcgattacttgatctggccctggttcgaaaggctcgaggccatgaagttgaacgaatgtgtcgatcatactcccaaattgaagctttggatggccgctatgaaggaggatccgactgtgagcgctttactcacttcagaaaaggattggcagggcttcttggaattgtatttgcaaaactcccccgaggcctgtgattatgggttgtag

SEQ ID NO: 224908 - DNA, 543 bp, synthetic construct
  misc_feature 1..543: note = Description of Artificial Sequence: Synthetic coding sequence
  source 1..543: mol_type = other DNA
atgcggttttgtcctttcgccgaacgcacccgcctcgttctcaaagctaaaggcatccggcatgaagttatcaatattaaccttaagaacaaacccgaatggttttttaagaagaacccatttggcttggtcccagtcttagagaatagccaggggcagctgatttatgaatccgcaatcacctgcgagtatctcgatgaagcttatcctggtaagaagctgttgcctgatgatccttatgaaaaagcttgtcagaaaatgatcttggagctgttttcaaaggtgctgaccaataagaaaacaaccttctttgggggtaatagcatctcgatgatcgattacttgatatggccgtggttcgaacggcttgaagcgatgaagctcaacgagtgcgtagaccacacacccaagctgaagctttggatggcagcaatgaaggaggaccctaccgtctcggcattgctgacgagtgagaaggactggcagggatttctggaactttaccttcagaacagccctgaagcctgcgactatgggctctag

SEQ ID NO: 224909 - DNA, 603 bp, synthetic construct
  misc_feature 1..603: note = Description of Artificial Sequence: Synthetic coding sequence
  source 1..603: mol_type = other DNA
atgcgtttttgtccatttgcggagaggactagactggttcttaaggctaaaggcattaggcacgaggtgatcaacatcaatctcaaaaacaagcctgaatggtttttcaagaaaaaccctttcgggcttgtccccgtgcttgagaacagccagggacagctcatctatgagtcagccatcacatgtgagtatctggatgaagcataccccggaaagaaactgctgccagacgatccatacgaaaaggcctgccagaaaatgattctggaactcttttctaaagtaccatcactggtgggatcattcataaggtcccagaacaaggaggactatgcaggacttaaagaagaatttaggaaagagtttacaaaactggaggaggtgctgacaaataagaagacgaccttctttggcggaaacagtataagcatgatagattacctgatttggccatggtttgaacgactagaagccatgaaacttaatgaatgtgttgaccacacccccaagctgaagctgtggatggccgcaatgaaagaggatccaacggtgagcgcgctgttgacttccgagaaagattggcaaggatttctggaactctag

SEQ ID NO: 224910 - DNA, 642 bp, synthetic construct
  misc_feature 1..642: note = Description of Artificial Sequence: Synthetic coding sequence
  source 1..642: mol_type = other DNA
atgaggttctgtccatttgctgagagaactcgacttgttctcaaggctaaggggatcagacatgaggtaatcaatatcaatctgaaaaacaagcccgagtggtttttcaaaaagaatccctttggcctcgttcctgttctcgaaaatagccaagggcagctgatttacgagtccgcgatcacctgcgagtacctggacgaggcttacccgggtaaaaagttgctcccagatgatccttacgaaaaggcctgccagaagatgatacttgagctgtttagcaaggtgccttcgcttgtgggatctttcattaggagtcagaacaaagaagactacgctgggctgaaggaagaattccggaaagaatttacgaagctggaagaagtgttgaccaacaagaagacaaccttttttgggggaaactcgatcagcatgattgactatctcatctggccctggtttgagcgactcgaggccatgaaactgaacgagtgtgttgatcatacacctaaactcaaactgtggatggccgcaatgaaggaggacccgactgtcagtgccctgctgaccagcgagaaagattggcaaggctttctggaattatatcttcagaacagcccagaagcctgcgactacggcttgtag

SEQ ID NO: 224911 - DNA, 732 bp, synthetic construct
  misc_feature 1..732: note = Description of Artificial Sequence: Synthetic coding sequence
  source 1..732: mol_type = other DNA
atgtccggcgatgccacccgcacattgggaaaggggagccaacctcccggtcccgtccctgaaggcctgatcaggatctactcaatgcgcttttgtccgtacagccatcggactcggctcgttctgaaagctaaggacatccggcacgaggtcgttaacattaatctcaggaacaaacccgagtggtattacaccaagcacccgtttggacacattcccgtcctggagacatctcagtgtcagttgatctacgaaagcgtgatcgcgtgtgagtatctcgacgatgcttacccgggtcggaagttatttccatacgatccatatgaacgcgctcgtcagaagatgctcttggagctgttctgcaaggtgccacatctcacaaaggagtgtctggtggcccttcgatgtgggagagaatgcacaaatcttaaagctgccctgcgccaggaattctccaatctggaagaaatactcgagtatcagaacactaccttcttcggcggaacatgcattagcatgatcgattatcttttgtggccctggtttgagaggctggatgtgtatggcattttggattgcgtgagccatactcctgcgttgaggctgtggatcagcgctatgaagtgggatccaaccgtgtgtgcgctgctcatggacaagtccatttttcaagggtttctcaatctgtactttcagaacaatccaaacgcgtttgacttcgggctgtgttag

SEQ ID NO: 224912 - DNA, 648 bp, synthetic construct
  misc_feature 1..648: note = Description of Artificial Sequence: Synthetic coding sequence
  source 1..648: mol_type = other DNA
atgaggttctgcccgtatagtcacagaactagattagtcctcaaagctaaagacattaggcacgaagtcgtgaacatcaatctaagaaacaaacccgagtggtactacactaaacatcctttcggccacatacctgtcttggaaacgtcccaatgtcagcttatctacgagtccgtgattgcctgtgagtatttagatgatgcataccccggacgcaagctcttcccttacgacccatacgagcgcgctaggcagaagatgctgctggaactgttttgcaaggtgccccacctgacaaaagaatgcctcgtggcactacggtgcgggcgagagtgtactaacctgaaagcagcattacggcaggagttttcaaatctggaggaaatcttagagtaccagaacactactttctttgggggaacatgtatctctatgatcgattacctgctttggccatggtttgaaagactggacgtatacggaatcctcgattgcgtctcacatactccagccctcagattatggatcagcgccatgaagtgggaccccacggtttgcgctttgctgatggataagtccatcttccagggcttcctgaatctctactttcagaacaatccgaacgctttcgacttcggtctgtgctag

SEQ ID NO: 224913 - DNA, 732 bp, synthetic construct
  misc_feature 1..732: note = Description of Artificial Sequence: Synthetic coding sequence
  source 1..732: mol_type = other DNA
atgagtggcgatgccactcgcactctcggtaagggaagccaaccaccgggacctgttccagaagggttaattcggatctatagcatgaggttttgtccttacagccaccggaccaggctcgttcttaaagctaaggatattaggcatgaagttgtcaatatcaacctgcgaaataagcctgaatggtactacactaagcatccctttgggcatattcccgtgcttgaaacatcacagtgtcagctcatttatgagagtgttatcgcctgtgaatatctcgacgatgcttacccaggcagaaagttattcccctacgatccgtatgagcgcgcaaggcagaagatgctcctggagctgttttgcaaagttccacacttaacaaaggagtgcctggttgccctccgctgcggccgagagtgcacgaatctgaaagccgctctgagacaagaattctctaatctggaggaaatattagaataccagaatactacattctttggcggaacttgtatctctatgatcgactaccttctgtggccatggttcgagcgactggacgtgtacgggatcctggattgcgttagccacacacccgcactgcgtctgtggatctcggcaatgaagtgggacccaaccgtgtgtgcactactgatggacaagtcaatttttcagggcttcttaaacctgtatttccagaataaccccaatgcgttcgattttgggctgtgctag

SEQ ID NO: 224914 - DNA, 501 bp, synthetic construct
  misc_feature 1..501: note = Description of Artificial Sequence: Synthetic coding sequence
  source 1..501: mol_type = other DNA
atgtctggcgacgccacacgcacactcggtaaggggtcccagccgccaggccctgtcccagaggggctgatacggatttacagtatgaggttctgtccgtattctcacagaactcgtctggtgttaaaggctaaagacatcaggcacgaggtggttaacattaacctgagaaacaagcctgagtggtattataccaaacatccatttgggcatatcccagtcttagaaacctctcaatgccaactcatttacgaaagcgtgatcgcttgcgagtacctggacgatgcctaccctggcagaaagctgttcccctacgacccctacgaacgggcaagacagaagatgctcctggagctcttctgtaaagtcccacatctcaccaaagagtgcctcgttgccttgcgctgcggcagagagtgcaccaatctcaaggctgccttacgtcaggagttttctaacctcgaggaggatcggaagaaaagaaaatttattcctggctag

SEQ ID NO: 224915 - DNA, 366 bp, synthetic construct
  misc_feature 1..366: note = Description of Artificial Sequence: Synthetic coding sequence
  source 1..366: mol_type = other DNA
atgcgcttttgcccctactctcatcgtactcgtctcgtgttgaaggctaaggacatcaggcacgaggttgttaacatcaacctaaggaacaaaccggaatggtattacacgaaacaccccttcggtcacatccctgtgctagaaacgtcgcagtgccagttgatctacgaatctgttatcgcctgtgaatacctggatgatgcataccccggaagaaaactgttcccatatgacccttatgaacgggctcgccagaaaatgctgctcgagctcttctgcaaactatgtgagcctcacgcgtctccagctgccctagacattagtcatgaggtgggtcctcactctctctgtagcagccatggctag

SEQ ID NO: 224916 - DNA, 630 bp, synthetic construct
  misc_feature 1..630: note = Description of Artificial Sequence: Synthetic coding sequence
  source 1..630: mol_type = other DNA
atgtcaggtgacgcaaccagaaccttgggaaagggatcacaaccaccagggcctgtacccgaagggctgatcagaatctacagcatgcggttctgtccatattcccacagaaccaggctcgtcctgaaagcaaaggatattcgacacgaagtggtgaacatcaacttgagaaataaaccagagtggtactataccaagcatcccttcggccacatccctgtgctggaaacttcacaatgtcagctgatttatgaatccgtgatcgcctgcgagtatctcgatgacgcctaccccggtcggaaactgttcccgtatgatccctatgaaagggccagacagaaaatgctgcttgagctgttctgtaaaatcctggaatatcagaatactacttttttcggtggcacttgcatttctatgattgattacctcctttggccctggttcgaacgcctcgatgtgtacggcatcttggactgtgtttctcacaccccggctttgagattatggatatcagcaatgaagtgggaccctaccgtctgtgccctgcttatggataagtcgatctttcagggctttctgaacctgtatttccagaacaatcctaatgcgttcgatttcgggctctgctag

SEQ ID NO: 224917 - DNA, 723 bp, synthetic construct
  misc_feature 1..723: note = Description of Artificial Sequence: Synthetic coding sequence
  source 1..723: mol_type = other DNA
atggggctggagctctacctggatctgctgagccaaccctgtcgcgctgtgtacattttcgccaaaaaaaacgacatcccgtttgaattaagaatcgtggatctgatcaagggtcagcacctgagcgatgcatttgcgcaagtcaatccattaaagaaggtgccggcactcaaagacggcgattttaccctgaccgagagtgttgcaatcctcctctacctgactaggaaatacaaggtgcccgattattggtatccacaagatctgcaggccagagcaagagtggatgagtatcttgcttggcagcacaccacactgaggaggagctgcctccgcgctctctggcacaaggtgatgtttcccgtgttcctgggggagccagtatccccccagaccctagctgccacacttgctgaactggatgttactctacagttactggaggataagtttttacagaataaagcatttctcacagggcctcacatatccctcgccgaccttgtcgcaattaccgagctgatgcaccccgtcggtgctggatgtcaagtgtttgaaggtcgacccaaactggcaacatggcggcaaagggttgaggcagccgtgggcgaggacctattccaggaggcccacgaagtgatcctcaaggccaaggacttcccaccagcagatcccactatcaagcaaaagctgatgccttgggttctggccatgattcggtag

SEQ ID NO: 224918 - DNA, 486 bp, synthetic construct
  misc_feature 1..486: note = Description of Artificial Sequence: Synthetic coding sequence
  source 1..486: mol_type = other DNA
atgggtctggaattgtatctcgatcttctctcacagccttgccgggctgtgtatattttcgctaaaaagaatgacataccattcgagctcagaatcgtcgatttgatcaagggcgtcatgtttccggtttttctcggggaacctgtgtctccacaaactctcgccgctaccctggctgagttagacgtaaccctacagttactcgaggataaatttctgcagaataaggccttcttaactggcccacacatcagcttggccgacctggtggcaataacagagttgatgcatcccgttggtgctggttgccaggtcttcgaaggcaggccaaaactggcaacatggcgtcagcgggtggaagcagccgtcggtgaggatctcttccaggaagcccatgaagtgatattgaaagccaaggattttcctcctgccgatcccactattaaacagaaactcatgccctgggtcctggctatgatccgttag

SEQ ID NO: 224919 - DNA, 369 bp, synthetic construct
  misc_feature 1..369: note = Description of Artificial Sequence: Synthetic coding sequence
  source 1..369: mol_type = other DNA
atgttccctgtcttccttggcgaaccagtttcgccacaaaccttggctgcgaccctagcagaacttgatgtcactctccagttgctggaggacaaattcctccagaacaaggcatttttgacgggccctcacatctctctggccgacctggtggcgatcacagaactgatgcatcccgtgggcgctggatgccaggtgttcgaaggcaggcccaagctggcgacgtggcggcagcgagtggaagctgcggtaggagaagatctattccaggaagctcacgaggtgattttgaaagcaaaagactttccgcctgctgaccctaccatcaagcaaaagctcatgccttgggtgctggccatgatcagatag

SEQ ID NO: 224920 - DNA, 198 bp, synthetic construct
  misc_feature 1..198: note = Description of Artificial Sequence: Synthetic coding sequence
  source 1..198: mol_type = other DNA
atgggtcttgagctgtacctggatctcctgtcccagccctgtagggcggtttacatttttgccaagaaaaatgacatccctttcgaattacggattgtggacctaattaagggtcagcacttatccgatgcgttcgctcaggtgaatccactgaaaaaagtgcccgcattgaaggacggcgattttacattgacttag

SEQ ID NO: 224921 - DNA, 219 bp, synthetic construct
  misc_feature 1..219: note = Description of Artificial Sequence: Synthetic coding sequence
  source 1..219: mol_type = other DNA
atgggcctggaactctacctggacctgttgagtcagccatgtagggccgtctatatttttgctaagaaaaatgatattccattcgagttgagaatagtggatctgatcaaggctcgcggttgctggctgccatctctcagacgcccaacccaggcgggacatatggccgctgctcgcggagggtcatcaggaggaggtccgctgccaggcggtccttag

SEQ ID NO: 224922 - DNA, 405 bp, synthetic construct
  misc_feature 1..405: note = Description of Artificial Sequence: Synthetic coding sequence
  source 1..405: mol_type = other DNA
atgcctttcctagaactggatacgaatctccctgctaaccgcgtgcctgctgggctggagaaacggctatgtgcggcagccgctagcattctgggcaagccagctgaccgggtgaacgtcactgtgaggcctgggcttgcgatggcgctttcaggttcgaccgagccctgtgcccagctcagtatttcaagcattggagtcgtcggaaccgctgaggacaaccgcagccattccgctcatttctttgagttcttgaccaaagagctagcattgggacaagataggtttccaacggttcttagcacctctcccgctgcacacggagggcctagatgccctggggaaattattgaaggcaagaaaagttgcctgaacgaagaggctctgttcatttatttcatttag

SEQ ID NO: 224923 - DNA, 831 bp, synthetic construct
  misc_feature 1..831: note = Description of Artificial Sequence: Synthetic coding sequence
  source 1..831: mol_type = other DNA
atgcctgtgccagcctcatggcctcatcccccaggccctttcctgcttctaacgctcctacttggcctgaccgaagtggccggtgaggaggagctccagatgatccagcctgagaaactcctcttggtgacagtcggcaagaccgccacattgcattgcaccgtaaccagtcttttacctgtcggacccgtcctgtggtttagaggcgtgggccctggcagagagctaatctacaaccagaaggagggccacttccccagggtgactaccgtaagtgacctaacaaaacggaacaatatggacttttctattagaatcagtagcatcacccccgcagatgtgggcacctactattgtgtgaagttccgaaaaggctctcctgagaacgtggaattcaaatccggacctggtacggagatggcactcggagccaagcctagcgctcctgtagtcttgggtccggctgccaggacgacaccggagcacactgtgagttttacctgcgagagccacgggttcagcccaagggacatcacgctaaagtggttcaagaacgggaacgagttgagtgatttccagacaaatgtggatcctacaggtcagtctgtggcctacagcattcggtcgaccgcccgtgtggtgctggatccatgggacgtgagaagccaggtcatctgtgaggttgcccacgtcacattgcaaggggatccactgaggggcactgccaatctttcagaggctatcagaggcccagctagctccttgacagcattgctcttaatagcagtactcctcgggccaatttatgtcccttggaagcagaagacatag

SEQ ID NO: 224924 - DNA, 1092 bp, synthetic construct
  misc_feature 1..1092: note = Description of Artificial Sequence: Synthetic coding sequence
  source 1..1092: mol_type = other DNA
atggccacaaattggggaagcctgctccaggacaaacaacagctggaagagctggccaggcaggccgtcgacagggccctggctgaaggagtgctgctgaggactagccaggaaccaacaagctcagaggttgtaagttacgcccctttcaccctcttcccttccttagtgccctcagcccttctggagcaggcatatgctgtccaaatggatttcaacttattggttgacgctgttagccaaaacgctgcttttcttgagcagacactgtctagcgcactcgttctactgatagcccaggagaaggagcgaaatatatttgatcaacgcgcaattgagaatgagttactggctcgcaacatccacgtaattagaaggaccttcgaggacatttctgagaagggtagcctggatcaagaccgaagattattcgtggacggccaggaaattgctgtggtgtatttcagagacgggtatatgcccaggcaatattccctccagaactgggaggctcgtctacttctcgaacgttcgcatgccgcaaaatgtcctgacattgcaactcagctggctggcactaaaaaagtgcagcaggagctgtcacggcctggcatgctagagatgctgttgccaggccagccagaggctgtcgctcgccttagggccacatttgctggcctgtactctttagacgttggtgaggagggggatcaggcaatcgccgaagccctggctgccccatcccgtttcgttctcaaaccccagcgcgaaggaggcggtaataatttgtatggagaggagatggtgcaggctctaaagcagctgaaagactctgaagagagggcttcctacatcctcatggagaaaatagagcctgagccttttgagaactgccttctgcgacccggatcccctgcaagagtggttcagtgcattagcgagctcggaatattcggcgtatacgtgagacaagaaaagaccttagtgatgaataaacacgttggacatctcctgagaactaaagccatagaacatgctgacggtggtgtcgccgctggagtcgcagtgctcgataatccataccccgtttag

SEQ ID NO: 224925 - DNA, 1041 bp, synthetic construct
  misc_feature 1..1041: note = Description of Artificial Sequence: Synthetic coding sequence
  source 1..1041: mol_type = other DNA
atgttccagcgatccgccgatggaagccccgctctgaagcagatagagatcaataccatatctgcttcgtttggcggacttgcatcaagaacaccagctgtgcacaggcacgtcctcagcgtcctgagcaagacaaaggaggccggtaagatcctgagcaacaatcccagcaaggggctagcacttggcatcgccaaggcctgggagctgtatggctcacctaacgctctggtgctcctaattgcacaggagaaggaaaggaacatattcgaccagagggctatcgaaaatgagcttcttgctagaaatattcacgttatccgcaggacattcgaggatattagtgagaagggaagcttggaccaggacaggcggctcttcgtggacgggcaagaaatcgccgtcgtctatttcagggatggctacatgcctagacagtattcattgcagaactgggaggctcggctcctattggaacgcagtcacgctgctaaatgcccagacatcgcaacccaactagccggaactaagaaggttcagcaagaactgagccggccagggatgttagagatgctcctgcctggccagccagaggcggtcgcgcgattgcgagcgacatttgcaggactttatagcttagatgtcggggaagagggggaccaggcaattgcagaagctctggctgccccatccagattcgtgctgaaacctcagagagaagggggtggcaacaacctctacggtgaggaaatggtgcaggcgcttaagcaactgaaggattccgaggaacgagcgtcatacatactgatggagaaaatagagccagagccttttgaaaactgcctcctcagaccaggatccccagccagggtggtccaatgcatttctgaacttgggatttttggcgtatacgtccggcaggaaaaaactctggtgatgaacaaacacgttggacaccttctgcgaaccaaggcaattgagcacgcggacggtggcgtagcggctggggtggcagtgttggacaatccttaccctgtgtag

SEQ ID NO: 224926 - DNA, 768 bp, synthetic construct
  misc_feature 1..768: note = Description of Artificial Sequence: Synthetic coding sequence
  source 1..768: mol_type = other DNA
atgtcttctatcggtactggatacgatcttagtgccagtacattcagccccgacggtcgtgtgttccaggtagagtacgcaatgaaggctgtagaaaactcctctacggccatcggaatcagatgtaaagatggtgtggttttcggcgtagagaaattagtcctgagcaagttgtatgaggaaggctcgaataagcgcttgttcaacgtggaccgccacgtgggcatggccgtcgctgggctattagcagacgccagaagcctcgcggacatcgctcgtgaagaggcctccaacttcaggagcaactttggctacaacattccacttaagcaccttgcagatcgagtggccatgtatgtccatgcctatacactttactccgcggtcaggccctttggctgctcttttatgttgggcagctactcagtcaacgatggagcacagctctacatgatcgatccctccggcgtgtcttacggctattggggttgcgccatcggtaaggctaggcaagccgctaagacggaaatagaaaaactccagatgaaggagatgacatgcagagacatcgttaaagaagtggccaaaattatatacattgtccatgatgaagtgaaggataaagcttttgaactggaactgagctgggtcggcgagctgaccaatgggagacacgagattgtgccaaaggatattcgcgaagaggccgaaaaatacgctaaggagtcactcaaggaggaagacgagtccgacgatgataatatgtag

SEQ ID NO: 224927 - DNA, 525 bp, synthetic construct
  misc_feature 1..525: note = Description of Artificial Sequence: Synthetic coding sequence
  source 1..525: mol_type = other DNA
atgcaagctggaaaaccaattctttattcctactttaggtcgagctgcagttggcgtgtgaggatcgccttggccctcaaagggattgattatgagacagttcctattaacttgatcaaagatgggggtcagcagtttagcaaggattttcaggcactcaatccaatgaaacaggtgcctaccttgaaaattgacgggataacaatccatcagtctaacctgtctgtattgaaacaggtgggagaagagatgcagctgacctgggctcaaaatgccatcacttgcggcttcaacgccttggagcaaattttgcaatctaccgccggaatttattgcgttggggatgaggttaccatggccgacctctgtttggtcccacaagtggcgaacgcagagcgttttaaagtggatctgaccccatacccgacaatctcatcgatcaataaaaggttgctggtgctggaggccttccaggtgagtcacccatgcagacagccagataccccgaccgaacttcgcgcttag

SEQ ID NO: 224928 - DNA, 486 bp, synthetic construct
  misc_feature 1..486: note = Description of Artificial Sequence: Synthetic coding sequence
  source 1..486: mol_type = other DNA
atgaaacaagtgccaactcttaagatcgatggtattacaatccaccagtctttagcgatcattgaatatctggaggaaatgcgtcctacaccgaggctgctacctcaagatccgaagaagcgcgcttcggtgcgtatgatcagcgacttaattgccggaggcatacagccactgcagaatctgagcgtcctgaaacaggtcggtgaagagatgcagttaacatgggctcagaatgccatcacttgtggatttaatgcactcgaacaaatacttcaatccacggccggtatctattgcgtgggagatgaagtgaccatggccgatctttgtttagtaccccaggtggctaatgccgagaggtttaaggtcgacttaacgccgtatcctaccatctccagcataaacaagcggctgctagtgttggaagcatttcaggtgagtcatccctgcaggcagcccgatactcccacagaactacgcgcttag

SEQ ID NO: 224929 - DNA, 486 bp, synthetic construct
  misc_feature 1..486: note = Description of Artificial Sequence: Synthetic coding sequence
  source 1..486: mol_type = other DNA
atgaaacaagtgcccactctgaaaatcgacggcatcactatccatcagtccctggctataatcgagtacttggaagaaatgcgcccaacccccagactgctgcctcaggaccctaagaagagagcttccgtccgcatgattagcgacctcattgccggtggcatccagcccctccagaatctctcagtgctgaagcaggtaggcgaagaaatgcaacttacctgggctcagaacgccatcacatgcggattcaacgccctagagcaaatcctccagtccaccgccggtatttattgcgttggggacgaagtgactatggccgatctgtgtctggtgccccaagtggccaacgctgagcggtttaaggtggatcttacaccctatccaaccatttcttccatcaacaaacggctgctcgtgctggaagcatttcaggtaagccacccgtgccggcagcccgacacgcctacggagctgagggcctag

SEQ ID NO: 224930 - DNA, 180 bp, synthetic construct
  misc_feature 1..180: note = Description of Artificial Sequence: Synthetic coding sequence
  source 1..180: mol_type = other DNA
atgaaacaggtgcctacgctgaagattgacgggatcaccattcaccagagcctggctatcattgaatatttagaggagatgagacccacacctcggctcctcccacaggatcccaagaaacgggctagtgtgaggatgatttccgatctcatcgcaggaggaattcagcccctccaatag

SEQ ID NO: 224931 - DNA, 117 bp, synthetic construct
  misc_feature 1..117: note = Description of Artificial Sequence: Synthetic coding sequence
  source 1..117: mol_type = other DNA
atgaagcaggtgcctacactgaaaattgatgggataactattcaccagtccctagctatcatcgaatacctcgaggaaatgagacctacacccagactgcttccccaggatccttag

SEQ ID NO: 224932 - DNA, 486 bp, synthetic construct
  misc_feature 1..486: note = Description of Artificial Sequence: Synthetic coding sequence
  source 1..486: mol_type = other DNA
atgaaacaggttcctacactgaagatcgatgggatcacaatccatcagtcccttgccattatagaatatctagaggaaatgagacccactcctagactcctgcctcaagatcccaagaaaagggcatccgttcgaatgatatcggacctgattgcaggagggatacaacctctgcagaacctgtccgtgcttaaacaagtcggcgaggaaatgcagctaacatgggcccaaaatgccatcacctgtgggtttaatgcactcgaacagatcttacagagcacagctggtatctattgcgtgggggatgaagtcacaatggcagacctgtgtctagtgccccaagtggccaatgctgaacgcttcaaggttgacctgacaccctaccctaccatcagtagtattaataagagactgctggtccttgaagctttccaagtgagtcatccatgccgacagcccgacactccaacagagctacgcgcttag

SEQ ID NO: 224933 - DNA, 387 bp, synthetic construct
  misc_feature 1..387: note = Description of Artificial Sequence: Synthetic coding sequence
  source 1..387: mol_type = other DNA
atggccggaaacttgttaagtggcgcaggtagaagactctgggattgggtccccctagcctgtcggagtttttcgctgggcgtcccccgtttgattggcatccgattgacattgcctccccctaaggtggtggaccgctggaatgagaaacgcgcaatgttcggtgtgtatgataacattgggattctcggcaactttgagaagcatcctaaagagttaatccggggtccaatttggctgcgcggatggaaaggaaatgagttacagcggtgtatccgcaaaaggaaaatggtgggaagcagaatgttcgcggacgatctgcataacttgaacaagaggatccggtatctgtacaagcattttaatcgacatgggaagtttaggtag

SEQ ID NO: 224934 - DNA, 783 bp, synthetic construct
  misc_feature 1..783: note = Description of Artificial Sequence: Synthetic coding sequence
  source 1..783: mol_type = other DNA
atggaagaaatgcgcgatccaagtaaaatcaaatggggtgacgctggtgcagagtacgtggtcgagtcaaccggcgtctttaccacaatggagaaggctggcgctcacctccagggtggcgctaaaagagtcataatttccgcacctagcgccgatgccccaatgttcgtgatgggggtaaaccatgagaagtacgataatagcttgaagataatatctaatgcttcctgtactacgaactgcctcgcccctctggcgaaggtgatccacgacaatttcggcatagttgaaggactcatgacaaccgtacacgccattactgcgactcagaagaccgtggatggcccatccggaaagttgtggcgcgacgggagaggagctctgcagaacattattccagccagcacaggtgccgctaaggccgtggggaaggtcatcccagaactcaacggaaagctcaccggtatggcattccgcgtgcctactgccaacgtgtcagtggtcgaccttacatgtcgccttgagaaacccgctaagtacgacgatatcaaaaaagttgtgaagcaggcctccgaagggcctcttaagggcattctgggttacaccgaacatcaggtcgtgagttccgactttaactcagacactcattcgtccacgttcgacgccggagcaggtatcgctctgaacgaccacttcgtgaagctcattagctggtacgacaatgagtttggctattccaacagggtagtggacctgatggcccatatggcttctaaggagtag

SEQ ID NO: 224935 - DNA, 882 bp, synthetic construct
  misc_feature 1..882: note = Description of Artificial Sequence: Synthetic coding sequence
  source 1..882: mol_type = other DNA
atggtgtacatgtttcaatacgattctacccacgggaagtttcacggcacagttaaggccgaaaacggaaagctggtaataaacggaaacccaattaccatattccaggaaagggacccatctaaaatcaagtggggggacgcaggcgcagagtacgttgtagagagcactggagtgttcacaacaatggagaaggctggcgcacacctccagggaggtgccaagcgggtgatcatctccgcacctagtgcggacgcacctatgtttgtgatgggtgttaatcacgagaagtatgataacagtctgaagatcatctctaacgctagttgcaccacgaattgcctggccccactggccaaagtgatccacgacaacttcggtatcgtggaagggttaatgactacggtgcacgctattactgcaacccagaagactgttgacggcccatcaggaaagttgtggagggatggacgaggcgctcttcaaaatatcatcccagcttccactggagccgcaaaggcggtagggaaggtgatcccggagctgaacggcaagctgacagggatggcttttcgcgtcccaaccgccaacgtgtccgtggtcgatctgacttgcaggttggaaaagcctgcgaaatatgacgatattaaaaaagtggtgaaacaggcatcggaagggccactcaagggcattctggggtacacggagcatcaggttgttagcagtgactttaatagcgatacacactccagcaccttcgatgccggtgctggtatcgcactcaacgatcacttcgtaaaattgatctcctggtacgacaacgagttcgggtacagtaatcgcgtagtggaccttatggcccacatggccagtaaagaatag

SEQ ID NO: 224936 - DNA, 1008 bp, synthetic construct
  misc_feature 1..1008: note = Description of Artificial Sequence: Synthetic coding sequence
  source 1..1008: mol_type = other DNA
atgggtaaagtaaaggtcggggttaatggctttggtcggatcggccgattggtgacacgggcagcttttaactcaggaaaagtcgacatagtagccattaatgatcctttcattgatctaaattatatggtttacatgttccagtatgattcaacgcacggaaagttccatggcacggtgaaagccgagaacggcaaacttgtgatcaacggaaaccccattactatcttccaggaacgcgaccctagcaagatcaagtggggcgatgctggtgcggaatatgtcgtcgaaagcacaggtgtttttactactatggagaaagccggagcccacttacaaggcggagctaagagagtgatcatttccgctccttccgctgatgccccaatgttcgtaatgggagtgaaccatgaaaaatacgacaattccttgaaaatcatctcaaacgcctcttgtactacgaactgtctggcgcctttagctaaagtaatccatgacaatttcggtattgtggaaggcctcatgactaccgtccacgctatcaccgccacccagaagaccgtggatgggccttcaggcaaattatggcgagatggcagaggtgctctgcaaaatatcatccctgcgagtactggcgcagccaaagcggttggcaaagttattccagaattaaacgggaagctgaccgggatggccttcagagttcctaccgctaatgtgtctgtggttgacctgacatgccgcctcgaaaagccggcaaagtatgacgatattaagaaggtggtcaaacaggcctccgaaggcccactcaaggggatcctcggatatactgagcaccaggtggtgtcttcagacttcaactctgatacgcactcttcaaccttcgacgccggtgcaggcattgcgttgaatgaccattttgtgaagctgatctcatggtacgacaacgagttcggatatagcaatagggtggttgatctaatggcccacatggcctctaaagaatag

SEQ ID NO: 224937 - DNA, 1008 bp, synthetic construct
  misc_feature 1..1008: note = Description of Artificial Sequence: Synthetic coding sequence
  source 1..1008: mol_type = other DNA
atgggaaaggtgaaagttggcgtgaatggtttcggcaggattggcaggctcgtaactagagcggctttcaacagcggcaaggtcgatatcgtagccatcaatgatccttttatcgatctgaactacatggtgtacatgttccaatacgactcaactcacggcaaatttcacgggaccgtgaaagccgagaacggaaagctggtgatcaacggtaatcctattacaatatttcaggagagggacccctcgaagatcaagtggggggacgctggggcagagtatgtggtcgagagtacaggggtattcaccactatggagaaagcaggcgctcacttgcagggaggagccaagagggtgatcatttcagccccatccgccgacgcacctatgtttgtaatgggcgtgaaccatgaaaaatatgataattccttgaagatcataagtaatgcgtcttgcactaccaactgtctggcccctttggccaaagtgatacacgataattttggtattgtggagggccttatgaccaccgtgcacgcaattaccgctacccagaaaacagtggacggtccgtcaggaaagttgtggagagacgggaggggagccttgcagaacatcatcccagcttcaaccggtgctgcaaaagcggtgggaaaagtgatccccgaattgaacggcaagctgactggaatggcattccgcgtgcccactgcaaatgtttccgtggtggatctgacttgtcggctggagaagcccgctaaatacgatgatatcaagaaagttgttaaacaggcatccgagggcccactaaaaggcatactggggtataccgaacaccaggtcgttagctctgacttcaattctgacacacattcaagcacttttgacgctggcgcaggtatagctctgaacgaccactttgtgaagctcatttcttggtatgataatgagtttggttactccaatagggttgtggacctgatggcgcacatggcctccaaggagtag

SEQ ID NO: 224938 - DNA, 648 bp, synthetic construct
  misc_feature 1..648: note = Description of Artificial Sequence: Synthetic coding sequence
  source 1..648: mol_type = other DNA
atggggaaggtcaaagtaggcgtgaatggctttggcagaatcggaaggctcgtgactagggccgctttcaactctgggaaggtggatatcgttgcaattaacgacccttttatcgacttgaactacatggtatacatgttccagtacgactcaacccatggaaagttccacggaacggtgaaggcggaaaatggcaagctggtgattaatggtaaccccatcaccatcttccaggagcgagatccgagtaaaattaaatggggagatgcaggggctgagtatgtcgtggaatccaccggagtttttacaaccatggagaaggctggcgctcatttgcagggtggagccaaaagggttattattagtgctcctagcgctgacgccccaatgttcgtgatgggagtcaaccatgaaaagtacgacaactcactcaaaataatcagtaacgcgtcttgcacaacgaattgtttggccccacttgcaaaagttattcacgacaattttgggatcgttgaggggctgatgacgacggttcacgcgatcacagcaactcagagagaagcacattggcacggcctgccatgtccccattgccagagagtgtctggaggacccgacctgccaagccggaaaacctgtcaaatttag

SEQ ID NO: 224939 - DNA, 675 bp, synthetic construct
  misc_feature 1..675: note = Description of Artificial Sequence: Synthetic coding sequence
  source 1..675: mol_type = other DNA
atgacactgttccacttcgggaattgcttcgcgctggcctatttcccatactttattacttacaagtgcagcggacttagcgagtataacgccttctggaagtgtgtccaagctggggtaacatatcttttcgttcagctgtgtaagatgttatttctggccacttttttcccaacctgggaggggggaatctacgacttcattggggagtttatgaaggcctctgtggatgttgccgatctgatcggtctcaacttagtgatgtctaggaatgcgggaaaaggtgagtataagataatggtcgctgcactaggctgggctacagcggaactgatcatgtcgaggtgtatcccactgtgggtcggggcaagggggatcgaatttgactggaagtatattcagatgagcattgatagcaacatttctctggtccactacatagtggcgtccgctcaggtgtggatgatcaccagatatgatctatatcatactttccggccagcagttctgttgctgatgtttttaagtgtgtataaagccttcgtaatggagacttttgtgcacctatgttctttgggaagctgggccgctttgctggcacgggcagtcgtgacaggacttctcgctcttagcactctcgctctttacgtggccgtcgttaacgttcactcctag

SEQ ID NO: 224940 - DNA, 1104 bp, synthetic construct
  misc_feature 1..1104: note = Description of Artificial Sequence: Synthetic coding sequence
  source 1..1104: mol_type = other DNA
atggcagctgcccttcaggttctgcctagactcgctcgggctcctctacaccctctattgtggcgtggtagcgtggctaggcttgcatcaagcatggccctcgcggagcaagcaaggcagcttttcgaatctgcagttggagctgtcctccccggacccatgttgcaccgtgccctttcgctggaccccggaggcaggcagctaaaggtgagagatagaaactttcagctgaggcagaacctgtacttggtcggcttcggaaaagcagtgctggggatggcagctgcagcagaggaactgctcggccaacatctggtccagggagtgattagtgtcccgaagggcattagggcggcaatggaacgggctgggaagcaggagatgttactcaagcctcattcaagagtccaggtgtttgaaggcgctgaggataacttgccagaccgtgatgctctgagagccgctctcgcaatacaacaattggcggaaggcctcacggccgacgatctgctgttagtcctcatctcagggggaggcagcgccctattgcccgcacctattccccctgtgactctcgaagaaaagcagacattgacaagactactcgccgctaggggagccaccatacaggagttaaacactataagaaaggccctgtcccaattgaagggtggcggtctcgctcaggccgcatatcctgcgcaggtggtcagtctgatactgagtgacgtggtcggagatcctgtggaggtgatcgccagtggaccaacagttgcaagcagccataatgtgcaggattgcctccacatactgaaccgatacggtttacgcgcagcgttaccaaggagtgtcaagacagtgctctcgagagccgatagcgatccacacggccctcatacctgtggccacgtgctgaacgtaatcatcggttccaacgtactcgcattggctgaggcccagcgacaagccgaggccttgggatatcaagccgtggttctgtcagccgcaatgcagggctggggaacccctgccgctcacagagacgatcgataccaatgccatggccatcccccactggtgccagctgcctctgtgatggcctag

SEQ ID NO: 224941 - DNA, 705 bp, synthetic construct
  misc_feature 1..705: note = Description of Artificial Sequence: Synthetic coding sequence
  source 1..705: mol_type = other DNA
atggcagccgcactgcaagtgttgcccaggcttgcaagagctcccctccatcccctcttatggcggggaagtgttgccagattagcctcaagcatggctcttgcagagcaagccagacagctgttcgaaagcgccgtgggagccgtgctccctggccctatgttacaccgcgctctgagtcttgacccaggagggagacagctgaaggtgagagatagaaactttcagctgcgccagaacttgtatttggttgggttcggaaaagccgtgttaggcatggccgcagccgcagaggaactgttaggccaacatcttgttcaaggcgtgatcagcgtacctaaaggaattcgagctgctatggagcgggctggaaaacaagaaatgctgctaaaaccccactctcgagtgcaggttttcgagggagccgaagacaacctcccagatcgggacgccctccgcgctgccctggcaattcagcaactggccgagggcctgacagctgatgacctcctgctggtcctgatcagcgggggagagccccatcctgtgcggtgcggcggaggtccatgcggcggagattgccagtggcctcaccggggtcagttcccacaatgcgccagactgcctgcatacccacagagtttgcgccctccttgctcacctgccactttttgcgaggattgtgcagtgtctggtcggctgtag

SEQ ID NO: 224942 - DNA, 1374 bp, synthetic construct
  misc_feature 1..1374: note = Description of Artificial Sequence: Synthetic coding sequence
  source 1..1374: mol_type = other DNA
atggcagcagccctccaggtcctgccacgacttgcgcgagcccctctgcatcctctgttatggagaggctccgtggctcgcttggctagctctatggcgttagcagaacaggcgcgtcagctcttcgaatccgccgtaggcgcagtgctccctggcccaatgctacatcgcgcactctctctggatcctgggggaaggcaactgaaagttagagaccggaactttcaactgagacagaatctctacctggtaggattcggaaaggcggtgctggggatggcggcagctgctgaggagctgctgggacaacatctcgtccagggtgttatttcggtccctaaagggatccgggctgccccaattccgccagtgacgcttgaggagaagcagacccttacacggcttcttgctgcaaggggggctacaatccaagagctcaacactattcgcaaggcactttctcaactgaaagggggtggtctggcacaggccgcatatcccgcacaggtagtaagccttatcctgagcgatgtcgtaggcgacccagtggaagttattgcgagtggccctacagtggcttcctctcacaatgtacaagattgcctgcatatcttgaacagatacgggttgcgcgcagcccttcctcgtagtgtgaagaccgtgctgtcaagggcagactcagacccacatggccctcatacatgtgggcatgtactgaacgtgatcattggctccaatgtcctggctctggcagaggcccagcggcaggcagaagctctgggataccaagcagttgtgctgagcgccgctatgcagggagatgtcaagtcgatggcccagttttacggcctgcttgcccacgtggcccgaactagactcaccccctctatggccggtgcaagtgtggaggaagacgcccaactccacgaactcgcagccgagcttcaaattcctgatttgcagctggaggaagcactcgaaactatggcgtggggaagaggcccagtctgcctcctcgctgggggagagccgacagtgcaattgcaggggagcggcagaggcggaaggaatcaggagctggctctccgcgtcggcgcagaacttcgccgatggcctcttggccctatcgatgtcttattcctgtcgggaggcacggacggccaggacggccctactgaggctgccggagcttgggtgacacccgagctggctagccaagccgctgccgaaggcttagacatcgccacgtttctcgctcataatgatagccacacctttttctgttgccttcaaggcggagcgcatttattacatacaggcatgaccggaacaaatgtgatggacacacacctgctcttcctgcgaccacgatag

SEQ ID NO: 224943 - DNA, 1572 bp, synthetic construct
  misc_feature 1..1572: note = Description of Artificial Sequence: Synthetic coding sequence
  source 1..1572: mol_type = other DNA
atggctgccgcactgcaggtcctgcccaggttggctagggcccctcttcatccactactctggagaggaagtgtggccagactggcgagctctatggcactggcagaacaggccaggcagctgtttgaatcagcggttggagcagtcctgccgggacccatgttgcaccgtgcattatctctggatccgggaggcaggcagttgaaagtacgcgaccgcaatttccagctgaggcaaaacctgtatctggtcggcttcggcaaagccgtgttaggtatggctgcagcggctgaagagctgcttggacagcacctggtgcaaggagtgatcagcgtgcccaaaggcatccgcgcagccatggagagggctgggaaacaggagatgctattaaagccacacagtcgggttcaggtgtttgagggtgctgaggataatctgcccgaccgcgatgccttgcgggctgccctggctattcaacagctagccgagggcctcacagcagatgatcttttgctagtgctgatttctggtggaggctctgctctactgccagcacccatcccaccagtcacactcgaggagaagcagaccctcacccggctgctggcagcgcgaggcgctactattcaggaattgaacaccattaggaaggcactgtcacagctcaagggtggcggtcttgcgcaggctgcgtacccagcccaggttgtaagtctgatccttagtgatgtagtgggcgacccggtcgaggttatcgccagtggtcccacggtcgcttcatctcacaatgtccaggattgtttgcacatcctcaaccggtatggactccgggcagccctgccccgatctgtgaaaaccgtgctgagtcgggctgactccgatccccatggcccacatacatgcggccatgtgctgaacgtaataataggctctaacgtcctggcccttgcagaggctcaaagacaggcagaggctctgggctaccaggccgttgtgctgtccgcagcaatgcagggggatgtgaagagcatggcccagttctacggactgctggcccatgttgctcgcactagacttaccccttctatggcaggggcatccgtggaagaagatgctcagttgcacgagttagcagcagaacttcagattcctgacctgcaactggaagaagccctcgaaactatggcttggggacgtggacctgtgtgtctgctcgccggaggcgagcccacggtccagttgcagggcagcggtaggggaggaagaaaccaagaactggccctgcgtgttggagcagagcttcgacgatggcctcttggccctattgatgtcctgttcctctcaggtggcaccgatggccaggatgggcctaccgaggcggctggggcatgggtgacgcccgagctcgccagtcaggccgcagccgagggcctggacattgctacgtttctggcccataacgactcccacacattcttctgctgcttgcaggggggagctcaccttctccacaccggcatgaccggaactaatgtcatggatacccatttactgttcttgagaccgaggtag

SEQ ID NO: 224944 - DNA, 852 bp, synthetic construct
  misc_feature 1..852: note = Description of Artificial Sequence: Synthetic coding sequence
  source 1..852: mol_type = other DNA
atggaactattgcttagccagagctgtatctggtggccgatggtgggagaggggagaaccattatttcatgcggaataaaggccatggaacgatctggcaattacctgatttggctgcagaaaggagaaatgctactgaaaccccattcccgagtgcaggttttcgagggggcagaggacaacctgccggatagagatgcactaagggcagctctggctatacagcagcttgctgaaggcctcaccgcagacgaccttcttctcgtgctgattagtgggggtggctcagccctgcttcccgcacctatccccccagtgaccctggaggaaaaacaaacgcttactcgcctcttagccgcacgcggagccactatacaggaactgaacaccatccgcaaggcactgtcccaattgaaaggaggcggtctagcacaggcggcttaccccgcacaggtggtcagtctcattttgagtgacgtggttggtgacccagtcgaggtgatcgcctcagggcctaccgttgcgagttctcataatgttcaggattgcctacatatccttaacagatatgggctccgagccgctctcccgaggtccgtgaaaactgttctcagccgggctgactcagaccctcacgggcctcatacgtgcggccatgtacttaatgtgatcatcggatccaacgttcttgccctcgcagaggcccagaggcaggcagaagccctggggtaccaggccgtcgtgctgagtgcggcaatgcaaggatgggggactcctgcagcccaccgtgacgacaggtatcagtgtcatggtcatccacccttagtgcccgctgcgagcgtgatggcatag

SEQ ID NO: 224945 - DNA, 723 bp, synthetic construct
  misc_feature 1..723: note = Description of Artificial Sequence: Synthetic coding sequence
  source 1..723: mol_type = other DNA
atgcttctgaagccccactcacgcgtgcaggtgttcgagggcgctgaagacaacctaccagacagagatgctttgagagccgcacttgcaatacagcagctcgctgagggacttacagcagatgatcttctgctggtgctgatttctgggggaggctctgctcttttgcccgctccgattcctcccgtgactctggaagagaagcagaccctgacacggctgctggcagctcggggagctaccattcaggagctgaatacgattcggaaggccctctcccagctgaaaggaggaggtctggcccaagccgcttaccctgcgcaggtggtttccctgatcctgtccgacgtggtgggggatccagtcgaggtcattgcttcaggcccaactgtggcttcttcccacaatgtgcaggattgcctccacattctgaatcggtacgggctccgggcagccctgcccagatctgtcaaaacagttctgtccagggccgatagcgatcctcacggtcctcatacctgtgggcacgtgctgaacgtgatcataggatccaacgttttggcgctcgcagaagcccagagacaagccgaggctctcgggtatcaagcagtggtcctgagcgcagccatgcagggatgggggaccccagcagcacacagagacgaccgctaccagtgccatggccacccgccacttgtgccagcggcatccgtaatggcctag

SEQ ID NO: 224946 - DNA, 618 bp, synthetic construct
  misc_feature 1..618: note = Description of Artificial Sequence: Synthetic coding sequence
  source 1..618: mol_type = other DNA
atggctgcggcattgcaggttctgccacggctggcacgggctccactgcaccctttgctgtggcggggatctgttgccagacttgcctctagcatggccctcgcagaacaagccagacaactctttgaatcagcagttggcgctgtgttacctggtccaatgctacatcgagccctgagcctggatcctgggggaagacagctgaaagttagggataggaacttccaactaaggcagaacttgtacctggttggcttcggaaaagccgtgctggggatggcggctgctgccgaggagttactaggccagcaccttgtccaaggggtcatatccgttccaaaaggtattagggctgccatggagagagctggaaaacaggagatgctgctcaaaccccattctcgcgtccaggtttttgagggtgccgaggataacttaccagacagagatgccttgagggcagctctggccattcagcagctggctgaagggctgacagctgacgaccttctactcgtactgattagtggatggggaacccctgccgcacaccgcgacgaccggtatcagtgtcacggtcacccaccactggttccagccgcatctgtgatggcatag

SEQ ID NO: 224947 - DNA, 705 bp, synthetic construct
  misc_feature 1..705: note = Description of Artificial Sequence: Synthetic coding sequence
  source 1..705: mol_type = other DNA
atggctgcagctctccaggtgctgcccaggctcgcccgagcccctctgcacccactgctttggcggggttctgtcgctcgcttggcatcttctatggccctggctgaacaggcgcgacagctgttcgagtccgccgttggcgcagttctccctggacccatgttacatagagctctgtccctagatcctggaggccgtcagcttaaagtgcgagaccgaaacttccagttgaggcagaacctctatcttgtggggttcggaaaggcagtccttggcatggcggcagccgctgaagagctcttgggacagcacctagtgcagggggtgatttccgtacctaagggcatccgcgctgccatggagagggcgggaaaacaagagatgttgttgaagccccattcacgggtccaggtgttcgagggtgcagaagataacctgcctgatagagacgcgttgcgcgcagcccttgccatccagcagctggctgaggggctgaccgcagacgaccttctcttggtgctgatctcagggggagaaccacacccagttcggtgtggtggaggcccttgcggcggagattgccagtggccccatcgcggacaatttccgcagtgtgcccgtttgcctgcttatccccagtccctgagaccgccatgtagccctgctacattctgtgaggattgcgctgtttccggacgtctgtag

SEQ ID NO: 224948 - DNA, 285 bp, synthetic construct
  misc_feature 1..285: note = Description of Artificial Sequence: Synthetic coding sequence
  source 1..285: mol_type = other DNA
aagatcttagatgccatgaatcgggactgtggcatccccctatcccacctccaggtcgacggagggatgaccagcaataaaatccttatgcagttgcaggccgacattctgtacatcccagtggttaagccaagtatgccggagacgacagcccttggggcagcaatggctgcgggtgcggctgaaggggtgggtgtgtggagtttggaaccagaagatctgtctgccgtcactatggaaagattcgagccacagattaatgctgagggtacatttaaggaatag

SEQ ID NO: 224949 - DNA, 1662 bp, synthetic construct
  misc_feature 1..1662: note = Description of Artificial Sequence: Synthetic coding sequence
  source 1..1662: mol_type = other DNA
atggccgcatctaagaaggctgtgctgggcccactcgttggggctgtggaccaaggaacctcctccacgcggttcctggtgttcaactcaaagaccgccgaattgctctcacatcatcaggtggagataaagcaggaattcccacgggagggatgggtggaacaggaccctaaagaaatcctacacagcgtgtacgagtgcatcgagaaaacatgcgaaaaacttgggcagttaaatatcgacatctccaacatcaaagcgatcggggtctctaaccagcgagaaaccaccgtggtttgggacaaaatcactggagagcccttatacaacgccgtcgtttggctggatctcagaacccagtcaaccgtggagtcactgtctaagaggatcccgggaaataataactttgtaaagagcaaaacgggccttccccttagcacttatttctcggcggtaaaattgcgctggctcctggacaatgtgcgtaaagtgcaaaaggccgtggaagagaaaagagccctatttggcacgatcgatagttggttgatctggagcctgactggtggagtcaacggcggagtgcactgcactgatgtaacaaacgcgtctcggacgatgctgttcaatattcattctctggagtgggacaaacagctgtgtgaattcttcggcattcctatggagattctccctaacgtcaggtccagttcagaaatctatgggctgatgaaggctggcgctctggagggcgttcctattagtggatgcctgggggatcagagtgcggcactagttggccagatgtgctttcagatcggccaagccaaaaacacctacgggacgggctgcttcctgctgtgtaacacgggacataagtgtgtgttcagcgaccacggcctactaacaaccgtggcttataaacttggcagggataagccagtctactacgctttagagggatcagtcgctattgccggagccgtgatcagatggctgcgcgacaatctgggcatcataaaaacatctgaagagatcgagaagctggcaaaagaagtcgggaccagttatggctgctacttcgtgcctgcgttcagcggtctgtacgccccatattgggaaccttcagccagaggtatcatctgcggactgacccagttcaccaataagtgccatatcgcttttgccgcattggaggctgtctgtttccaaacacgagaaatcttggacgccatgaatcgggactgtggcattcccctgagccacctgcaggtggacggcggtatgacttccaacaaaatactgatgcagctgcaggccgacattctgtacattccggttgtgaaaccaagcatgcccgaaacaacagcgttaggtgctgccatggctgctggggcagcagaaggagtcggtgtatggagtctggaacccgaggacctgtccgcggtgactatggaaagatttgagccacagattaatgctgaggaatcagagataagatatagcacttggaagaaggctgtgatgaagagcatgggctgggtaaccacccagtctcccgaaagcggtgatccttctatcttctgcagtttgccactgggattcttcattgtctcttctatggtgatgctcataggtgcacgttacatcagtggtatcccttag

SEQ ID NO: 224950 - DNA, 1575 bp, synthetic construct
  misc_feature 1..1575: note = Description of Artificial Sequence: Synthetic coding sequence
  source 1..1575: mol_type = other DNA
atggccgcatcaaagaaggctgttctcggtcctctcgtaggggcagtcgaccaaggaactagcagcactcggttcctggtgttcaattcaaagaccgccgagttgttgtcccaccatcaagtggagattaagcaagagttcccccgagagggctgggtggaacaggaccccaaagaaatccttcactcagtctacgagtgtatcgaaaagacatgtgagaaactggggcagctgaatatcgacatatccaatatcaaggccattggtgtgagcaaccagcgtgagacaaccgtggtctgggacaagatcactggcgagcccctgtacaatgcagtggtttggctcgatttgcgaacacagagcactgtggagtctttatcaaagagaattcccggaaataacaacttcgtgaaatccaagactgggcttcctttgtccacatactttagcgccgttaagttgagatggcttctggacaatgtgaggaaagtgcagaaagcagtggaagagaagcgcgcactctttgggaccattgattcctggctcatctggagcctgaccgggggtgtcaacgggggagtgcactgtacggatgtgacaaacgcaagccgcacaatgctattcaatattcacagcctagagtgggacaagcaactgtgcgagttcttcgggattcctatggaaatcctgccaaatgtgaggtcttcaagtgaaatctacggcctcatgaaggcgggagctttagagggtgtcccgatttccggttgcctaggtgatcagtctgccgcattagtgggccaaatgtgtttccagatcggccaggccaagaatacctacggtaccggctgtttcttgctgtgcaacacgggccataagtgtgtgttctccgatcacggtctcttgactaccgtggcctacaaattgggccgagacaagcccgtttattatgctctggaaggctctgtggccatcgctggcgcagtgatccggtggttgcgggacaatttgggaatcattaagacctcagaagagatcgaaaagctcgccaaggaggtgggtaccagttatggatgttattttgtgcctgccttttcaggcttgtatgctccctactgggaaccgtctgctaggggtatcatctgtggcctcacacagttcactaacaaatgccacattgcttttgctgctctcgaggccgtttgttttcagacccgcgagatacttgacgctatgaatagggactgcgggattccactctcccatttgcaggtagacggcggtatgacaagtaacaaaatccttatgcagcttcaggcggacatcctttacattcctgtggtgaaaccgtctatgcccgagacgacagctctgggagctgccatggccgcaggagcggctgagggcgtgggagtgtggtctttagagcccgaggacttatctgccgtgaccatggagaggtttgaaccgcagattaacgcagaagaatctgaaatccgctacagcacatggaaaaaagccgtgatgaagtcaatgggatgggtgaccacccaaagtccagagagtgggatcccttag

SEQ ID NO: 224951 - DNA, 1593 bp, synthetic construct
  misc_feature 1..1593: note = Description of Artificial Sequence: Synthetic coding sequence
  source 1..1593: mol_type = other DNA
atggccgcatctaaaaaggctgtcctgggacctctggtgggcgctgtcgatcagggcacctcctctacgcggtttttggtgtttaactctaagacagcagaactactctcccaccaccaggtcgagataaaacaagagtttcccagagaaggctgggttgagcaggatcccaaagaaatacttcattcggtgtacgagtgtattgagaaaacgtgcgagaaattaggacagttaaatatagacatttctaacataaaggcgattggcgtgagcaatcagagggagaccaccgtggtttgggataaaatcacaggcgaacccctgtataacgccgtggtctggctggacttgcggactcagtccaccgtggaaagcctcagcaagcgaattccagggaacaataactttgtcaaatctaagacgggcttacccttatcaacttatttttcagcagtcaagttgcgctggttactggataacgtgaggaaagtgcagaaggctgtggaagagaagagggccctgttcggcacgatcgatagttggctgatttggtcactaacaggaggcgtgaatgggggagtgcactgtaccgatgtgacaaacgcatcacgcaccatgctgttcaacattcacagtctggaatgggacaagcagctatgtgagttctttgggataccaatggagatcttacccaacgtccggtcttcctcagagatttatggcctgatgaagatttctcactcagtgaaggctggtgctctggagggagtcccaatcagcggttgcctgggcgatcagagcgccgcactagtcggacagatgtgcttccaaatcggtcaggctaagaatacctacggcacaggctgctttctgttatgcaacactgggcacaaatgtgtgttctcagaccacggactccttacaaccgttgcttacaagcttggacgtgacaagccagtatattatgcactggaaggcagcgttgccatcgccggagcagtgattagatggctgcgagacaacctgggtatcatcaagacctctgaggagatcgagaagctggcgaaagaggtcggaacatcctatgggtgttatttcgtgcccgcatttagcggtctgtacgccccttactgggaaccctccgcgagagggatcatttgcggccttactcagttcacaaacaagtgtcacatagcctttgctgccctggaggccgtgtgttttcagactcgcgaaatactggacgctatgaaccgtgattgcggcatccccttatcccatctgcaagtggatggtggaatgacctccaacaaaattcttatgcagctgcaggcggatattctgtatatcccggtcgtaaaaccatctatgcccgagaccacagcactcggcgcagccatggccgcaggggcagcggaaggcgttggagtttggtctttagagccggaggatctgtcagcagtgacaatggagcggtttgaaccacagattaacgctgaggagtccgaaattaggtatagcacatggaagaaggcagtgatgaaatcgatgggctgggtgactactcagagccccgaaagcgggataccctag

SEQ ID NO: 224952 - DNA, 1065 bp, synthetic construct
  misc_feature 1..1065: note = Description of Artificial Sequence: Synthetic coding sequence
  source 1..1065: mol_type = other DNA
atgctgttcaacatccattcactggagtgggataaacagctgtgtgaattttttggaattccgatggagattctcccaaatgttagaagttctagcgagatctatggcctgatgaaaatctctcactcggtaaaagccggagcactagagggcgttccaatatccgggtgcctaggcgaccagtctgctgcactagttggccagatgtgcttccagattggacaggcgaaaaacacctacggaaccggatgtttcctgctctgcaataccggtcataagtgcgtgttttctgaccacggattacttactaccgtggcttataagttagggcgagataaacccgtgtactacgcccttgaggggagtgtggctatcgccggagcagtcatcaggtggctcagagataatctgggaatcattaaaactagcgaagagatcgagaaactggccaaagaagttggtacgtcatacgggtgctacttcgtgcccgctttctctgggctttatgcaccttattgggagccgtccgccaggggaataatatgtggactgactcagtttaccaacaagtgtcacattgccttcgccgctctggaggccgtgtgttttcagactcgagaaattttagatgctatgaatagggactgcgggattcccttatcccacctccaggttgacgggggaatgacctctaacaaaatacttatgcagcttcaggcagatatactgtacatcccagtggtgaagccaagtatgcctgagacgactgccctgggtgctgccatggctgctggcgcagccgagggcgtgggagtgtggagtttggagcccgaagacctgtctgccgtgaccatggaaagattcgagccccaaatcaatgctgaagaaagtgaaatacgatattcaacttggaagaaagccgtgatgaagtccatgggatgggtcacaactcagagtcccgagtctggcgatccgtcaatcttctgctcactgccgcttggattctttatcgtaagtagcatggtgatgctgatcggcgctaggtatattagcggaattccgtag

SEQ ID NO: 224953 - DNA, 1104 bp, synthetic construct
  misc_feature 1..1104: note = Description of Artificial Sequence: Synthetic coding sequence
  source 1..1104: mol_type = other DNA
atggcctacctggacaactttaagacaaatgcaagacattttatcctgtttgttaatatctcgtcactaaccggcggagtaaatggcggagtccactgtaccgacgtgacaaacgcttcccgcaccatgctatttaacatccactccctagagtgggataagcagctctgcgagttcttcggaattcctatggaaatcctgcctaacgtcaggagcagtagtgagatctacgggctgatgaagatcagccattctgtcaaggcaggcgctctggaaggagtgccaattagtggatgtttgggtgatcaaagtgctgccctggtgggccaaatgtgtttccagattgggcaggcaaagaacacttatggtaccggttgcttcctgctgtgcaataccggccataaatgcgtgtttagcgaccacggcctgttgaccacagtagcttacaagctcggtcgcgataaacccgtgtactatgcgctggaaggatctgtggccattgcaggagctgtcatcaggtggttgcgggacaatttggggatcatcaaaaccagcgaggagatagagaaactagctaaggaggtagggaccagctacggatgctacttcgtgcccgcattctctggcctctatgctccctactgggaaccaagtgccagaggcatcatttgtggtcttacgcagtttacaaacaagtgccatatcgcattcgccgcactggaagccgtgtgttttcagacccgagaaatcctcgatgctatgaacagagactgcggaatcccgctctcccacttgcaggtggatggaggcatgactagcaataagatacttatgcaacttcaggccgacattctctatattcctgtggtcaagccaagcatgcccgagaccactgccctgggagcggctatggcagcgggtgccgctgagggggttggcgtctggtctctggagcccgaagacctctctgccgtgactatggaacgattcgaaccgcagatcaatgccgaggaaagcgagattagatactctacatggaagaaggcagtcatgaaatccatgggctgggtgaccacccagtcccctgagagcggcattccatag

SEQ ID NO: 224954 - DNA, 1680 bp, synthetic construct
  misc_feature 1..1680: note = Description of Artificial Sequence: Synthetic coding sequence
  source 1..1680: mol_type = other DNA
atggccgcttcgaagaaggccgtactcgggccattggtgggggcagttgaccaggggacctcgtccacgagattccttgtgtttaatagtaaaacggcagagcttctgagccatcaccaagttgagattaagcaggagttcccacgggaaggatgggtcgaacaggatcctaaggaaatactgcatagtgtttacgagtgcattgaaaagacttgtgagaaactgggccagctgaatattgacatctctaatattaaggcaattggagtttctaaccagcgtgaaaccacagttgtctgggacaaaataaccggtgagccactgtacaatgctgtcgtctggttagatctgaggacccaatcaacggttgaaagcctttccaagcgtatccctggtaataataactttgtgaagtctaagacaggactacctctgagcacctatttctcagccgttaagctgagatggttgctggacaatgtgagaaaggtccaaaaagctgtcgaggagaaacgagctctgttcggcactattgactcttggctgatatggtctctcaccggcggagtcaatggcggtgtgcactgcaccgacgtcactaatgctagccggactatgctgttcaacattcacagccttgaatgggataagcagctgtgcgagtttttcggaattcccatggagattttgcccaacgtacgttccagttccgaaatctacggtcttatgacgatccacaactcaaagaaagccggtgctctggaaggagtccccatctccggctgtctgggtgatcagtccgcggctcttgttggccagatgtgtttccagatcgggcaggcaaagaacacttacggcacaggatgcttcttactttgcaacaccggccacaaatgcgtattttcagaccacggcctgctgacgacagtggcttataagctgggacgggacaagcccgtgtattacgccctggaggggtccgtggcaattgctggagctgtcattcggtggttgcgcgataacctggggattattaagacctctgaagaaattgagaagctggcaaaggaggttgggacctcatatggctgctactttgtacccgctttcagcggactgtatgcaccttattgggagccaagtgcacgtggaatcatatgtggactcacacagttcacaaacaaatgtcatatagcgttcgctgcactcgaagccgtctgcttccaaacccgggaaattttggatgccatgaatcgggactgtggcatacccctttcccaccttcaggtcgatggtgggatgaccagtaataaaatattaatgcaattacaggcggacattttgtacatacccgtagtgaaaccctccatgccggagactaccgccctgggggctgctatggctgccggtgccgcagagggagtgggagtctggtcacttgagccagaggatctgtccgctgtgactatggagcggtttgaaccacagattaacgccgaggaatccgaaattcgctacagcacctggaaaaaggctgttatgaagtcgatgggctgggttaccacgcagtcgccagagtcaggtgaccctagcattttttgttcactgccattaggcttttttatcgtgagcagcatggttatgctgatcggggcacgttacatctcagggataccctag

SEQ ID NO: 224955 - DNA, 1662 bp, synthetic construct
  misc_feature 1..1662: note = Description of Artificial Sequence: Synthetic coding sequence
  source 1..1662: mol_type = other DNA
atggcagcccctaagacagccgctgtcggcccactcgttggcgcagttgttcagggtacaaactcgacacgctttttggtgttcaatagcaagacggccgaactgctaagccaccacaaagtagagctgacccaggagttcccgaaggaagggtgggtcgagcaggatcccaaagaaattctgcaaagcgtctacgaatgtatagccaggacctgcgagaaactcgacgagctcaacattgatatcagcaatattaaagccgtgggggtgtcgaatcaaagagagacgaccgtgatatgggataagctgacaggagagcccctttacaacgccgtggtctggctggatctcagaacacagactacagttgaggatctgtccaagaagattcctggcaatagcaatttcgtcaagtcaaaaacagggttaccactgtcaacatatttcagcgccgttaagttaaggtggatgttggataatgtgcgcaacgtgcaaaaggcggtagaggaaggcagagccctgttcggcactatcgactcttggctaatttggtccctgaccggcggtgtaaatggaggcgtgcactgtacagatgtaaccaatgcaagccgaaccatgctgttcaatatccactcacttgagtgggataaggaactatgcgatttcttcgagatccctatggatctgctgcccaacgtgtttagctcatccgaaatctacgggctaattaagactggcgctctggagggtgtgcccatctcaggctgtctcggggaccagtgcgcggctctggttggccagatgtgctttcaagaaggacaagccaagaatacttatggcacaggatgctttttgctgtgtaacaccgggaggaagtgtgtgttcagcgagcatgggctgttgactacggtcgcctacaagctgggcagagagaaaccagcatactatgccctggaaggctccgttgccattgccggtgcggtcattaggtggctgcgggacaacctgggcatcattgagactagtggagatattgagagactggctaaggaagttggaacaagctatggttgttacttcgtgcctgcattcagcggtctgtacgctccatactgggaaccaagcgccaggggaattctctgtggcttgactcagttcacaaataagtgccatatcgcatttgcggctctggaagcagtgtgctttcagactagggagatcctggaggcaatgaatagagattgtggcatccctctgcgacatctgcaagtcgacggagggatgacaaataacaaagtgctgatgcagttacaggctgacatactccatatcccggttatcaagccttttatgccagagacaaccgctttgggcgctgccatggccgcaggcgctgcagagggcgtttccgtctggtctctggagccccaggcactgtcagttcttcgtatggagagattcgagccccagatacaggccaccgagagtgagatcaggtacgctacatggaaaaaagccgttatgaagagcatgggctgggtcaccagccagtcccctgagggcggagaccctagcatctttagcagtcttccgcttggcttcttcatcgtgtccagcatggttatgcttattggcgctcggtacatttccggcgtgccttag

SEQ ID NO: 224956 - DNA, 1050 bp, synthetic construct
  misc_feature 1..1050: note = Description of Artificial Sequence: Synthetic coding sequence
  source 1..1050: mol_type = other DNA
atggcctcaaagaaggtgtgcatcgtgggtagcggaaattggggttctgccattgctaaaattgtgggcggaaacgctgcgcagctcgcccagtttgacccccgagttactatgtgggtgttcgaggaagacataggaggtaaaaaactcaccgaaatcattaatactcagcatgagaatgtaaaatacctgccgggtcacaaattaccccctaacgttgtggccgtgcctgacgtggtgcaggctgcggaggacgccgatattttgatcttcgtggtaccgcaccagtttataggaaagatctgcgaccagctcaaaggccacctcaaggcaaacgcaactggtatctccctgatcaaaggggtggacgagggacccaacggcctaaaacttatttcagaagtcatcggtgagcggcttggaatacccatgtcagtgcttatgggcgcaaacattgcctccgaagtggcggatgaaaaattttgtgagacgaccatcggatgtaaagatccagctcaggggcagttgcttaaagagctcatgcagacacctaattttaggattacagtggtgcaggaagttgacactgtagagatttgcggagccctcaagaacgtggtggctgtcggcgctgggttttgtgacggactcggattcggcgataacaccaaagcagccgtcatcagattgggactgatggaaatgatcgcattcgcaaaactcttttgctcaggcccagtgagttcagctacgtttctggagagctgtggagttgccgatctgatcactacctgctacgggggacgcaatcgtaaggtcgccgaagctttcgccaggaccgggaaatcaatcgaacagctcgagaaggagctgctcaacgggcagaaactgcaaggcccagagaccgctcgggagctttactccattctgcagcataagggactcgtagacaagttccctctgtttatggccgtgtataaagtgtgttatgagggtcaaccagtgggtgagtttattcactgcctccagaatcatcctgagcacatgtag

SEQ ID NO: 224957 - DNA, 981 bp, synthetic construct
  misc_feature 1..981: note = Description of Artificial Sequence: Synthetic coding sequence
  source 1..981: mol_type = other DNA
atgcagactcctaacttccggatcaccgttgtgcaggaggtggatacagtggagatttgtggggcactcaaggtgcgcggtgcgcagcggcaactgtggggcgaagagaaggccccaaaagaggtctggctgtcctcagcccgactgcaggtgctgcaggcgctgactatcgaacagtggtttccattccctacaatgtctcatgcctatagaagatcttgtcgttctaaggcaagggctatccaggccgactactcatcctccgatcgtggccctccatgcagctgtcctatcctggccccatgcgggacaccccaccccctggctcctggtggacagggggacaaagagatgcctcggttaatgggcgataagaccagcctgacaccacgccagaccaatgggcagaattacggttcttggaccgctgtggatgggttatataatggtatggttagatgggaggatcagcttgaacgccgagtagtgttccgcaaatgcccgaggggcggaagcatgggccaaggcctcaggaagggagttcagcagggtgggaaacctagaggcggatctcgcctgttgaagggccacaccctgtatctttccagcgccgtcggcgttactgcagacgagatgtccatgagggggctgcatatgggccctataggaggcggactgtttacatatgacctacacagcttcaagaacgtcgtggcggtcggagccggtttttgcgacggactgggctttggcgataacacaaaggctgcagtcatccggcttgggctgatggagatgatcgcgttcgctaagctgttctgctccggccctgtgagttcagccacattccttgagtcttgtggcgttgcagatctcatcacaacctgctatggaggaaggaacagaaaggtcgctgaggcattcgccaggaccggaaaggtgggccctgggagaagagagaaccgaggggcagctttatag

SEQ ID NO: 224958 - DNA, 1056 bp, synthetic construct
  misc_feature 1..1056: note = Description of Artificial Sequence: Synthetic coding sequence
  source 1..1056: mol_type = other DNA
atggccgcagcccctctcaaggtgtgtatcgtcggatcgggtaattggggcagtgctgtggcaaagatcataggcaacaacgtaaagaagctgcagaagtttgctagcaccgtcaaaatgtgggtttttgaagagacagtcaacggacgaaagcttacggatatcatcaataacgatcacgagaatgtgaaatacctccctgggcacaaactccccgaaaatgtggtggccatgtccaacctaagtgaggcagtgcaggatgccgacctgcttgtgttcgttatccctcatcagtttatacaccgcatatgtgacgaaattacgggacgcgtgccgaagaaggcactgggtatcacccttataaagggcatcgatgaaggcccagaggggctcaagctaatcagtgacatcatccgtgaaaagatgggaattgatattagcgtactcatgggggcaaatattgctaatgaggtggctgccgagaagttctgtgagactactataggatcgaaagtaatggagaacggactactgtttaaggaattgctgcaaacacctaattttcggattaccgtggtagacgacgcggacactgtcgagctctgcggggctttgaagaacatcgtggcggtgggcgcaggcttttgtgacggactcagatgcggcgataacactaaagctgccgtgattcggcttggcttgatggagatgatagctttcgctcgcatattctgtaaaggacaggtttctacggccacatttctggagagttgtggcgtggcagacctgataactacgtgttacggcggacgaaatcgacgggtggctgaagcgtttgctcgcacgggcaagaccattgaggaacttgaaaaagagatgctgaatggccagaaactgcagggaccacaaaccagtgccgaggtatataggattttgaaacagaaggggttgcttgataaattcccattgttcaccgcagtgtatcagatatgctacgagtcacgccctgtacaggagatgctgagttgcctgcaatcccaccctgagcatacttag

SEQ ID NO: 224959 - DNA, 1860 bp, synthetic construct
  misc_feature 1..1860: note = Description of Artificial Sequence: Synthetic coding sequence
  source 1..1860: mol_type = other DNA
atggagtcatcttcctcttcaaattcgtacttttccgtggggcctacttcaccaagcgcggtcgttttactgtactccttgtcaaaagaatcattgcagagcgtcgacgtactccgagaagaggtcagcgagattctggacgaaatgtctcacaagctcaggctaggcgcaatacgcttctgtgcatttacattatccaaggtttttaagcagattttttcaaaggtgtgtgtgaacgaagaaggcattcagaaactgcaaagagccattcaggagcatcccgtcgttctgctgccctctcacaggtcgtacattgatttcctcatgctctcatttttgctatataactatgacttacccgtccccgttatcgcagccggtatggacttcctgggcatgaaaatggtgggtgagctgctcaggatgtccggagcattctttatgcgccgaacatttggtggtaacaaactttactgggccgtctttagcgagtacgtgaaaacgatgctgaggaatggatatgctcctgtggagtttttcctcgagggcacgcgttcacgctccgctaagaccttaacaccaaagtttggtttgctgaacatcgtgatggaaccttttttcaagcgcgaagttttcgatacttacctggtgccaatatctatctcatatgataaaattctcgaggagacgctgtacgtttacgaactgttgggagtgccaaagcccaaagaaagcaccacagggcttctgaaggctcgaaaaattctgtccgaaaattttggaagcattcacgtttacttcggcgatcctgtgtcactcagaagtctcgcggcaggcaggatgtcgcgttcttcctataatttggtccctcgatatatccctcagaaacagagcgaggatatgcacgccttcgtgacagaggttgcctacaagatggaactcttgcagatcgagaatatggttttgtccccctggactctcattgtggctgtgttgctccaaaatcgtccctctatggacttcgacgcattagtcgagaaaacactgtggctgaaaggcctcacgcaggccttcggaggattcctgatctggcccgacaacaaacccgcagaggaagtggtgcccgcttcgattctacttcacagtaatatcgcgtcactggttaaggatcaagtgattttgaaagtagacagcggcgatagtgaggtggtcgatggtctgatgcttcagcacattacactgctcatgtgcagtgcttacagaaatcagctgctgaacatatttgttcggccatcgctggtggctgtcgcactgcagatgacaccaggcttccgaaaggaagacgtctatagctgcttcagattcctgagggacgtatttgccgatgagtttatattcctgcctggcaataccctcaaggactttgaggaggggtgttaccttctgtgcaaatctgaggcgatacaggtgaccactaaggacattttagtcaccgaaaaaggtaacacagtactggagttcttggttgggctgttcaaaccgtttgtggagtcctaccaaattatctgcaagtatttactgtcggaggaggaggaccacttttccgaagagcagtacctggccgctgtgaggaaatttacttctcagttgcttgaccagggtactagccagtgttatgacgtgctcagcagcgatgtccagaaaaacgctctggctgcctgcgtgagactgggggtagtcgagaaaaaaaaaatcaataacaattgtatctttaacgtaaacgaacctgccacaacgaaactcgaagagatgcttggctgtaagactcccatcggaaagcctgccaccgccaaactctag

SEQ ID NO: 224960 - DNA, 2043 bp, synthetic construct
  misc_feature 1..2043: note = Description of Artificial Sequence: Synthetic coding sequence
  source 1..2043: mol_type = other DNA
atggagagcagtagcagtagcaactcctacttttcagtgggccctactagcccttctgccgtggttctcctgtattccaaggagctgaaaaagtgggacgagtttgaggatatcttggaagaacggagacacgtgagtgatctgaaatttgctatgaagtgctacacaccccttgtgtataagggaattacaccctgtaagcctatagatatcaagtgtagtgtcctgaacagcgaagaaattcattacgtaatcaagcaactatctaaagagtctctccaatctgttgatgtgcttagagaggaggtgtccgaaattctcgatgagatgtcccacaagttgcgcctgggagccattaggttttgcgcctttacattgagtaaagtgttcaaacagattttcagtaaggtgtgtgtgaacgaagaggggattcaaaaactccagcgagccatccaggaacaccccgtggtgttgctgccctcacaccggagctacatcgatttcttaatgctgtccttcctgctttataactatgacctgcctgtacccgtcatcgccgctggcatggacttccttggcatgaaaatggtgggtgagctactgcgcatgagcggcgctttcttcatgaggcgaacctttggtggcaataagctctattgggctgtgttttccgagtatgtgaagacaatgctccggaatggctatgctcccgtcgagttctttctcgagggtacaagatctcgttcagccaagacccttacacccaaatttggccttctgaatatcgtgatggaaccttttttcaagcgagaggtctttgatacatatctcgtgccaatctcgatttcctatgataaaattctcgaagaaactttgtacgtctatgagctgttgggagtgcccaaacctaaagagagcacaaccggtctgctcaaagctaggaaaatactctctgagaattttggctctattcatgtgtattttggtgacccagtatcccttcgtagtcttgctgcaggcaggatgtctagatctagctataatctggtgcctagatatatccctcagaaacagtcggaggatatgcacgcctttgtgacagaggtcgcctacaagatggagctcttgcagatcgaaaatatggtgctttccccgtggactctgatcgtagcagttcttctccagaataggccttcaatggactttgacgcattggtcgaaaagacactttggctaaaaggcctcactcaggccttcggtggcttcctgatttggccagacaataaacccgctgaagaggtggtgcccgcaagcattctgctccactccaacatcgctagcctggtgaaagatcaagtgattctcaaagtggatagcggcgattcagaagtcgtggatgggttgatgctgcagcacatcacgttgctgatgtgctcagcgtatcgaaatcagctcctcaacatctttgtccgcccatctcttgtggccgtggctttacaaatgactccaggctttagaaaagaagacgtgtacagctgttttcgcttcctgcgtgacgtgttcgctgacgaattcatttttctacctggcaacaccctcaaggacttcgaggaaggctgctacttgttatgtaaaagtgaggctattcaggtcactaccaaggatatcttggtgaccgaaaaaggaaatactgtgctcgagtttctggtcgggctgttcaagccattcgtggagagctaccagataatttgcaagtatcttctgtcggaggaagaagatcatttcagcgaggagcagtatctagctgctgtgcgcaagtttacttcccagctgttggaccagggtacaagtcagtgttacgacgtgctgtcctcagatgtccaaaaaaatgctctggcagcgtgtgtgaggctgggagttgtcgagaagaagaagattaataataattgcatcttcaatgtgaacgaacccgcaaccaccaaacttgaagaaatgcttggctgtaagacacccattggaaaaccagcgacagccaagctttag

SEQ ID NO: 224961 - DNA, 1764 bp, synthetic construct
  misc_feature 1..1764: note = Description of Artificial Sequence: Synthetic coding sequence
  source 1..1764: mol_type = other DNA
atggagagttcctccagcagtaattcttacttcagtgtgggcccaacttctccatccgcagtggtgcttctgtattccaaggaattgaagaaatgggacgaattcgaagatattctggaggagagaaggcacgtaagcgacctgaaattcgcgatgaaatgctacacccccctggtttataaagggataactccctgcaagcccatcgacatcaaatgctctgtgctgaacagcgaagagatccactacgtgatcaaacagttgtctaaggagtccttacaatctgttgatgtgctccgcgaagaggtctccgagattctggatgagatgtcccataaactccgcctgggcgcaattagattctgcgcctttaccctgtccaaggtgttcaagcagatattctccaagctgcagagggctatccaggaacatccagtggtgttgctgcctagtcaccgcagctatatagacttcctcatgctcagctttcttctctacaactatgatttgcctgttcccgttatagcagcgggaatggattttttgggaatgaagatggttggggagttgcttagaatgtcaggggcatttttcatgcggcgaacattcggcggaaacaagctctactgggctgtgtttagtgaatatgtgaaaacaatgctgaggaatggatacgccccagtcgaattttttctggagggtaccaggtctcgttccgctaaaaccctgacccctaaattcggcctgttgaacattgtgatggagccattttttaaacgtgaagtgttcgacacttatctggtgcccattagtataagctacgacaaaattctggaagaaaccttatatgtttacgagttgttgggtgttcccaaaccaaaggaatctacaaccggcctcttaaaggctaggaagatactgtctgaaaatttcgggagtattcacgtgtactttggcgatccagtgagccttaggagccttgctgcaggacgaatgtcgaggagctcatataacttggtgcctcggtacatcccgcagaagcagtcggaagacatgcacgcattcgtgactgaggtggcctataagatggagttattgcaaatcgaaaatatggttttatcaccctggaccctgatagtagctgttttgcttcagaacagaccttccatggattttgatgcactggtcgagaaaaccttatggctgaagggtttgacccaggccttcgggggattcttaatatggccagataataagccagcagaggaagtcgtgccggcatcaatcctgctgcacagtaatattgcttcacttgtgaaggaccaagtgatcctaaaagttgactcgggggactctgaggtcgtggatggcctgatgctgcagcatatcactctgctgatgtgttcagcctaccgcaatcaactcctcaatattttcgtaagaccttccttagtggccgtggctctgcagatgacacccggatttcggaaggaagatgtctactcatgttttcgattcctgagggacgttttcgccgatgaattcatttttttacccggaaatactctcaaggatttcgaagaaggctgttatctgctttgcaagtctgaagccattcaggttactactaaagatatactcgttactgaaaaaggaaacacggtgctggagtttcttgtgggcctctttaagccattcgtcgaatcataccagatcatctgcaagtacctgttgtcagaagaggaggaccacttttccgagtag

SEQ ID NO: 224962 - DNA, 669 bp, synthetic construct
  misc_feature 1..669: note = Description of Artificial Sequence: Synthetic coding sequence
  source 1..669: mol_type = other DNA
atggagtcttctagctcttcaaactcttacttcagcgttggcccaaccagcccatctgccgtggtgctgctgtattctctcagcaaggagtctctgcagagtgtagatgtccttcgcgaagaggtcagcgaaatattagacgaaatgtcacataagttacgacttggcgcaatccgcttctgtgcattcacactttctaaagtcttcaagcagattttcagtaaggtttgtgtcaacgaggaaggcatccaaaagctgcaacgggctatccaagagcaccccgttgtgctgctgccttcacaccgttcatacatcgatttcctcatgctctcttttctgctgtacaactacgacctacctgtgcctgtaatcgccgcaggcatggactttctgggaatgaagatggtgggagagttactccggatgtcaggagccttttttatgaggagaactttcggtggcaataagctgtattgggctgtgtttagcgagtatgtgaaaaccatgcttagaaacgggtacgcccctgtagaattcttcctggaggggactcgctcccgcagcgccaaaacacttacacctaagttcgggctccttaacatcgtgatggaacctttttttaaaagagaagtttttgacacttacttggttcctatctccatcagctag

SEQ ID NO: 224963 - DNA, 870 bp, synthetic construct
  misc_feature 1..870: note = Description of Artificial Sequence: Synthetic coding sequence
  source 1..870: mol_type = other DNA
atgagtcgaaatagtaggaagacaattggtaaggtgcgtgtggattacataattatcaagcccctcccgggatactcatgcgatatgaaatcaagtttttccaagtattggaagcccagaatccccctagatgtggggcacagaggtgctggaaacagtaccactactgcccagctggctaaagtacaagagaatacaattgcttccctgcgcaatgccgctagtcacggagctgcgtttgtggaattcgatgtgcatctctctaaagattttgtacctgtagtctatcacgacttaacctgctgcctgactatgaaaaaaaacctatggttccgcaggaaaattccgttccagaagattagtcactttctcttgttgcggtgggtacgccagaagcagaacaagtatcccatcctgtttctgacccagggaaagagtgaaatttatcctgaacttatggatcttcgctcccgaaccacaccaattgcaatgagcttcgcgcagttcgaaaatctcctgggaatcaatgtgcacacagaggatctcctaaggaatccttcatatatccaagaagcgaaggccaagggactggtgattttctgttggggtgacgatactaatgaccctgaaaatcggaggaaactgaaagagctgggtgtaaacggtctcatctatgacaggatttacgactggatgcctgaacaacccaatattttccaggtggaacagctggagcgccttaagcaggaactaccggaacttaagagctgtctatgtccgaccgtgagtcgattcgtgccctctagcctatgcggcgagtctgatatccatgtcgacgccaacgggatcgataacgtggaaaatgcttag

SEQ ID NO: 224964 - DNA, 2019 bp, synthetic construct
  misc_feature 1..2019: note = Description of Artificial Sequence: Synthetic coding sequence
  source 1..2019: mol_type = other DNA
atgaccccatcccaagtcgcattcgaaataagagggactctattaccaggcgaagtcttcgccatctgcggctcatgtgacgcactcggcaactggaatccacagaacgcagtggccctactcccagagaacgacacaggggaaagcatgttgtggaaggctaccatcgtactctcgaggggtgtgagtgtacaatatcggtactttaaaggatacttcttggagcctaaaactatagggggtccttgccaagtgatcgtccacaaatgggaaacccatctgcaaccgagatcaattacgcctctggagtctgaaatcatcatcgacgatgggcagttcggtattcataacggagttgagacgttggattccggatggctcacttgccagaccgagatccgcttgcgccttcattatagcgagaaaccacctgtgagtataacaaagaagaagttgaagaaatcgaggttccgagtgaaactgactctggagggcctggaagaggatgatgatgaccgggttagtcccacagtcttacataagatgagcaactctctggagatctctttgatttcagataacgaattcaagtgccgtcattctcaaccggagtgtggctatgggcttcagcctgatcggtggaccgaatacagcattcagactatggagccagacaatctcgagctgatctttgacttttttgaggaagacctgagcgaacacgtggtgcagggcgacgctctgcccggacatgtaggcacagcatgcctacttagttccacaatagccgagtccggcaaatccgccggaatattaacactccccattatgtcccgtaatagcagaaagaccatcggaaaagtcagggtagactacatcattatcaagccccttccgggttactcctgtgatatgaagtccagctttagcaaatactggaagcctcgcattccattagatgttggccatagaggggctggcaactctacgaccaccgcccaacttgccaaggttcaggagaacaccatagcctcgctccgaaacgcagctagccatggtgctgcttttgtcgagtttgatgtgcatttgtccaaggacttcgtgccggttgtgtaccacgacctaacgtgctgcctgacaatgaaaaaaaaattcgacgcagatcccgttgagctctttgagattcccgttaaggagctgacgttcgatcagctccagctgctcaagttaactcatgtgacagcgttgaagtctaaagaccggaaggaaagtgtggtacaggaggagaattcattctctgaaaaccaaccattcccttctctcaaaatggttctggagtctttaccagaagacgtgggatttaatatcgagatcaaatggatttgtcagcagcgagacgggatgtgggatggaaatctgtcgacctatttcgacatgaatctgtttctggatattattctgaagacagtgctggaaaactcaggaaagcgtcgaattgtgtttagctctttcgatgccgatatttgtactatggtgagacaaaagcagaacaaataccctatcttgtttcttacgcaggggaagagtgagatttatccagaacttatggacctgcggagtcgcacaacacccatcgcgatgagtttcgctcaattcgaaaatctgctggggattaatgttcacaccgaagacttgttacgtaaccccagttacatacaagaagctaaagccaaaggtctggtgatcttttgctggggcgacgacaccaacgaccccgagaatcggaggaagctcaaggaactgggtgttaatggactaatctatgacaggatttatgattggatgcccgagcaacccaatatcttccaggtagaacaactggaaaggttaaagcaagagttaccggagcttaagtcatgcctctgcccaactgtgtcccgctttgtacctagcagcttatgtggagagagcgatatccacgttgatgccaacggtatcgataatgtggagaatgcttag

SEQ ID NO: 224965 - DNA, 795 bp, synthetic construct
  misc_feature 1..795: note = Description of Artificial Sequence: Synthetic coding sequence
  source 1..795: mol_type = other DNA
tgatgcgatatgaaatccagcttctctaaatactggaagcctcggatacccctcgacgtgggccacaggggcgcaggaaacagtactacaaccgcccagttggctaaagtccaggagaacactatcgccagcttaagaaacgccgcttcccatggcgctgcctttgtcgaatttgatgtccatctgtccaaagattttgtcccggtagtgtatcatgatctgacatgttgcctgactatgaagaagaacctttggttcagaaggaaaataccttttcagaagatatcccacttcctgttgctgagatgggtgcgccagaaacaaaacaaatatcccattttgttcctgacccagggaaagagtgagatctacccagagctcatggacttgagatcaagaacaaccccgatcgcgatgtcattcgctcagttcgagaatctcctgggaatcaacgtacacaccgaagatcttctgcgtaatccgagctacatccaggaagctaaagccaaaggcctcgttattttctgctggggcgacgacacaaacgacccagagaacaggcgtaagctgaaggagctcggcgtaaacggccttatctatgaccggatctatgactggatgcccgaacagccaaacatcttccaggtggaacagctggagagattgaaacaggaactgcctgaattaaagtcttgtctgtgccctacggtgtctaggttcgttccctcttcattgtgcggtgaatccgacattcacgtggatgcaaacggaattgacaatgtggaaaacgcgtag

SEQ ID NO: 224966 - DNA, 996 bp, synthetic construct
  misc_feature 1..996: note = Description of Artificial Sequence: Synthetic coding sequence
  source 1..996: mol_type = other DNA
atgtggctctgggaggatcagggcggactcctcgggccattcagctttttactgctcgtgctgcttctggtcacccggtccccagtaaatgcatgtctgctgaccggatcattattcgtactcttgagggtcttcagctttgagccggtccctagttgcagggcactccaggtgctaaaacccagagatcggattagcgcaattgcgcatagggggggatcgcatgatgctcctgagaatacgctggccgctattagacaagctgccaagaacggtgctaccggggtggaactggacatcgagtttacatctgatggaatccccgttctcatgcacgacaatactgtcgatcgcacgactgacggaacaggacgactgtgcgatctgacatttgaacaaatacgcaaacttaatcctgcggcaaaccatcggctgaggaacgattttcccgatgagaaaatccctactctccgtgaggccgtggcggagtgtctaaaccataatctgaccattttttttgatgtgaagggacacgcccacaaggccaccgaagcattgaagaaaatgtacatggagttcccacagctgtataataacagtgtcgtgtgcagtttcctgccagaggtgatctataaaatgagacaaacagaccgtgatgtcatcacagctctgacgcacaggccctggtctctctcccatacaggagacggcaagccacgttacgataccttctggaagcactttatctttgtgatgatggacattttgttggactggagcatgcacaacatcctgtggtatctgtgtgggatatctgcttttctgatgcaaaaggacttcgtgagtcctgcttatctcaaaaagtggtctgctaagggaattcaggtggtgggctggaccgtgaatactttcgacgagaaaagttactatgagtctcatctggggagtagctacattaccgactccatggtagaggactgcgagccacatttctag

SEQ ID NO: 224967 - DNA, 1818 bp, synthetic construct
  misc_feature 1..1818: note = Description of Artificial Sequence: Synthetic coding sequence
  source 1..1818: mol_type = other DNA
atggtgcgacaccagcccctacagtactatgagccccaactgtgcctgtcatgcctgacaggcatttatggatgccgctggaagcgttaccaaagaagtcacgacgacacaaccccgtgggagcgcctgtggtttctccttctgacattcaccttcggcttgacccttacatggctgtatttctggtgggaggttcataatgattacgatgagttcaactggtatctttacaatcgcatgggctactggagcgattggcccgtcccaattctggtgaccaccgcagctgcctttgcttacattgcaggattgctggtcctggcgctctgccatatcgctgtggggcaacagatgaaccttcactggctgcataagataggattggttgtcattctggcatccacagttgtggctatgtcggcagtcgcacaactctgggaagatgagtgggaagtgctactgatttccctgcagggaaccgcccctttcctgcacgtcggagccgtagccgcagtcacaatgctctcgtggattgtggccggtcagtttgccagagccgagaggacatcgtctcaagttaccatcttgtgtacctttttcactgtcgtattcgcactgtatctggcgccactgactataagttctccttgtatcatggaaaaaaaagacctgggacctaagcccgctcttatcggacaccggggtgcacctatgctggcacccgagcacacactgatgtctttcagaaaggccttggagcagaagctttacggtctgcaggccgacatcaccattagcttggacggcgtgcctttcctcatgcacgatacaacattacgacgtaccaccaacgtggaagaggaattccctgaactcgccaggcgtcctgcctcaatgctcaactggacaacattacagagactgaacgctggtcagtggttcctgaagactgatccgttctggacagcctctagcctcagcccaagtgatcaccgagaggcacagaatcagtcgatttgtagcctcgctgagttgctggaacttgctaagggtaatgccactctgctgctaaatctccgcgacccaccccgtgagcatccatatagatcctcctttataaatgtcaccctggaagcggtcttgcactctgggttcccgcagcaccaggtaatgtggcttccttctagacagcgacccctggtcagaaaggtggctccgggttttcagcagacttcgggttccaaagaggcagtagcttctttgcgtagagggcatattcaaagacttaatcttcgctacacccaggtgagccgacaggagctgcgggactatgccagttggaacctttccgtcaacctgtacacagtcaacgctccgtggttgttcagtctgctatggtgtgcaggcgtgccaagcgtgacttcagacaactcccacgccctgtcacaggtaccttctccactttggatcatgcctcctgacgaatattgcttgatgtgggttacagcggaccttgttagcttcaccttaatagtcgggatctttgtcctgcagaagtggcgcctcgggggaatccggtcatacaatccagaacagattatgttatccgcagccgtccggcgtacttcgagggacgtgagtataatgaaagaaaagctcattttttccgagataagtgatggggttgaggttagcgatgttctgtcagtctgttctgataactcatatgatacctatgctaactcaacagctacccctgttggtccgaggggaggcggaagtcataccaagacactcattgagcgctccggacgatag

SEQ ID NO: 224968 - DNA, 1461 bp, synthetic construct
  misc_feature 1..1461: note = Description of Artificial Sequence: Synthetic coding sequence
  source 1..1461: mol_type = other DNA
atggtcagacaccaacccctccagtattatgaacctcagttgtgcctatcgtgtctgacaggaatatacggatgccgttggaagcgttaccagcggtcacatgatgataccacccccggaacggcccctttcctgcacgttggagcggtcgccgctgtgactatgctaagctggatcgtggccggacagtttgcaagggctgagcgtacttccagtcaggtaactattctgtgtaccttttttacggtggtattcgcactgtatttagccccactcactatcagcagtccttgtataatggagaaaaaagacttgggaccgaagcctgcgctaatcggtcatagaggcgctcccatgttggctcctgagcacactctgatgtccttcagaaaagctctcgagcaaaaactgtacggcctccaggcagatatcacaatcagcctagacggcgtacctttcctaatgcatgacacaactcttaggagaacgactaatgtagaagaagagtttcctgaactggcccgtaggcctgcaagcatgctgaattggacaactctccagaggttaaacgcgggtcagtggtttctcaaaaccgatcctttctggactgcatcatcactgtccccctcggatcaccgggaggcgcagaaccagtctatatgctctctggctgaactcctggagctcgcgaaagggaacgccacactgctgcttaacctccgggaccccccacgtgagcatccatacaggtcatctttcataaatgtcacactagaggccgtactacactctgggtttccgcagcatcaagttatgtggctcccgtccaggcagagaccgcttgttcggaaagtggccccaggctttcagcagacatcagggagtaaagaggccgtcgcctctttgagacgaggacatatccaacggctcaacctcaggtacacccaagtgagccgccaggaactgagagactatgcgagttggaatctgtcagtcaacctctacactgtgaatgcaccatggctcttctctctgctctggtgcgccggagtacctagcgtgaccagtgacaattcacacgctttgtcccaggtgcccagccccctctggattatgccgccagacgagtattgcctgatgtgggttaccgccgaccttgtttccttcacacttatagtgggaatttttgtgcttcagaaatggagactggggggtattcggtcctacaatccagaacagataatgttgagcgccgctgttagacgtacaagtcgagacgtttctatcatgaaagaaaagctgatcttcagcgagatttcagatggagtagaggtatctgacgttctgagtgtgtgtagtgacaactcatatgacacctatgctaatagcactgccacccccgtcggccctcggggagggggttctcatactaagacactgattgagcggagcggcaggtag

SEQ ID NO: 224969 - DNA, 408 bp, synthetic construct
  misc_feature 1..408: note = Description of Artificial Sequence: Synthetic coding sequence
  source 1..408: mol_type = other DNA
atggtgcggcaccagccgctgcagtactatgaacctcagctatgtctgtcttgtttgacaggaatttatggttgtaggtggaagaggtatcaacggagccacgatgatactacaccgtgggagcgactctggttcctgctgctgaccttcactttcggattaactctgacatggctgtacttttggtgggaggttcataatgattatgatgaatttaactggtacctctataaccggatgggttactggtctgactggccagttcccatcctagtgaccacagcagcagcattcgcctatattgcgggactgttggtgctcgccctctgccacatcgcagttggacagcagatgaatctacattggctgcacaaggcttccagcgggcttccactgtcgcccctctag

SEQ ID NO: 224970 - DNA, 1404 bp, synthetic construct
  misc_feature 1..1404: note = Description of Artificial Sequence: Synthetic coding sequence
  source 1..1404: mol_type = other DNA
atgtcagccgtggcccagttatgggaggacgagtgggaagtgctgctcataagtttgcagggcaccgccccatttctgcatgtgggagcagttgcagccgtaacaatgctttcatggatcgtggccggacaatttgcgcgtgcagaacgaacaagttcccaggtaacgatcctgtgcacattctttactgtggtgtttgcactgtaccttgcccctcttactatatccagcccctgtatcatggagaagaaggacctgggcccaaaaccagcactcattggtcacaggggggcacccatgctggctcctgagcatacattgatgagcttcagaaaagcgctggaacaaaaactgtacggcttgcaggctgatataactatttccctggacggggtacccttcctaatgcacgataccactctacgtagaacaactaatgtggaggaggaattccctgagctggcaagacggcctgcaagcatgctaaactggaccacccttcagcggctgaatgccggtcagtggtttctcaaaactgatcccttttggacagcctctagcctttctccctccgaccacagggaggcacagaatcagtccatctgctcattagccgaactcctggaactggccaaaggaaacgctacgctgctgctaaacctcagggaccccccacgcgaacatccttatcgatcatcttttataaatgtgactctcgaggcagtgctgcactctggctttccacagcaccaggtgatgtggcttccctcccggcaacgcccattggtcagaaaggtggcccctggcttccaacagacgagcgggagtaaagaagcagtggctagcctgcgccgtggacatattcagcggcttaacctccggtacactcaagtgagcaggcaggaactcagggattatgcctcttggaacttaagcgtaaatctgtataccgtgaatgcgccttggttgttctctcttttgtggtgtgccggagtgccttctgtcacctccgataatagtcacgcactgagccaggtgcccagtcccctgtggattatgccacccgatgagtactgccttatgtgggtgaccgccgacctcgtttcattcaccctgatcgtgggaatcttcgtgctccagaagtggagactgggaggcattcgttcttacaatccagagcagattatgctgagtgctgctgtcaggagaaccagtcgggatgtgtcaattatgaaggaaaagctgattttttctgaaatttccgacggagttgaggtcagcgacgtgctgtcagtgtgctccgataacagttacgacacctacgccaattctactgctaccccggtaggacccagaggtggaggatctcacacgaaaaccctgatagagcgctctggcagatag

SEQ ID NO: 224971 - DNA, 1818 bp, synthetic construct
  misc_feature 1..1818: note = Description of Artificial Sequence: Synthetic coding sequence
  source 1..1818: mol_type = other DNA
atggtccgccaccagcccttacagtactatgagcctcagttgtgtctgtcctgtctcaccggtatctatgggtgtaggtggaagcgctaccagcggtcgcacgatgacaccacgccctgggagagactgtggttccttctactgaccttcaccttcggactgaccctgacatggctctacttttggtgggaggtacacaatgattacgatgagttcaactggtacctgtacaacaggatgggttactggtccgattggccagtcccgatcttggtgaccaccgctgctgcttttgcctacatcgcagggttacttgtactcgccttatgccatattgcggttgggcagcaaatgaacctgcactggttgcacaagattgggcttgtggtgatcttggctagcactgtcgtcgctatgtctgccgttgctcagctttgggaagacgagtgggaggttctgctgatatcgcttcaaggtaccgcacctttcttacacgtcggcgctgtggcagccgtcactatgttgtcttggatcgtcgctggccagttcgccagggcggagaggacgagtagccaggtgacgatcctgtgtaccttcttcactgtggtcttcgccttatatttagcacctctgaccatctcgtccccttgtatcatggagaaaaaagatctcggacccaaacccgcactgattggtcatcgtggagctcccatgctcgcccctgaacacacactgatgagctttaggaaggctttagaacaaaagctttacggacttcaggcagatatcacaatttcgctggatggagtgccctttctcatgcatgacacgacattgcgtcgtaccacaaacgtagaagaagaattccccgagcttgcaagacgccctgccagcatgctgaattggaccactctccagcgcctaaatgcagggcagtggtttctgaagaccgatccattttggaccgcttccagcctgagcccgtccgatcaccgtgaggctcagaaccaatcaatttgtagtcttgctgagctgctggagttggctaagggaaatgccactctgttgctgaacctgagggaccctccgcgagagcatccctatcgcagctccttcattaatgtgacactggaagccgtgttacattctggcttcccccagcaccaggtgatgtggctccctagtagacagcggcctttggtgagaaaagtagcaccagggttccaacagacgtcaggcagcaaagaggcagtagcatcactccgcagaggtcacattcagaggctaaatctgcgctacacccaggtatctcggcaggaactgcgtgactacgcttcttggaacctgtcagtaaatctctacaccgtgaatgcaccctggctgttctctcttctctggtgcgccggagttccttcggtgactagcgacaatagccacgctctgtcacaggtccccagccccctatggataatgcctcccgatgagtattgcctgatgtgggtcaccgccgaccttgttagcttcaccttgattgtaggaatatttgtgttacagaagtggcggctgggtgggattcggtcatacaacccggagcagataatgctcagcgctgctgttagacggacttctagggatgtctccattatgaaggaaaaactcatcttctctgagatttccgatggcgttgaagtgagtgacgttctgtccgtgtgcagcgataactcatacgacacgtacgctaactctaccgctacacccgtaggacccagaggaggcggttcccacaccaagaccctaatcgagagatctggccgatag

SEQ ID NO: 224972 - DNA, 222 bp, synthetic construct
  misc_feature 1..222: note = Description of Artificial Sequence: Synthetic coding sequence
  source 1..222: mol_type = other DNA
atggtgcggcatcagccattacaatattatgaaccccagctctgcttgtcgtgcctcacgggcatatatggatgtaggtggaaaaggtaccagcgaagccatgacgacaccaccccgtgggaacgattatggttcctgcttctcacgttcacctttggactgaccctgacgtggctctatttctggtgggaagttcataatgattatgatgagttcaactag

SEQ ID NO: 224973 - DNA, 1461 bp, synthetic construct
  misc_feature 1..1461: note = Description of Artificial Sequence: Synthetic coding sequence
  source 1..1461: mol_type = other DNA
atggtacgtcatcagcctctccaatattacgagccccagttgtgtctttcatgcttaaccggtatatacggatgtcgctggaagcgttatcaaaggtcccacgacgacaccaccccaggcaccgccccttttttacacgtgggcgcagtcgcagccgtgacaatgctgtcctggatcgtagctggccagttcgcacgcgcagaacggacttcttcacaggtgacaattctttgcactttctttaccgttgtttttgccctttatctcgctcctctgacgatcagttccccatgcattatggagaaaaaggatctgggacctaaaccggctcttatcggccaccgtggcgcaccaatgctcgcccctgagcataccctgatgtcctttaggaaagctctggaacagaagctttacggcctgcaagcggacattactatctccctcgatggtgtaccctttctgatgcatgacacaaccttaagaagaactaccaatgttgaggaggagtttcccgagctcgcgcgacggccagcttctatgctgaattggactacattgcaacgattgaacgccggtcagtggtttttgaaaaccgatccattctggacagcgagctcactgtcgccatctgatcatcgcgaagcccagaaccagtccatctgctccctcgctgaactcctcgaattggccaagggtaacgcaaccttgctcctaaaccttcgagacccgccacgcgagcatccttatagaagcagctttataaatgtgaccctcgaagccgtactgcatagcggattcccccagcaccaggttatgtggctcccaagtcggcaaagacccctagttagaaaggtagcccctggctttcagcagacatctggaagcaaagaggcagtggcgtcactgagaagaggccatatccagcgactcaatttgagatacacccaggtgagtaggcaagaactccgggactacgcatcatggaatctctcggtgaacctttataccgtgaatgcaccttggctctttagtcttctctggtgtgccggagtcccttcagttacttcagacaattcgcacgctctttctcaggtcccctctcccctttggattatgcctcccgacgaatactgcctgatgtgggtaactgccgatctggtgtcctttactctgattgtggggatattcgtactccagaaatggcgtttggggggaatccggtcctataatccggagcagatcatgctcagcgcagctgtgagacggacgtctagagacgtgtctattatgaaggagaagttgatcttctctgaaatctcggatggggtagaagtctcggatgtcctgtcagtgtgcagtgacaactcttacgatacatatgcaaactcaacggccacccctgtaggccctcggggaggagggagtcacactaagacgctgattgagcggtccgggaggtag

SEQ ID NO: 224974 - DNA, 1083 bp, synthetic construct
  misc_feature 1..1083: note = Description of Artificial Sequence: Synthetic coding sequence
  source 1..1083: mol_type = other DNA
atgagcttcaggaaggccctggaacagaagctctacgggttgcaggctgatatcaccatctctctagacggcgtcccgtttttaatgcacgatactacgcttcggagaactacaaacgttgaggaggagtttcccgagctggccaggagacccgcatcaatgttgaactggacgactttgcagcgtttaaacgccggtcaatggtttcttaaaacagatcccttttggaccgcgtcctccctctcccctagcgatcatcgcgaagcccagaaccaaagcatttgctcactagcggagctcctggagctcgccaagggcaatgccactctgctcttgaacttgagagaccccccacgtgagcatccctatcgatcatcattcataaatgtcaccctcgaggccgtactgcactcagggtttccgcaacaccaggtcatgtggctgcctagcagacagcggcctcttgttcgcaaagtggctcctggattccagcagacttcaggttcaaaagaagctgtggcctccctgagacgcggacatatacagcgcctgaatcttcgctacacacaagtgtctcgacaggagctgcgcgattacgcatcttggaacctgtctgtgaacctgtacaccgtcaacgccccttggctattttcgcttttgtggtgcgctggagtcccgagcgtaacttccgataattcacatgcgctgtcccaggtaccatctcctctttggattatgcccccagacgagtactgcctgatgtgggtcactgccgatttggtgtctttcactcttatcgtgggtatctttgttctccagaaatggcgcctgggagggatcagatcttacaatcccgagcaaattatgttgagtgcagctgtcaggagaactagtagagacgtctcaatcatgaaggagaaattgattttctccgaaatttcggatggagtcgaagtctccgacgtcttaagtgtctgctctgacaactcctatgacacgtacgccaatagcacggctacacctgtggggccacgcggtgggggtagccataccaagaccctcatcgaaaggagcggacggtag

SEQ ID NO: 224975 - DNA, 1272 bp, synthetic construct
  misc_feature 1..1272: note = Description of Artificial Sequence: Synthetic coding sequence
  source 1..1272: mol_type = other DNA
atgctgagggtgcgctgtctacggggtggatcaaggggtgcagaagctgttcactatattgggtcgcggctggggcgtactctgacaggatgggtgcagaggacttttcagagcacgcaagcagcgaccgctagttctagaaacagctgcgcagccgacgacaaggctacggagccgctgcccaaggattgcccagtaagtagctacaatgagtgggatcccctggaggaagtgatcgtgggtcgcgcagagaacgcctgcgtgccaccattcaccatcgaagtgaaggcaaatacctatgaaaaatactggccattctaccagaagcaaggcggacactattttcctaaggaccacttaaagaaggccgtggctgagatcgaagagatgtgcaacattcttaagacagagggggtgactgtgcgcagaccagaccccatcgactggagcttaaagtacaaaacgccagatttcgagtctaccgggctgtacagcgccatgcctagggatattctgatcgtcgtggggaacgagattattgaagcccctatggcatggaggtcaaggtttttcgagtaccgcgcttaccggtctatcataaaggattactttcaccgcggagccaagtggacaacggctccaaagcctacaatggcagatgagctttacaaccaggattacccaatccattccgtggaagaccggcacaagctggcggctcaaggcaaattcgtgaccacagaatttgagccttgctttgatgcagcggatttcatcagggctggcagggatatctttgcccagagaagccaggttactaattatcttgggatcgaatggatgcgccgacaccttgccccagactatcgcgttcacatcatctcctttaaggaccccaatcctatgcacattgacgccacttttaacataatcggtcccggaatagtactctcgaatccagaccgcccatgccaccaaatcgacctctttaaaaaggctggctggaccattataacccctcctaccccaatcattcctgacgaccaccctctgtggatgtcctccaagtggctgtctatgaatgtgcttatgctggatgagaagcgggtgatggtggatgccaacgaggtgccaatccagaaaatgtttgagaagctgggaatcacgactatcaaggtgaacataaggaacgcaaacagtttagggggaggctttcactgttggacttgtgacgttagacggaggggcacgctgcagagctatctcgattag

SEQ ID NO: 224976 - DNA, 1176 bp, synthetic construct
  misc_feature 1..1176: note = Description of Artificial Sequence: Synthetic coding sequence
  source 1..1176: mol_type = other DNA
atgctgcgcgtgaggtgtctgaggggtggatcccgaggggctgaggcggtgcactatatcgggtcgagattgggacggaccctgactggatgggtgcaaagaacgttccaaagcactcaagccgcaacagcctcatcgcgcaactcatgcgctgctgacgataaagctaccgaaccattgcccaaagactgccccgtcagttcatacaacgaatgggatccactcgaagaagtaatcgtcggcagggccgaaaacgcttgtgtgcccccatttaccattgaggtaaaagcaaacacctatgagaaatactggccattctatcagaagcagggaggtcactattttcctaaagatcatctgaagaaagccgtcgccgagattgaagagatgtgcaatattctgaaaactgaaggagtaacggttaggcggccagaccctattgactggtcccttaagtataagacccccgacttcgagtctactggtctgtacagcgccatgcccagggacatcctaatcgtggtgggaaacgaaataatagaagccccaatggcatggagatctcgtttcttcgagtaccgggcatacagaagtattataaaggactatttccacagaggtgcgaagtggacaaccgcccctaaaccgactatggcggatgaactgtacaaccaagattatcccatccactctgtggaggatcgccacaagcttgccgcacaaggtaaatttgttacaacagagtttgaaccttgcttcgacgctgccgattttatccgagccggacgggatatctttgctcagagatcgcaggtaactaactatctcggaatagaatggatgcgtcgacacctggctcctgattatcgggtccacattataagttttaaggatcccaacccgatgcacattgacgccacctttaacattattggccctggaattgtgctctctaaccctgacaggccgtgccatcagatcgacctcttcaagaaagcaggatggacaattattactcctcccacgccgatcatcccggacgatcaccctctttggatgagtagcaagtggctgtcaatgaatgtgctgatgctggatgagaagcgagttatggtagatgcaaatgaggtgccaattcagaagatgtttgagaaattgggaatgtacaacaagtag

SEQ ID NO: 224977 - DNA, 1260 bp, synthetic construct
  misc_feature 1..1260: note = Description of Artificial Sequence: Synthetic coding sequence
  source 1..1260: mol_type = other DNA
atgtggccaggcaatgcgtggcgggctgcactgttctgggttcctcgcggacgtagagcacagtctgcgctggcccagctcaggggcatcctcgagggcgagttggaaggcattcgaggagcagggacctggaaaagtgaacgggttattacatcaaggcaaggcccacacatcagggtggacggcgttagcggcggaatcttgaatttctgcgccaacaattatctcggcctctccagccaccccgaagtgattcaggcagggttgcaggctctggaggaattcggagccggactctcttcggtccggttcatctgtggaacacagagcattcacaaaaaccttgaggccaagattgcgaggttccatcagagagaggatgcaatcctctacccgtcatgctacgacgctaatgccggactcttcgaagctctcctaacgccagaggacgccgtgctttccgatgaattgaaccacgcatccattatcgatgggatccgcttgtgcaaagcgcataaatacaggtaccgccatctggacatggctgatctggaagcgaagcttcaggaggcgcagaaacatcgacttcggttggtcgcaaccgacggcgctttcagcatggatggcgatatagccccattgcaagagatttgctgcctggccagccgatatggagccctggtgtttatggacgagtgtcatgccaccggttttttggggcctaccggcagggggacagatgagcttttgggcgtgatggaccaagtgaccatcatcaactctactctaggtaaagcacttggaggggcttcgggaggctataccacaggacccggtcccctggtaagtttgctgagacagcgcgcaagaccatacctctttagtaactccctgccaccagccgtggtggggtgtgccagcaaggcgctcgatctgctcatggggtcgaatacaattgtgcaatctatggcagcgaaaacacagaggtttcgttcaaagatggaggccgctggcttcactatttccggcgcatcccatcctatctgcccagtgatgcttggggacgctaggttggccagccgaatggcagacgatatgcttaaacgagggatcttcgtcataggattctcttatccagtcgtgccaaagggcaaagcaaggattcgagttcagatcagcgcagtgcattctgaagaagacatcgaccggtgcgtggaagcctttgtagaggtggggagactgcacggggctctgccctag

SEQ ID NO: 224978 - DNA, 1338 bp, synthetic construct
  misc_feature 1..1338: note = Description of Artificial Sequence: Synthetic coding sequence
  source 1..1338: mol_type = other DNA
atgtggccagggaacgcctggcgggcagcactcttttgggttcctcggggaagacgagcccagagtgcactggcacagctcagaggaattctagagggagaattggagggaatcagaggagcagggacatggaagtctgagcgcgtcataacttcgaggcagggccctcatatccgagttgacggggtgtcaggcggaccgggaactgtgatttttcctggcctgcctctaccgcatttgagctgttgtatacacctgctgagcttcacttcaggaatacttaatttctgcgccaataattaccttggccttagtagccatcccgaggtgattcaggcagggctgcaggctctggaagagtttggagccggactatccagcgtcagattcatctgcggcacgcaatctatccataagaatctggaagccaaaatcgccaggttccaccagcgggaggacgcaattttgtacccaagctgctacgacgccaatgcaggcttgttcgaggcccttcttacacccgaagatgccgttctaagtgatgaacttaatcatgcctcaattatcgacggcatacggctgtgcaaggcacacaaatatcgctaccggcatctggatatggcagacttagaagccaagctgcaggaagcacagaaacatcgcctgcgtctcgtagccactgacggtgccttctctatggacggcgatatcgccccactgcaggaaatctgctgtctggctagtcgatacggggctctggtgttcatggacgaatgccatgctacagggttcttgggtcccacggggcgaggtacggacgagttgctcggcgtaatggaccaagtgaccatcattaattctactctgggcaaggcactcgggggtgcttctgggggttataccaccggccctggtcccttagtttctctccttagacagcgtgccagaccctatctcttttccaatagcttgccacctgcagtcgtcgggtgtgctagtaaggcactcgaccttctcatggggtctaatacgatcgtgcagtctatggcggcaaagacccagcggttccggtctaaaatggaggccgctgggttcacaatctctggtgcatcccacccgatttgtcccgtaatgctaggcgatgcgagactggctagtcgaatggccgatgacatgcttaagaggggtatctttgtgataggcttctcctatcctgttgtgccgaaagggaaagcacgtattcgagtccagatcagtgcggtccactcagaagaagatatcgaccggtgcgtggaagctttcgtcgaggtgggacgtcttcacggcgcactcccatag

SEQ ID NO: 224979 - DNA, 744 bp, synthetic construct
  misc_feature 1..744: note = Description of Artificial Sequence: Synthetic coding sequence
  source 1..744: mol_type = other DNA
atgtggccagggaacgcctggcgagccgcacttttctgggtgcccaggggccgacgggcacagagcgccctggcccagctgcggggaatattggaaggcgaacttgaggggatccggggagctggcacctggaagtccgagcgtgtgataaccagccgtcagggccctcatatccgggttgatggggtgagcggcggacccggaaccgtcatcttccctggactgcctctgccccatctatcgtgttgtatccacctcttatcttttacaagtggtatcctgaacttctgtgcaaataattatctgggactgtcttcccatccagaggttattcaagccggtcttcaggctttagaagaattcggcgctggcctctcttctgtgcgcttcatttgtggtacccaatccatccacaagaatttagaagctaagattgcaagattccatcagagagaggacgccatattgtacccaagctgttacgacgctaacgcagggttgttcgaggccttgttgacgccagaggatgctgtgctgtccgacgagctcaaccatgcctccatcattgacggaatccggttatgtaaggcacataaatatcgctaccgccacttagacatggcagacttggaggcgaagttgcaggaagcccaaaagcatcgacttcgcctagtggctaccgatggagcctttcacggctggagacaccgaaccccagccggagacctcctgccacgactttag

SEQ ID NO: 224980 - DNA, 522 bp, synthetic construct
  misc_feature 1..522: note = Description of Artificial Sequence: Synthetic coding sequence
  source 1..522: mol_type = other DNA
atggcactgcgcgtggttcgatctgtcagagccctgctgtgtacattgagagctgtgccttcacccgcagcaccgtgtccacctcgcccttggcaactgggggtcggggctgtgcgtacattgcgcacgggacccgcactcctgtctgtgcgaaagttcaccgagaaacacgagtgggtgacgacggagaatggtattggaacggtcgggatctccaacttcgcgcaggaagccctcggagatgtggtctactgcagccttcctgaggtcgggaccaagcttaataagcaggacgagttcggagccctcgagtctgtcaaagcagcatcagaattatacagtccactgtcgggtgaggtcaccgagattaacgaagcactagccgaaaatccgggactagtgaataagtcgtgctacgaggacggttggcttatcaagatgaccctttccaacccaagcgagctggatgagctgatgtccgaagaagcatatgagaagtacatcaagtccattgaggaatag

SEQ ID NO: 224981 - DNA, 3063 bp, synthetic construct
  misc_feature 1..3063: note = Description of Artificial Sequence: Synthetic coding sequence
  source 1..3063: mol_type = other DNA
atgcaaagctgcgccagagcgtggggtctgagactcggtcgaggagttgggggtggccgacggcttgccggtggcagtggcccttgttgggcccctagaagccgggactcatcttctgggggaggggattcagccgctgctggtgcctccaggctccttgaacgcctcctgcctcggcatgacgattttgcaaggcgccacatagggcctggggataaggaccagcgcgaaatgcttcaaaccttgggccttgcctctattgatgagctgattgaaaagaccgtgcccgcaaatatccggctgaagcggcctctcaagatggaggacccagtttgtgagaatgaaatcttggctacactgcacgcaatctcaagcaagaaccagatttggaggtcctatattggtatgggatactacaactgctccgtgccccaaaccatcctgcgcaacttgctggaaaattccggttggataacccaatacaccccgtatcaaccagaggtcagtcaaggcaggctggagtcactcctgaactaccagaccatggtgtgcgatattacaggcctcgatatggccaacgcatctcttttggatgagggcacggccgctgccgaggcactgcagctgtgttatcggcacaataaaaggagaaagtttctggtggatcctcgctgccatccacagacgatcgctgtggttcagacccgggcaaaatacactggtgtacttactgaactcaaactgccgtgtgagatggactttagcggtaaagacgtgtcaggcgttctttttcagtacccagatacagagggaaaagtggaggactttactgaactcgtggaacgtgcccaccagtcggggagcttggcctgctgcgcaaccgatttgcttgcattgtgcattctccgcccaccaggcgagtttggtgtggacatagctctgggctctagccaaagatttggagtccccctgggttatggtggacctcacgcggcattcttcgcagttcgtgaatcactcgtcaggatgatgcccggacggatggtgggggtgacaagagacgctaccggcaaagaggtctaccgcctggccttacaaactcgggagcagcacattcgacgagataaggccacatcaaacatctgtacagcccaagcgctgcttgcaaacatggcggctatgtttgccatctaccacggatcccacggccttgagcatatagcccgacgagtccacaacgccactctgatactcagcgagggccttaagagagctggacaccagctgcagcacgacctattctttgatacactaaaaatacagtgtgggtgtagcgtgaaagaggtgctcgggagagctgcccagagacagatcaactttcggctctttgaagacggtactcttggaatcagcttggacgagactgttaatgaaaaggacctggatgacctgctgtggatttttggatgtgaaagttcagctgaactggtcgccgagtccatgggagaagaatgtcgcggtattcccggttctgtgttcaaacggacgtctcccttcctaacacatcaggtgttcaattcttatcactcggaaactaacattgtccgatatatgaaaaagctagagaataaagacatcagcctggtgcattccatgatccctctagggtcgtgtactatgaagttgaatagtagtagcgagctggctcctataacttggaaggaatttgcaaacatacacccattcgtcccactcgaccaagcacagggctatcagcagctcttccgcgaactcgagaaggatctctgcgaactcactggctatgatcaagtttgcttccaacctaacagcggtgcccaaggagagtacgcgggattagctacgatcagggcctatctgaatcagaagggggagggccaccgaacagtgtgccttattcctaagtcagcacacggcacaaatccagcgagcgcccacatggcgggaatgaaaattcagcccgtagaggttgacaagtacggcaacatagatgccgtgcatctaaaagcgatggtcgataaacataaggagaacctagcagccatcatgataacctatccttctaccaatggggtttttgaagagaatatcagcgatgtctgcgacctgatacaccagcacgggggacaggtctacttagacggcgctaacatgaatgcgcaggtgggcatttgcagaccaggcgatttcggaagcgacgtgtcacacctcaacctccataagacattttgcatacctcacggtgggggagggcctggaatgggtcccatcggcgtgaaaaagcacctggccccattcctccccaatcacccggtgatttccctaaagcgtaatgaggatgcctgtcccgtaggaaccgtgagtgctgcaccgtggggctctagcagtattctgccaatttcttgggcctatattaaaatgatggggggaaagggccttaaacaggccaccgaaaccgctatccttaatgcgaattatatggccaaacgcctcgagacccattatagaattcttttccggggagcgcgtggatacgttggccacgaattcatactcgacacaagaccctttaaaaagtcagctaatatagaggccgtggacgttgccaagcgcctacaggattacgggtttcatgccccaacgatgagctggccagtggcgggaaccctgatggttgagcctaccgaaagcgaggacaaagcagagctggatagattctgtgacgcgatgatctccattaggcaggaaatagcagacattgaggaaggaagaatcgatcccagggttaatcccctgaaaatgagcccccactctctgacatgcgtaacgtcttcacactgggataggccgtactctcgggaggtcgcagcctttcccctgccttttgtaaaacctgagaataagttctggccaacaatcgctagaatcgacgacatctacggagaccagcacttggtgtgcacatgtcctcccatggaggtgtacgagtcaccattcagcgagcagaagcgagcctcgtcctag

SEQ ID NO: 224982 - DNA, 888 bp, synthetic construct
  misc_feature 1..888: note = Description of Artificial Sequence: Synthetic coding sequence
  source 1..888: mol_type = other DNA
atggtggattcagtttacaggaccagatcactgggtgtggccgcagagggactgccagatcagtacgccgacggcgaggccgctagagtgtggcagttgtacattggagatacccgatcacggacagccgagtacaaagcttggctattgggactgctgcgccaacatggctgccagagggtgctggatgtcgcctgcgggaccggcgttgatagcattatgcttgtcgaagagggtttcagcgtaacatcagttgacgcgtcagataagatgctgaagtatgccctgaaagagcgctggaaccgcaggcacgaacccgcattcgacaagtgggtgatcgaagaggccaactggatgacattggataaggatgtcccccagtccgccgaaggcggatttgacgcagtgatttgcttgggaaattctttcgcccacctgcctgactgtaagggggatcaatctgagcatagattggccctcaaaaacattgcttctatggtaagagcaggtggcctgctggtcattgaccaccgcaattacgaccatatactatcaacgggttgcgcgcctcccggaaaaaatatctattacaagtcagacctgaccaaagacgtgacaacatctgtcttaatcgtcaacaataaggctcatatggtcactctggactataccgtgcaggtgccaggggctggacaggacgggtcccccggactgtctaagtttcgcctgagctattaccctcactgcttggctagcttcactgagctgctccaggccgcttttggcggaaaatgccaacactccgtcttgggcgatttcaagccttataagccaggtcagacttacataccttgctattttattcacgtgctgaagaggaccgattag

SEQ ID NO: 224983 - DNA, 1350 bp, synthetic construct
  misc_feature 1..1350: note = Description of Artificial Sequence: Synthetic coding sequence
  source 1..1350: mol_type = other DNA
atgtatagcttcaatactctgagactgtacctatgggaaacaatagtattcttcagcctcgccgcaagcaaggaagctgaggcagctagaagtgcgcctaaacccatgagcccaagcgactttctggataagcttatgggcagaacatctgggtatgatgcccgtattcggcctaactttaaaggcccaccagtgaatgtcagttgtaatattttcattaattcctttggatctatcgcagaaacaacaatggattaccgggtcaatatctttctgaggcagcagtggaatgacccacgcctggcgtataatgaataccccgatgacagcctcgaccttgatcctagcatgctggattccatctggaagcctgatctgttcttcgctaatgagaaaggagcacattttcatgagataacaactgacaataagctgttgcggattagcaggaacgggaacgtgctctattcgatccgcatcactttgacattagcttgtcccatggatctgaagaactttcccatggatgtgcagacctgcattatgcagttagagtcgtttggatatacgatgaatgatctcatcttcgaatggcaggaacagggtgcggtgcaggtcgccgatggacttacactcccacaatttatcctgaaggaagagaaagatctcaggtattgcacaaaacactataatacaggtaagttcacctgtattgaggcacgcttccacctggagcggcagatgggttattatctcattcagatgtacatcccctcacttttgatcgtcatcctgtcttggataagcttctggatcaacatggatgcagcccctgctcgggtagggctcggaattacaaccgtgttgactatgacaactcagtcatcaggtagcagagcctccctccccaaggtctcttacgtgaaggccattgatatttggatggccgtatgcctgctattcgttttctccgcgctgcttgagtacgctgccgttaattttgtgtctcggcagcataaagagctcctgcgttttcgaagaaagaggcgccaccacaaagaggatgaagcaggcgaaggtaggtttaacttttccgcgtatggaatgggtccggcttgtctgcaggcaaaggatggaattagcgttaagggagccaacaattctaatacaactaatccacctccggcaccctcaaaatctccagaggaaatgaggaaactcttcatccagagggctaagaagatcgacaaaattagccggataggattccccatggcttttttaatatttaatatgttttactggatcatctataagattgtgaggagagaagacgtgcataatcaatag

SEQ ID NO: 224984 - DNA, 1374 bp, synthetic construct
  misc_feature 1..1374: note = Description of Artificial Sequence: Synthetic coding sequence
  source 1..1374: mol_type = other DNA
atgtactctttcaacaccttaaggctctacctatgggaaactattgtgttcttttctctcgctgccagtaaggaggccgaggctgctcggtcagcccctaagcctatgagcccctctgacttcctcgacaagctcatgggccgaacgagcggctacgacgcacgcatacgacctaactttaaggggcctcctgtgaatgtgtcttgtaatatcttcatcaacagtttcggcagcattgccgagacaacgatggattatcgagtcaacatcttcctgagacaacagtggaatgacccgcgattggcttacaacgagtatccagacgactcgctcgatttagatccatctatgctggattctatttggaagcctgacctgttctttgccaatgaaaagggggcacacttccatgagatcacaaccgacaataagttattgaggataagcagaaacggtaatgttttgtactccatccgcattaccctcaccttggcgtgcccgatggatcttaagaatttcccaatggacgtgcaaacatgcataatgcagcttgagagctttgggtatacgatgaacgacttgatattcgaatggcaagagcagggtgcggtccaggtggccgacggactgacactgccccaatttattctgaaggaggagaaagacctccggtactgtacaaaacactacaataccggcaaatttacttgcattgaagctcgcttccaccttgagagacaaatgggatactacctgatccaaatgtatataccaagcctgctaattgtaatactaagctggatctctttttggattaatatggacgcagcccctgcgcgtgtaggattgggaatcacgacagtgctgacgatgaccacacagagtagcgggtcacgggcatcccttcccaaggttagttatgtgaaggccatagatatttggatggcagtgtgccttctcttcgtttttagtgcactgctcgagtatgcagcagtgaatttcgtgtcccgccagcacaaggagctgttgcgatttcgacgaaagcggcgacaccataaatctcccatgctgaatctattccaggaagacgaagccggagaagggcgtttcaacttctctgcatacggtatgggaccggcatgtctccaggccaaggatggcatctccgtcaagggagcgaacaactccaacaccacaaatccccctccggctccatccaagtccccagaggagatgcggaaactgttcattcagagggctaagaaaattgacaagattagtcggataggtttcccaatggcgtttctcattttcaacatgttttattggattatctacaagattgtgcgtcgggaagatgtacacaatcagtag

SEQ ID NO: 224985 - DNA, 1101 bp, synthetic construct
  misc_feature 1..1101: note = Description of Artificial Sequence: Synthetic coding sequence
  source 1..1101: mol_type = other DNA
atggactacagagtcaacattttcctgaggcagcagtggaatgaccctcggttagcctacaacgaataccccgacgattcccttgacctcgacccctccatgctcgactctatctggaaacccgacctctttttcgccaatgaaaagggagcccactttcatgagatcacaactgacaataagctcctgcgcatctcccggaacggcaacgtgctttattctatccgtataactctcaccttagcttgtcctatggacttaaaaaatttccccatggacgtacagacctgtattatgcagttggagagtttcggctataccatgaatgatctgatctttgagtggcaagagcagggtgccgtccaagtggccgacggactcaccttgccgcaattcatcctgaaggaggagaaggaccttagatactgtactaaacactacaacactggaaagttcacatgcatcgaagcaagatttcacctggagagacaaatgggctattacctgatccagatgtacattccatctttattgatcgtgattctgtcttggattagcttttggattaatatggacgccgcaccagcccgagtggggctgggaatcacaactgtcctgaccatgaccacgcagtcaagcggttcaagagcgtcgcttcctaaggtgtcatacgtgaaagctatcgacatatggatggcagtgtgtctgctgtttgtgttttctgccctgctggagtacgctgctgttaacttcgtgagcagacagcacaaagaactcctgagatttcgaagaaaaagacggcatcacaaggaggatgaggcaggagaaggaaggttcaacttctcagcctatgggatgggccctgcctgcctccaggcaaaagacggaatttctgtcaagggcgcaaataatagtaatacgacaaaccctcctccggctcccagcaagtctccagaggagatgaggaagctcttcatccaacgcgctaagaagattgataagatcagcagaatcggcttccctatggccttccttatcttcaacatgttttactggataatatacaagattgtccggcgtgaggatgtgcacaaccagtag

SEQ ID NO: 224986 - DNA, 309 bp, synthetic construct
  misc_feature 1..309: note = Description of Artificial Sequence: Synthetic coding sequence
  source 1..309: mol_type = other DNA
atgtcagcgcgagttcgctcacggtcgcgcggaaggggcgacggccaggaggctccagacgtggttgccttcgttgctcccggagagtcacagcaagaggaacccccaactgacaaccaggacatcgagccgggtcaggagagagagggaactcctcccatcgaagaacgtaaggtagaaggcgattgccaagaaatggatctggaaaagacccggtcagagcgcggagacggctcggatgtgaaggaaaagactcctccaaatcctaaacacgctaagaccaaagaagccggtgatggtcagccatag

SEQ ID NO: 224987 - DNA, 1359 bp, synthetic construct
  misc_feature 1..1359: note = Description of Artificial Sequence: Synthetic coding sequence
  source 1..1359: mol_type = other DNA
atgaaccgtcaactcgttaacatactgacagccctcttcgcgttcttcctagagaccaaccactttagaacagccttctgtaaagaccatgactcaaggagcgggaagcagcctagtcagactttgagcccctctgactttctcgacaaactcatgggccgtacatccgggtacgatgcacgaatcaggccaaatttcaagggaccacccgtgaacgtgacatgcaatattttcatcaattcttttggaagtattgcagaaactaccatggattatcgtgtgaacatctttctccgtcaacagtggaatgattctcgactggcatactctgaatatcccgatgactccttggacttggatccgtcaatgctagacagcatttggaagcccgatctgtttttcgccaacgagaagggagctaacttccacgatgtgacgactgataataaactgctgcggatttcaaaaaacggaaaggttttgtatagcattaggttgactctcaccttgagctgcccaatggacctgaagaattttcccatggatgtgcagacttgtaccatgcaactcgaatcttttggatatacaatgaacgacctgatctttgagtggctctccgacggacccgtacaggtggccgagggcctgacgttgcctcaattcattcttaaagaggaaaaagagctcggctactgcacaaagcactacaacaccggaaagtttacttgtattgaagtgaaattccacctcgaaaggcagatggggtactatctgatccagatgtatatcccttctctccttatcgttatcctctcctgggtctcgttttggattaatatggacgccgctccagccagagtggcgttagggatcacaactgtcctcaccatgacgacacagagctcgggcagcagagcaagcttaccaaaagtatcctacgtcaaagccattgatatctggatggccgtttgtttactcttcgtctttgctgccctgctggaatatgccgctgtcaattttgtgtccagacaacataaagagtttctgcgactgcgacgacgccagaagcggcagaacaaagaagaggatgtgacaagagaatctaggttcaatttctcagggtatgggatgggccactgtctccaggttaaggatgggacagctgtgaaggccactccagcaaacccgttgcctcagccacccaaagacggcgacgcgatcaagaaaaagtttgtggatcgggcaaagaggatcgataccatctctagagccgctttccccctggccttcctgatctttaatatcttttattggataacatacaaaatcatacgccatgaagacgtccataagaaatag

SEQ ID NO: 224988 - DNA, 648 bp, synthetic construct
  misc_feature 1..648: note = Description of Artificial Sequence: Synthetic coding sequence
  source 1..648: mol_type = other DNA
atgaacctgcatatgaggatgacagcattttgtaaggatcacgattcacggtccggcaaacagccttcccaaaccttaagccctagtgacttcctggacaaactgatgggcaggacatcaggctacgatgcccgaattaggcccaatttcaaaggcccacctgtcaatgtgacatgcaacatcttcataaatagctttggctctgtcaccgaaacaacaatggactacagagtgaacatctttctgcggcagcagtggaatgattctcgactcgcatactcagagtatccggatgattcccttgacctggatccttcaatgctggacagcatctggaagccagacctgttctttgctaacgagaaaggtgccaattttcacgatgttacgacagataacaagcttcttcgaataagcaaaaatggcaaagtactgtatagcattcgtctgaccctaacactttcctgtccgatggatttaaaaaacttccccatggacgtccagacttgtactatgcagctggagagctttggctacacaatgaacgacttaatctttgagtggctttccgatggccctgtccaggtcgcagaagggcttactcttccccaattcattctaaaagaggaaaaagagctagggtactag

SEQ ID NO: 224989 - DNA, 1092 bp, synthetic construct
  misc_feature 1..1092: note = Description of Artificial Sequence: Synthetic coding sequence
  source 1..1092: mol_type = other DNA
atggactatcgtgtcaacattttcctgcgccaacaatggaatgactctaggctggcatacagcgagtaccccgacgactcacttgacctggaccccagcatgctcgatagtatctggaaaccggatctgttcttcgccaacgagaagggagccaattttcacgatgtcactacagataacaagctgctgcgtatctctaaaaatggaaaggtcttgtactcaattcgactgacactgacattgtcatgccctatggatctgaagaatttcccgatggatgtccagacatgcaccatgcagctcgagtcctttggctacaccatgaacgatctgatatttgaatggctaagcgacggacctgtgcaagtcgccgaggggctgaccctgccacagtttattttgaaggaggaaaaggagctggggtactgtacgaagcattacaacaccggaaagttcacgtgcatcgaagtgaagttccacctggagcgccagatgggctattacctgatccagatgtacattcccagccttctcattgttatcctcagctgggtctccttctggataaatatggatgcggctccggctagggtagccctcggaatcacaaccgtcctaactatgacaacccaatccagtggttcccgagccagtctgccaaaagtgagttatgtaaaagctattgacatttggatggcagtctgtcttctttttgtttttgccgcacttctggagtatgccgcagtgaactttgtctctcgccagcataaagaattccttagattacggagacgacagaaaagacaaaataaagaagaggacgtgactcgagagagcagattcaacttcagcgggtacggtatgggacactgcttgcaagttaaagacggcactgccgttaaagcaacacctgcaaaccctctgccacagcctcctaaagatggggacgcaatcaagaagaagtttgtggaccgcgctaagcggatagacaccatctcacgcgctgcctttcctctggcgttccttattttcaatatcttttattggataacctacaagatcatacggcatgaggatgtgcacaaaaaatag

SEQ ID NO: 224990 - DNA, 1395 bp, synthetic construct
  misc_feature 1..1395: note = Description of Artificial Sequence: Synthetic coding sequence
  source 1..1395: mol_type = other DNA
atggcacacgtccgtcactttcggacactggtatccggcttctatttttgggaagctgccctgctgttgagcttggtcgcaacaaaggagaccgatagcgcacgcagccgtagtgcgcctatgagccccagcgactttctagacaaactgatgggtagaacatccggctatgacgcaaggataagacccaatttcaaaggcccacctgtaaatgtgacctgcaatatcttcattaactccttcggaagcatcgcagaaacgaccatggactatagggtgaatattttcctgaggcagaagtggaatgatcccaggctggcctacagcgaataccccgatgattctctggacctggacccgagcatgctggattctatttggaaacctgatctgttctttgctaacgaaaagggtgctaattttcacgaagtgactacagataataagctgctacgtattttcaaaaatggaaatgtcctttatagcatcaggttgacgctgaccctgtcatgtccaatggacttgaagaacttccccatggatgtgcagacatgtattatgcagctcgagtcctttggttataccatgaatgatctgatctttgaatggcaggacgaagcgccagtccaagttgctgagggcctgactttgccgcagtttttattgaaggaggaaaaggatctgagatattgtactaagcactacaacaccggaaagttcacctgcatcgaggtgcggtttcatctggagaggcaaatgggttattatttaatccagatgtatatccccagcctgctcattgtgattttatcctgggtgagcttctggatcaatatggatgcggctcccgctagagtggcccttggcatcaccacggtgctgaccatgacgacacaatcaagcgggagtagagccagtctgcctaaggtgtcctatgtcaaagcaatcgacatatggatggcggtgtgcctcttgttcgtgttctcggctctactggaatacgcggcagtcaactttgtaagcaggcagcataaggaactgcttagattccgacggaaaagaaaaaacaaaacagaggcctttgccctggagaaattttaccgattttctgacatggacgacgaggtgagggagagccgtttttcctttacggcctacgggatgggaccatgcctacaagctaaggacggcatgacaccaaaggggcctaatcatcctgtgcaggtaatgcctaaatccccagatgaaatgcgcaaagtgttcatcgatcgtgctaagaagatcgataccattagtagagcttgtttccctctggccttcctgatctttaatatcttctactgggtgatctataagattcttagacatgaagatatccatcaacagcaggattag

SEQ ID NO: 224991 - DNA, 1350 bp, synthetic construct
  misc_feature 1..1350: note = Description of Artificial Sequence: Synthetic coding sequence
  source 1..1350: mol_type = other DNA
atggctcatgtgcgtcatttccggactcttgtgagtgggttctatttctgggaggcagcactgctgttatctttagtggcaacaaaagagacagattccgcccgttctaggagtgcccctatgagcccgagtgacttcttagacaagctgatggggcgtacatcaggatatgacgcgaggatacgacctaactttaaaggtcctccagtcaatgtcacctgcaacatctttatcaactccttcggttctatcgcagagaccaccatggactatagagtgaatatcttcctccgccagaaatggaatgatcccagactggcatacagtgagtatccggatgattcccttgatctcgacccatcaatgctggactccatctggaaaccagatctcttctttgccaatgagaaaggcgctaactttcatgaagtaacaactgataataagctgctgcgcattttcaagaacggcaacgtgctctactccatcagactcaccctcacgctgtcatgccccatggatttaaaaaactttccaatggacgtgcaaacgtgcatcatgcaactggagagcttcggctacacgatgaacgacttgatctttgaatggcaggacgaggcccctgtccaggtggcggaaggactcacgctgccacagttccttctgaaggaggagaaagatttgaggtactgcacaaaacattacaatactgggaaattcacttgcatcgaggtgagatttcatcttgaaagacagatggggtactaccttattcaaatgtatattcctagcctgctgattgtcatcttatcttgggtctctttttggatcaacatggacgcagctccggcacgggtggccctgggcattaccacagtgttgacgatgacaacacagtctagcggatctcgagctagtttgccaaaagtgtcctacgtgaaggccattgacatttggatggccgtttgccttctgttcgtctttagcgccctattggaatacgccgcagtgaactttgtatcccgccaacacaaagagttacttcggttcaggaggaagcgaaaaaacaaggatgacgaggttagggaaagtcgattttcttttacagcctatggaatggggccatgcctccaggctaaggacgggatgaccccgaaagggcctaaccaccctgtccaggtgatgcccaaaagtccggacgaaatgcgcaaggtattcattgaccgggcaaaaaaaatcgacacaatatcccgggcatgctttcccttggccttcctaatatttaacattttctactgggttatctataagatactccgccacgaggatatccatcaacaacaagattag

SEQ ID NO: 224992 - DNA, 1494 bp, synthetic construct
  misc_feature 1..1494: note = Description of Artificial Sequence: Synthetic coding sequence
  source 1..1494: mol_type = other DNA
atgaagttccttctgactaccgcctttctgatccttatctcactctgggtcgaagaggcttacagtaaagaaaaaagcagcaagaaggggaagggaaaaaagaaacagtatctgtgcccttcacagcagtccgccgaagatttagccagagtgccagccaacagcacgtctaacatcctgaaccgtttgttagtcagctacgatcctagaattagaccgaattttaaaggcattcctgtcgacgtggttgtcaatatattcataaactcctttggctcaattcaagagactacaatggattatcgggtgaacatcttcttgcgacagaagtggaacgacccacggctgaaactgcccagcgatttccggggatcggacgccttgacagtcgatcctaccatgtataaatgcttgtggaaaccggatttattttttgctaatgagaagtctgcaaatttccacgacgttacccaggagaatattcttctctttatctttcgggacggcgatgttttggtaagtatgcggctctccatcactctgagctgtcctctcgacctgacgctctttcctatggatacccagcgctgtaagatgcagttagaatcattcggatatacaacagacgatctgaggtttatctggcaaagcggggatccagtccaattggaaaaaatcgcattgccccaattcgacattaagaaagaagacattgaatatggcaactgcacgaagtactacaagggcaccgggtattacacttgcgtggaagtgatctttactctgagaagacaagtaggattttatatgatgggcgtttatgcacccactttattgattgtagttctgtcctggctgtccttctggatcaacccagacgcctccgcggctcgggtgcctctgggaatctttagtgtattgtcactggcttcagagtgcacaactttagccgctgagttacccaaagtgtcctatgtgaaggccctcgacgtctggctaatcgcttgccttttgtttgggttcgcgagcctggtcgagtacgcagtcgtacaggttatgttgaacaaccccaaaagagtagaggctgaaaaagctaggatcgcaaaggcggagcaggcagacggcaaaggcggaaacgtggctaaaaaaaatacagtgaacggcacgggcacaccagtccacatttcgacacttcaagttggggaaactcgttgcaaaaaggtgtgcactagtaaatccgacctcagatccaacgacttcagtattgtgggctctcttcctagggactttgaactgagtaattacgactgctatgggaagcctatcgaggtaaacaatgggctggggaaaagccaggccaagaataacaagaagccccctccagcaaagccagtaatccccaccgctgcgaagcggatcgacctgtacgcaagggcccttttcccattctgcttcctcttctttaacgtaatttactggtccatctatctttag

SEQ ID NO: 224993 - DNA, 1494 bp, synthetic construct
  misc_feature 1..1494: note = Description of Artificial Sequence: Synthetic coding sequence
  source 1..1494: mol_type = other DNA
atgaaatttctgctcactactgctttcttgatcctgatctctctctgggtcgaggaagcctattctaaagaaaagagttctaaaaaagggaaaggaaagaagaaacagtatctgtgcccgtcgcagcagagcgctgaggatctagcgcgagtgccagccaattcaacgagcaacatcttaaaccggctgcttgtctcctacgaccctagaatcagaccgaatttcaagggcataccagtagatgtggttgtcaatatatttattaattcgttcgggtctatacaagagactacaatggattaccgcgtcaacatttttctgcgccagaaatggaatgacccacgattaaagctgccatccgatttcaggggatctgacgcactcaccgtggaccccaccatgtacaaatgcttgtggaagcctgacctgttttttgcaaacgagaaatcggctaactttcacgatgtgactcaagaaaatattctcctattcatcttccgcgacggcgacgttctagtatccatgcgcctgagcattactctttcctgtcccctggacctgacgctcttcccgatggacacccagagatgcaaaatgcagctggaaagtttcggctatactacagatgacctacggttcatctggcagtccggcgacccagtgcagctggagaaaatcgctctcccacaattcgatattaagaaggaagacattgaatatggaaactgtactaagtattacaagggaacgggatattacacttgtgtggaggtgatctttaccctgcgaagacaagttggcttttacatgatgggggtctacgcacccacgctgttgattgtggttctgagctggctgagcttctggatcaaccccgacgcatccgcggcacgcgtgcctctgggtatcttctctgtgctctccctggcaagcgagtgcacaactttggcggctgaactacctaaagtgagttacgttaaagcacttgatgtgtggctgatagcttgcttgctatttggattcgcttccctagttgagtacgctgtcgtgcaggtcatgttgaataatcccaagcgtgttgaggcagaaaaggcccgtattgccaaggccgagcaagctgatgggaaaggaggtaatgtcgccaagaagaataccgtcaacggcacggggacaccggtccacataagtaccctgcaggtaggtgagactcggtgtaagaaggtgtgtacttctaaatctgacctacggagtaatgacttcagtatcgtgggtagcttgcctagagatttcgagttgtccaattacgactgctacggaaaacctatcgaagtgaacaatgggttgggaaaatcccaggctaagaacaacaagaagcctccgccagccaagcctgtcatcccaacagccgctaaacgcatcgatctctatgcgagagctctctttcccttttgtttcctgtttttcaacgtcatctactggagtatttacctctag

SEQ ID NO: 224994 - DNA, 912 bp, synthetic construct
  misc_feature 1..912: note = Description of Artificial Sequence: Synthetic coding sequence
  source 1..912: mol_type = other DNA
atgaagttcctgttaactaccgcttttcttattctgatatccctgtgggtggaggaggcctactctaaggagaaatcttctaaaaaagggaagggcaaaaagaagcaatatctgtgccccagtcagcagtccgctgaagacctcgcgagagttccggcaaattcaacctcaaacatcctcaacagacttctagtaagttacgaccctagaatccggcctaatttcaaaggcataccagtcgatgtggtggtaaatattttcatcaactcattcgggtcaatccaggaaaccacaatggattatagagttaatattttcctccgccagaagtggaacgatcctcgcctgaaacttccctctgatttcagaggctcggacgctctgaccgtcgaccctacaatgtacaaatgcctctggaaacccgacctgttctttgccaatgagaagtccgcaaatttccacgacgtaacacaagagaatatccttctcttcatcttccgtgatggggatgtccttgtcagcatgagactcagcattacactctcctgccccctcgacttgaccctgtttccaatggatactcagaggtgtaagatgcaactggagtcatttggctatacaacagacgacctgaggttcatctggcagagcggcgatccagtccaactggagaaaattgccttaccacaattcgacattaagaaggaggacatcgagtacgggaattgtaccaaatattacaagggcacgggatactacacgtgcgtcgaggtaatcttcacactgcgacggcaggtgggcttttatatgatgggcgtctacgcaccaacgcttctgatcgtcgtcctgtcctggttatctttctggatcaatcctgacgccagcgctgcgagggttcccctcggctggtag

SEQ ID NO: 224995 - DNA, 492 bp, synthetic construct
  misc_feature 1..492: note = Description of Artificial Sequence: Synthetic coding sequence
  source 1..492: mol_type = other DNA
atgatgttgccccttcagggagctcagatgctccaaatgctcgagaagagcctgcgtaaatctctcccagcgtcgctgaaggtgtacggcaccgtgttccatatcaatcacggcaaccccttcaatctcaaagccgttgtggacaagtggcccgacttcaatacggtggtggtgtgccctcaagagcaggatatgacagatgacctggaccactatactaacacttaccagatttacagcaaagatccgcaaaactgtcaagagtttctgggctcccccgagcttattaactggaagcagcatctgcagatacagagctctcagccaagcctcaacgaggccattcagaacctggcagcaatcaagtccttcaaggtcaagcagactcagcgcatcttatacatggcagccgagaccgctaaagagctgactccatttctgcttaagtccaaaatcttgagcccaaacgggggaaagcctaaagcaatgtag

SEQ ID NO: 224996 - DNA, 891 bp, synthetic construct
  misc_feature 1..891: note = Description of Artificial Sequence: Synthetic coding sequence
  source 1..891: mol_type = other DNA
atgatgttgcccctgcaaggcgctcagatgcttcagatgctggaaaagtcacttcggaagtctctgcctgctagcctgaaagtttacgggactgtatttcatattaatcacggtaacccttttaatctcaaggctgtggtggataagtggcccgacttcaacacagtggttgtgtgcccacaggagcaggacatgacagacgatcttgatcactatacaaatacgtatcaaatctattcaaaagacccccagaactgtcaagaattcctgggatcccccgagctgatcaactggaagcagcaccttcagatccagtcttcacagccctctctgaatgaagcgatccagaatctggcagccatcaagagctttaaagtgaagcagacacagagaatattatatatggccgctgagaccgctaaggagctcactccttttttactgaaatccaagatcttatccccgaacgggggaaagcctaaagcaatcaatcaagaaatgtttaaactcagcagtatggacgtgacccacgcccacctggtgaacaagttttggcatttcggtggcaacgagcgtagccaaaggttcatagagcggtgtatccagacatttccgacctgttgtttactaggacccgaagggacgccagtctgctgggacctcatggatcagacaggtgagatgcgcatggcagggacattgcctgagtacaggctacatggcctggtgacctacgtcatctacagccacgcacaaaaactgggaaagctcggttttcccgtatactctcacgtggattatagcaacgaggccatgcaaaagatgtcgtacaccttacagcatgtgcccattcccagaagttggaaccagtggaattgtgtgcctctctag

SEQ ID NO: 224997 - DNA, 891 bp, synthetic construct
  misc_feature 1..891: note = Description of Artificial Sequence: Synthetic coding sequence
  source 1..891: mol_type = other DNA
atgatgctgcctttacagggcgctcaaatgctccagatgttggaaaaaagcttgcgcaaatctttgcccgcaagcctaaaagtgtatggcacggtctttcacataaatcacggaaaccctttcaacttgaaggccgttgtggataagtggccggatttcaacactgtggtggtttgtcctcaggagcaagatatgacggacgatttagaccattatacaaacacatatcagatatattcaaaagacccacagaactgtcaggagtttctcggtagccccgaattgattaattggaagcaacatctccagattcagagtagccagcctagcctgaatgaggcaatccagaacttagccgctatcaaatcattcaaggtgaagcagacccagcgcatcctctatatggccgctgagaccgctaaggagttgacaccgttccttttgaagagtaaaattcttagtcctaacggaggcaagcctaaggctattaaccaagaaatgttcaagttaagctccatggatgtgacacatgcacacttagtcaacaagttctggcacttcgggggtaatgaaagaagccagaggtttattgaaaggtgtattcaaaccttcccaacatgttgcttgctgggacccgaggggacacccgtatgctgggatctgatggaccagacaggagagatgaggatggccggaacactgccagaatacagactgcatggtttagtgacctacgtgatctactcccatgcccagaaactcggcaagctggggtttcccgtctattcacatgtggactactcaaatgaggcaatgcagaaaatgagttacacactgcaacatgttcccattcccagatcctggaaccaatggaactgtgtgcccctatag

SEQ ID NO: 224998 - DNA, 2022 bp, synthetic construct
  misc_feature 1..2022: note = Description of Artificial Sequence: Synthetic coding sequence
  source 1..2022: mol_type = other DNA
atgcctcttaacaggacacttagtatgagttccctcccgggtttggaggattgggaagacgagtttgacttggaaaatgccgtcctctttgaagtcgcctgggaggtcgctaacaaggtggggggaatttacacggtgcttcagacaaaagccaaggtaaccggcgacgagtggggtgacaattatttccttgtgggcccttataccgaacagggggtcagaacacaggtcgagctgctggaggcacccactcccgctctgaaacgcaccctggacagcatgaactcaaaaggttgcaagttcctcgcgcaaagcgaggagaagcctcatgttgtggcacattttcacgagtggttggccggtgtgggtctgtgtctttgtcgcgcacggcgtctccctgtggctaccattttcaccacacacgccacactactcgggcgatacctgtgtgctggcgcagtagatttctacaataatctggagaattttaacgttgataaagaggcgggagagagacagatttatcatagatactgtatggagcgggctgccgcacactgtgcgcacgtgttcacgacagtcagccagataaccgccattgaggcacagcatctgttaaagcgaaagccggacattgttaccccaaatgggctcaacgtgaagaaattctccgctatgcacgagtttcagaacctgcacgcccagtctaaagctaggatccaggagttcgtgcggggtcacttctacgggcatctggattttaatttggacaagaccctttactttttcattgctggacgctacgaattttcaaataagggagctgacgttttccttgaggctctcgctaggctgaattatctgctgcgcgtcaatggcagcgagcagacggtggtagcattttttatcatgcccgcacgcactaataacttcaacgtcgagactctcaaaggccaagcggtgcgcaagcagttatgggacaccgccaacaccgtcaaagagaagttcggacgtaagctctatgaaagcctgctggttggaagcctccctgacatgaataaaatgctggataaggaggatttcacaatgatgaaaagagctattttcgctactcagcgccagtcttttcctccagtttgcacgcataacatgctggacgacagctcggatcccatactgaccaccattcgcaggatcggtctgttcaactcttcagcagaccgcgtgaaggtgatatttcatccagaattcctctccagtacaagtcccttgctccctgtggattacgaggaatttgtgcgcggttgccaccttggagtttttccaagttattacgaaccctggggatatacgcctgccgagtgcacggtgatggggatcccgtcaatcagcactaatctgtcagggtttggctgttttatggaggaacacatagctgatccatctgcgtacgggatttatatcctggaccgacgatttaggtcgctggacgattcttgctctcagcttacctcatttctgtattcgttttgtcagcaatcacgcaggcagcgtattattcagcggaatcgcaccgagaggctgagcgacctcctcgattggaagtacctcggtcggtattatatgtctgcgagacacatggcacttagcaaggcttttcctgagcacttcacgtacgagcccaatgaagccgacgcggcacaggggtacaggtacccaagaccagctagtgtgccgccatctcccagcctgagccggcattcctccccacaccagtcagaggacgaggaggatccccgtaatggccctctggaggaggatggcgagaggtacgacgaagatgaggaagccgcaaaggaccgccgaaatatccgtgctcccgagtggccgcgtagggcatcttgcacaagttctacaagcggcagcaagcgcaacagtgttgacactgccacaagctcctcactctcaacccccagcgagccactttcgcccacttcctccctgggtgaagaacgcaattag

SEQ ID NO: 224999 - DNA, 2214 bp, synthetic construct
  misc_feature 1..2214: note = Description of Artificial Sequence: Synthetic coding sequence
  source 1..2214: mol_type = other DNA
atgccattaaatcgtactctatcaatgagtagcttacctggcttagaagattgggaagatgagtttgatctggagaatgccgtgctgtttgaagtggcatgggaggtcgccaataaagtagggggaatttacactgtgcttcaaacaaaggccaaagtcaccggcgacgaatggggggacaattatttcctcgtgggaccatacactgagcagggagttcggacccaggtcgagctactggaagcacccacgcccgctcttaagagaaccttggacagcatgaactccaagggatgcaaggtatattttggacggtggctaattgagggtgggccactcgtcgtgttgctcgacgttggggctagcgcttgggcgttggagaggtggaaaggcgaactgtgggacacctgtaatatcggggttccctggtacgaccgagaagccaatgatgcggttctgtttggttttttaacaacttggttcctcggtgagttcctggcccaaagcgaagaaaaaccacacgtggtcgctcactttcatgaatggttggcaggcgtaggcctctgtctttgtagagctcgaaggctgccggtcgctactatctttacaacacacgcgactctgctcggaaggtacttgtgtgccggagctgtggatttctacaacaatctcgagaacttcaacgtcgacaaggaggccggtgagaggcagatctaccacagatattgtatggagagggctgcagcacattgcgcacacgtcttcactacagtttctcagatcacagccatcgaagcacagcacttgttgaagaggaagccagacatcgtcacaccaaacggccttaatgtgaagaagttctccgccatgcacgaattccagaacctccatgcccagagtaaagctcggatccaggaatttgtgcgtggccacttctacggtcacctggacttcaatctcgacaagacactgtacttctttatcgccggacgatacgaatttagcaataaaggtgctgatgtcttcttggaggctctcgctagactgaactacctcttacgcgtcaacgggtcagaacagactgtcgtcgcctttttcataatgccagctcggactaacaattttaacgtggagactctgaagggtcaggcagttcgcaagcagctctgggacaccgctaatactgtaaaagagaagttcggccgtaaactgtacgaaagccttctcgtgggttcgttacccgatatgaacaagatgttagataaggaggactttaccatgatgaagcgagctatcttcgctactcaacgccaatcattccctcctgtctgtacacacaacatgctggatgactcaagtgacccaatactgaccacaattcgaaggatcggactctttaatagctccgccgatagggtgaaagttatctttcatcctgaattcctatcaagcacttcaccgctgttacctgtggactacgaagagttcgtacgaggctgtcacctcggagtgtttccctcttactacgagccctgggggtacacacccgctgaatgtacagtgatgggcatcccgtccatcagtacgaacttgagcggctttggatgttttatggaagagcacatagccgatccatcagcctacggcatatacattctcgatcgtagattccgatctttggatgattcatgcagccaactcactagttttctctatagcttttgtcagcagtcccgacggcaacgcataatccagcgcaataggacagagcggctgagcgatttgctggattggaaatacttagggagatactatatgtctgcacggcacatggcactgagtaaagctttcccggaacattttacatacgagccgaacgaggctgacgcggcacaggggtaccggtaccctagaccagcctccgtccccccttctccttctctgagcaggcatagctcacctcaccagagcgaagatgaggaggatccacggaacggaccgctggaggaggatggcgaaagatacgacgaggacgaggaagctgctaaggaccgacgcaacattagggctccggagtggccacgccgagcctcttgtacaagcagcacaagcggttccaaacggaactccgtcgatacagcaacctccagtagcctctctacccctagcgaacccctgagccctacgtccagccttggagaagaaaggaattag

SEQ ID NO: 225000 - DNA, 708 bp, synthetic construct
  misc_feature 1..708: note = Description of Artificial Sequence: Synthetic coding sequence
  source 1..708: mol_type = other DNA
atgaatagtacctggcggacgcagtgttcctccaagtggcctggcaggtggctcactagagtgtatttcggtagatggctgattgaaggaggcccattggtggtacttctggatgtcggcgcatctgcatgggcattagagaggtggaaaggcgaactgtgggatacctgcaacattggagtaccctggtacgatagagaggctaatgatgctgtcctgttcggttttttaaccacttggttcttaggagaatttctggcccagtcagaggaaaagccccacgtggtagctcactttcacgaatggcttgcaggagtggggctgtgtctgtgccgcgctagacgactgcccgtggccacgattttcactacgcacgccactctgctgggtcggtacctatgtgcaggtgccgtagatttctacaataacctggagaattttaatgtcgataaagaggccggagagcgccagatctaccatcgctactgtatggaaagagctgccgcacactgcgcccatgtctttaccactgtctcccaaatcaccgccattgaggcacaacacctgctgaaacggaaacctggtatctggaccagtacttggacaagaccatatacgagtcttagccctgcagccatgtcttctccaacccgggtacttacatcttcctggagacattggctcggatccacgatctgcagtgaatag

SEQ ID NO: 225001 - DNA, 1974 bp, synthetic construct
  misc_feature 1..1974: note = Description of Artificial Sequence: Synthetic coding sequence
  source 1..1974: mol_type = other DNA
atgaactcaacgtggcggacgcagtgctcatctaaatggcctggtaggtggcttacgcgggtgtacttcgggcgatggctcatcgagggcggacccttggtagtgctcctggatgtcggggcttccgcttgggccttagagaggtggaaaggcgagctctgggacacatgcaacatcggcgtcccatggtatgaccgggaggccaacgatgccgtcctattcgggttcctcactacctggtttcttggggagttcctggctcagtctgaggaaaagcctcacgttgtcgcccactttcatgagtggctggcaggagtcggcctctgtctctgccgggcaaggcgtctgcccgtcgccaccatatttactacacacgccaccttattaggcaggtacctttgtgcaggcgctgtggatttttataataatttggaaaacttcaacgtggacaaagaagctggcgagcggcaaatttaccatagatactgcatggaaagggccgctgcccattgcgctcatgtgtttaccaccgtgtcccagattactgctattgaggcccaacacctcctgaagaggaagccagatattgtcacacccaacggcctcaatgttaagaagttctccgccatgcacgagttccagaatctgcatgctcaaagtaaagcacggatccaggagttcgtgcgcggtcatttctacggccatctggattttaatttagataagacgctctattttttcatagcaggcagatacgagttcagtaataaaggcgctgacgtgttcctagaggctttggcaaggctgaactatttgctgagagttaatggctcagagcagacagtagtagctttcttcattatgcctgctcgaaccaataacttcaacgtcgagactcttaaaggccaggctgtgcggaagcaattgtgggacacagcaaacaccgtgaaggagaaatttggaagaaagctttacgagagcctcttagttggatccctccctgatatgaacaagatgctggataaagaagatttcaccatgatgaaaagagccatcttcgccacacagcggcagtcattccccccagtgtgcacacataatatgctggacgactcaagtgatccaatcctgaccaccattcgacgcattgggctttttaactcgagcgcggatagggtcaaagtcattttccatcctgagtttctgagttcaacatctcctcttttacccgttgactatgaggaattcgtgcggggttgccatctgggcgtattcccgagctattacgagccatggggatatacaccggctgaatgcacagtgatgggtatccccagcatcagcacaaacctgtcaggcttcggttgttttatggaagaacacatcgctgacccctccgcgtacggaatctatatcctggatcggcgttttcggtccttggacgattcatgctcacagctcacctcatttctctactcattctgccagcagtcaagacgacaacgaattatccaacgtaatcgaacggagcgactgtctgacctgttggattggaagtacctaggacgctactacatgagcgctcggcacatggctctgtctaaagcttttcccgaacacttcacctacgagcccaatgaggcagatgcagcccagggctatcgctaccccagacctgcaagcgtgccacccagcccttcactttcaagacattcatctccacaccagtctgaggatgaggaggatccgcgaaatgggcctctggaagaagacggggagaggtacgatgaggatgaggaggccgcaaaggaccggcgtaacatccgtgctccagaatggcccaggagggccagttgcacctctagtactagcggaagtaagcgaaattctgtggacaccgctacgagctcctcactgtcaaccccatctgaacctctttccccaacttcaagtctcggagaggagcgaaattag

SEQ ID NO: 225002 - DNA, 1113 bp, synthetic construct
  misc_feature 1..1113: note = Description of Artificial Sequence: Synthetic coding sequence
  source 1..1113: mol_type = other DNA
atgccagctcggacgaataacttcaatgttgagactctaaaaggccaggccgtacgtaaacagctatgggacaccgccaataccgttaaagagaaattcggcaggaaactgtacgagtccctgctggtaggctcactgccggacatgaataagatgctcgacaaggaagatttcacaatgatgaaacgcgcaatctttgccacacagcgtcagagctttccacccgtttgcactcataatatgctggacgacagcagcgatcctattctcacgaccatccgaaggatcggactgtttaatagcagcgctgatagggttaaagtaatcttccacccggaatttctcagctccacttcacctctgctgcctgtggactatgaagagttcgttaggggctgccatctgggggtcttccctagctattacgagccttgggggtatacacccgctgaatgcactgtcatggggatacctagtataagtactaacctttctgggtttggctgtttcatggaggagcacatcgccgacccgagtgcttacggcatttatatcttagataggcgcttcagatcactcgacgatagctgtagtcaattaacatccttcctgtactcgttctgtcagcaaagtcggcgacagagaatcatccagagaaacagaaccgaacggctcagcgaccttcttgactggaagtatctcgggcgttattacatgagtgcacggcatatggctttgtcaaaagcattcccagagcattttacatatgagcctaacgaggcagatgctgcccagggttacagatacccaaggcccgcttccgttcccccttctccgtcacttagcagacatagcagcccacaccagagcgaagacgaggaggaccccagaaacggaccactcgaggaagatggagagagatatgatgaggatgaggaagcggcaaaggacaggaggaacattagggccccagagtggcctaggcgcgcaagctgcacctccagtacttccgggagcaagagaaacagtgtcgacacagctacaagtagcagtctttcgaccccatccgaaccactatccccaaccagctctctcggtgaggaacggaactag

SEQ ID NO: 225003 - DNA, 1002 bp, synthetic construct
  misc_feature 1..1002: note = Description of Artificial Sequence: Synthetic coding sequence
  source 1..1002: mol_type = other DNA
atgacagaccaagcttttgtcactttgaccacaaacgatgcctatgccaagggcgctctcgttctgggctcttccctcaagcagcaccgcacgacccgaagattggtggttctggcgacaccacaggtgagcgattcaatgcgcaaggtcctcgaaacagttttcgatgaggtaatcatggtcgacgtgctcgacagtggcgactctgcccacctgacacttatgaagcgcccagagctcggtgtgaccctcaccaagctgcactgctggtcgcttactcagtactctaaatgtgttttcatggatgccgacacccttgtgctcgccaatatagacgatttatttgaccgcgaagagctgtcagctgcgcctgatcctggatggccagactgctttaattccggcgtcttcgtgtatcaaccttcagtggagacttataatcagctcctgcatctagctagtgaacaagggagtttcgatggtggagaccagggcattttaaacactttcttctcatcctgggcaaccactgacatcagaaaacaccttccatttatctacaatctgtcctccataagcatttatagctatctgccagccttcaaggtgtttggggcatccgccaaagttgttcactttctcggcagggtgaaaccctggaactacacctacgatcccaagaccaaatcagtgaaatctgaggctcatgacccaaacatgacccatccggaatttctaatcctgtggtggaacatttttactacaaatgtcctccctcttttacagcagttcggccttgttaaggacacttgctcctatgttaacgttgaggacgtctcaggcgcaatctctcacctctctctcggtgagatccccgctatggcccagccatttgtgagtagtgaggaacggaaggagcggtgggaacagggtcaggcagactacatgggagctgacagctttgacaacatcaagcgcaagctggacacatatttgcagtag

SEQ ID NO: 225004 - DNA, 1053 bp, synthetic construct
  misc_feature 1..1053: note = Description of Artificial Sequence: Synthetic coding sequence
  source 1..1053: mol_type = other DNA
atgactgaccaagcattcgtgaccctcacaacgaacgacgcctacgcaaagggtgctttggttctcgggagctctctgaagcagcacaggacgactaggcggctggtcgtgcttgccactccacaagtctccgactcaatgaggaaggtcctcgaaacggtgttcgatgaagtgatcatggtggacgttttggactctggggactcagcacaccttacattaatgaagcggccagagctcggcgtgacactgaccaagctgcactgttggtccttgacgcagtattctaaatgtgtgttcatggacgccgacaccctggtcctagctaatattgacgacctgttcgaccgggaagaactcagcgcagctcccgacccagggtggcctgactgcttcaatagcggagtcttcgtgtatcagccttcggtagagacctataaccaactcctccatctcgcatctgaacaaggctccttcgatggaggggatcaaggaatcctcaacacgttcttttcatcatgggctaccacggatattcggaagcatttgccgtttatctacaatctttcgagcatcagcatttactcatatctgccggcattcaaggtatttggcgcatctgcaaaagtagtgcatttcttgggccgagtgaagccctggaactacacctacgacccaaagacaaaaagtgtcaagtctgaggcgcacgatcctaacatgactcatcctgaattcctgatcctgtggtggaacatttttaccacaaacgtgctgcctttattacaacagtttggcctggttaaggacacctgtagttacgtgaatgtcctgagcgacctggtctatacactggccttttcatgtggcttctgccgcaaagaggatgtgtcaggagccataagccacctctcacttggagagatccccgcaatggcccagccattcgtgagttccgaggaacgtaaagaaagatgggaacaaggtcaggctgattacatgggagcggattcttttgacaacattaaacgaaagctggacacttatctgcagtag

SEQ ID NO: 225005 - DNA, 840 bp, synthetic construct
  misc_feature 1..840: note = Description of Artificial Sequence: Synthetic coding sequence
  source 1..840: mol_type = other DNA
atgaccgatcaagcgtttgtgacactaaccactaatgatgcatacgccaaaggggcactggtccttggcagctcattgaagcagcaccggaccactagacggctggtggtcctcgccacgcctcaggtctccgatagcatgcgcaaagttctggagacggtttttgacgaggtgattatggtggacgtgcttgactctggcgactcagcacacttgacgctgatgaagagaccagaactgggggttacactaactaaattacattgctggagcctgactcaatatagcaagtgcgtgtttatggatgcagacacactggtcctggccaacattgatgatctcttcgaccgcgaggaactgtctgccgcacctgaccctggttggccagactgttttaattctggcgtctttgtctatcagccgagtgtggaaacatacaatcagcttctgcacctcgcaagtgagcagggcagcttcgacggcggagaccagggcatccttaacaccttcttctcttcttgggctacgaccgacattcgtaagcacctgccattcatctacaatttgagttctatcagcatctattcgtacctcccagccttcaaagttaagatgagtcaggaaccatatcacatctgtccattggggcgttcccagttgtggcatagcaggttgtatcccagaaagaacggaaggaacgatggcaatcgggctagacttatcatatgggagcagatccctctgactacatcccggggtaatctgacactgacatctagcagaaacaccgcctttttctgtgaacatatccacttcacaagcttagtgagcgacacatag

SEQ ID NO: 225006 - DNA, 1398 bp, synthetic construct
  misc_feature 1..1398: note = Description of Artificial Sequence: Synthetic coding sequence
  source 1..1398: mol_type = other DNA
atgtctgaaacagagtttcaccatggagctcaggccggactggagttacttaggagttccaactcgccgacatctgctagccagtccgcaggcatgacagtgactgaccaagctttcgtaacactggcaaccaacgatatttactgtcaaggcgctcttgtcctgggccagtccctgcggcgacatcgcctaacacgtaaattagtggtgctcataactcctcaggtgtccagcctgcttagagtgatactgtcaaaggtcttcgatgaagtgattgaggtcaacctcatcgacagcgcagattacatccatctggccttcctgaagcggccagaattgggtctgacactgactaaactgcactgttggacccttacccactatagcaaatgcgtgttcctggatgcagataccttggttttgtcgaacgttgacgagttgttcgatagaggcgaattcagcgctgcgccagaccccggttggcccgactgttttaattctggcgtgtttgtgttccaaccctccctccatacccacaagcttctgctgcagcacgcgatggagcacggaagttttgacggcgctgatcagggactcttgaactccttcttccggaactggagtactaccgacattcataagcatctgccgttcatctataatcttagcagtaacaccatgtacacttattctcccgctttcaaacaattcggatcttcagctaaagtcgtgcacttccttggttccatgaaaccatggaattacaagtacaacccgcagtctggctcagtgctggagcagggcagtgccagtagcagtcagcatcaggccgcttttctccacctgtggtggaccgtctaccaaaacaatgtcctcccactctacaagtctgtacaagctggtgaggcaagagctagtcctggtcataccctgtgccacagcgacgtgggaggtccctgtgcagattccgcttcaggagtcggcgaaccctgcgagaactccactccctctgctggagtcccctgtgcaaactcccctcttggttctaatcagcctgcccagggcctgccagaacccacacagattgttgacgagactcttagtctgccggaaggtaggcggtccgaagatatgatcgcgtgtcccgagaccgaaactcctgcagtcataacctgcgatccgctctcccagccctcccctcagccagccgacttcacggagacagaaaccattctggtcgacctcgcagtgtccgtgtctcagatctcaattgaagagaaggtaaaagaattgagtcctgaagaggagagacggaaatgggaagaaggtaggatagattatatggggaaagatgcattcgcgaggatccaggagaagctggatcggttcctgcaatag

SEQ ID NO: 225007 - DNA, 1506 bp, synthetic construct
  misc_feature 1..1506: note = Description of Artificial Sequence: Synthetic coding sequence
  source 1..1506: mol_type = other DNA
atgagtgaaaccgagtttcatcatggagcacaggctgggctagagctgcttagaagtagtaattcaccaacaagcgcaagccaaagtgcaggaatgaccgtaaccgaccaggccttcgtgactctggccacaaacgacatctactgtcaaggcgctctcgtgctgggccaatctttgcgccgtcataggttgacacgaaagctcgtcgtacttataacaccgcaagtgtcttctcttctgcgggtgattctatccaaggttttcgatgaggtgattgaagtgaacctaatcgactcagcagactatatacatctggccttcctgaaacgcccagaactgggcctcacactcacgaagctgcattgttggacgctcacccattactcaaagtgcgtgtttcttgatgccgacactctggttctctccaatgtcgatgagttattcgaccggggagagttctctgctgcacccgaccccggatggcccgattgcttcaacagtggcgtgttcgtgttccaaccctcactgcacacacataagctgctgctacagcatgcaatggagcatggttcgttcgacggcgctgaccagggactattgaacagtttctttcgaaattggtctacaacagatattcacaaacacctgcccttcatctataacctgtcatctaacacaatgtatacatactctcctgcattcaagcagttcggctcatccgcaaaggtggtccactttctgggcagtatgaaaccctggaattataaatataacccacaaagtggctcagtcctcgaacagggtagtgcttcaagttcccagcaccaggcagcctttctgcacctctggtggaccgtctaccagaacaatgtactgccactgtacaaatccgtgcaggcgggtgaagctcgggcaagccccggtcacaccctgtgccattccgatgtgggcggaccgtgtgctgattccgcttcaggcgtgggcgagccgtgcgagaatagcactccctccgccggagtgccgtgtgctaacagcccactgggcagtaatcagcctgctcagggccttccagaacccactcaaatcgtggatgaaactctgtctttgccagaaggccgaagaagcgaagatatgatagcctgtccagagactgagactccagccgttataacttgcgatccattgtctcagccttcacctcagcctgccgactttactgaaactgagacgattctgcagcccgcaaataaagtagagagtgtgagctctgaagagacgtttgagcctagccaggaactgcctgccgaggctctgagagatccctcgctccaggacgcactggaggtcgacctggccgtgtccgtgagtcaaatctccatagaagagaaggtaaaagaactcagccctgaagaagaaagaagaaagtgggaagaaggacgaattgattacatggggaaagacgccttcgccagaatacaagaaaaactagatagattccttcaatag

SEQ ID NO: 225008 - DNA, 1413 bp, synthetic construct
  misc_feature 1..1413: note = Description of Artificial Sequence: Synthetic coding sequence
  source 1..1413: mol_type = other DNA
atgtctgtcactgaccaggctttcgtcactctggcaacaaatgacatatattgccaaggagccctcgtcctcggtcagagccttagacgacacagactgactaggaagctcgtagtgctaatcacacctcaggtctcttcactgctgcgtgtgattctatccaaggtgttcgacgaggtcatcgaagtgaatctgatcgacagcgctgactacatccatcttgcattcctcaaacgtcccgagctcggtctcaccctcactaagctgcactgctggacccttacccattacagcaagtgtgtctttctggatgcagatacactggtgctatccaacgtagacgagctctttgatcgaggagaattcagcgcagccccagatcccggatggcccgattgcttcaacagcggtgtcttcgtgtttcaaccttcactccatacccacaaattgcttctgcaacatgctatggagcatggctcatttgatggagctgaccaaggactgctaaactcattctttcgaaactggtccaccacggatatccacaagcacctcccattcatttacaacctgagttctaacacaatgtatacttattctccagcctttaagcagttcggctcgagcgcaaaggtcgtgcatttcctaggcagcatgaagccctggaattataagtataaccctcagtcaggatctgttttagagcaaggttctgcctcttccagtcagcatcaagcggcatttctacatctgtggtggaccgtgtaccagaataacgttctgcccctatacaaatcagtccaggcaggcgaagcaagagccagtcccggacatacactgtgtcattcagacgtaggcggaccatgtgccgattcggcctctggtgtgggcgagccctgcgaaaattccacccccagcgcaggagtgccttgcgcaaactcccccttgggaagcaatcagcccgctcagggcctgccagagcctacgcagatcgtggatgaaacattaagcctgcccgaggggaggagaagtgaggatatgatcgcgtgccccgaaaccgaaacccccgctgtcattacttgcgatccgctgagtcagccctcaccccagcctgcagactttactgagactgagaccatccttcagcccgcaaacaaagtagaatctgtttccagtgaggagacatttgagccgtctcaggagctccctgccgaggcgctgcgcgatccaagccttcaggacgccctggaggtcgacttggcagtgtctgtaagccagatctccatcgaggagaaggtaaaggagctttcacccgaagaagagaggagaaaatgggaggagggcaggatagattatatggggaaagacgccttcgcacggatccaggagaagttagatcgctttctgcagtag

SEQ ID NO: 225009 - DNA, 417 bp, synthetic construct
  misc_feature 1..417: note = Description of Artificial Sequence: Synthetic coding sequence
  source 1..417: mol_type = other DNA
atgagtgtgactgaccaagcttttgtgacactagccaccaacgatatctattgtcaaggagcactggtcctagggcaaagcctccgtagacatcgactgacccgcaagctcgtggtgctgatcacgcctcaggtgagtagtctcctgcgggtcatcttgagtaaagtgtttgacgaagtgatagaggtgaatctcatcgattcagcagattatattcacctcgcgtttttgaagcgacctgagctgggcctgacactcactaagctgcactgctggactttgacgcactacagcaagtgtgtcttccttgacgccgatacacttgttctgtctaacgtcgatgagctgttcgatcgcggtgagttttccgccgcacccgatcctgggtggccagactgttttaattcgggggtgtag

SEQ ID NO: 225010 - DNA, 1293 bp, synthetic construct
  misc_feature 1..1293: note = Description of Artificial Sequence: Synthetic coding sequence
  source 1..1293: mol_type = other DNA
atgtcagaaaccgaatttcatcacggtgcacaagcgggtctcgagttgctcagatccagcaacagccccaccagtgcatctcagtcagccggtatgaccgtgacagaccaggcttttgttaccctggctacaaatgacatttactgtcagggcgctctggtgctgggccagtcgcttcgacggcaccgtctgacaagaaagctggtcgtattgattactccacaggtttcatcactacttcgcgtgattctgtctaaggtgtttgatgaagtgattgaggtaaacctgattgacagtgctgactacatccacctagcattcctgaagcgacccgaactgggtctaacccttacaaagctgcactgctggaccttgacccactattccaaatgtgtgttcttggatgctgatacgcttgtactgtcaaacgtggatgagttgtttgatagaggggagtttagtgcagcgcctgacccaggctggcccgactgctttaattcgggtgtgtttgtattccagccctctttgcacactcataagcttctcttgcagcatgccatggagcatggctcttttgatggtgctgaccaaggcttactcaactctttctttcgaaattggtcaacaactgacatccataagcacctgccattcatatataacctaagctccaacacgatgtacacctacagccccgctttcaagcagtttggatcttctgcaaaagttgtgcactttctgggatccatgaaaccctggaactataagtacaatccccagagcggatccgtgttagaacagggtagcgcatcaagttcccagcatcaggcagctttccttcacctgtggtggacagtatatcaaaataacgtgctgccactgtacaagagcgtgcaggctggcgaagccagagcctctcctgggcatactctgtgtcacagtgacgtcggcggaccatgcgccgatagcgccagcggcgtcggggaaccttgtgagaattccaccccctctgccggtgtcccttgcgcaaattccccattaggcagtaatcaacccgctcagggactgcctgagcctacacagatagtggacgagacattatccctaccagaaggcagacgatccgaagatgtagatctggccgtctctgtaagccagatctccatcgaagaaaaagttaaggaactgagtccagaggaggaaagaaggaagtgggaggaggggaggattgattacatgggaaaggatgcctttgccaggatccaggaaaaacttgataggtttttgcaatag

SEQ ID NO: 225011 - DNA, 354 bp, synthetic construct
  misc_feature 1..354: note = Description of Artificial Sequence: Synthetic coding sequence
  source 1..354: mol_type = other DNA
atgtatggcaaaatcattttcgtactattactctcggatacacataagcgcgatacatatgccgctacaccacgagctcatgaggtgagcgaaatctcggtgcgtacagtctatccccctgaagaagaaactggggaacgagtgcagcttgctcaccacttcagtgaacccgagataacccttatcatttttggcgtcatggccggagtgataggaacaattcttcttatctcttatggtattagacgtttaattaagaagtccccaagtgacgtcaaaccattgccttcacctgataccgatgtgcccctctcaagcgtcgagattgagaatccagagacaagcgatcagtag

SEQ ID NO: 225012 - DNA, 453 bp, synthetic construct
  misc_feature 1..453: note = Description of Artificial Sequence: Synthetic coding sequence
  source 1..453: mol_type = other DNA
atgtacgggaagatcatctttgtactgttgctgagcgagattgtgagcatctctgccctaagcacaaccgaggtggcaatgcatacaagcacctcttcgtcagtgactaaaagctatatcagcagtcagaccaacgatacccataaacgcgatacatatgccgctacccccagggcacatgaggtatcggagatctcagtgaggaccgtgtaccctcctgaagaggaaacgggcgaaagagtacagctcgcgcaccacttcagcgagcctgagatcacactcattatctttggggtcatggccggtgtgataggcaccattcttctaataagttacggtatacgacggttaatcaaaaagagtccaagcgatgttaagccattgccaagtcccgacaccgatgtccctttaagtagcgtagagatcgagaacccagagacttctgaccagtag

SEQ ID NO: 225013 - DNA, 189 bp, synthetic construct
  misc_feature 1..189: note = Description of Artificial Sequence: Synthetic coding sequence
  source 1..189: mol_type = other DNA
atgtatggaaaaattatctttgtgcttcttttgtctgagatagtgagcatctctgcgctgtcaaccaccgaggtagccatgcacaccagcacgtcaagctcagtaaccaaaagttatataagttcacagactaatggagaacgagtccagttagcgcaccacttttccgagccggatttccataattag

SEQ ID NO: 225014 - DNA, 357 bp, synthetic construct
  misc_feature 1..357: note = Description of Artificial Sequence: Synthetic coding sequence
  source 1..357: mol_type = other DNA
atgtatgggaaaattatctttgttctgttgctctctgagatcgtttcaatctcagccttgtctacaacagaggtggcaatgcacacgtccacttcaagttcagtaacaaaaagctacatctcttcccagactaacggcgaaagggtgcaacttgcccatcatttctctgaacccgagatcaccttgattattttcggagtgatggccggtgtcatcgggacgatcctgttaatcagttatgggattcgacggctgattaaaaagtctccatccgatgtgaaacctctcccatcccccgatacggacgtgccactgagcagcgtggagattgagaaccctgagacctctgaccagtag

SEQ ID NO: 225015 - DNA, 414 bp, synthetic construct
  misc_feature 1..414: note = Description of Artificial Sequence: Synthetic coding sequence
  source 1..414: mol_type = other DNA
atgtacggtaaaattatattcgtcctgctcctaagtgagatcgtgtctattagtgccctgagcacaacagaagtggccatgcatacctctacatcttcgagcgtgaccaagtcatacatcagcagccagactaacgacacacacaagagagatacgtatgctgcaacccctagggctcatgaagtgtctgagatttcggtcaggaccgtttatcctcccgaagaagaaactgaaattactcttattatctttggagtgatggcaggtgtgatcggcacaatcctgctgatctcctacggcattcggcgactcattaaaaaatctccaagtgacgtcaaacctcttccttcgccggacactgatgtccctcttagttccgtggaaattgagaaccctgagaccagtgaccagtag

SEQ ID NO: 225016 - DNA, 258 bp, synthetic construct
  misc_feature 1..258: note = Description of Artificial Sequence: Synthetic coding sequence
  source 1..258: mol_type = other DNA
atgtacggcaagattatcttcgtgcttctcctaagtggcgagagggtacagctagctcatcacttttctgagcctgagatcacccttattattttcggggtgatggcaggtgtgattggtaccatcctcctgatttcctacgggattcgcaggctgatcaagaaatcaccatctgacgtgaaacctttgccttcccccgataccgatgtcccactgagctcggtcgagatcgagaacccggagacttccgatcaatag

SEQ ID NO: 225017 - DNA, 375 bp, synthetic construct
  misc_feature 1..375: note = Description of Artificial Sequence: Synthetic coding sequence
  source 1..375: mol_type = other DNA
atgcacacgtctacgagttcaagcgttaccaagagctatatctcatctcaaacgaacgacacacacaagcgtgatacatatgccgctacacccagagctcatgaggtgagcgagatttcggtgcggactgtgtatccccctgaagaagaaacaggcgagagagtgcagctggcccaccattttagcgagcccgaaattacattaatcatctttggagtgatggccggagttatcggtactattctgctgatttcctacggaattagacgtctcatcaaaaagtcacctagtgacgtgaagcccctgccctccccggatacggatgtgccactttcctctgtagaaatcgagaatcccgaaacttccgaccagtag

SEQ ID NO: 225018 - DNA, 276 bp, synthetic construct
  misc_feature 1..276: note = Description of Artificial Sequence: Synthetic coding sequence
  source 1..276: mol_type = other DNA
atgtacggaaaaatcatttttgtgttgctgcttagtgagatagtgtctatcagcgctctatcaacaaccgaagtagctatgcacacatctacctcaagcagtgtgaccaagtcctacatctcctctcagaccaatggagagaccggacaactggtgcataggttcaccgtccctgccccagtggtgataatattgattatcctttgtgtgatggcaggcatcattggaacaatcctgttaatttcttacagtattcggagactgatcaaggcttag

SEQ ID NO: 225019 - DNA, 276 bp, synthetic construct
  misc_feature 1..276: note = Description of Artificial Sequence: Synthetic coding sequence
  source 1..276: mol_type = other DNA
atgtatggaaagataatatttgttttactattaagcgaaattgtatcaataagcgccttaagcaccaccgaggtggccatgcacaccagcacaagcagctctgttactaagtcctatatttcgtcccagacgaatggtgagacgggtcaactcgtgcaccgttttaccgtgcccgcaccagtggtaatcatcctgataatcctgtgcgtgatggcgggaatcatcggcactatcctccttattagctacagtattaggcgccttatcaaagcttag

SEQ ID NO: 225020 - DNA, 177 bp, synthetic construct
  misc_feature 1..177: note = Description of Artificial Sequence: Synthetic coding sequence
  source 1..177: mol_type = other DNA
atgtacggtaagattatctttgttctgttattgtccggcgagacgggtcagcttgttcaccgattcaccgttcccgctcccgtagtgattatattaattattctgtgcgtgatggccggaattatcgggactattctcctgatttcttactcaatcaggaggctgatcaaggcttag

SEQ ID NO: 225021 - DNA, 387 bp, synthetic construct
  misc_feature 1..387: note = Description of Artificial Sequence: Synthetic coding sequence
  source 1..387: mol_type = other DNA
atgtggtccacccgcagccccaatagcacagcatggcctctcagtttagaacctgacccagggatggctagtgcaagcactaccatgcatacgacgacgatcgcagagccagaccccggaatgtctgggtggccagatgggcgaatggagacatctactcccaccattatggacatcgtggtcatcgctggtgtcattgcggcagtggcaatcgttttggtatcgctcctgtttgtgatgctgcgatacatgtatagacataagggaacttatcacactaacgaggccaagggaaccgagtttgcagagagtgcagatgccgcactacagggcgatccggcattgcaggatgctggagattccagcaggaaagagtacttcatttag

SEQ ID NO: 225022 - DNA, 324 bp, synthetic construct
  misc_feature 1..324: note = Description of Artificial Sequence: Synthetic coding sequence
  source 1..324: mol_type = other DNA
atggcttccgcatccactacaatgcacacgaccacgattgccgaaccagatcctggaatgagcggctggccagatgggcgtatggagaccagcaccccaacaatcatggatatagtggtcatcgccggtgtcattgccgctgtggcaattgtactagtgtcccttctatttgtaatgctaaggtacatgtacagacataaagggacatatcacactaatgaggcaaaggggacggagttcgctgagtccgccgacgcagccctccagggcgaccccgcactgcaggacgcaggagatagttctagaaaagaatattttatctag

SEQ ID NO: 225023 - DNA, 330 bp, synthetic construct
  misc_feature 1..330: note = Description of Artificial Sequence: Synthetic coding sequence
  source 1..330: mol_type = other DNA
atgtggtctacaaggtcacccaatagtaccgcgtggccgttgtctctcgagcccgacccaggaatgtctggctggcccgatggaagaatggaaaccagcactccaacaatcatggacattgtcgtgatagcaggagtcatcgcagccgtcgcaatagttctcgtgagtctcctcttcgtgatgttgcggtatatgtacaggcataaggggacctatcacaccaacgaagccaagggaaccgagttcgccgagtccgccgatgccgctctgcagggcgacccggctcttcaggacgctggtgactccagccggaaagagtatttcatttag

SEQ ID NO: 225024 - DNA, 237 bp, synthetic construct
  misc_feature 1..237: note = Description of Artificial Sequence: Synthetic coding sequence
  source 1..237: mol_type = other DNA
atgtacggcaagattattttcgtgctgctgctctcaggaatagtctcaataagcgcaagctcaacaaccggtgtggcgatgcatacaagcacttcttcatccgttactaagtcttatatctcctcacaaactaacggcatcacccttattaattggtgggctatggccagagtgattttcgaagtgatgttagtagttgtcggtatgatcatcctgatcagttactgtattaggtag

SEQ ID NO: 225025 - DNA, 168 bp, synthetic construct
  misc_feature 1..168: note = Description of Artificial Sequence: Synthetic coding sequence
  source 1..168: mol_type = other DNA
atgtacggcaaaattatcttcgtgctgttgttatcgggcatagtctctatttccgcgtcgtcaaccactggcgtggcgatgcacacatccacatcaagcagcgtgacaaagtcttacatcagctcccagaccaacggagagcgcggtcagttggtccacagattttag

SEQ ID NO: 225026 - DNA, 237 bp, synthetic construct
  misc_feature 1..237: note = Description of Artificial Sequence: Synthetic coding sequence
  source 1..237: mol_type = other DNA
atgtacggaaagatcatctttgtcctcttgctgtcaggaatagtatctatcagcgcctcctccactactggagtggcaatgcacaccagtacctcgagttcagtgaccaaatcatatattagctcccagaccaatggaattacactgataaactggtgggccatggccagggtgatattcgaggtgatgctcgtagtcgtggggatgataattttgatatcatattgcattaggtag

SEQ ID NO: 225027 - DNA, 180 bp, synthetic construct
  misc_feature 1..180: note = Description of Artificial Sequence: Synthetic coding sequence
  source 1..180: mol_type = other DNA
atgtatgggaaaattatttttgtgctattactctccgggattgtttccatttccgcctcttcaaccaccggagttgccatgcacacctccacttcttctagcgtcaccaaatcttatatttcttctcagacgaacggatgtgtgattgggaatattatctgtagcgacaaatctaagtag

SEQ ID NO: 225028 - DNA, 1605 bp, synthetic construct
  misc_feature 1..1605: note = Description of Artificial Sequence: Synthetic coding sequence
  source 1..1605: mol_type = other DNA
atgccccatctgatggagcggatggtcgggtctgggctgctttggctggctctcgtcagttgtattctgacacaggctagcgctgtccagaggggatacggcaaccctatcgaagcttcctcttatggacttgatttagattgcggcgcacctgggacgcccgaggctcacgtttgctttgatccatgtcagaattacacactgttagatgagccctttaggtctaccgagaattctgccggatcacagggatgcgataagaacatgagcgggtggtacaggtttgtgggagaaggcggagtgcgaatgtcggaaacttgtgttcaggtacaccggtgtcaaaccgatgcccctatgtggctgaatggtacacacccagcgcttggcgacggaataacaaaccacacagcttgcgcacactggagcggaaattgctgtttctggaaaaccgaagtgctcgttaaggcctgccccggaggctaccatgtttacaggttggaggggaccccatggtgtaatctgcggtactgtactgacccgagtaccgtcgaggacaaatgtgaaaaggcatgccgaccagaagaagagtgccttgctctcaattccacatggggctgcttctgccggcaggacctaaattcatccgacgtgcattcactccagcctcaactggactgtgggcctagggaaatcaaagtgaaggtggataaatgtcttcttggcggattgggtttgggtgaggaagtgattgcgtatctgagggatcccaactgctcgtccattctccagacagaggagcgcaactgggtcagcgttacaagtccagtccaggcctctgcatgtcgcaatatcctggaacgaaaccagacacatgctatttataaaaacacactcagccttgttaacgacttcattatcagggacacaattctgaatataaatttccagtgcgcctacccactggatatgaaagtgtctctgcaagccgcattacaacccatagtgtccagtcttaacgtctccgtcgacggtaacggggaattcatagtacggatggcccttttccaggatcagaattacactaatccctatgaaggagacgcagtcgaattgtctgtggagtctgtgttatatgttggagctatcctggagcagggggatacatcccgcttcaatttggtcctccggaactgctacgccacccccaccgaagacaaggcagatctggtaaagtacttcatcatcaggaacagttgctctaatcaacgggattcaactattcacgtggaggagaacggccagtcatctgagagtcgcttctctgttcagatgtttatgtttgccggacattacgacctcgtttttttacattgcgagatccacctatgcgactccctgaacgagcagtgtcagccgtcttgctctagatcacaggtccgctctgaggttccagcaatcgatctagccagggtgttggatctgggcccaattactcgcagaggcgcacaatctccgggtgtcatgaacgggacgcccagtacagccggatttctagtagcgtggcccatggtgctgctcacagtgttgttggcctggctgttctag

SEQ ID NO: 225029 - DNA, 1164 bp, synthetic construct
  misc_feature 1..1164: note = Description of Artificial Sequence: Synthetic coding sequence
  source 1..1164: mol_type = other DNA
atgccacacctgatggagcgaatggtgggcagtggcttactatggctagctctggtgagctgcatcctgacccaagcatccgcggttcagagggacccttcaactgttgaggataagtgtgaaaaggcttgccgtcccgaagaggaatgcttggccttgaatagtacttggggatgcttctgtagacaagacctgaattctagcgacgttcactcactacaaccacaactggattgtgggcctcgcgaaatcaaggtaaaagtggacaaatgccttcttggaggcctaggcctgggcgaagaggtgatcgcatatctgagagacccaaactgctcttccattctgcagacagaagagcgtaactgggtgagcgtaacatcccccgtgcaggccagcgcttgtagaaatatcttggagcggaatcaaactcatgcaatctataagaacacattgtcactcgtgaacgatttcatcatccgtgacactattcttaacattaatttccaatgcgcatatccgctggacatgaaagtgtccctgcaggccgctttgcagcccattgtatcaagcctgaacgtgtctgtggatggaaatggcgaattcattgtccgaatggccctcttccaggaccagaattacacaaacccttacgaaggcgatgccgtggaactgtctgttgagagcgttctgtatgtgggggcaatcctcgagcaaggggatacttcacgcttcaatctggtattgaggaattgctacgcaactcctactgaggataaagctgacctggtaaagtactttatcattcgcaacagttgttcaaatcagcgcgactctaccattcacgttgaggaaaatgggcagagcagcgagtctcgattttcagtgcagatgttcatgttcgccggacattatgaccttgtattcctgcactgtgagattcatctgtgtgatagcctgaatgaacagtgtcagccttcctgcagcaggtctcaggtgagaagcgaggtgcccgcaatagatctcgcgcgagtccttgatctgggacctattaccaggcgcggagctcaaagtccaggagtcatgaacggaactccaagcacggctggcttcctggtggcatggccaatggtcctcttgaccgtgttgctggcttggctgttctag

SEQ ID NO: 225030 - DNA, 1173 bp, synthetic construct
  misc_feature 1..1173: note = Description of Artificial Sequence: Synthetic coding sequence
  source 1..1173: mol_type = other DNA
atgccacatcttatggaacggatggtaggctccgggctgctttggctggcattggtctcatgcattctgacgcaggcttccgctgtccagagggtgcctcgcgacccatcaacggtggaagacaagtgcgaaaaggcctgtagacccgaggaggagtgcctggcactgaattctacttggggctgcttttgtagacaggacctgaattctagcgacgtgcactccctgcaaccacagttggactgtggacccagggagattaaggtcaaggtcgacaagtgcctcttaggagggctcggcttgggggaggaggtcatcgcctaccttagggatcccaattgctcgagcatcctccaaactgaggagcgaaattgggtgtcagtgacttcgccagtgcaggcgtcggcttgtcggaacatactcgagaggaaccaaacacacgcaatctacaaaaacacgctgtccctggtaaacgatttcataatcagggatacgatcttgaatatcaattttcagtgtgcttatcctctcgacatgaaagtgtccctgcaggccgctctacagcccattgtttcttccctgaacgtttctgtggatggcaatggggagttcatagtgcgaatggccctgttccaggaccagaattatactaacccgtacgagggcgatgctgtagagctctctgttgagtcggttctgtacgtcggggcaatcctcgaacagggcgacacatccaggttcaatctagtactgcggaattgctatgcaacaccaacagaggataaagctgacctcgttaaatatttcataatccgcaattcatgttcaaatcagagggactcgaccatacacgtggaagaaaacggtcagtcttctgagagcaggttttccgtccagatgttcatgtttgccggacactacgatctcgttttccttcattgcgagatacacttatgtgattctttgaacgagcagtgccagccttcatgctcccggtctcaggtgagaagtgaggtgcccgctatcgatctcgcaagagtattagatctgggaccaattacgcggagaggcgctcagtcacccggtgtcatgaacggcacaccaagcacagctgggtttctggttgcttggcccatggtgttgctgacagttctcttagcttggctcttctag

SEQ ID NO: 225031 - DNA, 1614 bp, synthetic construct
  misc_feature 1..1614: note = Description of Artificial Sequence: Synthetic coding sequence
  source 1..1614: mol_type = other DNA
atgccgcacctgatggagcgaatggtgggatctggtctgctgtggctagctctggtttcctgcatccttacacaggcctccgctgtccagagagggtatggtaaccctattgaggccagcagttacgggctagacctcgattgtggagcacccggtaccccagaggcccatgtgtgctttgatccatgtcagaactataccctgctggatgagccattcagaagcaccgaaaactctgctggctcccagggatgcgataagaacatgagtggctggtaccgcttcgtaggggagggcggagtcagaatgtccgaaacttgcgtccaagtgcaccgctgccaaaccgacgcgcctatgtggctaaacgggacacatcctgccttgggcgacggtataacaaaccatacggcttgtgcacattggagcggcaattgctgcttttggaagaccgaggtcctcgtcaaagcatgccctggtggttaccacgtctatcgactggaggggactccgtggtgtaatctgcgatactgcactgtgcccagggatccgtccacggtggaagataaatgcgaaaaggcctgcagaccagaagaagagtgtctggcactaaattcaacctggggctgtttctgtaggcaggacctcaactctagcgatgttcactctctgcagccccagctggattgtgggcctagagaaattaaggttaaagtggataagtgtctgttagggggattaggactaggggaggaagttatcgcttacttaagagaccctaattgctccagtatcctccagaccgaggagagaaattgggtgtccgtaacatcccccgtgcaagcctctgcgtgtaggaacatactggaaagaaaccagacccatgccatttacaaaaacacgctgtccctcgtaaacgacttcattataagagataccattttaaatattaacttccagtgtgcctacccacttgacatgaaggtgagcctgcaggcagccctccaaccaattgtctccagcctgaatgtttccgtcgatgggaacggcgaattcatcgtgagaatggcactgtttcaagaccaaaactacaccaacccctatgagggtgacgcggtggagctgtctgtggaaagcgttctttatgtgggcgcaattctcgagcagggagacacctcaaggtttaacttggtcctgcgaaattgttacgccacacccaccgaggacaaggccgacctggtgaagtactttataatccgaaactcttgctcgaatcaacgagattccacgatccatgtcgaggagaatggccagagttcagagagccgattctcagtgcagatgtttatgttcgctgggcattacgaccttgtgttcctacattgtgagatccatctgtgtgacagcctcaacgagcagtgccagccaagctgcagccgatcccaggttcgttccgaggtgcccgctatagatttggcccgagttctcgacttgggacccattaccagacgaggtgctcagtctccaggcgtgatgaatggcactccttcgaccgcgggattcctggtggcctggcccatggtgctcctgaccgtcctattggcatggctgttctag

SEQ ID NO: 225032 - DNA, 1548 bp, synthetic construct
  misc_feature 1..1548: note = Description of Artificial Sequence: Synthetic coding sequence
  source 1..1548: mol_type = other DNA
atgaagataaagtgtgagaagtcgcgaacacagagttcagctcaacatgtccagcacagcgcccattctaccatcgtgtgcagaaagcacagccataacgccgagaccgccggaagggtggatattgttaggggcggacctttctttcaccatcctctgcggaagtggctcatctccccacccctgaataagcccagcgtctggcctagaactcctattatcccagttcaccagctgcgacgggacacctgggtcgggaactgtaacaaaaagacagcacactcaaggctgcatagccacggctggcccgaggaagagcgcttcgttttctcctccgagctgcacggaaagtcagcttactccaaggtgacgtgtatgccccacctcatggaacgcatggtgggcagcggcctactttggctagcactcgtgtcatgcatcctcactcaagcaagcgccgtgcagagggatcacctcgacccttccaccgtcgaggacaaatgtgaaaaagcctgcaggcccgaagaagagtgtctcgcattgaactcaacatggggatgcttttgcagacaggaccttaactcttccgacgtccattctctgcagccgcagctggattgcggcccacgcgaaatcaaagtgaaggtcgataagtgcctgttaggtggtttgggattaggcgaggaagttattgcctatctgagggacccaaattgctctagcattcttcagacagaagaacgcaattgggtgtccgtgacatcacccgttcaagcatctgcttgtcgcaacatcttggaacgtaatcagacccacgcgatttacaaaaacactctttccctagtaaacgacttcatcattcgcgacacaatccttaacatcaacttccagtgcgcctatcccctggatatgaaggttagtctccaggccgctctgcagcccatagttagctctctgaatgtatccgtcgatggtaacggcgaattcatcgtcagaatggccttatttcaggaccaaaattataccaatccctacgaaggggacgccgtggagttgtctgtcgagtctgtgctgtatgttggtgcgattctggagcagggcgacacgagccgctttaatctagtcttgaggaactgctacgcgacccctacggaagacaaggcagacctggtgaaatatttcataatccgaaacagctgctccaatcagcgggattctactatacacgtggaagaaaacggccaatcctctgaatcgaggtttagtgttcagatgttcatgttcgctggccactacgacctggtttttctgcactgcgagatccacctgtgtgactcactaaatgaacagtgccaaccttcatgttcccgcagccaagtccgcagtgaggtgccggcaattgatctggctcgggtcctggacctgggaccaataacacgtcgtggagcccagtcgcctggagtcatgaacggcactccctctacagcgggattcttggttgcatggccgatggtactgctaactgtgctgcttgcatggctattctag

SEQ ID NO: 225033 - DNA, 1959 bp, synthetic construct
  misc_feature 1..1959: note = Description of Artificial Sequence: Synthetic coding sequence
  source 1..1959: mol_type = other DNA
atgccccttctactcctcctgctcctgctgccgagcccactgcatccacatccaatatgtgaagttagtaaggtggccagtcatctagaggttaactgcgataaaaggaaccttactgctctgccccctgacctgccaaaggacacgaccattcttcaccttagcgaaaacttactctacacttttagcttggccacgctcatgccttacacccggctgacccagcttaacctagatagatgcgaactgaccaagctgcaggtcgacggaactctccccgtgctagggactctcgacctgtcacataaccagttgcaaagcttacccctcctggggcagacgctgcccgcattaactgtcttggacgtatcttttaatcgcctgacttcactgccccttggcgcacttcgtgggctcggagagctgcaggagctgtatctgaaagggaatgagctcaagaccctgcctccgggtctgctgactccgacacccaaacttgagaagctgagtctggccaacaacaacctaacagagttacccgctgggctgctcaacgggctcgagaatctcgatactcttctgctccaggagaatagcttatataccattcccaaggggtttttcgggagccacttgctaccatttgcctttctgcacggaaatccatggttgtgcaactgtgagattctgtatttcaggcgttggctccaggataatgccgagaacgtatacgtgtggaagcagggggtggatgtgaaagcaatgacatctaacgtcgcgagtgtccaatgtgataattctgataaattcccagtgtataagtatccgggaaaaggatgtccaaccctgggcgacgaaggcgacaccgacctgtatgactactatcctgaagaggatactgaaggagataaagtgagggccaccagaacagttgtgaagtttcctaccaaagctcatacaacaccctggggcctcttctactcgtggagcacagcgagcctggacagccagatgcctagctcacttcacccgacccaggaaagcactaaggagcagaccactttccccccaagatggactcctaactttactctgcacatggagtccatcactttcagcaaaactcctaaaagtaccacagagcccacaccttcccccaccacatcagagccagtgcctgaaccggctcctaacatgaccacactggaacccaccccctcgccgactacacccgaacctaccagtgaacccgctccatctccgacaacgccggagcccacgagcgagccagcaccatccccaaccactcccgagccaacttccgaacctgccccttccccaacaactcctgagccgacccccattccaactatcgcaactagtccaactattttggtgtcggctactagcctgattacgcctaagagtacttttctgaccacgactaaacccgtcagtctcctcgagtccacgaagaaaaccattcccgaacttgaccaaccaccgaagttacggggtgtcctgcagggtcatttggagtcctccaggaatgatccctttctacatcccgacttctgctgtctgctgccactaggattttatgtgctcggcctgttttggcttctgttcgccagcgtcgtcctgattctcctcctttcttgggtaggacacgttaagccgcaggccctggactcaggccaaggggcagccctcactaccgcaacgcagaccactcacttagagttgcagagaggcagacaggtgacggtccccagggcttggctgctcttccttcgtggctctctaccgacattcaggtcatctttattcctatgggtgagacccaatggccgagtgggaccactcgtagcgggacgtaggccttccgccttgtcccaggggaggggtcaagatctgttgagcacggtgtctatcagatatagcgggcatagcttatag

SEQ ID NO: 225034 - DNA, 1881 bp, synthetic construct
  misc_feature 1..1881: note = Description of Artificial Sequence: Synthetic coding sequence
  source 1..1881: mol_type = other DNA
atgcccctgctcctcttgctgctgctgctgccctctccattacatccccacccaatctgtgaggtgagcaaggtagctagtcatttggaggtcaactgcgacaaacgcaacctcaccgccctgcccccagatctgcccaaagacacgacgatactccatctgagcgagaacctgctgtatacgttctccctcgccaccctaatgccatatacacggttaacccagctgaacctggatagatgcgagctgaccaaactgcaagtggatggtactctacccgtgttgggcacgcttgatctgagccacaatcagctgcagtctctgccgttgttgggtcagacgttgcctgctctaacagtgctggacgttagctttaatagactcacttctttgcctttgggagctctcaggggcttgggagaattacaagagctttatttgaaggggaacgaacttaagacattgcctcccggactgttgacaccgaccccgaagttagagaaactgtcactggccaacaacaacctgaccgagctgcccgctgggctgctgaacggcctcgagaatctggataccttgttattgcaggaaaacagcctctacacaattccaaaagggtttttcgggtcacatctactcccctttgcctttctccacggcaatccgtggctttgcaactgcgagattctgtattttaggcgttggttgcaggataatgccgaaaacgtgtatgtgtggaagcagggagtggacgttaaggccatgacgtctaacgttgcttccgtgcagtgcgacaattctgacaagtttcctgtctataaataccccggtaaagggtgtccaacactcggtgatgagggcgacaccgatttgtacgactactatcccgaggaggacacagagggagacaaggtcagggcaacaagaaccgtcgttaaattccccaccaaagcacacaccacgccttggggcctcttttatagctggagtacagctagtctggactctcagatgccctcttctctgcatccaacccaggaatcgactaaggaacagactacgttccctcccagatggacaccaaactttactctccacatggaaagcattacctttagcaagacccctaagagcaccactgagccgacgccaagccctactacgtcggaacccgtcccggagccagcccctaatatgactacccttgaaccaaccccctctcctaccacccccgagccgaccagcgaaccagctcccagtcccactacacccgagccgacaccaattcccactattgctacctcaccaacgattcttgtgtctgccaccagcctgattactccaaagtccacctttctgactacgaccaaacctgtctctttactggaatccacaaaaaagaccattcccgagctagaccagcctcccaagcttcgaggagtccttcaaggacatctggagtcttcccggaacgatcccttcctgcatcctgacttctgttgtcttctccctctgggattttatgtgctcgggttgttctggttactgttcgcttcagtcgtgttaatacttttgcttagttgggtgggccacgtcaaaccccaggcccttgactctgggcaaggggctgcgttgacaaccgccactcaaacaacacatcttgagttgcagagaggtcgccaagtgaccgtccccagagcctggctgctcttcctccgcggttcattgcctacatttcgctccagtctgttcctgtgggtcagacctaatggcagagtgggccctctggtcgcaggacgacggccatccgcgctgtcccagggccgtggccaggatctgctgtccacggtgagcattcgttattccggccattctctgtag

SEQ ID NO: 225035 - DNA, 621 bp, synthetic construct
  misc_feature 1..621: note = Description of Artificial Sequence: Synthetic coding sequence
  source 1..621: mol_type = other DNA
atgggctcaggcccacggggagcactctcacttttgttgctgctccttgctcctccttcccggcctgccgctggctgcccggcaccttgtagttgcgcaggaacgctcgtggactgcggtcgcagagggctcacatgggcgagtctgccaacagcgttccccgtggatactaccgagttggttctgaccggcaataacctgaccgcgctccccccaggcctgctggacgccctcccagccctgcgcaccgcacacttgggtgcaaatccatggcggtgcgattgtcgattggtgcctctgcgcgcttggctggctgggcgacccgagcgtgctccttaccgagacctccgttgtgttgctccccctgctctgcgtggccgtctgctgccatatctcgcagaggacgaactgcgcgctgcctgtgccccagggcctctctgttggggagcactcgccgctcagctggcactgctgggcctgggcctgctccatgcgctcttgctggtcctgctgctctgccgtttaaggcgtctgcgcgcaagggcgagggctagagccgctgccaggctgagccttacagacccactggtggcagagagggcaggtaccgacgaatcatag

SEQ ID NO: 225036 - DNA, 1230 bp, synthetic construct
  misc_feature 1..1230: note = Description of Artificial Sequence: Synthetic coding sequence
  source 1..1230: mol_type = other DNA
atgatcccgtctaggcatacgatgctccggtttcttccagtcaacgcagcgagctgtcctggagataggcggacaatgctggtgaacgtggctgccggtgtgcgggtgctgagggtccccctgagggccggaggaagtggctctctgtccggtctccggccacccgctattgtatgttacttaccactgcaacgcgcatccgcctccggtctctttctcgcaagaccccaacattgcgggaggtgcggacgcggaagaggaggagctgccctgagcctcggatccccagcgtatgccagtcggtgcagggtctcgcgggcagcagttttcagcccctgggcgcctgttagtctggaaagtgggagagccccaggatgcagcctgggaaggcccggacttaggggcgcattggttgtgtggctacagctgggggagacatgggttagacttcggggagatttccagcccgcatgcggcgtcgttcgcgtggaacgcctggctggataccgagacgccggtcatcagggcttggatggggctgggcctgcagtctgggtgctgagagatgtggctcaggtgcccgcagacaggagcgcttattgcggtgcttctcttgcagggcctagaggggctctgtcacttctcctgctgctgctcgccccaccttcgaggcccgcagccggatgccccgctccatgcagctgcgcgggaaccctagtggattgtgggcgacgcggtcttacttgggcttccctcccaactgcatttcccgtggataccaccgagttggtgctgacaggcaacaatttaactgcgctacctccaggcctcttagacgctctcccagcgcttcggacggcccatctcggagctaatccctggcgctgtgattgccgattggttccgctccgtgcctggctggccggaaggccggagagggcaccatacagggatctgcggtgcgttgctcccccagcactaaggggcaggctgctgccgtacctcgctgaggacgagctgcgggctgcatgcgcgccaggccctctgtgctggggcgcactagccgctcagctggcgcttttggggctgggattgctccacgctcttctgctggtccttctgctgtgtaggctgagacggttacgagccagggccagagcacgcgcagcagcccgtctaagtcttactgatcccttggtcgctgaaagagccggaacagacgaatcctag

SEQ ID NO: 225037 - DNA, 534 bp, synthetic construct
  misc_feature 1..534: note = Description of Artificial Sequence: Synthetic coding sequence
  source 1..534: mol_type = other DNA
atgcccgcttggggcgctctgtttctcttgtgggccacggcagaggccacaaaagattgcccaagcccctgtacatgtcgggctctggagaccatggggctttgggtggattgccgagggcacggcttaaccgctctccctgctctaccggcacggacaaggcatctgctcttggcgaataattcattgcagtcagttccccctggtgcttttgatcatttgcctcagctccagaccctggacgtaacacagaacccctggcactgcgattgttctctcacttacctccgcctgtggctcgaggaccgtacaccggaagccttgctgcaggtcagatgtgcctctccatccttggctgctcacggccctctggggagattaactgggtatcagcttgggtcatgtggctggcagctgcaggcttcatgggttaggccaggcgtgctgtgggatgtagccttagtggctgtcgccgctctcggattagccctgctggcagggctgttatgcgcgaccaccgaagcgctggattag

SEQ ID NO: 225038 - DNA, 987 bp, synthetic construct
  misc_feature 1..987: note = Description of Artificial Sequence: Synthetic coding sequence
  source 1..987: mol_type = other DNA
atgaagcctgcaatggaaaccgccgctgaagaaaacacggaacagtcccaggagagaaaggttaattcacgagctgagatggaaatcgggagataccactggatgtatcccggttctaaaaaccatcagtaccatcccgtaccaaccctcggcgaccgcgcttcaccattgagttcccctgggtgctttgagtgctgcatcaagtgtcttggcggagtgccatacgccagcttggttgcaacgattttatgttttagcggcgttgcccttttctgtggctgcggccatgtcgccctcgccggaactgtcgctatattggagcagcacttcagtactaacgccagcgatcacgctctgttaagtgaggtgattcaattaatgcaatatgtgatttacggcatcgcctcttttttttttctatacgggataatattgctcgccgagggattttacacgacctctgctgtgaaagaactccacggtgaatttaaaaccacagcctgcggaagatgcatcagcgggatgtttgttttcctgacttacgtcttgggcgtggcatggctgggtgtctttgggttctctgcagtaccagtgttcatgttttacaacatttggtccacctgcgaggtgattaagtccccccagaccaatggcacaaccggcgtcgagcaaatctgcgtcgatatacgccaatacggcatcatcccctggaatgccttcccaggcaagatatgtgggtccgctctggagaatatttgtaacaccaatgagttctatatgagttaccacttgtttattgtagcatgtgcgggtgccggagccaccgttatcgcactgatccactttcttatgattctctcttcaaattgggcctatctgaaggatgcatccaagatgcaggcgtaccaggatatcaaggcaaaagaagagcaagagctacaagacatccagagcaggtccaaagaacagctgaactcttacacctag

SEQ ID NO: 225039 - DNA, 918 bp, synthetic construct
  misc_feature 1..918: note = Description of Artificial Sequence: Synthetic coding sequence
  source 1..918: mol_type = other DNA
atgaagcccgctatggagaccgctgctgaggagaatacagagcagagtcaggaacggaaggtgaacagcagggcggagatggagattgggaggtaccattggatgtacccgggatccaaaaaccaccagtatcacccagtgcccacactgggagaccgggcttctcccctatcctctcctggctgtttcgagtgctgcatcaagtgtctcggtggagtaccatacgcatccttggtcgcgacgattctgtgcttctcgggtgtcgctctgttttgtggttgtggacacgtcgcgctggccggaactgtggcaatcctagagcaacacttctccacaaatgcctccgaccatgccctgctgtcggaagttattcagctcatgcaatatgtaatttatggcatcgcatcattcttctttctatatggaattattctgctggcagaggggttttacaccacatctgccgtgaaggagctccacggtgagttcaagacaaccgcttgcggtcgctgcatctcgggaatgttcgtgttcctcacctatgtgctcggagtagcttggctgggcgtcttcggattcagtgccgtgcctgtctttatgttctacaatatctggtccacctgcgaagttatcaagagcccccagaccaacgggacaacaggagttgagcaaatctgtgtcgatattaggcagtacggtatcatcccttggaatgcttttcccggaaaaatttgcggaagcgccttagaaaacatctgcaataccaacgaattctacatgagctatcacctgtttatcgtggcctgtgccggagccggtgctaccgttatcgccctactgatatatatgatggccaccacttacaactacgctgtgctgaaattcaagtcgagagaagattgctgcaccaaattctag

SEQ ID NO: 225040 - DNA, 798 bp, synthetic construct
  misc_feature 1..798: note = Description of Artificial Sequence: Synthetic coding sequence
  source 1..798: mol_type = other DNA
atgaaacccgctatggagactgcagcggaagaaaatacagagcaatcgcaggaaaggaagggctgctttgagtgttgtattaaatgcttaggaggtgtgccatatgcctcactcgttgcaaccattttatgttttagcggcgtagccctcttctgcggttgcggccatgtcgcactcgccggtactgtggctatcctagagcagcacttttcgactaacgcgtccgatcacgcgcttctgtctgaggtgatccagctgatgcaatatgtaatatacggcattgcctccttcttcttcctgtacggcataattttactggctgagggcttttataccacatccgctgtcaaggaacttcacggggagtttaaaacaactgcgtgcggaaggtgtatctctgggatgttcgtcttcctcacctacgtgttgggagtggcatggcttggtgtgttcggttttagcgctgtgccagtgttcatgttttataacatttggtcgacatgtgaagtgattaagagtccccagacaaacgggaccactggggtggaacagatatgtgtggatatcaggcagtatgggattatcccatggaatgcctttcctggcaagatctgtggtagcgcacttgagaatatctgcaatacaaacgaattttatatgagttaccatctctttatagtcgcttgcgccggagccggagcaactgttatagcgttactcatctacatgatggcaaccacatataattacgccgtgctgaaatttaagtcaagggaagattgttgtaccaaattttag

SEQ ID NO: 225041 - DNA, 540 bp, synthetic construct
  misc_feature 1..540: note = Description of Artificial Sequence: Synthetic coding sequence
  source 1..540: mol_type = other DNA
atgcagtacgtgatttacggtattgccagtttcttcttcctgtatggtatcatcttgcttgctgaggggttttataccactagcgccgtgaaagagctgcatggagaatttaagacgaccgcatgtggccgatgcataagtggcatgtttgtgttcctgacctacgtgctgggcgtcgcttggttgggcgtattcggattcagtgccgtgccagtgttcatgttctacaacatctggtctacctgcgaagtcattaagagcccacagacgaatgggactaccggggtggagcaaatctgtgtcgacatccgacagtacggaattattccatggaacgccttccccggtaagatttgtggctccgcccttgagaatatctgcaacaccaacgagttctatatgtcctatcacctgtttattgtcgcttgtgctggcgctggtgctacagtgattgctctgctgatttacatgatggcaaccacgtataattatgcagtgctgaagtttaaaagcagagaagactgctgcacgaagttctag

SEQ ID NO: 225042 - DNA, 741 bp, synthetic construct
  misc_feature 1..741: note = Description of Artificial Sequence: Synthetic coding sequence
  source 1..741: mol_type = other DNA
atgggctgttttgagtgttgcatcaagtgtctcggcggagttccttacgcctccctggtcgccacgatattgtgtttctcaggtgtggcactcttttgcgggtgtggccacgtcgccctagctggaacagtagccatcttggaacagcacttttctaccaatgcatcggatcacgcactgctatctgaggtcatccagctcatgcagtatgtaatctacggcattgcctccttcttttttctgtacgggataattctattggctgagggattctatactacatctgcagtgaaggaactgcacggcgaattcaagacgaccgcctgtgggaggtgcatctccgggatgttcgtgtttttgacttatgtgctgggcgtagcctggctgggcgtgtttggtttcagcgcagtcccagtcttcatgttctataacatctggtctacctgtgaggtgattaagtcaccccaaacaaatggcactactggcgtagagcagatttgtgtggacattcgccagtacggcatcattccctggaatgctttcccaggcaagatctgcgggtccgccttagagaacatctgtaacactaacgaattttacatgtcctaccatcttttcattgtggcctgcgcaggtgccggtgctaccgtcatcgccctgctaatttatatgatggccaccacttataactacgccgtcctcaagttcaagagtcgtgaagattgttgtactaagttctag

SEQ ID NO: 225043 - DNA, 324 bp, synthetic construct
  misc_feature 1..324: note = Description of Artificial Sequence: Synthetic coding sequence
  source 1..324: mol_type = other DNA
atgaagcccgcaatggagaccgccgctgaggagaataccgagcagtcgcaggaacggaaaggatgctttgagtgctgcatcaagtgtctcggtggcgtaccatatgcctcccttgtcgctaccatcctgtgcttttccggtgtcgctctcttttgcggatgtggacacgtagccctcgccggtaccgtggcgattctggagcagcacttctcgactaacgcctccgatcacgccttgctatctgaggttatccagctgatgcagtatgtgatctacggaatcgcctcctttttcttcctctacggcatcattctgctcgcatag

SEQ ID NO: 225044 - DNA, 909 bp, synthetic construct
  misc_feature 1..909: note = Description of Artificial Sequence: Synthetic coding sequence
  source 1..909: mol_type = other DNA
atggaaatcggacgataccactggatgtacccgggatctaagaatcaccaataccaccccgttccgaccctgggcgatagagcatcaccactgtcttcgcccggatgttttgaatgctgcatcaagtgcctgggaggagtgccctacgcaagcctggtcgccacaatcctctgcttcagcggcgtggccctgttttgcgggtgtggtcatgttgccctcgcaggcaccgtcgccatcctggaacagcacttcagtacgaatgcttctgatcacgctctgctttccgaagttatccaactcatgcaatatgttatttacggcattgcctccttcttctttctgtatggcattatactgctggccgaaggattttacactacaagcgctgttaaggaactgcatggcgagtttaagacaaccgcctgcggccgttgcatttccggaatgtttgtttttttaacttacgttttaggggttgcatggctgggggtgttcggtttctcagccgtgcccgtgtttatgttttacaacatctggtcaacatgtgaagttatcaagtcaccgcagaccaacggcaccacaggcgtggaacagatttgcgtggatattaggcaatacgggatcataccatggaatgcttttccaggcaagatctgcggaagtgctttggagaatatttgtaatacaaatgaattttacatgtcttaccacttgtttatagttgcatgcgcaggagcaggagccaccgtcatcgccttgattcactttttaatgatcttatcttccaactgggcctatctcaaggacgcttccaaaatgcaggcctaccaggacatcaaagccaaagaggagcaggagctgcaagacatccagtctcggtcgaaggaacagttgaactcctatacatag

SEQ ID NO: 225045 - DNA, 1863 bp, synthetic construct
  misc_feature 1..1863: note = Description of Artificial Sequence: Synthetic coding sequence
  source 1..1863: mol_type = other DNA
atgtctccatctccaaccgccctgttctgcctgggtctgtgtctgggaagggtgccggctcaatctgggcctttgcctaaacctagcctccaggcgctgccgagttcactggtccccctagaaaaaccagtgaccttgcgttgtcagggacccccaggggtggatctatatcggctggaaaaactgtcaagtagtaggtatcaggaccaggctgtattattcatccctgctatgaagcgtagcctcgcaggtaggtaccgctgttcataccagaacggatccctgtggagcctaccaagtgaccagttggaactggttgccacaggagtgttcgcgaaaccttcactcagtgcccaacccggacctgcggtgtcttccggaggggacgttacccttcagtgccaaacaaggtacggatttgaccaattcgccctgtacaaggagggcgaccctgccccttacaaaaatccggaacgctggtatcgagcctccttccctatcattacagtgaccgcggcacattctggtacctaccggtgctactccttttctagcagagatccttacctgtggagcgcgcctagcgacccactcgaactcgtggtcaccggtaccagtgtgacaccctccagattacctacggagccccctagccccgtggcagaattttctgaggccaccgcggagctgacggtcagttttaccaatgaagtgttcacaaccgaaacgagtcggagcatcacggctagtcccaaggagtccgattctcccgctggtgaatcttgtccccctgtactgcaccagggacagccgggtccagacatgccccgtggttgcgatccgaacaaccctgggggtgtcagcggacgaggacttgcccagcccgaggaggccccagctgcgcaaggccaagggtgcgcggaggccgcatcagcccctcccgctccacccgcagatccggaaattaaacggggatccggttggcgcccaacgggctgctcccagcctcgcgttatgtttatgacagccgaacctcaggcccgttcttatcccagggaaggcagttggcacggccgaagactcaaggactggcgagtgtggagcgtggaggccggtggccagcgcctacaactctggaaacgcggtcatgccgcttccagctggtgctctattcgcgagccatttggacagtgtctgtctgtctgtctacccctctgtttgcgggcaccatccatttgggatggcaggaacctatggaggcctcaccctcccccttgcactctatggatgacatggtacccaggctggacgacctactggcctctctcctcgacgtccctgatctgggcacctgatggcagcctgcggttccccgctctccgggtggattctgtgccttcctccgtgcaaaacccgcctgtcctgccattcggaccattgtgctcatgtctagtgtttcccaggaacagccatcctcattccatatcccattgcggtctgactaacttgctgtccagcctgcggactggactagccggtagccttggcatgtcctttatttttctgtctgtcaagctggctagatgcccgctgccctttacccttgagaataagatttcactctgcaacatggtgaagccacacctgtaccagcagaataaaaagacacagaaactggccaggtgtgggggtgcatctctgtattctcaacagctcaggggccttaggtgggagaacgggctgtccctgggcggacgaggttgctccgagctgagatcacatcattgtacattagcccgtgtaacaaaacccgattttgtgtcaaaaaatacagggatgaacatgagcatcaccctcatttag

SEQ ID NO: 225046 - DNA, 966 bp, synthetic construct
  misc_feature 1..966: note = Description of Artificial Sequence: Synthetic coding sequence
  source 1..966: mol_type = other DNA
atgtcaccaagccctactgccttattctgcctaggcctttgcctcgggagggtgccagcacaatccggtccactgcctaagccaagtttacaggctctgcctagtagcttggttcctttggaaaaaccggtgactctgcgttgtcagggacctcctggcgtcgatttgtatcgactggaaaagttgtcaagcagcagataccaggatcaggcagtgctgttcattcccgctatgaaaaggtcccttgccggtcgctacaggtgttcctaccagaatggctcgctttggtcactcccctctgaccaactggaacttgtggcaacgggagtctttgccaaaccttctctgagtgcccagccgggacctgccgtatcaagcggcggagacgtgacacttcagtgccagacaagatacggttttgatcagttcgccctctacaaggagggagatcctgctccttacaaaaatcccgaaaggtggtaccgcgcatcctttcctatcatcactgtcactgcggctcatagcgggacctatcggtgctattccttcagcagtagggacccgtatctttggagcgccccaagcgatcctctcgaactcgtggtaaccgaatttagtgaggccacagctgagctgaccgtgtcctttaccaacgaagtgttcaccacagagacctcccgaagtatcactgcgagccccaaggagagtgattcaccagccggtcccgctcgacagtactatactaaggggaacctcgtgaggatctgcctgggggcagtcatactcataatcctggcgggttttctggctgaagactggcatagtagaaggaagaggctacgtcaccgaggcagagccgtgcaacggccattgccaccccttcccccactcccattaacccggaaatcaaacggcggacaggacggcggtcgccaggacgtccacagtcgtggtctctgttcctag

SEQ ID NO: 225047 - DNA, 1020 bp, synthetic construct
  misc_feature 1..1020: note = Description of Artificial Sequence: Synthetic coding sequence
  source 1..1020: mol_type = other DNA
atgtccccatcgcccacagctctgttctgcttaggcttgtgcctgggaagagtgcccgctcagagtggaccactcccaaaaccctccctgcaagcccttccctcctccttggtacccctggagaagcctgttactcttagatgtcaaggacccccaggcgtggatctgtatcgcctggagaaattatcaagcagtcgctatcaggaccaggccgtactctttatcccagctatgaagagatccctcgctggcagatatcggtgcagctaccagaatggctctctctggagcttaccttcggaccagctggagctagtggctacaggggtgttcgccaagccatcgttatctgcgcaacccggacccgctgtgagttcaggcggagacgtgacactgcagtgccaaacccggtacgggttcgaccaatttgccctgtataaagagggggatccagctccttataaaaaccctgaaaggtggtacagagcgtcatttcctataatcacggtgactgcagcacactctggcacctacagatgctactccttctccagcagggacccctacctatggagcgcccctagcgacccactggaactggtggtcaccggcactagtgtgaccccctcccgattacccacagagcctccttctcctgtggccgagttcagcgaggccacagccgaactgaccgtgagctttaccaatgaagtttttacgactgagactagccgctctattactgcgagccctaaagaaagcgattctcccgcagggcctgcacgccaatactacacaaagggcaacttagttaggatctgccttggtgcagtgatcttaattatcttggccggatttcttgccgaggactggcactcgaggagaaaaagacttcggcacagaggaagagccgtacagaggcctctcccgccactgccccctcttcccctgacgcgcaagtctaacggcggtcaggatgggggaaggcaggacgtgcactccaggggcctgtgttcctag

SEQ ID NO: 225048 - DNA, 1866 bp, synthetic construct
  misc_feature 1..1866: note = Description of Artificial Sequence: Synthetic coding sequence
  source 1..1866: mol_type = other DNA
atgggtcttctttcagatccagtgagaagacgtgccctcgccagactggtcttacgactgaacgccccactgtgtgtacttagctatgtggccggaatagcgtggttcttagcgcttgtatttccccctctcacacagaggacatatatgagtgaaaatgctatgggatcaacaatggtggaagagcagtttgcaggcggagatagagcacgggcttttgctcgcgacttcgcagcacaccgcaaaaaatccggagcgctccctgtagcctggctcgagaggaccatgagatctgtgggattggaagtctatacccaaagtttctcgcggaagctgccattcccagatgaaactcacgagcgttacatggtgagcggcaccaatgtgtacggcatcttgagagcgccacgggcagctagtaccgaatccctggtgctcactgttccttgcggatccgactccacgaatagccaagccgtgggtctactacttgctctcgcagctcacttcaggggccagatctattgggctaaggacattgtcttcctggtaaccgaacacgacttgttgggtacagaagcatggctagaggcatatcacgatgtgaacgtaaccggtatgcagtcaagtcccctgcagggcagagctggcgctatccaggctgcggttgcattggaactctcctcggacgtggttacctccctggatgtagcggtagaggggttgaatggccaacttcctaatctggatttgctgaaccttttccagaccttttgccagaagggagggctgttatgcacacttcagggaaagttgcagcctgaggactggacctctctggatggcccactgcaggggctgcagacattactgctgatggtgctgaggcaagcatcaggtcgccctcatgggagccatgggctttttttaagatacagagtcgaggcgctcactctgaggggcatcaacagcttccgacagtacaagtacgacctggtcgctgtggggaaggctctggaaggaatgttcagaaagctcaatcacttgctcgagcgccttcaccagtctttttttctctacttgctgcctggattatcccgttttgtctctattggcttgtatatgcctgcagtcggttttctgctcctggtgttaggcctcaaagccctggagttatggatgcagctacacgaagcgggtatgggcctcgaagagcccggaggggctcccggtccatccgtgccattacccccatcacaaggcgtgggactggccagccttgtcgcacctctgctcatcagccaggctatgggattggccttgtacgtgctgcctgtgctgggccaacacgtggctacccaacactttccagttgccgaagcagaagccgtcgtcctgactttgttggcaatttatgcggctggcctagcactgccccacaatacgcaccgagtggtgtcaacgcaggcaccagacaggggctggatggctctgaaactggttgcgctcatctatctagctctgcagctcggatgcatcgctcttacaaacttctccttgggctttctgctggccaccacaatggtgccaacagcggcattggctaagcctcacgggcctcgaactctgtacgccgctctgctggtcctcacaagccctgcagcaaccctgttgggatcactgttcctgtggcgagagttacaggaggcccctttgtctctggccgagggatggcaactctttctggcagccctcgcgcaaggggtgctggagcaccacacctacggtgccctcctttttcctctactctctctcgggctgtatccatgttggctgttattctggaatgtactattttggaagtag

SEQ ID NO: 225049 - DNA, 1686 bp, synthetic construct
  misc_feature 1..1686: note = Description of Artificial Sequence: Synthetic coding sequence
  source 1..1686: mol_type = other DNA
atgggcctgctttcggatccagtgaggcggagagcccttgcacgtctggtgctgcggttgaacgctcccctttgggccctgcccgtcgcttggcttgaaagaacaatgagaagtgttggcctcgaggtctacacccagtctttctctcgtaagctgcccttccctgacgagacccacgagcgctacatggtcagcgggactaacgtgtacgggatcttgcgagctccccgagccgcaagcaccgaaagcctcgtgctcaccgtgccgtgtggttcagactccaccaattctcaggcagttggccttctcttggcactcgctgcccacttcaggggccagatctattgggcaaaagacattgtcttcctggtcacagagcatgatctgctgggtacagaggcatggctggaggcctaccacgacgtaaatgtgaccggtatgcagagcagccctttacagggaagggccggagctatccaggccgctgttgccctcgagctgtctagcgatgtggtgacaagcctggatgtggcagtggaaggcttaaacggtcagttgcccaatttagacctgctgaatctctttcagaccttttgccaaaaaggtgggttgctgtgcaccctgcagggcaagctccagcccgaggattggacttctctcgacggcccactgcaggggctgcagaccttattgctgatggtgctgaggcaagcctccgggcgaccacatggatcccatgggctgttcctgcgctatcgagtcgaagccttaacgctcagagggattaactcttttaggcagtacaagtacgatttggtggctgtcggcaaagctctggagggaatgtttcggaagctcaaccacctcctcgagagactgcaccaaagctttttcctttatctgcttcccggactcagccgctttgtttctatcggactttacatgcctgctgtgggttttcttctgctggtgttgggccttaaggccctcgaactgtggatgcagctgcacgaagccggtatgggcctcgaagaacccggtggtgccccaggcccatctgttcctcttcctccatctcagggggtaggcctcgcctctttagtcgctccacttcttatatcacaggctatgggactggccctttatgttctgcctgtgttagggcagcatgttgctacacagcactttccagtggccgaggctgaggccgtagtgctcacactcctggccatatatgcagcaggtcttgccctgccgcacaatacacacagggtggtctcgacccaggccccagatagaggctggatggcccttaaactggttgctctgatctacctggctctacagttgggttgtattgcgctgactaacttctcgctcggcttcttgctggccaccaccatggtcccgactgccgctctggccaagccacacggcccacgaacactgtatgcagctctgttggttcttacctccccagcagcaaccctgctgggatcattatttctgtggcgagagctgcaggaggcaccactttctctcgccgaaggctggcaactgttcctcgcagccttagcacagggggtgctcgaacatcatacctacggagccctgctctttcctctcctgtcgctcggcttgtacccctgctggctgctgttctggaatgtcctgttctggaagtag

SEQ ID NO: 225050 - DNA, 555 bp, synthetic construct
  misc_feature 1..555: note = Description of Artificial Sequence: Synthetic coding sequence
  source 1..555: mol_type = other DNA
atgaaggccctgggcgctgtcctgctcgcccttctgctctgcggcaggccgggaagggggcagacgcagcaggaggaggaagaggaagacgaggaccacggccctgacgattacgacgaggaagatgaggacgaagtcgaggaggaggagactaaccgattacccggagggagatcaagagttctcttacgatgctatacttgtaaaagtctaccccgtgacgaaagatgcaacctcacgcaaaactgcagtcacggtcaaacatgcaccacactgatcgcccacggtaacacagagtctggtctgctcacaacacattcaacctggtgcacagactcttgtcagcccatcacaaagactgtagaaggcacccaggtcactatgacgtgctgtcagagtagcctttgtaacgtccctccatggcagtcaagcagagtgcaagatccaacagggaaaggcgctggcggacctcgaggatctagtgagaccgttggcgctgcactgctcctgaacctgttggcagggctcggcgcaatgggggctaggcggccttag

SEQ ID NO: 225051 - DNA, 582 bp, synthetic construct
  misc_feature 1..582: note = Description of Artificial Sequence: Synthetic coding sequence
  source 1..582: mol_type = other DNA
atgggtaagcagaattctaaattaagaccggaagtgatgcaggaccttctcgagagtactgacttcaccgaacatgaaatccaggagtggtataaaggcttccttcgtgattgcccttcagggcacctgtcaatggaagaatttaaaaagatctatggaaatttctttccatacggcgatgcttcgaagttcgccgagcatgtgtttcggacattcgatgccaatggtgacggaacaatagacttccgggaatttatcatcgccctgtcggttacttcacggggtaaactggaacagaagctcaagtgggcctttagtatgtatgatctggatgggaacggatacatctccaaggctgagatgctagaaatcgtgcaggccatatacaagatggtgtccagtgtgatgaaaatgcccgaggacgagagtactcccgagaaaagaacagaaaagatcttccggcagatggatacaaatagagacggaaagttgagcctggaagaatttatcaggggcgcaaaatccgatccatcaatcgtgcggttactacagtgcgacccttccagtgctggccagttctag

SEQ ID NO: 225052 - DNA, 756 bp, synthetic construct
  misc_feature 1..756: note = Description of Artificial Sequence: Synthetic coding sequence
  source 1..756: mol_type = other DNA
atgtccgcatacgggatgcccatgtacaagtccggggatctggtcttcgccaaactgaagggatacgcccattggcccgctcgaatagaacatatgacccagccaaatcgctaccaggtcttttttttcggtacccacgagaccgcatttctttctccaaagcgcctgtttccttacaaggagtgcaaggagaagtttggcaagcctaataagaggcggggtttctccgcaggactctgggagatagaaaataatcctacggtccaggcgtccgactgtcctctcgcatccgagaagggctctggtgacggaccctggccagagccagaagccgctgagggtgacgaggacaaacccacacatgccggtgggggtggagatgaacttggaaagcccgacgacgacaagcccacagaagaagagaaggggccactgaaaaggtcagccggtgaccccccagaggatgcacctaagagaccaaaggaggcagctccagaccaggaggaagaggccgaggcagagcgggctgctgaagctgagcgtgctgctgctgcggcagccgctacagcagttgatgaggagtcgccgttcctggtggctgtcgagaacggtagcgcgccttctgaacctgggcttgtgtgtgaaccccctcagccggaggaggaagagctccgtgaagaggaggtggccgacgaggaggcatcccaagaatggcacgccgaagctccaggtggaggtgaccgggactctctctag

SEQ ID NO: 225053 - DNA, 531 bp, synthetic construct
  misc_feature 1..531: note = Description of Artificial Sequence: Synthetic coding sequence
  source 1..531: mol_type = other DNA
atgtccgctttccggctgtggccaggcctactgatcatgctcgggtctctgtgccatcgcggaagcccatgcggcttgtccactcacgttgaaattggacatcgagcgcttgaatttttgcaactgcacaatggtagggtgaattatcgggaattgctgctggaacaccaggacgcctatcaggccggaatagtgtttccggactgcttctatccctccatctgcaagggcggaaaattccatgatgtttccgagagtacgcactggacaccttttcttaacgcgtctgtgcattacattcgggagaactatccgctgccatgggagaaagacaccgaaaagttagtggcattcctctttggcataacctctcatatggccgctgatgtttcctggcactctctcggattggaacagggattcctgaggactatgggcgctattgatttccacggttcatatagcgaggcccactccgctggtgactttgggacggtgtaccttcaccttctgaacttcctcgtcgtttag

SEQ ID NO: 225054 - DNA, 831 bp, synthetic construct
  misc_feature 1..831: note = Description of Artificial Sequence: Synthetic coding sequence
  source 1..831: mol_type = other DNA
atgaacagcaagaggatgctgttactggtgctgttcgccttttcactaatgctggttgaacgctatttccgaaatcaccaggtggaggaacttcggctctctgattggtttcacccaagaaagagacccgatgtgattacgaaaactgactggttagcacccgttctttgggaaggcacattcgataggcgcgtgcttgagaagcactatcgaagaagaaacatcaccgtggggctagcagtctttgccaccggccgttttgccgaagaatacctgaggccctttctgcatagcgctaataagcactttatgactggatacagggtgatcttctacattatggtggacgccttcttcaaactcccagatatcgagccctcacctttaaggacttttaaagcctttaaggtcgggacagagagatggtggctggacggacccctggtgcatgtgaagagtctgggggaacatatcgccagccatatacaggacgaagtggatttcctgttctccatggctgccaatcaagtgttccagaacgagtttggtgtggaaaccttaggtccgttggtggcccaactccacgcttggtggtactttcgcaacacgaagaattttccttatgagcggcgaccgacttcggcagcctgcatcccttttggacagggcgatttctactatgggaacctaatggtggggggtacacctcacaatattctggatttcattaaggagtacctgaacggtgtgattcacgacatcaaaaatggtctcaattccacgtacgaaaagcatctgaacaaatacttttacctgaacaagcctacatag

SEQ ID NO: 225055 - DNA, 2166 bp, synthetic construct
  misc_feature 1..2166: note = Description of Artificial Sequence: Synthetic coding sequence
  source 1..2166: mol_type = other DNA
atgctcccacgcggaagaccccgagctctgggggcagcggcactcctgctcttgttgctgctcctcggctttctgctcttcggcggtgacctcgggtgtgaacggagggagcccggaggcagggcaggagctccgggttgtttcccgggaccactgatgcccagagtgcctcctgacgggaggctccgcagggccgcagccctggatggggaccccggtgcaggcccaggagaccataataggagcgactgtggcccacagcctcccccaccaccaaagtgtgagctccttcacgtagccatagtgtgcgctggtcacaattcatcacgcgacgtgattacgctggttaaatccatgctgttctaccggaagaacccactccacctccaccttgtgacagacgctgtggctcggaacatacttgagactctgttccacacttggatggttccggctgttagagtgagtttctatcacgctgatcaattaaagccccaggtttcctggatccccaacaaacattatagtggtttatatggtttgatgaagcttgtactcccatcggctctgcctgctgagcttgcacgcgtgatcgtgcttgatacagatgtcaccttcgcatcagacatcagcgagctgtgggcacttttcgcccacttctctgatacgcaggccattggccttgttgaaaaccagagtgattggtatctgggcaatctgtggaaaaatcaccgaccctggccggctcttgggaggggcttcaacaccggagtcatactcctccgactggacagattgaggcaagccggatgggagcagatgtggcgattaactgccagacgtgaactcctctccttgccggcaacttctctcgctgaccaagatatatttaacgccgtgatcaaagaacatcccggacttgtacagcgattgccatgtgtgtggaacgttcagctctccgatcacacgctcgctgaacgctgttacagcgaagcttctgacctaaaggttatacactggaacagcccaaaaaaactccgtgtaaaaaataagcatgtggaattttttcggaatttttacctgacctttcttgaatacgacggtaatcttttgaggagagaattgttcgtctgtccgtctcagcccccacccggtgcggagcagctgcaacaggccctggcacaattagatgaagaggatccatgcttcgagttcagacagcagcagttgacagtgcaccgtgtccacgtaactttcctccctcacgagccccctcctccccgaccgcatgacgtcacactggttgcccaactgagtatggatcggcttcagatgctcgaggccctctgcaggcactggccaggccctatgagtctcgccctctacctaactgacgcagaggcccagcagttcctccatttcgtggaagcctctccagtgctagcagcgaggcaagacgtcgcctaccatgtcgtatatagagagggcccactgtatcccgttaaccagcttaggaacgtggctctggctcaggctctcactccttatgtgttcctgtcagatatcgattttttaccagcatatagtttgtacgattacttacgggctagcatcgagcagctaggcctaggcagcagaagaaaggccgcactggtggtgccagcttttgagacacttcgttacaggttcagcttcccccactcaaaagtcgagcttctggctctacttgatgcaggaaccctgtacacatttcgctaccatgaatggcccagggggcacgctccaacagactatgcccgttggcgagaagcacaggccccatacagagtacagtgggccgcaaactacgagccctatgtcgtcgtgcctcgtgattgcccgagatatgaccctcgctttgtaggtttcgggtggaataaagtggcccacatcgtggaactcgacgcacaggaatacgaattgttggtcctgcccgaggcattcacaatccatttaccacatgcacccagcctcgatatctccaggttcaggagttctccaacgtatagagattgcctgcaggcactgaaggatgagttccatcaagatcttagccgacaccatggtgccgcagctctgaaatatctccctgctctccagcagccccaaagtcccgctagggggtag

SEQ ID NO: 225056 - DNA, 870 bp, synthetic construct
  misc_feature 1..870: note = Description of Artificial Sequence: Synthetic coding sequence
  source 1..870: mol_type = other DNA
atgtggcgactgactgcgaggcgcgagctcctcagcctgcccgctacttcactagcagaccaagacatctttaatgcagtcatcaaagaacacccagggctcgtccagagactcccatgtgtgtggaatgtacagctttccgaccacacgcttgccgagcgctgttatagcgaagcgtcagacctaaaagtcatccactggaactcccctaaaaagttaagggtcaagaacaaacacgtcgaattcttccgcaatttttatcttaccttcctagagtatgacggaaacttgctgagacgggaactgttcgtctgcccttcccagccaccccctggtgctgaacagttacagcaggctctggcccagctggatgaggaggacccatgttttgaattccgccaacagcagctcactgtccatagggtgcatgttacattcctgccacatgagcctccaccacctcgccctcatgacgtgacgctggtcgcacagctgtcaatggacaggctgcagatgttagaggcgctgtgcagacattggcccggaccaatgtcgctagccctttatttgacagatgccgaggcccagcagttcctgcatttcgttgaagcgagtcccgtactcgccgctaggcaggatgtcgcctatcacgtcgtatatcgggagggtccactatatcccgtcaatcaactgcgaaatgtcgcactggctcaggccctgactccctacgtgttcctctctgatatcgattttctccctgcttacagcctttacgactacctccgcgaagccagagcaggtttcaatagtagttccacctgtggttgcgcccatccatcccatcaggctcgctggccaatggttgtttag

SEQ ID NO: 225057 - DNA, 2166 bp, synthetic construct
  misc_feature 1..2166: note = Description of Artificial Sequence: Synthetic coding sequence
  source 1..2166: mol_type = other DNA
atgttgccccgaggccgtcccagagccctgggggcagcagctttgctcttgctgttgctcctgctggggtttttgctcttcgggggagatcttggctgtgagcgtcgggaacctggcggtcgcgcaggtgcgcctggctgctttccaggaccactgatgcctagagtgcctccggatggcagattacgcagagctgccgcattagatggcgacccaggtgcaggtccaggggatcacaatcgttcagattgcggcccacagcctcctccccctcctaaatgtgagcttttgcatgttgcaattgtctgtgctggccacaatagctcacgggatgttatcacgttagtgaagtccatgctgttttaccggaaaaatcccctccacctgcaccttgtaaccgacgccgttgcccgaaatatcttggaaacgctgtttcacacctggatggtccctgctgtgcgcgtctccttctatcatgccgatcagctgaaacctcaggtgtcatggatccctaataagcactatagtggcctgtacggacttatgaagctggtgttgccttctgcccttcccgcagaactagccagggtgatcgtcctggacaccgatgttacattcgccagtgacatcagtgaactctgggctctctttgcacacttctctgacactcaggcgatcggcctggtggaaaaccagtctgactggtaccttggcaacctttggaaaaaccaccggccttggccagccctgggaagggggttcaataccggcgtcatcctgctgcgccttgatcgtttgcgtcaagccggatgggagcagatgtggaggctaacagcacgtagggaacttttgagtcttccggcaacatccctggccgatcaggatattttcaacgccgtcattaaggagcaccccggattggtccagcgtctgccatgtgtgtggaatgtgcagctcagtgaccacactctggcagagagatgctatagcgaggcctccgatttgaaggtgatccactggaattcccccaaaaagctgagagtgaagaacaaacatgtcgaattcttccgtaacttctacctcacatttctagaatatgatggaaatctcctgcgacgggaactgtttgtgtgtccctcgcagccaccccctggcgcagagcagctgcagcaggctctggcccagctggatgaagaagacccttgttttgaatttcggcagcagcagttgacagttcaccgggttcatgtcactttcctcccccatgagccaccccctccgagaccacacgacgtcactctcgttgcacaattatccatggaccgcttacagatgctcgaggctctgtgcagacactggcccggacctatgagcctggcactttacctgaccgatgctgaggcccagcaatttttgcacttcgtggaggcttcgccagtgctggctgctagacaggacgtcgcctaccatgtcgtgtatcgcgaagggcctttatacccagtgaaccagctgcggaacgttgcattagcacaggcacttaccccatacgtttttcttagtgacattgactttctccccgcttacagcctttatgattatctgcgagcctcaatcgaacagctcggtctgggatcgaggcggaaagctgccctcgtggtgccagctttcgaaactcttcgttatagattctcattccctcacagtaaagtagagctgttggccctgctggatgccggtactctctacactttccgttaccatgaatggcctagaggacacgctccgactgattatgccagatggcgcgaggctcaggcaccttacagagtccagtgggctgccaactacgagccatacgtggtggtgcccagggattgcccgagatacgatcctcgttttgtgggattcggctggaataaagtcgctcacatagttgaactggatgcccaggagtacgaattgctggttttaccagaagccttcactatccatcttccgcacgcaccttcgcttgacatatctaggttccgctcctctcctacatacagggattgtcttcaggccctcaaggacgaattccaccaggatttgtcaagacatcacggggctgccgctcttaaatatctgcccgctctgcagcagccccagtccccggcaaggggttag

SEQ ID NO: 225058 - DNA, 2166 bp, synthetic construct
  misc_feature 1..2166: note = Description of Artificial Sequence: Synthetic coding sequence
  source 1..2166: mol_type = other DNA
atgctgccccgaggccgaccgagggccctaggggcagctgctctcctactgttgctcttgctgctaggattcctcctgttcggaggagatttaggatgcgaacgcagggaacctggtgggcgagctggggctccgggatgtttccccggaccactgatgcctagggtacccccagacggtcgcttgcgacgggctgccgcactggacggcgacccaggggcagggcctggtgatcacaacagaagtgattgcggccctcagccacctcctcccccaaaatgcgagctgttgcacgttgcaatcgtttgtgccggacacaattcctcccgcgacgtgatcacgctcgtgaaatctatgctgttctaccggaaaaatcctcttcacttgcaccttgtgactgacgcggtggctcgtaacatcctggaaacactgtttcacacatggatggtgccagctgtgagagtgagcttctaccacgccgaccaattgaagccacaggtgagctggattccaaataagcattatagcgggctttatggattgatgaaactggttttaccgtctgcgcttcctgctgagctggccagagtcatagtgctggacaccgacgtgacgtttgcctctgacatttctgaactctgggctctcttcgcccacttctccgatacccaggctataggtctggtggagaaccagtcagattggtacctggggaatctttggaaaaaccaccgaccctggcccgcactcggcagaggctttaacacaggtgtgatcctgttgcgcctcgacagactgcggcaggcgggatgggagcaaatgtggcgcctgaccgctaggcgggaactgctatccctaccagcaacttccctggccgaccaggatatttttaatgccgtcattaaggaacatcctgggttagtgcagagattgccctgtgtgtggaacgtgcagttgtcagaccatactcttgccgaacgctgctacagtgaggcaagtgatctcaaagtaatccactggaactcccctaaaaagctgcgagtaaaaaacaagcacgtggaatttttccgcaatttctacttaacgttcctcgaatatgatgggaatctactgcggagagagctgtttgtgtgtccctcgcagccgccacccggagctgaacagctgcagcaggcccttgcccagctcgacgaggaggacccctgcttcgagtttaggcagcagcaactcactgtgcatagagttcacgtgacattcctcccacacgaaccaccacccccacgcccacatgatgttactttagtggcacagttatccatggatcgtctgcaaatgctcgaagccctgtgccgccattggcctgggccaatgagtttggctctgtacttaaccgatgctgaggcccaacagtttctgcatttcgtggaagcaagccccgtactggcagccaggcaggatgtcgcttaccacgtcgtctaccgggagggaccactgtaccccgtgaatcagctgcggaacgtggctttggctcaggctctgactccttatgtgttcctgtcagacatcgacttcctccccgcatactcattatacgactatctccgcgctagcattgaacagttgggcttggggagtagacgaaaggccgctctggtagtccctgcattcgaaaccctccgctatcgcttctcatttccacattccaaggtggagctgttggccttgctggatgccggaacactctatacattcaggtaccatgagtggccgagaggacatgccccaaccgactatgccaggtggcgggaggctcaggctccttaccgcgtacaatgggccgcaaattatgagccgtatgtggtcgtgccacgggattgtcctcgatatgatccacgctttgttggctttgggtggaataaggtggctcacattgtcgagcttgatgctcaagagtatgaactcttggtcttgcccgaagcttttacgattcacctgccacacgccccaagcctagacatatcacggttcaggtcctcacccacctacagggactgtctccaggctctcaaggatgagttccaccaggacctgagtcgacatcatggcgcagccgctttaaaatatttaccagccttacagcagccccaaagtcccgcacgaggatag

SEQ ID NO: 225059 - DNA, 2073 bp, synthetic construct
  misc_feature 1..2073: note = Description of Artificial Sequence: Synthetic coding sequence
  source 1..2073: mol_type = other DNA
atgctcccaagaggaagaccccgtgctcttggggctgctgctctgcttttactgctcctactcctggggtttctgctgttcgacggacggctacggagggcggctgcacttgatggtgatccaggggcagggccaggcgatcacaatcgctccgactgtggccctcagcctcccccaccaccaaagtgcgagctgctacatgtggctatcgtgtgtgctggtcataatagtagccgggacgttataacgttggtcaagtccatgcttttctacaggaaaaatcctttgcacctgcatttagtcacagatgccgtggcgagaaacattctcgagacgctgtttcatacatggatggttcctgccgtgcgggttagcttctatcatgccgaccaattgaaacctcaggtgtcctggatccccaataagcattactcagggctgtacggactaatgaagttggtgctgccgtcagccctgccagcggaactggcacgggtgatagtgctggatacggatgttacttttgcctccgacatctcagaactctgggccctgttcgcccatttctccgatactcaagctatcggtctagtggagaaccagtctgattggtatctgggaaatctgtggaagaaccatcgaccctggccagctctgggccgaggcttcaatacaggagtgatcctccttaggctggaccgcctacggcaagctggctgggagcagatgtggaggctgaccgctaggagagaactgctgtccctccccgctacatcactggcggaccaagacattttcaatgcagtcattaaagaacaccccggtttagtccagagactgccgtgcgtttggaatgtccaactaagtgatcacacattggctgagcgctgctactctgaagcctcagatcttaaagtcatccattggaacagtcctaagaagctaagagtcaaaaacaagcatgtggagttctttcggaatttttacttgacatttctggagtacgacggaaacttattacggagggagttatttgtgtgcccgtctcagcctcctccgggagcagagcagctccagcaggctctcgcccaactggatgaagaggacccttgcttcgagtttagacagcagcaactgaccgtgcacagagtgcatgtcaccttcctgccacacgaacctccacccccacgaccccatgacgttaccctggtcgcgcagctatcaatggaccgattgcagatgttagaggccttgtgtagacactggcctgggcctatgtctctggccttgtatctgacagatgccgaggcgcagcagtttcttcacttcgtggaggcctccccagtactggctgcaaggcaggacgttgcataccacgttgtttaccgcgagggtccactttatcctgtgaaccaactccggaacgtagccttagcccaagcccttactccatacgtgttcctcagtgatattgactttctgcccgcttatagcctgtacgattatttgagagcctcaatcgagcagctgggactggggtcacgaaggaaagctgcactggtggtgcctgcttttgaaacccttagataccgtttctcttttcctcatagtaaagtcgagctactggccctgctggacgccggaacactatataccttccgctatcacgagtggccaagaggccacgccccaaccgattatgctaggtggagagaggcccaagcaccctatcgggtgcagtgggccgctaactacgagccttacgtcgtcgtgcctcgggattgtccaagatatgatcctaggttcgtggggttcggatggaacaaggtggcccacatcgtcgaactggatgctcaagaatatgagctcctcgtgctccctgaggcgttcactatccatcttcctcacgccccaagtcttgacatctcccgctttcgctcaagccccacctaccgggattgtctgcaagcactgaaggatgagttccatcaggacttgagtcgccaccatggggcagccgctctgaaatatctacccgctctccagcagcctcagagcccagctcgtgggtag

SEQ ID NO: 225060 - DNA, 1122 bp, synthetic construct
  misc_feature 1..1122: note = Description of Artificial Sequence: Synthetic coding sequence
  source 1..1122: mol_type = other DNA
atgtccatcctgatcatcgaggcattttacggtgggtctcacaagcagctggtggacctgttacaagaggagttaggagactgcgtagtgtacacactacctgcaaagaaatggcactggcgggctcggacaagcgccttatacttttctcagaccattcccatcagtgaacattatcgcaccctcttcgcttcttccgtgttgaatctgaccgagctggccgctctgagaccagacctggggaagctcaagaaaatactttacttccacgaaaaccagctgatttaccctgtcaaaaagtgccaggaacgggacttccagtacggatataaccaaatactgtcctgtttagtcgccgatgtggttgtgtttaactccgtgtttaacatggagtctttcctgactagcatgggtaaatttatgaagcttatccccgatcaccggcctaaagatctggagagcatcattaggccgaagtgtcaggtcatctacttcccaattcgttttcccgacgtatcccggttcatgcccaagcataagacaactcacttaaagaaaatgctcggactaaagggtaacggaggagctgtcctttccatggcactgccattccagcctgagcaaagggactccgaggatttgctcaaaaactttaattccgagtgtgacacccattgtggtctcgacaccgccagacaggagtacttggggaactctctccgacaagaatcagacctgaaaaagtctacttcttcagataactcctcatctcaccatggtgaaaacaagcagaatttgaccgtggacccttgtgacattctcggcggagtcgataaccagcaaagattgctgcacatagtgtggccacaccggtggctggaggccgtgtattgcgggtgttatcccctatgtccaaaagatttggtgtatccggagatttttccagctgagtacctctatagcactcccgagcaactctctaaacgcttgcaaaatttttgcaaacgcccagacataattcgcaagcacctctataaaggggagattgcccctttttcatgggccgcactgcatggaaagtttcgtagcctcctgacaactgagccccgtgaagatctgtag

SEQ ID NO: 225061 - DNA, 1377 bp, synthetic construct
  misc_feature 1..1377: note = Description of Artificial Sequence: Synthetic coding sequence
  source 1..1377: mol_type = other DNA
atgtcaatcctgattatcgaggccttttacgggggttcacataagcaattagttgaccttctgcaggaggaattgggggactgcgtggtttatacattgcctgcaaagaagtggcactggcgggctagaacgagcgccttgtatttttcacaaaccatccctatttcggaacactatcggaccttgttcgcgtccagtgtactcaatttgactgagctggctgctctcaggcctgatctgggcaagctgaagaaaatcttatattttcacgaaaatcagttaatctaccccgtgaagaaatgtcaagaaagagattttcaatacggctataatcagattctcagctgtttggtagccgacgtggtggtgtttaactcagtgtttaatatggagagttttcttacatctatgggcaagttcatgaagttgattcccgatcaccgacccaaggacctggagagcatcatccgtcctaaatgtcaggtcatttactttccgattcgattcccagacgtttccagattcatgccaaaacataaaaccactcacctgaagaagatgctcggcctaaaggggaatgggggtgcagtgctgagtatggcgctgccctttcagccagagcagagagattccgaagacttattaaagaacttcaattccgagtgtgatacgcactgtgggcttgataccgcccgacaggagtacttggggaattctttacggcaggaaagtgacctaaagaaaagcacaagctccgacaattctagctctcaccacggcgagaacaagcagaacctcactgtggacccctgcgatattctcggcggagtggacaaccagcagagactgctccacatcgtctggccgcacaggtgggagcatgacaaagatcctgagtcattctttaaagtgctcatgcacctgaaggacttagggctcaatttccacgtaagcgttttgggagagactttcaccgatgttcccgacatcttttccgaagccaaaaaagcgctgggatcctctgtactccactggggataccttcccagtaaggatgattattttcaggtgctgtgtatggctgacgtcgtaataagcactgcaaaacatgaattttttggagtagctatgttggaagccgtgtattgcggatgttaccccctctgccccaaagacttagtttatccagaaattttcccagcagaatacttgtactcaactcccgagcaattgagtaagagactccagaatttctgtaaacgcccagacattatacggaaacacctgtataagggcgaaattgctccgttcagctgggccgcactacacggaaaatttaggagtcttctgacgactgaacctagggaggatctgtag

SEQ ID NO: 225062 - DNA, 1122 bp, synthetic construct
  misc_feature 1..1122: note = Description of Artificial Sequence: Synthetic coding sequence
  source 1..1122: mol_type = other DNA
atgagcattcttatcatagaggccttctacggcggtagccataagcaattggtcgatctacttcaggaggagctgggcgattgcgtcgtttatacacttcccgctaagaagtggcactggcgcgctaggactagcgcactttatttctcccagaccatacccatcagtgagcattaccgcacattatttgcatcatccgtgctgaatctcactgagctggctgctcttcgtcccgacctcggcaagctcaagaagatactgtattttcacgaaaatcagctgatctatcccgtgaaaaaatgtcaggaacgcgactttcagtatggctacaaccagattctgtcatgtctggtggccgatgttgtagtgtttaattcagtgtttaacatggaaagttttctcaccagtatgggaaaatttatgaagttaattcccgaccaccgcccaaaggacctggaaagcattattcgccctaaatgtcaggtcatctattttcctattagattccccgatgtctcccgatttatgcccaaacacaaaacgacgcatcttaaaaagatgttaggattgaaagggaacggcggtgctgtgctttctatggcactgccattccaacctgagcaacgcgattcggaggatctactgaagaactttaacagtgaatgtgatacacattgcgggctcgacactgccagacaggagtatttggggaattctcttaggcaggagagcgatctcaaaaaatccacatccagcgataactcgtccagccatcacggtgaaaataagcaaaatctcacagttgatccttgtgatatcctgggaggggtcgacaatcagcagcgcctgctgcatattgtctggcctcaccgctggctcgaagcagtgtactgcggctgctacccactctgcccaaaggatctggtgtatcccgaaatattcccagctgagtacttgtacagcacacctgaacagcttagtaagcgactgcaaaatttttgtaagcgtcccgacattattcggaagcacctgtacaaaggcgagatcgcacccttttcctgggctgcactgcacggcaaatttcgatctctgctgaccaccgagccccgtgaggacctgtag

SEQ ID NO: 225063 - DNA, 1377 bp, synthetic construct
  misc_feature 1..1377: note = Description of Artificial Sequence: Synthetic coding sequence
  source 1..1377: mol_type = other DNA
atgtctattctcattatcgaggctttctacgggggttcacacaaacagttagtggacctgctccaagaggagttgggcgactgcgtggtctatacgttgcccgcaaagaagtggcactggcgtgcaagaacctccgctctttattttagccagaccatccctatctccgagcactacagaactctgtttgcgtcatccgtgctcaatctgaccgagctggccgctctccgccctgacctggggaaactgaagaagatactttattttcatgaaaaccagctgatttatcctgttaagaaatgtcaagaaagggattttcagtacggctacaaccagatactttcatgcttagtcgccgacgtggttgtgttcaactccgttttcaatatggagagttttctgacttctatgggcaaattcatgaaactgatcccggatcatcggccaaaggatctggaatccattatcaggcccaagtgccaggtgatatactttcccattcgattccctgacgtttcccggtttatgcccaagcacaaaacgactcatctgaagaaaatgctcggcttgaagggcaatggcggtgcagttctttccatggccctcccgtttcagcccgagcagcgagattctgaagacctactgaaaaatttcaactctgagtgtgacacccactgcggcctggacacagctaggcaagagtacctgggcaatagtctgaggcaggagtcagaccttaaaaagagcacctcctccgataactcatcctcacaccatggcgagaacaagcagaatctgaccgttgacccgtgcgatattctgggaggtgtagacaatcagcagcgcctactgcatattgtgtggcctcacagatgggagcatgacaaggatccagagtccttcttcaaagtgctcatgcacctgaaagacctgggccttaacttccatgttagtgtgctgggcgaaacttttactgatgttccagatatttttagcgaggccaaaaaggctctcggatcctcggtgctgcattggggatacctgcccagcaaggacgactacttccaggttctttgcatggccgatgtggtgatttccaccgccaaacacgagttttttggggtggccatgctcgaggccgtctattgcgggtgctatcccctctgtcctaaagatctcgtctatccggagatttttcctgcagaatatttatactccacaccagagcaactatccaaaaggttgcaaaatttttgtaagaggccagatattatccgtaaacatctctataagggggagatcgccccattttcttgggcagcgctgcatggaaaattccggtccttgctcaccacggagccacgtgaggacctctag

SEQ ID NO: 225064 - DNA, 1377 bp, synthetic construct
  misc_feature 1..1377: note = Description of Artificial Sequence: Synthetic coding sequence
  source 1..1377: mol_type = other DNA
atgtcaattcttataattgaggctttctacggaggttcccataagcagctagttgacctgctgcaggaggaattgggggactgcgtggtctatacgctacccgcaaagaaatggcattggcgagctcggaccagcgcgctatacttttcacagactatccctatctcagagcactatcgcacactcttcgctagctccgtgctgaacctaacagagctcgccgctctcaggccagatctaggcaaactaaagaaaatcttatatttccatgagaaccagctgatctaccctgtgaagaagtgccaggagagagattttcaatacgggtacaaccagatactctcttgtctggtcgccgacgtggtggtctttaattctgttttcaatatggagagcttcctgacttcgatggggaaatttatgaagctgatcccggaccaccggcctaaggacttagaatccattattaggcctaaatgccaagtcatatatttcccaatccgcttccccgacgtctcccgattcatgccgaagcataagaccactcacctgaagaaaatgctcggacttaagggtaacggtggggctgttctgtccatggctctgccctttcagcctgagcagagggattccgaagacctgctgaagaacttcaactccgagtgtgatacacattgcggactcgacacagcccgtcaggagtatctggggaattcccttagacaggaatccgacctgaaaaaatcaacctccagtgataattcttccagccaccatggggaaaataagcagaacctgaccgtcgacccttgcgacatcttggggggagtggacaaccagcaaagactacttcatatcgtgtggccacaccgctgggagcacgataaagacccggagagcttcttcaaggtccttatgcatctgaaagacctggggttgaatttccatgtaagcgtgctgggagagacttttaccgacgtgcccgatatttttagcgaggccaaaaaggctctgggctctagtgtgcttcactgggggtatctccctagtaaggatgactactttcaggtcctgtgtatggctgacgtagtgatctctactgctaagcacgagtttttcggtgtcgcgatgctggaagcggtgtattgcgggtgttaccccctgtgccctaaggacctcgtataccccgagatattccctgcagaatacctctacagtacccccgagcaactgagcaaacggctccagaacttttgtaaaagacccgatataatcagaaagcacctctacaaaggcgagattgcacccttctcatgggctgccctgcacggcaaatttcggagcctgcttaccaccgaaccccgtgaggacttgtag

SEQ ID NO: 225065 - DNA, 300 bp, synthetic construct
  misc_feature 1..300: note = Description of Artificial Sequence: Synthetic coding sequence
  source 1..300: mol_type = other DNA
atgtctatactcataattgaagcattctatggcggtagtcacaagcaactcgtggatcttctacaggaggaattgggtgactgtgtagtatatacgctgcctgccaaaaagtggcattggcgggcaaggaccagcgcactgtacttcagtcagaccattcccatttccgaacattacaggactctcttcgcgtcctcagtgctgaacttaactgagctggctgccttgaggccagacttaggtaagttgaagaagatcttatatttccatgaaaatcagttgatttatcctgtgaaatag

SEQ ID NO: 225066 - DNA, 522 bp, synthetic construct
  misc_feature 1..522: note = Description of Artificial Sequence: Synthetic coding sequence
  source 1..522: mol_type = other DNA
atgtcaattctgataattgaagctttctacggcggttcccataagcagctagtggatctgcttcaggaggaattgggcgactgcgtggtttacaccctgcctgctaagaagtggcactggcgtgcacgtacatccgccctgtacttcagccagaccattccaatctctgaacactacagaaccttgtttgcctctagcgtcttgaatctcaccgaactagccgcactgcgcccagaccttggaaagctgaagaagattctgtacttccacgagaaccaactaatttacccggtcaagaagtgtcaagaaagagacttccagtacggatacaaccagattctctcgtgccttgtagctgacgtcgtggtgttcaacagtgtcttcaatatggagtctttcttgacgtccatgggaaaattcatgaagctcattcccgaccatcgacccaaagacctggagtctatcattagaccgaaatgccaggtgatttattttccaataagattccctgatgtgagttag

SEQ ID NO: 225067 - DNA, 1377 bp, synthetic construct
  misc_feature 1..1377: note = Description of Artificial Sequence: Synthetic coding sequence
  source 1..1377: mol_type = other DNA
atgtccatcctgatcattgaggctttttacgggggtagccacaaacagctggtagacttacttcaggaagagcttggagactgcgtggtgtacaccctgccggctaaaaagtggcactggcgggcacggacttctgccttgtattttagccagactatccccattagcgaacattatcgtacactgtttgcatcttccgtgctcaatcttactgagctggcagctcttcggccagacttaggcaagttgaagaagatcctatacttccatgagaatcagctgatctaccctgtcaaaaaatgtcaagagagagatttccagtacgggtataatcagattctttcgtgtctcgtggccgacgtcgtggtctttaacagcgtgttcaatatggagagcttcctgacctctatggggaagtttatgaagttgatccctgatcacagacccaaggatctcgagagcattatacggcctaagtgtcaggtcatctattttcctatacgtttcccagatgtctctagatttatgccaaagcacaaaactacccacctgaagaagatgttaggcctgaaggggaacgggggagccgtcctgtctatggcgttgccgtttcagccagaacagagggacagcgaggatctgttaaaaaacttcaatagcgaatgcgacacccactgcggtcttgacacagccaggcaggaatatctaggcaattctctgcgccaagaaagtgatttaaagaagagcacctcatctgataattcaagttcccaccacggcgaaaacaagcagaatctgactgtcgatccgtgtgatatactgggcggagtggacaaccaacagaggctcctgcatatcgtgtggcctcacaggtgggaacatgataaagatccggagtccttttttaaggtgttaatgcacctgaaggacctgggcttaaatttccatgtatccgtgctcggcgaaaccttcacagacgtgccagatattttctccgaggcaaagaaggcattaggctcctccgtcttacactggggttacctcccttccaaagatgattactttcaggtcctgtgtatggccgatgtggttatctctacagcaaagcatgaattcttcggtgtggcaatgttagaggcagtgtattgtggatgctaccctctgtgcccaaaggacctggtgtaccccgagatcttccccgcagagtatctctactcaactccagagcagctgtcaaagaggttgcaaaacttttgtaagcggccagatattattcgtaaacacttgtataaaggcgaaattgcccctttttcctgggccgctctacacggtaagtttcgttctttactcaccaccgagcctcgggaagatctgtag

SEQ ID NO: 225068 - DNA, 2220 bp, synthetic construct
  misc_feature 1..2220: note = Description of Artificial Sequence: Synthetic coding sequence
  source 1..2220: mol_type = other DNA
atgccttcccctaggcctgtgttgctaagaggagccagagccgcactgctgctcctcctaccccctagattactggccagaccatctctgctcttgcgcaggtccttatcggctgcctcctgtccacccatttctctccctgcggctgctagccgttcctctatggatggcgcaggagccgaggaagtgcttgctcccctcagactggctgtgaggcaacaaggtgatttggtgcgcaagcttaaggaagacaaggcaccacaggtggacgttgacaaagctgtggccgagctgaaggcccgaaagagagtccttgaggccaaggaattggcccttcagcccaaggatgacatagttgacagagctaaaatggaagatacactgaaaagacgcttcttctatgaccaagcatttgcaatctacggcggagttagcggactttacgacttcggtcctgtgggctgcgctctcaagaataatatcatccagacatggcgacagcatttcattcaggaggagcagatcctggagattgattgcactatgcttaccccagagccagtactgaagacgtctgggcatgtggacaagttcgctgatttcatggtgaaagacgtaaaaaatggtgagtgtttcagagccgaccatctccttaaggcccatctgcagaaactcatgtctgacaagaagtgctccgtggagaaaaagtccgaaatggaatctgttcttgcacagctggacaattacggtcagcaagaactggcagatctatttgtgaactataatgttaaaagcccaatcactggcaacgatttatctcccccagtctctttcaatcttatgtttaaaacattcattggccctggcggtaatatgcctgggtacctgaggcctgagaccgctcagggcatttttctgaacttcaaacgcttgcttgagtttaaccagggaaagctgcctttcgctgccgcacagattggtaattcatttcgaaatgaaatcagtcccaggtctggcctcatacgggtccgcgaattcaccatggcagaaatcgagcactttgtggacccctccgaaaaggaccacccaaaattccagaacgtggccgaccttcacttatatctttactccgcgaaggcccaggtgtctggccagagcgccagaaagatgcgcctcggggatgctgtagaacagggagtgatcaataacacagtgctgggctattttatcggccgtatttatttgtacttaaccaaagttggtatcagccccgacaagttgagattccgtcaacacatggaaaacgagatggctcattacgcatgcgactgctgggacgcagaaagcaaaacttcatacggatggatagaaatagtaggctgtgctgataggtcctgctatgaccttagttgtcatgctcgggcaaccaaagtgccactggtggcagagaaaccccttaaagaacccaagaccgtgaacgtggtgcagtttgagccctccaagggagcgatcggcaaggcctacaagaaagacgccaagttagttatggagtatcttgctatctgcgacgagtgctatatcaccgagatggagatgttactgaatgagaaaggcgagttcacaattgaaaccgaaggcaagacattccagctgaccaaggatatgattaacgtgaagcgctttcagaagacgctttatgtggaggaggtcgtccctaatgtcatcgagccctccttcgggcttgggaggattatgtatacggtgttcgagcataccttccatgtgcgggagggcgatgaacagcgtacctttttctcttttcctgccgtggtggcgccattcaagtgttctgtgctgccgctctcacagaatcaggaattcatgccattcgtgaaagagctgtctgaggctcttacccgacacggggtctctcacaaagtggacgactcatcaggaagcatcggacggcgatacgcccgaaccgatgaaataggtgtggcttttggggtcacgattgattttgataccgtgaataagactccccacacagccaccctgcgggatagagatagtatgcgccagatacgtgccgagatctccgagctgcctagtattgttcaggatctagccaacggcaacataacgtgggctgacgtggaggcgagataccccctgtttgagggccaggagactggaaagaaggagactatagaggagtag

SEQ ID NO: 225069 - DNA, 555 bp, synthetic construct
  misc_feature 1..555: note = Description of Artificial Sequence: Synthetic coding sequence
  source 1..555: mol_type = other DNA
atggcggagccccagccgccaagcggcggactgacagatgaggccgctttgtcatgttgttcggacgcggatcccagtaccaaggattttctcctccagcagacaatgttgcgcgtcaaggaccccaaaaaatcactggatttctacactcgcgtcctgggcatgaccctgatacagaagtgcgattttcccattatgaagttcagcttgtactttctggcctatgaggacaaaaacgatatccccaaggagaaggacgagaagatcgcttgggctttgtcacgcaaggctacacttgagctcacgcataattgggggaccgaagatgacgaaacgcagagttaccataatggcaactctgaccccagagggtttggtcacattggaatcgcagtcccagacgtctacagcgcctgcaagcgctttgaggagttgggagtgaaatttgtgaaaaagcccgacgacggtaaaatgaaggggctggcctttattcaggatcctgacggatactggatcgaaatcctcaacccgaataagatggccactctcatgtag

SEQ ID NO: 225070 - DNA, 987 bp, synthetic construct
  misc_feature 1..987: note = Description of Artificial Sequence: Synthetic coding sequence
  source 1..987: mol_type = other DNA
atgcgacccgtgcgcttgatgaaagtttttgtgactcggcgtatccctgccgaagggagagtggccttggcaagggctgcggactgtgaagttgagcagtgggatagcgatgagcccatcccagccaaggagctcgaaaggggggtggcaggtgcacacgggcttctgtgcctgcttagcgaccatgtggacaaacgtatactcgacgccgctggagccaatcttaaggtcatatcaactatgtccgtgggcatcgatcatctcgcccttgacgaaatcaagaagcgtggaataagagtgggatacaccccagacgtcctcacagatacgactgccgagctggctgttagtctactgctcacaacctgtagaagactccctgaagccatcgaggaagtgaagaacgggggatggacctcctggaagccactgtggctatgtggctacggtctgacacagagtactgtaggcatcataggattgggacgtattggacaggccatcgccagacggctcaagcctttcggggtgcaaaggttcctatatacaggccgacagcctcgtccggaggaggcagccgagtttcaagccgagttcgtgtccacgcccgagctggccgcacagtctgattttattgtggttgcctgtagcttgacgcctgccactgagggactttgtaataaggacttttttcagaaaatgaaggagaccgcagttttcattaatatatctcgtggggacgtcgtgaaccaggatgatctgtaccaagcgctggcctctggtaagatcgccgcagccggacttgatgtcacgtcccccgaaccattgcctaccaaccaccccctgctcaccctgaaaaactgtgtgatcctaccccacatcgggtctgcaactcataggactaggaataccatgagcctactggcagcaaacaacctgttggccggtttaaggggtgagccgatgccctccgagctgaagctgtag

SEQ ID NO: 225071 - DNA, 1188 bp, synthetic construct
  misc_feature 1..1188: note = Description of Artificial Sequence: Synthetic coding sequence
  source 1..1188: mol_type = other DNA
atgcgcccagtgcgcttgatgaaggtttttgtgacccgcaggatacccgctgagggaagggttgccctcgccagagcggcagactgtgaagtggagcagtgggactctgacgagccaattccggcaaaagagctggagcgcggagtggcaggagcccatggcttgttgtgcctcctaagcgatcatgtcgacaagcgtatcctcgacgccgcaggtgccaatctgaaagtcatctctactatgagtgtggggatcgaccatcttgctctggacgagattaagaagagaggcatcagggttggttataccccagacgtgctgaccgacaccacagccgaactcgccgtaagcttgctcttaactacctgccggcgattacctgaagccatagaagaagttaaaaacggtgggtggacgtcatggaaacctctctggttatgcggatatggcctgacccagtcgacggttggtattatcggtttgggtaggattggccaggccattgcgcgtcggctgaagcctttcggcgttcaacgctttctgtacacaggacgtcagcctaggccagaagaagctgcagagttccaggcagagttcgtatccacaccagaactggcagcacaatctgattttatcgtggtcgcctgctcacttacaccagccactgaggggctctgtaataaggacttcttccagaaaatgaaagagaccgctgtttttataaatatcagtcgttacccgagagccacactgcccagcaaacccggagaagagccgtctcctctgttgcccagtggagattttttgccaagaggactcctggtgagacctcaagcagaattagctggttttcataagccaaataatcagctaaggaacagctgggaatacaccaggccaccctatcgcgaggaagaacccagtgagtgggcctggcctgtctgcttttcagccgtggcacctacacgcagaggcctcgcccacagcagtgtggcatcagggagcgtgccacgcgaacctctacaggcccactatccacccccacagagagctggcctcgaggacctaaagggacccttggaggccgcatcacacaccgctgagccgggattcgtctggctttggtttagcgacacattgaacctaatgctcctgggcggacagacactcaagctgacatggtcatag

SEQ ID NO: 225072 - DNA, 759 bp, synthetic construct
  misc_feature 1..759: note = Description of Artificial Sequence: Synthetic coding sequence
  source 1..759: mol_type = other DNA
atgctgggcggagtcccgacgttgtgcgggacaggcaatgagacctggaccctgctggccctcggtcaagctatcgcccgtcggttaaagccctttggggtgcagagattcctgtacactgggcgtcaaccccgtcccgaggaagcagcagaatttcaggccgaattcgtgagcacccccgaacttgccgcacagagcgattttattgttgtggcctgcagcttgaccccggcaaccgagggactttgcaataaggacttcttccaaaaaatgaaggaaacagccgtgtttattaatatcagtcggtatcccagagccacgttaccctcgaaacctggggaggaaccaagtcccctcctgccgtccggggacttcctgcctcggggtttgttagttcgtccacaggctgaattagcgggtttccacaaacctaataatcagctgaggaattcctgggaatacacacgccctccctatagggaggaggaaccgagcgaatgggcatggcctgtgtgtttctcagctgtagcccctacacgacgcggtctggcacactcgtctgtggcctccggttcagttccacgcgaaccgctgcaggcccactacccccctccccagcgcgctggactcgaagatctaaaagggcctctggaagctgcttcacacaccgccgaaccaggtttcgtgtggttatggtttagcgacaccctgaacctaatgctgctgggaggacagacccttaagctgacgtggtcctag

SEQ ID NO: 225073 - DNA, 1677 bp, synthetic construct
  misc_feature 1..1677: note = Description of Artificial Sequence: Synthetic coding sequence
  source 1..1677: mol_type = other DNA
atggagctcagagcccgaggatggtggcttctctgtgcagcagccgctcttgtcgcgtgtgcgcgtggtgatcctgctagcaagagcaggtcttgcggagaggtgagacagatctatggggcaaaaggcttctctctttctgacgtgccccaggctgagatatccggtgagcacttgcgaatatgccctcaagggtacacctgttgcacttcagaaatggaagaaaatcttgccaaccgcagccacgccgaactcgagacggcgctgagggatagctcacgtgtccttcaggctatgctggccactcaattacgatcatttgacgaccacttccagcacctgctcaacgatagtgaacggaccttgcaggcaaccttcccaggagcatttggggagctctatacacagaacgctcgagctttcagagacctatattccgaattaagactgtactaccggggagctaacctacacctggaggagacactggcagagttttgggctcggttgcttgagcggctattcaaacagctgcatcctcaacttttattaccggacgattacctggattgcctgggaaagcaggccgaagccctgagaccgttcggagaggctcctagggagttacgcctgcgagcaacacgtgccttcgtggcagcacgatccttcgttcagggcctgggggttgcgtcagatgtcgtgaggaaggtggcccaagttcctctgggcccagaatgttcccgggcagtaatgaagctagtttactgcgcccattgcttgggcgtgcccggtgcgcgtccatgtcctgactactgccggaatgttcttaagggctgcctggccaaccaggccgatctggatgcggaatggagaaaccttctggatagtatggtgctcattacagataagttttggggaacttctggcgtagagtctgtaatcggtagcgtccacacctggcttgctgaagctatcaacgcactgcaggataaccgagacaccctaaccgcgaaggttattcaaggctgtggtaatcctaaagtgaaccctcagggaccaggaccagaggaaaaacgaaggaggggaaagctggcacccagagaacggccaccctcgggtaccctggagaaacttgtgagcgaagctaaggctcaactacgcgatgtgcaggatttttggatttcgttacccggaactctgtgctcagaaaaaatggctttgtccactgcatcggacgataggtgttggaacgggatggctaggggtcgttatttacctgaggtgatgggggatgggctcgccaaccaaatcaataacccagaggtagaagtagacattaccaagcctgacatgacgatccggcagcagattatgcagttgaaaataatgactaataggctgaggtccgcctataatgggaatgacgtcgatttccaggacgcctcggacgacggcagcggctccggaagcggagatggttgcctggatgacctgtgttctcgtaaagtgtcgagaaagtcttcctcctcaagaacccctctaacacatgctctgcctgggttatctgaacaggaggggcagaaaacttccgcggcatcttgcccgcagccgccaacgttcctcctaccgctccttctgtttctggctttgactgtggccagaccacgctggcgatag

SEQ ID NO: 225074 - DNA, 1743 bp, synthetic construct
  misc_feature 1..1743: note = Description of Artificial Sequence: Synthetic coding sequence
  source 1..1743: mol_type = other DNA
atggctggcaccgtcaggacggcttgcctggttgtggctatgctgttgagtctcgattttccaggccaggctcagcccccaccgcctcccccagatgctacatgtcatcaggttcgatcattctttcagaggctgcagccagggctgaaatgggtgccagaaacacctgtgccgggatccgatctacaggtgtgcttgcccaaaggaccaacatgttgcagcaggaaaatggaggagaagtatcagctcaccgccagactcaacatggaacagctattgcagagcgcatctatggagttaaagttcttgatcattcagaacgccgctgtcttccaggaggctttcgagatcgtggtgcggcacgcgaaaaactatactaatgctatgttcaagaataactatccctcccttactccccaggcttttgagttcgtcggagagttcttcacagacgtgagtctttatatcctgggaagcgatatcaatgtcgacgacatggtgaacgaattatttgattcgctgtttccagtgatctacacgcagttaatgaacccagggctgccagactccgccctggacattaacgagtgcctgcggggagccaggagggatctgaaggtcttcggaaactttcccaaacttattatgacccaagtgtcaaagagtctccaggtgacacgcatattcctgcaggcactcaatctcgggattgaggtgattaacactacagaccatctgaagttcagtaaagattgcggtcgcatgctgactcggatgtggtattgttcctattgtcaaggcctcatgatggttaaaccttgcgggggatactgcaatgtggtcatgcagggatgcatggccggtgttgttgaaatagataagtattggcgcgaatacatcttaagtctcgaggagcttgtcaacggcatgtatcgaatttacgacatggagaatgtgttgctcggtctcttctctactattcatgactctatccaatatgtccagaagaacgcagggaagcttacaacaacgatcggcaagctctgcgcccacagtcagcaaaggcagtacaggtcagcttactaccctgaggatctgtttatcgataagaaagtgctcaaggtggcccacgtggagcacgaggaaaccttgagcagcaggagacgggagctcattcaaaaactgaagtcgtttatctccttttactccgccctccccggttacatctgttctcattcccctgtcgctgagaatgatacactctgttggaatgggcaagagctggttgaaagatatagccagaaggctgccagaaatggcatgaagaatcagtttaacctccatgagctgaagatgaagggaccagagcccgtggtatcacagatcatcgataagttgaagcatatcaaccaactcctgcgaacaatgagcatgccaaaaggcagggtcctcgacaagaatttggatgaggagggattcgagtctggggactgcggtgacgatgaagacgaatgcatcggagggtccggtgacggcatgatcaaggtcaaaaatcaacttcggttcctggccgaattagcctacgacctggatgtagacgacgcccctggcaacagccagcaggccacccctaaggacaacgagatatccacttttcacaacctcgggaatgtgcattctcccctaaagctccttaccagtatggctatatctgtagtctgtttcttcttccttgttcactag

SEQ ID NO: 225075 - DNA, 1812 bp, synthetic construct
  misc_feature 1..1812: note = Description of Artificial Sequence: Synthetic coding sequence
  source 1..1812: mol_type = other DNA
atggccggtactgtgcggacagcatgcctcgtggtggctatgctcctatcacttgattttccgggtcaggcacagccccctccccctccacccgacgctacctgtcatcaggtcaggtccttcttccagcgcttgcagccgggactgaaatgggtgcccgagacgccagtcccgggttctgatttgcaggtgtgcctccctaaaggccctacttgctgcagtagaaagatggaggagaagtatcagctgactgctcgactgaacatggagcagctcctgcaatcagccagcatggagctaaaatttcttataatacagaatgccgctgtgtttcaggaagcctttgagatagttgttaggcatgcaaaaaattatactaacgctatgttcaagaataattatccctcactgacgcctcaagcatttgagtttgtgggcgaattctttactgatgtcagtctgtacatcctcggcagcgacatcaacgtggatgacatggttaacgagctgttcgactctctgtttcctgtgatctatactcagttgatgaatcctggccttcctgattccgctctcgatatcaatgagtgcctaaggggcgctcggagagatctcaaggtattcggcaatttccctaagctgatcatgacccaggtttcaaagtcacttcaggtcactagaattttcttacaagccctgaacctggggatagaggtgattaacacaaccgatcacctgaagttttccaaagattgtggccgtatgctcacaagaatgtggtactgcagctactgccaagggctgatgatggtcaagccctgtggcggttattgtaatgtggtgatgcagggttgtatggccggagtcgtggagatcgacaagtactggcgagagtatatcctgagcctggaggagctcgtgaacggtatgtaccgaatatatgacatggagaacgtccttctagggttattcagtacaattcacgactcaatccaatacgtacagaagaacgccggtaaattgactactaccgagaccgagaaaaaaatatggcactttaaataccctatcttttttctgtgtattggcttggatctgcaaatcggcaaactctgtgcgcattctcagcagcggcaataccgctccgcctactatccggaggatctgtttattgacaaaaaggtcctcaaggtggctcatgtggagcatgaagagacattatcttctagaaggagagaattgattcagaaactgaagtccttcatctctttttattcagctctacctggctacatatgcagccattccccagtggccgaaaacgacaccctgtgctggaacggtcaggaactggtggaaagatatagccagaaggccgctaggaacgggatgaagaatcaatttaaccttcatgagttaaagatgaaggggccagagcccgtggtatcgcagatcatagacaagctgaaacacattaaccagctcctcagaaccatgagcatgcccaagggaagagttctcgacaaaaacttggatgaagagggttttgagtctggggattgtggagacgatgaggatgagtgtataggaggcagcggcgatggaatgatcaaggtcaagaaccagttacgcttcctagctgagctggcctatgacttggacgtggacgatgccccagggaactcacagcaggctacccccaaggataacgagatcagtacatttcacaatctcggcaatgtccactcccctttgaagttactgacaagtatggctatctccgtggtctgttttttcttcttagtgcactag

SEQ ID NO: 225076 - DNA, 771 bp, synthetic construct
  misc_feature 1..771: note = Description of Artificial Sequence: Synthetic coding sequence
  source 1..771: mol_type = other DNA
tgaaagccatgtggtggctactgcaatgtcgtcatgcagggttgtatggctggcgtggtcgaaatcgacaaatactggagagagtatattctttcattggaggagcttgtcaatggaatgtatagaatctatgatatggagaatgtgctgctcgggctgtttagtaccattcatgactcaattcaatacgtccaaaagaacgccggaaagctgaccaccacaatcggcaaactgtgcgcgcactcccagcagcgtcaatacaggagcgcttattacccagaggatctattcatcgacaagaaggtgctgaaagtagcgcacgtggagcacgaagagaccttatccagccgcaggagggagctcattcagaagctcaaaagcttcatttcattctacagcgcattgcctggttacatctgctcccacagtccggtggcagaaaacgacactctgtgttggaacgggcaggagttagtcgaacgatactcccagaaggccgcacggaacggcatgaaaaaccagttcaacctgcacgaattaaagatgaagggacctgaaccagtagtctcacagatcatcgataagcttaagcacattaaccagctccttcggactatgagcatgcctaagggtagggtcctggataagaacttagacgaagaaggcttcgagagtggcgactgtggtgatgacgaagacgaatgtattggagggtcgggagacggtatgatcaaagtgaaaaatcagcttagattcttggctgggaattag

SEQ ID NO: 225077 - DNA, 1581 bp, synthetic construct
  misc_feature 1..1581: note = Description of Artificial Sequence: Synthetic coding sequence
  source 1..1581: mol_type = other DNA
atggcagggaccgttcggacagcatgcctggttgtcgcgatgctgcttagtctagattttcctggtcaggcacaacctccccctccccctcccgatgccacctgccatcaggttcggtcatttttccaacgcttacagccgggtctcaagtgggtcccagagacacccgtaccagaggcctttgagatagtggtcaggcacgctaaaaattacactaatgccatgttcaaaaacaattatccgagcttgactccgcaggccttcgagttcgtgggagaattctttacggacgtctccctttacattctgggatctgatattaacgtagacgacatggtgaacgagctattcgattcactcttccctgtgatttacacgcagctgatgaacccgggtctccctgattctgcattggacatcaatgaatgtctaagaggcgctaggcgcgaccttaaagtgttcggcaattttcctaagctgatcatgacccaggtgtctaaatctcttcaggtgacgagaatttttctgcaggccctgaatctgggaatcgaggtgataaatacaaccgatcacctgaagttttccaaggactgtgggaggatgcttaccagaatgtggtattgtagttactgccaaggactgatgatggtaaagccctgcggtggttactgcaacgttgttatgcaaggttgtatggcgggtgtggtcgagatcgataagtactggagggagtatatactgagcctggaggagctggtgaatggaatgtatcggatatacgacatggagaatgtgctgctaggcctcttcagcacaattcatgatagcatccagtacgtccaaaaaaatgctgggaaactgacgactacaattggcaaattgtgtgcacattcgcagcagcggcagtatcgttctgcatactaccctgaagatctgttcatagacaagaaagtcttaaaagtggctcatgtggaacacgaggagacactgtcaagccgtaggcgggagctcatccagaagctgaagtcctttatttcattctattccgctctgcctggctacatttgctctcactcgccagtagctgagaacgataccctgtgctggaatggacaggaacttgtcgaacgctacagccaaaaggcggctcggaatgggatgaaaaaccagtttaatctacacgaactgaagatgaaagggcctgaacccgtggtatctcagattatcgataagttaaagcacattaatcaactcctgagaactatgtccatgcccaaaggaagggttctggacaagaacttggacgaggaagggttcgaatctggagattgtggggatgacgaggacgagtgcattgggggaagcggcgatggcatgataaaagtgaaaaaccaacttcggttccttgcggagctggcttatgatttggacgttgacgacgcccctgggaactcccagcaggctacgcccaaggataacgaaatatcaacatttcataatctgggtaacgtgcattccccccttaaacttctaacctccatggcaatttccgtggtgtgctttttttttctcgtacactag

SEQ ID NO: 225078 - DNA, 1671 bp, synthetic construct
  misc_feature 1..1671: note = Description of Artificial Sequence: Synthetic coding sequence
  source 1..1671: mol_type = other DNA
atggcacgtttcggtttaccagccctgctctgcaccctggcagtgctgtccgccgctttgctcgccgctgaactgaagagtaagagctgttctgaggtgcgacggctatacgtctccaagggctttaataagaacgacgccccactccacgagattaatggcgaccacctaaagatctgtccacagggcagcacatgctgttcacaggaaatggaagagaaatacagtttacaatcaaaagacgatttcaaatcagtggtgtccgaacagtgcaaccacctgcaggcggtcttcgccagtcggtacaagaagtttgatgaattcttcaaagaacttttggagaatgcggaaaaaagtctgaacgatatgttcgtcaaaacctatggccatctctatatgcagaacagtgaactcttcaaagacctattcgtcgaactcaagcgctactacgtcgtgggaaacgtgaacctcgaagagatgttgaacgatttttgggccaggcttctggagcgcatgtttcggcttgtgaactcccagtatcatttcacagatgagtacttagaatgtgtttcaaagtacacagaacagctgaagccattcggtgacgttcccagaaagctcaagctccaggtcactcgagcctttgtcgccgcacgcaccttcgcccagggtctggctgtggcgggtgatgtcgtctccaaggtcagcgtggtgaatcctacggcccagtgtacccacgcacttctcaaaatgatctactgcagccattgccggggtttagtcactgtgaagccttgctacaattattgtagtaatattatgcgcggatgccttgcaaaccagggagacttagatttcgaatggaacaactttatagatgccatgctgatggtcgccgaacgccttgaggggccatttaatatcgagtcggtgatggacccgatcgacgttaaaatctccgatgcaataatgaacatgcaggataattcggtccaggtttcccagaaggtgtttcaaggctgcggccctcccaaaccgctccccgcaggccgaatttcccggtcaatcagtgagtccgcgttttcagcacggttccggccacaccatccagaggaacgcccaactaccgcagctggaacatcgctggaccggttagtgaccgatgttaaagagaaattaaagcaggcaaaaaagttttggtcttccctgccctctaacgtgtgtaacgacgaaaggatggccgctggcaacggcaacgaggacgattgttggaacggcaagggcaaatctaggtacttgtttgctgtgactgggaatggcttagctaatcagggaaataacccagaggttcaggtcgacacttctaagcctgacatccttatactgcgacagatcatggcgcttagagtgatgactagcaaaatgaagaacgcctataatgggaacgatgtggacttcttcgacatctccgatgagtcatctggcgagggctcggggagtggatgtgaataccagcaatgcccatctgaattcgactacaatgccaccgaccacgccggaaagtctgccaatgagaaggcagactctgctggtgttcgccctggagcacaggcttatctcctaacagtcttttgcatcctgtttttagtcatgcaacgtgagtggagatag

SEQ ID NO: 225079 - DNA, 1461 bp, synthetic construct
  misc_feature 1..1461: note = Description of Artificial Sequence: Synthetic coding sequence
  source 1..1461: mol_type = other DNA
atggaagagaaatacagtttgcagtcgaaggacgatttcaagtccgtggtgtcggaacaatgtaatcatctacaggccgtgttcgcctcgcggtataaaaagtttgacgaatttttcaaagaactgctggaaaacgctgagaagagtttgaacgatatgtttgtcaaaacatacggtcatctttatatgcagaactccgagctcttcaaagatctgtttgtggagttgaaaagatattacgtggtgggaaacgtgaatttggaggaaatgttgaacgatttttgggccaggcttctcgaaaggatgttccgccttgtgaattcccagtatcactttaccgatgagtacctggaatgcgtctctaagtacactgaacagctaaaaccgtttggtgacgtgcccagaaagctaaagctgcaggtgacccgggcttttgtcgcggcaaggaccttcgcccagggtctcgcagtggctggggatgtggtcagcaaagtttccgtggtgaacccgacggcccaatgtacgcatgcattgctcaagatgatctactgttcccattgtcgtgggctggtgactgtgaagccttgttataattactgttccaatataatgcggggatgtcttgcaaaccagggggatcttgactttgaatggaataacttcatcgatgctatgctgatggtggctgaacggctcgaagggcctttcaatatcgagtcagtgatggacccgattgacgtgaaaataagcgacgctattatgaacatgcaggacaatagtgtccaagtctctcaaaaagttttccagggctgcgggccaccaaaaccattgccagctggtcgcatttcccgatccatatccgagagtgctttcagcgccagatttcgccctcatcatcctgaggaacggccaaccacggccgctggaacatccctagaccggctggtcacggacgtgaaggagaagcttaagcaggccaaaaaattttggtcatctcttccgagcaatgtttgcaacgatgaacggatggccgctggcaacggaaacgaggatgactgctggaacggcaaaggtaaatctcgctatctctttgcagttacagggaacggtcttgcaaatcaaggtaataacccggaggtccaggtggacacctccaagccagacatccttatattgagacaaatcatggccctcagggttatgactagcaagatgaagaatgcatataatgggaacgatgtggattttttcgacattagtgatgagagtagcggcgagggttctggatccggatgcgagtaccagcagtgtccaagcgaatttgactacaacgccactgaccacgccggaaaatcagcaaatgaaaaagccgactcagctggtgtccgaccaggggcacaggcgtatctcctcaccgtcttctgcattctgttcctcgtcatgcagcgggaatggcgatag

SEQ ID NO: 225080 - DNA, 1653 bp, synthetic construct
  misc_feature 1..1653: note = Description of Artificial Sequence: Synthetic coding sequence
  source 1..1653: mol_type = other DNA
atggcacgttttggactgcctgctttgttgtgcactctcgcggtgctttccgcagctctgttggctgccgaacttaagtctaagtcatgttctgaggttagacgcctttatgtgtctaagggattcaataaaaacgatgctccattgcacgagatcaatggggaccacgaagacttaagtccagggttttacctcctactgtctagagacggaggctactcccttcagtccaaagacgatttcaaaagtgtagttagtgagcagtgtaaccacctgcaggcagtgtttgcatcacggtacaaaaagttcgacgagttctttaaggagctgctggagaacgcagaaaaatccctgaacgatatgtttgtgaagacatacggccacctgtatatgcagaattcagagttattcaaagatctgttcgttgaactaaagcgctactatgtggtggggaacgtgaacctggaagagatgctgaacgacttctgggccaggctgctcgaacgcatgtttcgactcgtaaattctcagtatcacttcaccgacgaatatctcgagtgtgtgagcaagtacaccgagcaattgaaaccctttggggacgtgcctcgtaagcttaagctgcaggtgacaagagctttcgtcgcagctcgcacctttgcccaaggtttggcagtcgctggggatgttgtgagcaaggtgagcgttcctagttgcactcacgctctcttgaagatgatttattgtagccactgcagaggactagtgaccgtgaaaccctgctacaactattgtagcaacatcatgaggggatgtctcgcaaaccagggagacctcgatttcgagtggaacaattttatcgatgccatgcttatggtcgctgaacgcctagagggaccctttaatatcgagagtgttatggatcctatagacgtgaagatctcagatgctatcatgaacatgcaagataatagcgtccaagtgtcccaaaaggtttttcaggggtgtgggccaccaaaacctcttcctgctggcaggattagccgcagtatttccgagtcagccttttctgcaaggtttaggccgcaccacccggaggaaaggcccacaacagctgctgggactagtctggaccgcctcgtgaccgatgtgaaggagaagctcaagcaagccaagaagttttggagcagcctgcccagcaatgtttgtaacgacgagcggatggccgcaggcaacgggaatgaagacgattgttggaacggcaaaggcaaaagccgctacttattcgctgtaacggggaacggcctggctaatcaaggcaataatcccgaagtgcaggttgatacgagtaaacctgatattctaatcttgcgccagattatggccctgcgcgtgatgacctcaaagatgaagaatgcatataacggtaatgacgtagacttttttgatatatccgatgagtccagcggcgagggtagtggctccggctgtgaatatcagcagtgcccttccgagtttgactataatgccaccgaccacgcagggaaaagcgctaatgagaaggccgacagcgctggcgtccgccctggcgcacaggcttaccttcttacggtcttctgcattttgttcctcgtcatgcagcgggaatggcgttag

SEQ ID NO: 225081 - DNA, 1719 bp, synthetic construct
  misc_feature 1..1719: note = Description of Artificial Sequence: Synthetic coding sequence
  source 1..1719: mol_type = other DNA
atggacgcccagacatggcctgttggcttccgctgcctgttattgcttgcgcttgtaggcagtgcccgttctgaaggtgttcagacttgtgaggaggttcgcaagttgttccagtggagactccttggggcagtccggggtttacccgatagccccagagcagggccagacctccaagtctgcatctctaagaaaccgacatgctgcacacggaagatggaagagaggtaccagatagcagcgcgacaggacatgcagcagtttttgcagacctcctcgtccaccctgaagtttctcatctctcgcaatgccgcagcctttcaagagacgttggagactcttattaagcaggctgaaaattacacaagcatcctgttttgcagtacataccggaacatggcattagaggcagcagctagcgtccaggagttctttacagacgtgggactctatctgtttggcgcagatgtgaatcctgaggagttcgtcaatcgtttctttgactcactgtttccacttgtgtacaatcacctgatcaatccaggtgttactgattcttctctggagtatagcgaatgcatccgcatggcacggagagatgtctcaccttttgggaatatcccgcagcgtgtaatgggccagatgggcaggtcactcctgccctctaggacattcttgcaagccttgaatctcgggatcgaagtgatcaatacaacagattatctgcacttttccaaagagtgtagccgagcattgttgaagatgcagtattgcccccactgccaaggcctggccctgactaagccttgtatgggctactgcttaaatgtcatgcgcggttgtctggctcatatggctgagctcaatccccactggcacgcctacattcggtccctcgaggaactcagtgatgcaatgcacgggacctacgatattggtcacgtcctcttgaattttcatcttcttgtgaatgacgccgtcctccaggctcaccttaacgggcagaaattactggaacaagtgaacagaatctgtggaaggcccgtcagaacccccacgcagagcccccgatgttcattcgatcagtccaaggagaagcatgggatgaagacaaccacgaggaattcagaagagacactggcaaacagacgcaaggaatttatcaacagtcttcgtttgtaccggagcttctacggcggtctggctgatcagctctgcgctaatgagctcgcggcagctgacggccttccttgttggaatggcgaggacattgtaaaaagctacacacagagagtcgtgggtaatggtatcaaggcccaatccggtaatcctgaagttaaggtgaaggggatcgatcctgtgataaatcaaattatagataaactcaagcatgttgtgcagctcctgcaggggcgatccccaaagcccgataagtgggagctgctccagctcggttctggaggtggaatggtcgaacaggtatctggggactgcgatgatgaagacgggtgcggaggatctggctctggcgaagtgaaacgcaccctgaagatcactgactggatgcctgatgacatgaacttctcagatgtaaagcaaattcatcaaaccgacactggtagcacgctggacaccactggtgccggatgtgccgtggctacagagagcatgacatttaccttgatctcagtggtgatgctcctaccaggcatctggtag

SEQ ID NO: 225082 - DNA, 1668 bp, synthetic construct
  misc_feature 1..1668: note = Description of Artificial Sequence: Synthetic coding sequence
  source 1..1668: mol_type = other DNA
atgccctcatggattggtgccgtcatcttaccgctcttagggctgttgctgtcattacccgctggagctgatgtcaaagcccgatcctgtggcgaagtgcggcaggcgtatggagctaaggggttttcattggctgatatcccatatcaggaaatcgcaggtgagcatcttagaatctgtccccaagagtatacatgttgcacaacggaaatggaagataagctatcacagcaaagtaagctggagtttgaaaatctggtggaggaaacttctcacttcgtgcgcacaacattcgtcagcaggcataagaagtttgacgagttcttcagagaactactggagaacgccgagaaaagtttaaacgacatgtttgttaggacatacggaatgctgtacatgcagaatagtgaggtgttccaagatctatttactgagctgaaacggtattataccggcggaaatgtgaaccttgaggagatgctgaatgacttctgggctcgtctcctggagagaatgttccagttaataaaccctcagtaccacttttccgaagactatctggagtgtgtaagtaaatacacagaccagctaaaaccgtttggggatgtaccccgtaagcttaagattcaggtgacgagagccttcatcgctgcaagaacgtttgtgcagggtctgacagtgggcagggaagttgccaacagggtgtcaaaggtgtcacccactcctgggtgcatccgggctctgatgaaaatgctctactgtccttactgccgcggacttcccaccgtgcggccatgcaacaactactgcctcaatgtcatgaaaggatgcttggctaaccaggcggatttagataccgagtggaatctctttatcgatgcgatgctcctggtggctgaaaggttggaaggcccatttaacatcgaatcagtcatggaccctatcgatgtcaagatctcagaggcgataatgaacatgcaggagaatagcatgcaggtctccgccaaggtgtttcaaggatgcgggcagcctaagcctgctccagccctaaggtctgcgcgtagtgcacctgagaatttcaacactcgctttcggccttacaatcctgaagaaaggcccaccacagcagcgggtacctcactggataggcttgtgactgacattaaagagaagctcaagctgagcaaaaaagtgtggagcgcactcccatataccatttgtaaggatgaatctgtaaccgcgggaactagcaacgaagaggaatgttggaatggccattccaaagcacggtacctgcctgagatcatgaatgacggacttacaaatcagatcaataaccctgaggtggacgtcgacatcacacgaccagacaccttcatccgccagcagattatggccctgcgggtcatgacgaacaagcttaaaaacgcctacaacggaaacgatgtcaatttccaggacacgagcgatgagagctctggctccggcagtggatcaggctgcatggacgacgtctgtcctacagagtttgaattcgtgacaacagaggctcccgctgtggaccctgataggcgcgaggtggattccagcgcagcccagcgagggcatagcctgttaagctggtcattgacatgcatcgtgctggcgcttcagcggctgtgcaggtag

SEQ ID NO: 225083 - DNA, 582 bp, synthetic construct
  misc_feature 1..582: note = Description of Artificial Sequence: Synthetic coding sequence
  source 1..582: mol_type = other DNA
atgcagtctctgatgcaggccccattactgatcgccctgggactgctcctggccgcacctgcccaggctcacctgaagaagcccagtcaattgtcttcattcagctgggacaactgtgacgagggaaaagaccctgcagtgattaggagcctgactctcgaacccgaccctataattgttccgggtaacgtgacactgtccgtcatggggagtaccagcgtgccattgagctctccactgaaggtagatctcgtgctggagaaggaagtagccggactgtggataaaaattccatgtactgattatatcggctcctgcacatttgagcatttctgcgatgtcctggacatgcttatccctaccggcgaaccgtgcccggaaccactgagaacttatggcctgccatgtcattgtccatttaaggaaggaacatactccctgccgaaaagtgagtttgttgtaccagaccttgagctcccctcatggctgaccacgggcaattaccgcatagagtctgttctttctagctcagggaagaggttgggatgcataaagatcgctgcatcattaaaggggatttag

SEQ ID NO: 225084 - DNA, 1140 bp, synthetic construct
  misc_feature 1..1140: note = Description of Artificial Sequence: Synthetic coding sequence
  source 1..1140: mol_type = other DNA
atgggctgtctcggcaactccaagactgaagaccagcggaatgaggagaaagctcagcgtgaggcaaacaagaagattgagaagcagctgcagaaggacaaacaggtgtaccgggcaacgcataggctgctgctcctgggagcaggggagagcggcaaaagcactatagtgaaacagatgcgcatcctgcacgtaaatggattcaacggcgatgagaaggccactaaggtgcaggacattaaaaataacctgaaggaggccatcgaaaccatcgtggcggctatgtccaacctggttcctccagtagagctcgccaatcctgagaaccaatttagagtggactacatcctgagcgtgatgaacgtgcccgatttcgacttcccacctgagttttacgagcatgccaaggccttgtgggaggatgaaggtgtgagagcctgctacgagcgcagtaatgaataccaactcatcgactgtgcccagtatttccttgataaaatcgatgttatcaaacaggctgattacgtcccctccgaccaggatctactgcgatgtcgagtgctgacaagcgggatattcgagacgaaatttcaagtggacaaagttaattttcatatgttcgacgtaggcggtcagagagatgaaagacgaaaatggattcagtgcttcaatgacgtgacagccattatatttgtagtggctagttcctcctataatatggtgatccgggaggataatcagactaacaggctgcaggaagcacttaacctgtttaaatcaatttggaacaatagatggctccgcacgataagtgttatcctattcctcaataagcaggaccttctagcagaaaaagtgctcgctgggaagtctaagatcgaggactacttccctgaatttgcacgctacactacgccagaagatgcaacgccagagcctggggaagacccgcgtgtgacacgtgccaaatacttcatccgtgatgagtttctgcggatctctacggcctccggagacggacggcactattgctacccacatttcacctgtgcagtcgatacagagaacatacgcagggtgttcaacgactgtcgtgacatcatacagcggatgcacttgaggcaatatgagttactatag

SEQ ID NO: 225085 - DNA, 1143 bp, synthetic construct
  misc_feature 1..1143: note = Description of Artificial Sequence: Synthetic coding sequence
  source 1..1143: mol_type = other DNA
atggggtgcttggggaatagcaagaccgaggatcaacgcaacgaggagaaggcccagcgggaggctaataagaaaattgagaagcagctgcagaaagataagcaagtgtaccgcgctacccaccgcctgctccttcttggcgcaggcgagagcgggaaaagcaccattgttaagcagatgcgaatcctccacgttaatgggttcaatggtgactctgaaaaagcaaccaaagtgcaggacatcaagaacaacctgaaggaggccatcgaaaccatcgtggcagccatgtctaacctggtgccgccagtggaactggcgaacccggaaaaccagtttcgagtagactacattctttctgtaatgaacgtgccagactttgactttccacccgagttctatgaacacgccaaagctctatgggaggacgaaggcgttcgggcttgctacgagcgctcaaacgaataccagctaatcgattgcgcccagtactttctcgacaaaattgacgtgattaaacaggctgattacgtaccatctgatcaggatcttctcagatgtcgggtgctgacgtcagggattttcgagacaaagtttcaagtagataaggtcaactttcacatgttcgacgtcggaggacaacgggatgagcgtagaaagtggatacagtgttttaatgatgtaaccgccatcatattcgtggttgccagttccagttataatatggtaatccgagaggacaatcagacaaacagattacaagaggcattgaacctcttcaagtccatttggaacaaccgttggctgcgcacgattagcgtaatcctgttcctgaacaaacaagaccttttagccgaaaaggttttggctggcaagtcaaagatcgaggactatttcccagagttcgccagatacaccactccggaagatgcaacaccagagcccggtgaggaccctagggtgacaagagcgaagtacttcatccgcgacgagtttcttaggatctctaccgcctccggagacggacgtcactactgttacccacacttcacatgtgccgtcgacacagagaatatccgccgagtatttaatgattgtcgcgacataattcagcgcatgcacctgagacagtatgagttgttgtag

SEQ ID NO: 225086 - DNA, 738 bp, synthetic construct
  misc_feature 1..738: note = Description of Artificial Sequence: Synthetic coding sequence
  source 1..738: mol_type = other DNA
atggatcgcaggagtcgagcccagcagtggaggcgagccaggcacaattataacgacctgtgcccaccgatagggcgacgagctgcaaccgcattgctgtggctgtcctgctccatcgcactcctgagagctctggctacctctaacgcgcgtgcacaacaacgcgcagccgcacaacagaggcgatccttcctgaacgcacaccatcgctctggtgctcaggttttcccagaatccccagagtccgagagcgaccatgagcacgaagaagcagatctggagctgagtcttccggaatgtttggagtacgaagaggagtttgactacgagactgagtccgagacggagtcggagatcgaatctgaaaccgatttcgagacggagcccgagacagcccctactactgaacccgaaactgagcccgaggacgaccgagggccagtcgtccctaagcactccacgttcggccagtctctaactcaacggctccatgcactcaagctgagatcccccgacgccagcccaagcagagctcctccctcaacccaggaaccacagagccccagggagggcgaggagctcaaacctgaggataaggaccccagggaccctgaggaaagtaaggagcctaaggaagagaagcaaaggaggcgttgcaaacccaaaaagccgacaagaagagacgctagcccagagtcaccttcaaaaaaaggtccgatcccaattcgcaggcactag

SEQ ID NO: 225087 - DNA, 1188 bp, synthetic construct
  misc_feature 1..1188: note = Description of Artificial Sequence: Synthetic coding sequence
  source 1..1188: mol_type = other DNA
atgggttgcctcggcaattcaaagaccgaggatcaacgcaacgaagagaaagcgcagcgggaggccaacaagaagatcgaaaagcaattgcagaaggacaaacaggtttaccgcgctacacacagactactgctcctaggcgcaggggagagtggaaagagtacaattgtaaaacagatgcggattctccatgtgaatggatttaacggagaaggcggtgaggaagatcctcaggccgctaggtccaattctgatggatctgagaaggcgacaaaagttcaggatatcaagaataacttaaaggaagcaatcgagactatcgtcgccgctatgtctaatctcgttccacctgttgaacttgccaaccctgaaaaccagtttagggtagactacattttgtcggtgatgaatgtacctgacttcgatttcccaccagaattctatgagcatgctaaggccctgtgggaggatgagggtgtgcgggcatgttacgagcggagcaacgagtatcagctgattgactgtgctcagtattttttggacaagatagacgtgatcaagcaggctgattatgtgcctagtgaccaggatctgctgcgatgtcgtgttctaacttctggcattttcgagactaagtttcaggtggacaaggtgaacttccatatgtttgatgtcggaggacaaagagacgaacgcagaaaatggatccaatgcttcaacgacgttactgcaattatttttgtcgtcgccagttcaagttataacatggttattagagaggataaccagacaaaccgccttcaagaagccttgaacctctttaagtcaatatggaataatcgctggttacgcacgatctcagttattctcttcctgaataaacaggatttgctggcagagaaggttcttgccggaaagagcaaaattgaggactactttccggaattcgcccgttacacaacacctgaagatgccaccccggagcccggagaggatcccagagttacgcgcgctaaatactttatccgggacgagttcctgcggatctctaccgccagcggagacgggaggcattattgttacccccacttcacctgcgcagtggatacagaaaacataagaagggtgtttaatgattgccgcgatattatccagaggatgcatctgagacagtacgagctgctttag

SEQ ID NO: 225088 - DNA, 738 bp, synthetic construct
  misc_feature 1..738: note = Description of Artificial Sequence: Synthetic coding sequence
  source 1..738: mol_type = other DNA
atggacagacgatccagagcccagcagtggcgcagggcccgacacaactacaacgacctgtgccccccaatcgggagacgcgcagctacagctctcctctggctgtcgtgttcaatagctttactgagagctctggccacaagcaacgcgcgtgctcagcagagagctgctgcccagcagaggcgctcgtttttgaatgcccaccacaggtcaggcgcacaagtgttccccgagtcgccggaaagcgagagcgaccacgagcacgaggaggctgatctggagctatctttgcctgagtgcctcgaatacgaggaggaattcgattatgagacggagtcagaaactgaaagcgaaatcgaatcagaaaccgacttcgagactgaaccggaaacggccccaactacagaacccgaaaccgaacccgaggatgatcggggacctgtcgtgcccaagcactccaccttcggacagagcctgacccagaggctccacgccctgaagttacgctcccccgacgcctccccgagtcgcgcaccaccaagcactcaggaaccgcagagcccgagggaaggcgaggagcttaagcctgaggataaggacccacgcgatccagaagagagcaaggaaccaaaagaggaaaaacaacggcgaagatgcaagcccaaaaaacctaccagaagggatgcctctcccgagtcgccaagcaagaagggaccaatcccaatccggagacattag

SEQ ID NO: 225089 - DNA, 483 bp, synthetic construct
  misc_feature 1..483: note = Description of Artificial Sequence: Synthetic coding sequence
  source 1..483: mol_type = other DNA
atgggctgccttgggaattctaagacagaagaccaaaggaacgaggaaaaagcacagcgcgaggcgaacaaagaggataaccagacaaataggctgcaagaggcgcttaacctttttaaatccatttggaataaccgttggctccgtactataagcgtcatcctttttcttaacaagcaagacttactggcagaaaaggtcctggctggcaagtcaaaaattgaagattacttcccagagtttgccaggtataccacaccagaggacgcgactccagagccaggagaagatcccagggtgacacgggcaaaatactttatccgtgacgaattcctgaggatatccacagcttccggggacggcagacattactgctatccacattttacttgtgcggtagacacagagaacatccgccgtgttttcaatgattgcagagatatcatccaacgaatgcaccttaggcagtacgagctcctatag

SEQ ID NO: 225090 - DNA, 1185 bp, synthetic construct
  misc_feature 1..1185: note = Description of Artificial Sequence: Synthetic coding sequence
  source 1..1185: mol_type = other DNA
atggggtgccttgggaatagcaagaccgaggatcaaaggaatgaagaaaaggcccagcgcgaggcaaacaagaagatcgaaaaacagctgcagaaggataagcaggtgtacagggccacacacaggttactgctcctgggggcaggtgagtctggtaaaagcaccattgtgaagcagatgaggatcctccatgtgaacggcttcaacggtgaaggtggagaggaggatccacaggccgctaggtcgaactccgatggggaaaaggccacaaaggtccaagacatcaaaaataatctcaaggaagcgattgaaactatcgtggctgcaatgtccaatcttgtgccccctgtggagctagcaaaccctgagaaccagtttcgcgtagattacatcctgtccgttatgaatgttccggactttgatttccccccagagttctatgagcacgcaaaggctctgtgggaggatgaaggggtccgcgcatgctatgagagatccaacgagtaccaactgattgactgcgctcagtatttcttagataagattgacgtgattaaacaggcagattacgtacccagcgatcaggatctactgcggtgccgtgtgctcacttccggcatcttcgagactaagttccaggtggataaggttaacttccacatgttcgacgtgggtgggcagagggacgagagacggaaatggattcagtgttttaatgatgtgacagccatcattttcgtcgtcgcctccagttcttataatatggtgatccgggaagataaccagaccaatcgacttcaggaggcgctgaatttatttaagagcatctggaataacaggtggctacgcaccatcagtgtaattttgttcctcaacaaacaggatctcctggctgaaaaggtgctcgccggaaaaagcaagattgaagactacttcccagagttcgccagatacaccactccagaggacgctaccccggagccgggtgaggatccaagagtgacccgagctaaatactttattcgggacgagtttctgcggatatcgactgcctccggtgacgggaggcactactgctacccgcacttcacatgtgctgtggatactgaaaatatccgaagggtctttaatgattgcagagatatcatacagagaatgcatctgcgccagtacgaactcctgtag

SEQ ID NO: 225091 - DNA, 1143 bp, synthetic construct
  misc_feature 1..1143: note = Description of Artificial Sequence: Synthetic coding sequence
  source 1..1143: mol_type = other DNA
atggggtgtctcgggaactcaaagactgaagaccaaagaaatgaagaaaaggcccagcgtgaagctaataagaagattgaaaagcagctgcagaaggataaacaggtgtaccgggctactcataggctgctgctgttgggcgctggagagtccgggaaatctactatcgtgaaacagatgaggatcctccatgtcaatggctttaacggggattctgaaaaagctacaaaagttcaagacatcaagaacaatctaaaagaggctattgagaccatcgtcgccgctatgtctaacctcgtcccacccgtggaattggcgaatcccgaaaaccagtttagggtagattacattcttagtgtgatgaacgttcccgatttcgacttcccccctgaattttacgagcacgctaaggccttatgggaggacgaaggagtgcgggcttgctacgagagatccaacgaatatcagctaatcgactgcgcccagtacttcttggataagattgacgtgattaaacaggctgattacgtcccatccgaccaggacctgctgcgatgtcgggtactgacctctggaatctttgagacaaagttccaggtggataaggtgaatttccacatgtttgacgtgggaggacagcgtgatgagcgaagaaagtggatccaatgtttcaacgatgtcacagcaataatctttgttgtagcctccagttcatataatatggtgatcagggaggacaatcagacaaaccgactgcaggaggctctcaaccttttcaagtcaatctggaacaaccggtggctgagaacaattagtgtgattctgtttttaaataaacaggatctgttagccgaaaaagtgcttgcaggaaagtccaaaatcgaggattattttccagagtttgctaggtatactactccggaggacgctacaccagaacccggtgaggaccccagagtgactcgggctaaatactttatccgtgatgagtttttaaggatcagtaccgcttctggtgatggacggcattactgctatccacatttcacctgtgctgttgataccgagaacatcagaagggtgttcaacgactgccgagacattatccagcgcatgcacctgcggcagtatgagctgctttag

SEQ ID NO: 225092 - DNA, 738 bp, synthetic construct
  misc_feature 1..738: note = Description of Artificial Sequence: Synthetic coding sequence
  source 1..738: mol_type = other DNA
atggacaggcgtagcagggcacagcagtggcggcgagctcggcataactacaacgacctttgtcctcccattgggaggagagcagccacagccctcctgtggctctcttgttccattgcccttctcagggcgctggccacaagtaacgctagggctcagcagagggctgcagcccagcaacgcaggtctttccttaacgcccaccaccgctcaggagctcaggtgttcccagaatcccccgagtcggagagcgaccacgagcacgaagaagccgatctggaactgagtctgcctgagtgcctcgagtatgaggaagaattcgactacgaaactgagtctgaaacggaatccgagattgagtccgagactgatttcgagactgaaccagagactgccccaacgaccgagccagagacggagcccgaggacgatcggggacccgtcgtccccaaacacagtacctttgggcagtccctaactcagcgtttgcacgctctgaaactgcggtcccccgatgccagtccctctcgggcacctccttctacccaagaaccacagtctcccagagaaggcgaggaactgaagcctgaggacaaagacccgagggacccggaagaaagcaaggagcccaaggaggaaaagcagaggcgacgttgtaagcccaagaaacctacaaggcgcgacgcctccccagaaagccccagcaaaaaagggcctatcccaatcagacggcactag

SEQ ID NO: 225093 - DNA, 3114 bp, synthetic construct
  misc_feature 1..3114: note = Description of Artificial Sequence: Synthetic coding sequence
  source 1..3114: mol_type = other DNA
atgggggttcgaaattgcctgtacgggaataatatgagcggtcaacgtgatatcccgccagagattggagagcagcccgagcagccacctctggaggcaccaggcgcagccgcacctggggcaggtccttcaccagccgaggaaatggaaaccgaaccaccccataacgaacccatcccggtggaaaacgatggggaggcctgtgggcctcccgaggtcagccgccctaatttccaggtcctcaatccggcatttcgggaggccggagcccacgggtcttattcacctccgcctgaggaggctatgccattcgaagcggaacaaccttctctgggaggattttggcctaccctcgagcagccaggcttccctagtggcgtgcatgccggtcttgaggcattcggccctgccttgatggaaccaggcgctttctcaggagccaggccagggttaggtggttacagccctcctcccgaagaagccatgccattcgagttcgatcagcctgcacagcggggttgtagtcagctgctgctccaggtacccgacctggcccctggtggcccaggagccgcaggtgttccgggtgcacccccagaagagccacaggccctccgcccagcgaaggccggaagccgcggagggtacagtcctcccccagaagaaacaatgcccttcgaactggacggcgagggcttcggtgatgattcacctccgcctggcctgtccagagtgatcgcccaggtggacggaagttcccagttcgccgctgtggctgctagctcagccgtgcgtctgacaccagccgctaacgccccaccactctgggtacctggagcaatcggctccccatcccaggaggcggtgcgaccaccatctaacttcactggctcaagcccttggatggagatctcgggtcccccattcgagatcgggagcgctcccgctggcgtcgacgacactccggtaaacatggacagtcctcccatcgctctggacggacccccaatcaaagtgagtggcgcacctgataagagggagcgagctgagagaccaccagtggaggaggaggccgcagagatggaaggcgcagccgatgcagctgaagggggaaaagtgccctctcctggttacggcagtcctgccgcaggcgctgccagcgctgacactgccgcaagagccgctcctgctgcacccgctgatcctgattcaggtgctaccccggaagacccggatagcggaactgcccctgccgatccagattccggtgcttttgccgcagaccctgatagcggtgccgcacctgctgcccctgccgatcctgactccggagcggcacccgacgcacctgccgaccccgatagcggggctgcccctgacgcaccagcagatccagacgcaggtgccgcacctgaagcgcctgccgctccggctgccgcagagactcgcgctgcccacgttgctccagccgctccggacgctggcgctcctaccgcgccagccgcttctgcaactcgggctgcccaggtgcgcagggccgcatcggcagcccctgcctccggcgctagacgtaaaattcacctgagaccaccatcccctgaaatccaggcggctgatccgcctacccccaggccaaccagggcctccgcgtggcgtgggaagtctgagtctagccgaggcagacgtgtctactacgatgagggcgtcgccagttccgacgacgatagcagtggggacgagtctgatgatggtacttccggctgcttgcggtggtttcagcatcgtcgtaacaggcgccgaaggaagccccaaaggaacctgcttcggaattttttggttcaggccttcggaggatgcttcggccgatccgagagcccccagcccaaagctagcagaagcctgaaggtgaagaaagtccctttggcagaaaagaggaggcagatgagaaaagaggcgttggaaaaacgcgcacaaaaacgagctgaaaaaaaaagatccaagttgatcgataagcagcttcaagatgagaagatggggtacatgtgtactcaccggttgttgctactgggcgcaggagagtctgggaaatccacgatcgttaagcagatgcgaatcttgcacgtaaatggttttaatggagagggcggagaagaagacccacaagcagctcgctccaattcggatggggagaaggcaaccaaagttcaggatattaaaaacaacttaaaggaggcaattgagactattgtagcagccatgagcaacctggttcccccagtagagctggcaaaccccgagaaccagttccgcgtcgattacattctcagcgtgatgaacgtgcctgattttgactttcctcctgaattttacgagcatgccaaagcgttatgggaggacgagggggttcgcgcatgctatgaaagatctaacgaataccagctcatcgactgtgcccaatatttccttgataaaattgacgtgattaagcaggcagattacgtgccatctgaccaggatctcctgagatgtagagtcttgacatctggtattttcgagacgaagtttcaggtggacaaggtgaatttccacatgttcgacgtggggggacagagggatgagcgcaggaagtggatccagtgttttaacgatgtaaccgctatcattttcgtcgtggctagctcatcctacaacatggtgattagggaggataatcaaacaaatcgcctgcaggaagctctgaacctcttcaagtctatatggaataatagatggctcaggactatatctgtgattctgttcctgaacaagcaggacctgctagcggagaaggtcctagccggaaaatccaagatagaggactatttccctgagttcgcaaggtacaccacgccagaagatgcaacaccagagccaggagaggaccctagggtgaccagagccaaatacttcattcgggatgaatttctacgcattagcactgcatccggcgacggacgccattattgttacccacactttacttgtgcagtagataccgagaacataagaagagtgtttaacgattgccgcgatattattcagagaatgcacttgagacagtatgagctgctgtag

SEQ ID NO: 225094 - DNA, 342 bp, synthetic construct
  misc_feature 1..342: note = Description of Artificial Sequence: Synthetic coding sequence
  source 1..342: mol_type = other DNA
tgaacaactgaacctgaaaccgaaccagaggatgatcggggacctgttgtgccaaaacatagcactttcggccagagtctaactcaaaggctgcatgctttgaagctgcgttcccctgacgcaagcccatccagagctccaccttctacgcaggaaccacagtctcccagagagggtgaagagttgaagcctgaagataaagacccacgggacccggaggagtccaaggaaccaaaagaggagaagcaacggcgaaggtgcaagcccaaaaagccaaccaggagagacgcgtcccccgagtcaccatcaaaaaagggacctatcccaatcaggagacattag

SEQ ID NO: 225095 - DNA, 501 bp, synthetic construct
  misc_feature 1..501: note = Description of Artificial Sequence: Synthetic coding sequence
  source 1..501: mol_type = other DNA
cccgaatcagagagcgaccatgagcacgaagaggcagatctggagctatccctgccggagtgtttagagtacgaggaggagtttgattacgaaaccgagtccgaaaccgaatccgagattgaatccgagaccgacttcgagactgagccggagacggcccctaccactgaaccagaaaccgagcctgaagacgatcgtggccctgtcgttcccaagcacagcacttttgggcagtctctgactcagagactacatgcattaaagcttcgttcccctgacgcttctcctagtcgggctcctccatccacccaggagccacaatcaccccgagaaggggaggaactgaagcccgaggataaggaccctcgcgaccctgaggaatcaaaagaaccaaaagaagagaagcagcgtagacgttgcaagcctaagaaaccaacaagaagagacgcctcacctgagagtccttcaaagaagggcccaattcccatccgccgtcactag

SEQ ID NO: 225096 - DNA, 5579 bp, synthetic construct
  misc_feature 1..5579: note = Description of Artificial Sequence: Synthetic coding sequence
  source 1..5579: mol_type = other DNA
atggtggacaagaatatctatattattcagggtgagattaatattgtggtgggcgctatcaaaagaaatgcccgatggagtacccacactccactggacgaggagcgggatcctctcctccactcctttggacacctgaaagaggtgctgaacagcattaccgagctatccgaaatcgaaccaaacgtttttttgcgcccttttctcgaggtcattagaagcgaggacacaacaggacctatcaccggcttggctctaaccagtgtgaacaaattcctatcctacgctctcattgatccaacacatgagggtactgcagaaggcatggagaacatggccgacgctgtcacccatgcccgatttgtcggtactgaccctgcaagcgacgaggtcgtattgatgaagatcctgcaagttctgcggacactcctgctgacgcccgtcggcgcacacctcaccaatgaatccgtttgcgaaattatgcagagctgtttcagaatatgcttcgaaatgagactctctgaactactccgcaaatcagccgagcacacgctggtggacatggtgcagctcctttttaccaggctcccccagtttaaggaggagcctaaaaattacgtggggaccaacatgaaaaaactcaaaatgcgggctggaggcatgtctgatagctctaaatggaagaagcaaaagcgtagtcctcggcctcccaggcacatgacgaaggtgacccctggtagtgagttgcccaccccgaacgggacgaccctgtcatccaaccttactggaggaatgccatttatcgacgtgcccacccctatctccagcgcatcctccgaagccgcatccgccgtagtcagcccatccactgattcgggacttgaattctcatcacaaacgacctcgaaagaagacctgacagatctcgagcagccaggaagccccggatactccacagccactgagccgggatctagcgagctgggcgtgcccgaacagccggatctacaggaggggacccatgtagaaaagagccaatccgcatccgtggagagtatccccgaagtactggaagagtgtacctccccggcagaccactccgacagcgcatcggtgcatgatatggactatgtaaacccacgaggcgtccgtttcactcagtcctctcagaaggaggggacggctcttgtgccctatggcctgccctgtattcgcgaattgttcaggttcctgattagcctcaccaacccccacgatagacataactctgaagttatgatccacatgggcctccatctcttgacggtggctcttgaatccgcacctgttgcccagtgccagactctgctgggtcttatcaaggacgagatgtgtaggcacctgtttcagctcctgtcaattgagcggcttaacctctacgctgcatcattgcgtgtgtgcttccttctgtttgagtccatgcgagaacaccttaagttccagatggagatgtatatcaagaagctgatggagataattaccgtggaaaatccaaagatgccttatgaaatgaaagagatggctctggaggccatagtccagctgtggcggatcccatcattcgttactgaactctacataaattacgattgtgattactactgttctaatctctttgaagaactcaccaaactactgagcaagaacgcattccctgtttcaggacagctgtacaccactcacctcctgagtcttgacgcactcctcactgttatcgacagcacagaagcgcactgccaggccaaagtgctgaacagtctgacccaacaggagaagaaagagactgcgagaccatcatgtgagatcgttgacggtactcgcgaagcgtcaaatacggagagaacagcctctgatggcaaggcagttggaatggcatctgatatccccggacttcaccttcctggaggagggaggcttccccctgaacacggcaaatcggggtgtagcgacctggaagaggccgtcgactccggagctgacaagaagtttgctaggaaacctcccagatttagctgtcttctgcccgaccccagagaacttattgaaataaagaacaaaaaaaagctgctcataaccggaaccgagcagtttaaccaaaaacctaagaaagggatacaatttttacaggagaaaggcctgctgactattccgatggataataccgaggttgcccagtggctcagagaaaacccgcgactggataaaaaaatgatcggggagttcgtttctgatcgaaaaaacatcgacctcttagaaagctttgtaagtaccttcagtttccagggtctcagactcgacgaagccctacggttgtaccttgaagccttcagattgccaggcgaagcccctgtcattcaacgactgttagaggccttcactgagcgctggatgaactgcaatggttctccgttcgctaacagcgacgcctgcttcagccttgcctatgctgtaataatgctgaacacagatcagcacaaccacaatgtgaggaaacagaacgctccaatgacgcttgaggaatttaggaagaatctgaagggcgtaaatggtgggaaggacttcgagcaggatatcctcgaggatatgtaccatgcgataaagaacgaagagattgtaatgccggaagagcagaccggacttgttcgggagaattacgtgtggaacgtcctgctccacagaggggctacccctgagggaatatttctgagggtcccaaccgccagttatgacttagacttgtttaccatgacatggggacccactatcgctgccctctcttacgtattcgataaatccctggaagaaacaattatccagaaagcaatctccggctttcgcaagtgtgccatgattagtgcacactatgggctctctgatgtcttcgataacctgataatcagcctctgcaagtttactgctttatcaagcgagtcaattgaaaatctgccttccgtctttggtagcaaccccaaggcgcatattgccgctaaaactgtgttccacctggcgcacaggcatggagacattcttagagaagggtggaaaaatatcatggaggccatgctgcaactgtttcgggcacagcttcttccaaaggccatgatcgaagtggaggattttgttgatccaaatggcaagatttccttacagagagaggaaaccccatccaaccgcggtgaaagtacagtgttatcttttgtgagctggctcactttgagtggcccagaacagtcctcggtaaggggcccatcaaccgagaatcaggaggccaagagagtggcactagagtgcatcaagcagtgtgatcctgaaaagatgattactgagtctaaatttctccagttggaatccctgcaggaattgatgaaggcactggtgagcgtgacccctgatgaggaaacctatgatgaagaggatgcggcattctgcctggaaatgctactgcggatcgttcttgaaaatagggatcgcgtgggttgtgtctggcagactgtgcgcgaccatctgtaccacctatgcgtacaggcgcaggatttttgtttcttggtggaaagggccgtggtgggcctgctgcgtctggcaatcaggctgttgcggagagaagaaatcagcgcgcaggttcttctgagcttgcggattctgttactgatgaaacctagcgtgctatcccgggtatcgcatcaggtggcatacggactgcacgaactgctgaagaccaatgccgctaacattcactctggagacgactgggctacattattcacgttgttagaatgcataggatcgggcgtgaaaccaccagcggctctccaagccactgccagagctgacgctccagatgctggggctcagtcagattccgagttaccctcgtatcaccaaaatgatgtttctcttgaccgaggatatacatcagatagtgaggtttacacagatcacgggagacctggaaagattcatcggtccgcaacagacgccgatgtcgtgaatagtggttggcttgtagtgggtaaggacgatgtggacaactccaagcctgggccaagtagacccggtccttctcctctcatcaatcagtactctctgactgtcggcctggacttgggacctcacgatacaaaatctctgctgaagtgtgtagagtcactcagtttcattgtcagagatgcggcacatatcaccccggacaatttcgaattgtgcgtgaaaaccctgcgaatcttcgtagaagcaagtttaaacgggggttgcaagagtcaggagaaaagaggtaagtcccacaagtatgacagcaaagggaaccggttcaaaaaaaaatcaaaggaaggctctatgctgcgaaggccccgtacatccagtcagcacgccagcaggggcggacagtccgatgatgatgaagacgaaggggttcccgcatcttatcacactgtgtctcttcaggtgtcgcaagaccttctcgacctcatgcatacgttgcatacacgtgccgctagtatttactcttcctgggccgaggagcagaggcatctggagaccggcggacaaaagatagaagctgattctcgcactctgtgggctcattgttggtgccctctcttacaggggatcgcgtgcctatgctgtgacgcgcgaaggcaggttcgaatgcaagctctaacttacctgcagagagcactgttagtgcacgatctccagaagctcgacgcacttgaatgggagtcctgcttcaacaaggtactgtttcctcttttgaccaaactgttggagaacatttctcctgccgacgtgggtggcatggaggaaacacgtatgagggcatcaaccttgctgtccaaggtcttccttcagcacctgagccccctgctctccctctccacctttgctgctttgtggctgactattctcgatttcatggataaatacatgcacgctgggagctccgatctcctttctgaggccatacccgagtcgctgaagaacatgctgttggtcatggacactgctgaaatttttcattctgcagacgcccgtggaggaggaccttccgccctatgggaaattacctgggaaaggattgactgcttcctgccacacttgagagacgagctattcaagcagaccgtcatccaggaccctatgccaatggagccccagggtcagaagcccctggccagtgctcatctgacaagcgcggctggtgatacccgcacacctggacacccccctccacccgaaattccctctgaactaggtgcgtgtgatttcgagaaacctgaaagtcccagagcagccagcagctcatcacctggttctcccgttgcttctagtccttcgagacttagccccacacctgacggaccaccgccattagcacagccacccctgatcctgcagccgctggctagccctctgcaggttggtgtcccaccaatgactctccctatcatccttaaccccgcacttattgaagcaacttctccggtccctctcctcgccactcccaggcctacagacccaatccctactagcgaagtaaatta

SEQ ID NO: 225097 - DNA, 1749 bp, synthetic construct
  misc_feature 1..1749: note = Description of Artificial Sequence: Synthetic coding sequence
  source 1..1749: mol_type = other DNA
atggggggtagcagccccgtgacctccaaggcgatcgtcgatgctgacggcaggatttatatccgcaattggcagggcggtattctttcgggcggtttcgagaaaaaccccaaacctattttcacagaggggaagaaccagctggagatccagaatctgcaggaagactgggaccacttcgaaccattattgagttctcttttacggcgaatgcctgagttagaaacccttgagattatgaagctggtcaactgtcctgagacattcacccctgatatgcggtgcataatgggagagtccccggcagtacaggggtatttcgtactcgccggtatgaattcagccggactttctttcgggggaggcgctggtaagtatctagcggaatggatggttcacggttatccttcggaaaatgtctgggaactggacttgaaacggttcggcgcattacagagctcccgtaccttcttacgccacagggtgatggaggtgatgccactgatgtatgatctcaaagttccacgttgggacttccagacaggcagacagctgaggacaagccccctctatgacaggctcgacgcacaaggcgcacgctggatggaaaagcacgggtttgagcggcctaaatactttgttcccccagataaggatttacttgcactcgagcagtcaaagactttttacaaacccgactggtttgatattgtggagtctgaagtcaaatgctgtaaagaggccgtgtgtgtcattgatatgtcctctttcacaaagttcgagatcacatcgacaggggaccaggctctggaagtcctgcaatacctcttctcaaatgatcttgacgtgccagtaggtcacattgttcacaccggcatgttgaatgaggggggaggctatgaaaacgattgttctatagctcgcctgaataaaagatcctttttcatgataagcccaacagaccagcaggtgcattgctgggcctggctcaaaaaacatatgccaaaggacagcaaccttctgttggaggacgtgacctggaaatataccgcacttaatctgatcgggccaagagctgtggatgtgctctccgaactgagctacgctccgatgacccctgaccactttccctcactgttttgtaaggaaatgagcgtaggctacgcaaatggtatccgggtaatgagcatgacccatacgggcgagccaggattcatgctttacatcccaatcgagggaatggatttcatcgggcgtgatgccttgttacagcagaagcagaatggcgtttacaaaagactgactatgttcatccttgatgatcacgatagcgatctagacctgtggccttggtggggcgagcctatctatcgtaacggccagtacgtcgggaaaaccacatcgtccgcgtatagctactccctggagagacatgtgtgtctgggcttcgtgcacaacttcagtgaggacacaggagaagagcaggtggtgactgctgatttcatcaatcgcggagagtacgagatcgacatagccggttacaggttccaggctaaggcaaaactttatccagttgcctctctctttacccaaaaaagacgtaaggacgacatggaacttagcgcctttctcgccctaccaccccctccacccaacatccactccggactgttcttcccatcacaccctagcctgtctttctcttggtggcaagaagtctgcctaacaggccagaagcaagcgccatag

SEQ ID NO: 225098 - DNA, 3540 bp, synthetic construct
  misc_feature 1..3540: note = Description of Artificial Sequence: Synthetic coding sequence
  source 1..3540: mol_type = other DNA
atggccgcatgtggcagggtccgcagaatgtttcgcctgtctgctgccctacatctccttctcttgtttgcggctggagctgaaaagctaccaggtcagggtgtgcactcccaaggtcagggaccaggcgcaaattttgttagcttcgtgggccaggctggcggaggaggtccagcaggccagcagctaccacaactgcctcagagcagtcagctgcaacagcaacaacaacagcagcaacagcaacagcagccccagccaccccagcccccatttccagccggtggacccccagcccgaagagggggagcaggcgcagggggaggatggaaactggctgaggaagaaagctgccgggaggacgtgactagggtgtgccccaagcacacatggagcaacaatttagctgttttggagtgtctacaggatgtgcgtgaaccagaaaacgaaatcagctcagactgcaaccatttgctgtggaattacaagctgaatctaacgacagatccgaaattcgaatctgtagctagagaggtgtgcaaatctaccataacggaaataaaggagtgtgcagatgaacctgtgggtaagggctatatggtctcttgcctcgtagaccatcggggtaacataaccgaataccagtgccaccagtacatcactaaaatgaccgctatcatcttttccgactaccgcctcatatgtggtttcatggatgactgtaagaatgacattaatatactgaaatgtggttcaattaggcttggggagaaagatgctcactcccaaggggaagtagtgagctgcctagaaaaaggcttagtcaaggaggccgaggagcgcgagcccaagatccaagtgtctgagctgtgcaaaaaagcgatcctccgcgtggccgaacttagcagtgacgatttccatctcgacagacacctgtactttgcctgccgtgacgatcgagagcgattttgtgagaatacccaggcaggtgagggaagagtgtacaaatgtttatttaaccataagttcgaggaaagcatgtctgagaaatgtagagaggccctaacgacaaggcagaaactcattgctcaagactacaaggtcagctacagtctggcgaaatcctgtaaaagtgatctgaaaaaatataggtgtaacgtagaaaacctgccccgttctcgagaggctcgactgagttacctcctgatgtgcctggaatccgctgtgcatcgaggaagacaggtgagcagcgaatgccaaggtgagatgcttgattataggagaatgctcatggaagacttctctctaagccctgaaataatcttgtcttgccggggagagatagaacaccattgttcgggccttcatcgtaagggtcgcacactccattgtttgatgaaagtagtaagaggcgaaaaaggcaacctgggtatgaattgccagcaagctctacagacccttattcaagaaacagatccaggcgcagattatcgaattgacagagccctcaacgaagcctgcgaatccgtcattcagactgcatgtaaacatatccgtagcggagatccgatgattctaagctgccttatggaacatctgtacaccgaaaagatggtcgaggactgcgaacatcggttgttggagctgcagtacttcatatcgagggactggaaactggacccggtcctgtaccgcaaatgccagggggacgcctctagattgtgtcacactcacggctggaatgaaacaagcgagtttatgccacagggcgctgtcttttcatgcctgtatcgccacgcttaccgaacagaggaacaggggaggcgactgagccgtgagtgtcgggcagaggtccagagaatactgcaccagcgggcaatggatgtgaaacttgaccccgcactacaagataagtgtcttatcgacctgggaaagtggtgcagcgaaaaaacagaaactgggcaagaactggaatgcctgcaggatcacctggatgacctggtggtggagtgccgggacatagtcgggaatctgaccgaactagagagcgaagatatccaaatcgaggccctcctgatgagggcttgtgagccaataatacaaaatttctgtcacgatgtggccgataatcagatcgactccggcgacctgatggagtgtctcattcagaacaagcaccagaaggatatgaatgagaagtgtgctataggggtcacacacttccaactagtacagatgaaagacttcagattcagttacaaattcaaaatggcatgtaaggaggatgttctaaaactatgccctaatatcaaaaagaaagtggatgttgtcatctgcctgagtacaaccgtgcggaacgataccctgcaggaagctaaagaacatcgtgtgtctctgaaatgtaggaggcagctgagagtagaggagctcgaaatgactgaggacataagactggaacccgatctttacgaagcatgtaaaagtgatattaagaatttttgctctgctgtgcagtacggaaatgcccagatcatcgagtgccttaaagagaataaaaaacagctatctactagatgtcaccagaaagtcttcaaacttcaggagaccgaaatgatggacccagagcttgactatacactaatgagggtgtgcaaacagatgatcaaacgattttgcccagaagcggactccaagaccatgctacaatgccttaagcaaaacaagaattccgagctgatggatccgaaatgtaagcagatgatcacaaagaggcagatcacacaaaacactgattatcgattaaaccccatgcttagaaaagcctgcaaggcagacatccccaaattttgtcacggcatccttaccaaagctaaggatgactctgagttggagggtcaggtgatctcttgcctcaagctacggtacgcagaccaacggctcagttctgattgcgaggatcagatacggatcattatccaggaatcagccctggattacagactggatccacaactgcagctgcattgctcggacgagatcagttctttgtgcgctgaagaagctgctgcacaggagcaaaccggccaggtggaagaatgcttgaaggtaaaccttctaaaaatcaagaccgagctgtgcaagaaggaggtgttaaacatgctgaaagagagtaaggcggacattttcgtcgacccagtgctacacaccgcttgcgctcttgacatcaagcaccactgtgcggctatcacccctgggagagggaggcagatgagctgtctgatggaagctctagaagataagagggtgcgtctccagcccgagtgcaagaaacggctcaatgaccgaattgagatgtggtcctacgctgccaaagtcgccccagcagatggcttctccgacttggcaatgcaggtcatgacttctccgtcaaaaaattacatcctgtccgtgatcagcggttcaatctgcattcttttccttattggcctaatgtgcggcagaataaccaagcgagtgacacgggaattgaaggacagatag

SEQ ID NO: 225099 - DNA, 3579 bp, synthetic construct
  misc_feature 1..3579: note = Description of Artificial Sequence: Synthetic coding sequence
  source 1..3579: mol_type = other DNA
atggccgcatgcggcagggtgcggcgtatgttccgcctgtccgctgccctacatttgcttctgttgttcgccgctggagccgagaagctccctggtcagggggtacatagtcaggggcagggccctggcgcaaactttgtgagctttgtgggtcaagccggtggtggaggaccggcaggacagcaattaccacaactcccacagagctcccaactgcaacagcagcaacagcagcaacagcaacagcagcagccgcaaccaccacagcctcctttccctgccggaggacctccagctaggcgaggcggagctggcgcaggcggagggtggaagctggcggaggaagagtcttgccgtgaggacgtgactcgagtgtgtcccaaacacacatggtctaataacttggcagtgctagagtgccttcaagacgttcgcgagttactatggaattacaaactgaatttaaccactgacccaaaattcgaatcagtcgctcgcgaggtctgcaagagcactataaccgagatcaaggagtgcgcagatgaaccagttgggaagggttacatggtatcctgcctcgttgatcaccgcggaaatataacagagtatcagtgccatcagtatatcactaaaatgacagcgatcatcttctcagattacagactgatctgcgggtttatggacgattgcaagaacgatatcaacatcctcaaatgtggcagcatccgcttaggggagaaggacgcccattctcaaggtgaagttgtgagttgtctagagaagggccttgtaaaggaagctgaggaacgcgagcctaagatccaggtttctgagctgtgtaagaaagcgatcctcagagtggccgagctgtcttccgacgactttcatctggaccgacacttatacttcgcttgcagagatgatcgggagcgtttttgtgagaatacacaggcgggagaagggcgtgtatacaagtgtctctttaaccacaagtttgaggagtccatgtcggaaaaatgtcgcgaagctttaacaactagacaaaagctcattgcccaggactataaagtctcatactccctggccaagagttgtaaatccgacctcaagaaatatcgttgtaatgtcgagaatcttcctagatcacgggaagcgaggctcagctaccttctgatgtgccttgaatccgccgtccacagaggcaggcaggtgtcatccgaatgtcagggggaaatgcttgattacagacgcatgctgatggaagattttagccttagtccagagattatacttagctgccggggagaaatcgagcatcattgttccggtctgcacaggaaagggcgaaccctccactgtctcatgaaagtcgtgcgcggagagaagggcaatctgggaatgaactgccagcaagctctgcagaccctcatccaggagaccgaccctggggcagattaccgcatcgacagggccctcaatgaggcatgcgaatccgtgattcagacagcctgtaagcatatacgtagcggggaccctatgatcttgtcttgtctgatggagcacctgtataccgaaaaaatggtggaagattgcgaacatcgacttctggaactgcaatatttcattagtcgtgattggaagcttgaccccgtgctgtatagaaagtgtcagggcgacgcatcgaggttatgccacactcacggttggaacgagacatcagagttcatgccgcagggagctgttttctcgtgtttgtatcgccacgcttacaggaccgaagagcagggccgtagactgtcaagagaatgccgggcagaggtccaaaggatcttgcatcaacgcgctatggacgtgaaattagatccagctctccaggataagtgcctgatcgatctcgggaaatggtgcagtgagaagacagaaacaggtcaagagctcgagtgtctccaagatcatctggacgatctggtggtggaatgtagggacatcgttgggaacctgacagaactcgaaagcgaggatatacaaatcgaggcgctgttgatgcgcgcttgtgagcctataatccagaatttttgccatgacgttgccgataatcaaattgattcaggagatcttatggaatgccttatacagaacaagcaccagaaggatatgaatgaaaaatgcgccatcggggtcacacactttcagctcgtgcagatgaaggattttcggtttagttacaagtttaagatggcatgtaaagaggacgtgctgaaactatgtccaaacattaagaagaaggtggacgtggtcatttgtctttcaacaacagttaggaatgacacactgcaagaggccaaggagcaccgcgtcagtttgaaatgtcgaagacagctgcgggtggaggagctggagatgaccgaggatattaggctcgaacctgatctctatgaggcctgcaaatccgatatcaaaaatttctgtagtgccgtccagtacggaaacgcgcagatcattgagtgtctaaaagagaacaaaaaacagctttcaactcgctgccaccaaaaagtcttcaagctgcaggagacagagatgatggatcctgagctcgactatacgctcatgcgggtctgtaaacagatgatcaaacgtttctgccccgaggccgacagcaagaccatgctacagtgtttgaaacagaacaaaaatagtgagctcatggacccaaagtgcaagcagatgattactaagaggcaaatcacacagaacactgactatcgactaaaccctatgctgagaaaagcatgcaaggctgacatccctaagttttgccacggaattcttaccaaagccaaggacgattctgagctggaggggcaggtcatctcctgcttgaaacttagatatgcagaccaaaggctcagctctgactgtgaagatcagatacggatcattatccaggagagtgctctggattacagactcgacccccagctacaactgcactgcagtgacgaaatcagttccctttgtgcagaggaagccgctgcccaagagcaaacaggacaagtcgaggagtgcctcaaggtcaatttgctgaagattaagacggagctttgtaagaaggaggttctgaatatgctgaaggaaagcaaggcagatatctttgtggacccggtgctgcacactgcatgcgccttggatattaaacaccactgtgctgccattacacctggcagaggcaggcagatgtcctgtctgatggaggccctagaggacaagagggttcgcctgcaaccagagtgcaagaagagactgaatgacaggatagagatgtggagctatgcagccaaagtggcaccggcagatgggttcagcgacttggccatgcaagtaatgacaagcccctcaaagaattacatactttcagtaataagcggatccatttgcatcctgtttttgatcggactcatgtgcgggagaattacgaagcgcgtaaccagggaactcaaggatcgactgcaatacagatccgagactatggcatataagggcctggtgtggagccaggacgtaacaggaagtcccgcatag

SEQ ID NO: 225100 - DNA, 2091 bp, synthetic construct
  misc_feature 1..2091: note = Description of Artificial Sequence: Synthetic coding sequence
  source 1..2091: mol_type = other DNA
atgggcaatggaatgtgctctcgcaagcagaaaaggatttttcagaccctcttacttttaactgtggttttcggcttcctctacggtgccatgttgtattacgaactgcagacgcagctcagaaaagccgaggccgtcgccctaaaatatcagcaacaccaggaatcactttccgcgcagctgcaggtggtgtacgagcacaggagccgattggaaaagtctttgcagaaagaacgtctggagcacaagaaggccaaagaggatttcttggtttacaaactcgaggcacaggagacgctgaacaagggcagacaggattctaacagccgctattcagcactaaacgtccagcaccagatgcttaagagtcagcatgaggagttaaagaaacagcactctgaccttgaagaagagcaccgcaagcagggggaagacttttccaggacattcaacgaccacaagcagaaatatttacagctgcagcaggagaaagaacaggagctgtccaagctaaaagagacggtgtacaacttgagagaggaaaacaggcagctaaggaaagcccaccaagatatacacacccaactgcaggacgtgaagcagcagcacaagaacctgctcagcgagcatgagcagctagtggttactcttgaagaccacaagagcgctctagccgcagcccagacacaagtagcagagtataaacagcttaaagacactcttaacaggatccctagtcttaggaaaccagaccccgcagaacagcagaacgtaacccaggttgcccactctcctcagggatacaacaccgcacgcgaaaagccgacaagggaggtacaggaggtgtcaaggaataacgacgtatggcaaaaccatgaagctgtaccagggcgtgctgaagatacaaaactgtatgctccaacccataaagaagccgagttccaagctccaccagaacccattcagcaggaagttgaaagacgggagccagaggagcatcaggtggaagaagagcacagaaaggccctggaggaggaagagatggaacaagtaggccaggctgagcatctggaggaggaacacgacccaagccctgaagagcaggatagggaatggaaagagcaacacgagcaacgcgaagcagccaatttgctggaaggacatgcccgagcagaggtctatcctagcgccaagcccatgataaagtttcagtctccttacgaagagcagctagagcaacagaggctcgctgtgcagcaggtagaagaggcccagcaattgagagaacaccaagaagcgctgcaccagcagcgcctacaagggcacctgctgcgccaacaggaacagcagcagcagcaggtggcccgtgaaatggccctgcagcggcaagctgaactcgaggagggaagaccacaacaccaggaacaactgagacaacaggcccattacgacgcaatggataacgatattgtccagggggctgaagatcaaggcattcaaggagaggagggtgcatatgagagggataatcagcaccaggacgaggctgaaggcgatcccggaaatcggcacgagccaagggagcagggacccagagaggccgaccctgagtctgaggccgatcgggctgcggtggaggacatcaatcctgccgacgaccctaacaaccaaggggaagacgagttcgaggaagctgagcaggtgagagaggaaaacctgcccgacgagaacgaggagcaaaagcagtccaaccaaaaacaggaaaacaccgaggtagaagaacacttggtgatggccggtaacccagaccagcaggaagacaatgtcgacgaacagtatcaagaggaggcagaggaggaagtgcaggaggaccttacggaagagaagaaaagggagctggagcataatgccgaggagacatatggcgagaacgacgagaacactgatgacaagaacaacgatggggaagagcaggaggttagggatgacaatagacctaagggaagagaagagcactatgaggaggaggaagaagaggaggaggacggcgcagctgtggctgagaaatcgcaccgaagagcagagatgtag

SEQ ID NO: 225101 - DNA, 897 bp, synthetic construct
  misc_feature 1..897: note = Description of Artificial Sequence: Synthetic coding sequence
  source 1..897: mol_type = other DNA
atgacaagcctcacccagaggagcagcggtctggtacagcgccgaacagaggcctcccgcaacgccgcagacaaggagcgagcggctggcggaggggcaggctcatccgaggatgacgctcaaagcaggcgagacgagcaggacgacgatgataagggagattcgaaggaaacacggttgacgctcatggaagaagtgctccttctgggtttgaaagaccgagaaggctacacatctttctggaacgattgtatctcctcaggcctacgaggatgcatgctaattgagctcgcgctgcggggtagactgcagctcgaggcttgtggaatgcgaaggaagtctttgttgactagaaaggtgatctgtaagtctgacgctccaacaggcgacgtactgcttgatgaagcgctgaagcacgtgaaagaaactcagcccccagagacagtgcaaaattggatagagctcctgtctggagagacctggaatcctctgaagctgcactatcagttgaggaacgtgcgtgaacgccttgcgaaaaatctcgtggagaagggcgttctaacgacagagaagcagaacttcctcctcttcgacatgacaacgcatccactgaccaataacaacatcaagcagaggctcataaaaaaggttcaggaggctgtgctagacaagtgggtcaatgacccacataggatggatcgaaggctgctggcactgatttacttagcgcacgcaagtgacgtcctcgaaaatgccttcgcacctctcttggatgagcagtatgaccttgcaaccaaacgcgtgcgtcagcttctggacctcgacccagaggtggaatgcctgaaagccaataccaatgaagtactttgggcagtggtcgccgcatttaccaagtag

SEQ ID NO: 225102 - DNA, 846 bp, synthetic construct
  misc_feature 1..846: note = Description of Artificial Sequence: Synthetic coding sequence
  source 1..846: mol_type = other DNA
atgacttctctcactcaaaggtcgagcggtctagtgcaaagacgcaccgaggccagccgtaacgccgcagacagcaggcgcgatgagcaggatgatgacgacaaaggggactccaaggaaacccgtcttaccctgatggaagaagtcctgctgcttggcttgaaggacagggagggttatacatcgttctggaatgactgcatctcttccgggttacgtggctgcatgctgatagagctggccctccggggacgattgcagttggaggcctgcgggatgcgacggaagagtctgcttaccagaaaggttatctgtaagagtgatgcgcctaccggagatgtactgctggatgaggcactcaagcacgtaaaagaaactcaacctcctgagactgtccaaaactggatcgagcttctgagtggtgaaacttggaacccattaaagttgcattaccagctccggaacgtcagagagagactggccaaaaacttggtggaaaagggcgtcctcacgactgaaaaacaaaactttctgctttttgatatgactacacacccattgacaaataataatatcaagcagaggctcattaagaaagttcaagaagccgtcctggataagtgggtcaatgatccccacagaatggataggcgcctcctggcattgatctatcttgcccatgcatccgatgtcttagaaaatgccttcgcccctcttctggatgaacaatatgacctggctactaaaagggtacgacagctgctggacctggatcccgaggtggaatgcctgaaagccaatacaaatgaagtgctgtgggccgtcgtggccgctttcaccaagtag

SEQ ID NO: 225103 - DNA, 858 bp, synthetic construct
  misc_feature 1..858: note = Description of Artificial Sequence: Synthetic coding sequence
  source 1..858: mol_type = other DNA
atgaccactctgacgcacagagctcgcagaaccgagatctctaagaattcagagaagaaaatggaatcggaagaagatagtaactgggaaaaaagtcctgacaatgaagatagtggtgacagtaaagatattagactcacattgatggaggaggtgttgctgctcggactgaaggacaaggagggctacacttcgttctggaacgattgcatcagctctggcctcaggggtggcatattgatcgaactagctatgcggggtaggatctatcttgagcctccaaccatgagaaagaagcgactcttagacaggaaagtcctgctaaaatctgactctcctaccggggatgtacttttagatgaaacgctgaagcacatcaaagccacagagcctactgagaccgtacagacttggatcgagttgctgacaggcgaaacctggaatccctttaaattgcagtaccagttgcgcaatgtgcgtgaaagaattgctaaaaacctggtggagaagggtatactgaccacagagaaacagaactttttgctgtttgatatgacaacccaccccgtgaccaacactacagaaaagcagagactggtaaagaagctgcaagatagcgtgctcgaacgttgggtaaatgaccctcagcgcatggataagcgcactcttgctctgctagtgctggcacactcttccgacgtattggagaacgttttctcttctctgactgatgacaagtacgacgttgccatgaaccgcgcaaaggatttagtggagttagatccagaagtggagggcaccaaaccatccgcgactgaaatgatctgggcggtgttggcagcctttaacaagagctag

SEQ ID NO: 225104 - DNA, 924 bp, synthetic construct
  misc_feature 1..924: note = Description of Artificial Sequence: Synthetic coding sequence
  source 1..924: mol_type = other DNA
atgaccacactgacacatagggctaggaggacagaaatttctaagaattccgagaagaaaatggagtctgaggaagactcaaattgggagaagagcccagataacgaggatagcggtgactctaaggacattcgtcttactctcatggaagaagtgctgcttctggggctgaaggacaaagaggctaatattaatagctggatcactcgttggctgacccctgtaattcccgctctgtggggggcagagggctatacctctttttggaacgattgtatatcttctggtttgcgcggtggtatcttaattgaactggcgatgaggggcagaatctacctcgagcccccaacaatgcgaaaaaaacggctgctcgaccggaaggtactgttaaaaagtgactcaccaaccggcgatgtcctactggacgagaccctgaagcatatcaaagctaccgaaccgactgaaacagtgcaaacttggatcgaactgctgaccggagaaacctggaacccttttaagttgcaatatcagctcagaaatgtgcgcgaacggattgcgaagaatctggtggagaaggggatcctcactaccgagaaacagaacttcttactgtttgacatgactacccatcctgtgaccaatacaactgaaaagcaaaggctagtgaaaaagctgcaggactctgtgctcgagcggtgggtaaacgatcctcagcgaatggataagcgaaccttagccctcttggtgctggcacattcctccgatgtgctcgaaaacgtgttcagcagcctgactgacgataagtacgatgtggcaatgaaccgtgcgaaggatttggttgaattggatcccgaagtcgaaggaacaaaaccatcagcgacagaaatgatttgggctgtacttgctgcattcaacaagtcctag

SEQ ID NO: 225105 - DNA, 810 bp, synthetic construct
  misc_feature 1..810: note = Description of Artificial Sequence: Synthetic coding sequence
  source 1..810: mol_type = other DNA
atgaccacactaacacacagagccaggcgtacggagatttccaaaaactccgagaaaaaaatggagagcgaagaagatagcaactgggagaagagccctgacaacgaggactctggggactccaaggacatcagactgaccctcatggaggaagttctgctgctcggcttaaaggataaggaggccaatatcaattcatggatcactcgctggctcaccccagttattcccgctctttggggcgcagagggatacactagcttctggaacgattgtatcagtagcggtctgcgagggggtatcttgattgaactggcgatgagaggcagaatctatctggagccccctacaatgagaaaaaaaaggttattagacaggaaggttttgttgaaatccgactcaccgacaggagatgtcttgctcgatgagacactcaagcacataaaagcgaccgagccaacagaaaccgttcaaacatggatcgaacttctgaccggcgagacatggaaccccttcaaacttcagtaccaactcagaaatgtgcgagaaagaattgctaagaacctggtggagaaggggattttgactaccgagaaacaaaatttcctcttgttcgacatgaccacccatcctgtgacaaatactaccgaaaaacaaagactggtcaagaaactacaggattccgttctcgagcgctgggtgaacgacccgcagcggatggataagcggactctggcgcttctcgtcttggctcatagttcggacgtgctggagaacgttttcagctccttgacggacgataaatactag

SEQ ID NO: 225106 - DNA, 726 bp, synthetic construct
  misc_feature 1..726: note = Description of Artificial Sequence: Synthetic coding sequence
  source 1..726: mol_type = other DNA
atgactaccctcactcacagggctcgacgtacagagattagcaaaaactccgaaaaaaaaatggaaagcgaggaagattccaattgggaaaaatctcccgataacgaagattctggagacagcaaggacatcaggctcaccttaatggaagaggtgttactgctgggtttaaaagacaaagaggtgctgctcaaaagtgattcccccactggagacgtgttacttgatgaaacccttaaacacataaaagcaacagaacccacagagacggtgcagacatggatcgaactccttacaggcgagacctggaacccatttaagttgcaataccagttgagaaatgtgagagagcggatcgctaagaacctggtagaaaagggaatcttaaccacagagaaacagaatttcctgttgttcgatatgacaacgcaccccgtaactaacactactgagaagcagaggctcgtcaaaaagctgcaggactccgttctggaacgctgggtgaacgacccgcagcgaatggacaaacgcactttggccctgctggttctggctcatagctccgacgttctggaaaacgtctttagcagcttgacagacgacaagtacgatgtggccatgaatagggcaaaggacctggtcgaactagaccctgaggtggaaggaacaaagccttctgccaccgagatgatttgggccgtgcttgccgctttcaataagagttag

SEQ ID NO: 225107 - DNA, 1323 bp, synthetic construct
  misc_feature 1..1323: note = Description of Artificial Sequence: Synthetic coding sequence
  source 1..1323: mol_type = other DNA
atggggctcggtgttagcgccgagcagcccgctgggggtgctgagggattccacctgcacggagtgcaggagaacagcccagcacagcaggccggactggagccatattttgattttattattactattggacactcgagactgaataaggagaacgataccctgaaggccctgttgaaggcaaacgtagagaaaccggttaagcttgaggtgtttaacatgaaaaccatgagggtgagggaagtcgaagtggtcccctccaacatgtggggaggccaaggcttactcggagctagtgtgaggttctgctcctttcgaagagcttccgaacaggtttggcatgtgcttgacgtcgagcctagcagccctgccgctctggcgggacttaggccgtacaccgattacgtggtgggctcagaccagatcctgcaggagtcagaagacttcttcacgcttatcgagagccacgaaggcaagccactgaagctgatggtttacaactcaaaaagcgactcttgtcgcgaagtgacagtgactccaaatgctgcttggggaggcgaggggagtctgggatgtggaatcgggtacggctacctgcatcgtattcctacccagccgcctagttatcacaaaaagcctccagggaccccaccaccttcagccctgcccctgggtgcacccccaccggacgctctgcccccaggccctactcccgaggactcaccctccctggagactggctcacgccagtcagactatatggaagccctactgcaggcccctggatctagtatggaagatcccctgccaggccctgggtctccctctcacagcgcccctgatcctgatgggctgccccacttcatggaaacgcccttgcaaccaccccctcccgttcagcgcgtgatggacccaggttttctggacgtttccggtatatcactgctggataattcaaatgcatccgtttggccgtccttgccctcttctacagaactgaccactacagcggtgtctacttctggacctgaggatatctgcagctctagcagttctcacgaaagaggaggagaggccacttggtcgggatcagaattcgaagtgagcttcctcgattcccccggtgcccaagctcaggcggatcatttgcctcaactcactttgccggactcactcacctccgccgcaagccctgaggatggcctgagcgccgagcttctggaggcacaggctgaagaggagccagcttcaactgagggtcttgacacgggcaccgaagctgaaggactagacagccaggcgcagattagtaccaccgaatag

SEQ ID NO: 225108 - DNA, 4143 bp, synthetic construct
  misc_feature 1..4143: note = Description of Artificial Sequence: Synthetic coding sequence
  source 1..4143: mol_type = other DNA
atggcctccggcagagatgagcggcctccctggcgactcggacgactgttgctgctgatgtgccttcttctcctaggtagcagcgctcgagctgcacacattaaaaaggcggaggcaacaactaccactacctcggccggtgcagaggcagccgaagggcagttcgatcggtattatcacgaggaagagttagagagtgcactcagagaggccgcagcagctggacttcctggccttgccagactgttttctattgggaggagcgtcgaagggagaccattgtgggtcctgaggctaaccgccggacttggtagcctgattcccgaaggagacgcgggtcctgatgccgctggacccgatgctgccggacctctactccctggccgtccccaggtcaagttggtcgggaacatgcacggcgatgaaaccgtgtcacggcaggtgcttatttatctagcacgggaactggccgctggatacagaaggggagaccctaggttggtgcgactgttgaacacaacggacgtttacttactcccaagtctgaaccctgatgggttcgagcgggcacgcgaaggtgattgtggattcggagacggtggaccgtccggtgcatctgggagagataatagccgcggaagggacctcaaccggagtttccccgatcagttttcgacaggcgaaccccctgccttggatgaagttcctgaggtgagggccctgattgaatggatccgcaggaataaattcgtgctcagcggcaacttacacgggggttctgtggtggcctcttaccctttcgacgacagtcctgagcacaaggccaccggcatatatagcaagacaagtgacgatgaagtgttcaagtaccttgctaaggcgtacgcgtcaaaccatcccatcatgaagacaggtgagccccattgtccaggagacgaagacgaaacttttaaggacggcatcaccaatggcgcacattggtatgatgttgagggaggaatgcaggattataactatgtgtgggccaattgtttcgagattaccctggagctgagttgttgcaagtacccaccagcaagccaattgagacaggagtgggagaacaaccgcgagtccctgatcacactcattgagaaagtacatataggggttaaggggttcgtaaaagacagcataacggggtccggcctggagaacgctaccattagtgttgccggaatcaaccataacatcactaccggcaggttcggagacttctaccggctgctggtgccaggaacatacaacttgacggtggttctgacggggtacatgcccctgactgtgaccaatgttgtggttaaggaaggaccagcgaccgaagttgacttcagcctgagaccgacagtgacatctgtcatacctgacacaacggaggcagtgtccaccgcgagcacggtggcaattcctaacatcctgagcggaacctcttcttcatatcagcccattcagcccaaggactttcaccaccaccacttccctgatatggagatcttcttgcgccgtttcgctaatgaatatcccaatattacgcgattatactctctcgggaagtcagtggaatctagagaactgtacgtcatggagatcagcgataaccccggagtgcatgaacctggtgaacccgagtttaagtacattggaaatatgcacggcaacgaagtggtcggcagagagctgctgttaaaccttatcgaatacctgtgtaaaaattttggcactgatcccgaggtgacagacctagtgcacaataccaggattcacttgatgccttccatgaatccggacgggtatgaaaagtcccaggaaggcgactccataagcgtgattgggagaaacaatagtaacaatttcgatctgaacaggaatttcccagaccaattcgtgcagattaccgatcctactcaaccagaaaccattgctgtgatgtcgtggatgaaaagttatccttttgtgctttctgctaatctccatggtggaagcctcgttgtgaactacccctttgacgatgacgaacaggggcttgcgacttactctaagtcgcctgatgatgccgtgtttcaacagatcgctctttcctatagcaaagaaaattcgcagatgttccagggccgaccatgtaagaacatgtaccctaatgaatattttcctcacggaattacgaacggtgctagttggtacaacgtgccaggcggaatgcaggattggaactatctacagactaactgctttgaggtgactattgagctcggatgtgtgaagtacccactggagaaggaactgcctaatttttgggaacagaaccggaggtctcttatccagttcatgaaacaggtgcatcagggagtgcgaggttttgtattagacgccactgacgggcgaggcatcttaaacgccaccattagtgtagctgagatcaatcatccagtgacaacatacaagactggagattattggcgtctgttggtgcctggcacttacaaaataaccgctagtgctcgtggttacaatccagtgaccaagaatgttacagtaaagtccgagggcgcaatccaggttaatttcaccctggttcgctcatcaacagattccaacaatgagagcaagaaaggaaaaggtgctagctcttctacaaatgacgctagcgacccaaccactaaagagtttgaaacacttattaaggacctctctgctgaaaatggccttgaaagtcttatgctgagaagctcctcaaacttggctctcgccctctaccggtaccactcatataaagacctgagtgagttccttcgaggactggtgatgaactacccacatataaccaacctaacaaatctcggccagtctacagagtatcggcacatatggagtctggaaatctccaacaaaccgaatgtgagcgagcctgaggaaccaaagatacggttcgtcgcgggtattcacggaaatgctcccgtggggaccgaactcctgctggccctcgcagagttcctgtgccttaattacaaaaagaaccctgcggtgacacagctagtggacaggacccgcatcgtcatcgttccaagtctgaatcccgatgggagggaacgggctcaagagaaggactgtacctccaagatcgggcaaaccaatgccagaggcaaggacctggatactgacttcacgaataatgcttcccaacccgagacaaaagccattattgagaacctgatccagaaacaggatttctcattgagcgtcgccctggatggaggttccatgctggtgacatacccgtacgacaaaccagtacaaacagtcgagaataaggagacactgaaacaccttgcctctctatatgctaacaatcaccccagtatgcacatgggacagccttcatgccctaacaaaagcgatgaaaatattcctggaggcgttatgaggggagcagagtggcactcccacctcggctctatgaaggattacagtgtaacatatggacattgtcctgagattactgtttacacgtcttgctgctattttccgagcgccgctcggctcccatcgctgtgggcggataataagagatccttgttgtccatgctcgtggaagtccacaagggcgttcacggatttgtcaaggacaaaaccggcaaacctatttccaaggccgtcatagtgctgaacgagggtattaaagtgcagactaaggagggcggatatttccatgttcttcttgcccctggcgtgcacaacatcattgcgattgccgatggctatcagcagcagcattcccaagtgtttgttcaccatgacgccgcatcaagtgtggtaatcgtctttgatacagacaaccgcatattcgggttaccccgagaactggtggtgactgtttccggtgccaccatgtccgccttgatcctgactgcctgtatcatctggtgcatctgtagcataaagagcaaccgtcataaagatggtttccaccgactgcggcagcatcacgatgagtatgaggacgagattcggatgatgtctactggtagcaaaaaaagcttgttgtctcacgagttccaggatgagactgatacggaggaggagaccctgtactccagcaaacattag

SEQ ID NO: 225109 - DNA, 558 bp, synthetic construct
  misc_feature 1..558: note = Description of Artificial Sequence: Synthetic coding sequence
  source 1..558: mol_type = other DNA
atgtttgagactatggccatcgagattgaacagctgcttgcccgtttgacaggggttaacgataagatggccgagtacacaaatagcgctggagtcccttcattgaacgctgcccttatgcacactctgcagcggcaccgggatattctccaggactacacacacgaatttcacaaaactaaggccaattttatggcaatcagggagcgggaaaacctgatggggagcgtgagaaaagatatcgaaagttataaatcaggaagcggtgtgaacaatcgaagaacagaactcttcctgaaggagcacgatcacttgcgcaacagcgatagactcattgaggagacaattagcatagctatggcgacaaaagaaaatatgacttcgcagagagggatgctgaagagtatccattctaaaatgaacactctggccaatcgattccctgctgtgaattccctgatccaacgtataaatcttcgcaaaaggcgggactccctgatcctggggggtgtgatagggatttgtacgatattgctgctgttgtacgcctttcactag

SEQ ID NO: 225110 - DNA, 525 bp, synthetic construct
  misc_feature 1..525: note = Description of Artificial Sequence: Synthetic coding sequence
  source 1..525: mol_type = other DNA
atggctgcagggaccagctcgtactgggaagacctgcgaaaacaggctaggcagttggagaacgagctcgatttgaaactggtgtccttcagcaagctgtgtacatcgtattcccacagcagcacgagagatggaaggagggattctagtgatactactccccttctgaacgggtcttctcaggacagaatgttcgagacaatggccatcgaaatcgagcagttgctcgctcgcctgaccggcgtgaatgataaaatggcagaatataccaactctgccggagttccgagtctcaatgcggctttgatgcacaccctgcagaggcatagagatattttgcaggactatactcatgaatttcacaagacgaaagccaacttcatggccatccgggaaagagaaaacctcatggggtccgttagaaaggacatagagtcatacaaatctggctcgggggtcaacaaccgcagaaccgaattgtttctcaaggagcatgatcatcttcggaaagggtttcagtggtag

SEQ ID NO: 225111 - DNA, 747 bp, synthetic construct
  misc_feature 1..747: note = Description of Artificial Sequence: Synthetic coding sequence
  source 1..747: mol_type = other DNA
atggccgctggcaccagctcatattgggaggacctgagaaagcaggctaggcaacttgaaaatgaactagacctgaagctcgtgagctttagtaagctctgcacctcttactcccacagttcaacgagagatgggaggcgggacagctctgacacaacgcctctgctgaatggtagctcacaagaccggatgttcgagacaatggctattgagatcgagcagttactggcccgactgacaggcgtgaacgacaagatggccgaatatacaaatagtgcaggcgtgcccagccttaacgccgcactgatgcacactctgcagagacaccgcgacattcttcaggattatacccatgagtttcacaagactaaggccaactttatggcaatcagggagagagaaaatttgatgggcagcgtcaggaaggacattgagtcatataaatcaggatctggagtgaataatagacgaacagagctctttctgaaagagcatgatcacctgcggaactctgaccgactgatcgaggagacaatcagtatagctatggctaccaaagaaaatatgacttctcagcgcggaatgcttaaaagcattcactctaagatgaataccctggccaaccgatttcccgctgtaaacagcctcatacagaggatcaatctgagaaagagacgagacagcttaattctagggggtgtgattggcatctgtacaatactgctgcttctgtatgcattccattag

SEQ ID NO: 225112 - DNA, 528 bp, synthetic construct
  misc_feature 1..528: note = Description of Artificial Sequence: Synthetic coding sequence
  source 1..528: mol_type = other DNA
atggcggctggaactagctcctactgggaggacttaagaaagcaggccagacagctagagaacgaactggacctaaaactggtctcgttttccaaactttgtacctcttattctcattcaagcacaagggacggacgcagagataggtatagctctgacacaacacccctgctgaatggttccagtcaggatcgtatgttcgaaacgatggccatcgaaatcgaacagttacttgcccgtctcaccggcgtgaatgataagatggcggaatacaccaacagcgcgggtgtaccatcccttaatgccgcactgatgcacacactgcaaagacaccgagacatcctgcaggtcatctactgggcaagggatgtctttattattacaggcgtttgggtgttttttttcaatccttgcatcggttacgtgcacatctatttgaaaggccaacgcgaaaaaagtgagaaaataaatgcaatgctcaaagggctagtgctcctgtttttcggtgtcaccataattaaattctag

SEQ ID NO: 225113 - DNA, 558 bp, synthetic construct
  misc_feature 1..558: note = Description of Artificial Sequence: Synthetic coding sequence
  source 1..558: mol_type = other DNA
atgtttgaaaccatggccattgaaatagagcaacttctggcccgtttgaccggcgtgaacgacaagatggcagagtatactaactctgcaggagtccccagcctgaacgcagcccttatgcacaccctccagaggcatcgcgatatcctgcaagattacacacatgagtttcataaaacaaaggccaactttatggcaatccgcgaaagggagaatctgatgggatcagtgagaaaagatattgaatcctacaagagcggctccggcgtgaacaacaggagaaccgagctgtttctgaaagaacatgatcacctacgcaatagcgatagactgattgaagaaactattagcatagcaatggcaaccaaggagaatatgacttcccaaagaggtatgctcaagagcatccactcgaagatgaacacattagctaatcgatttccagccgttaacagtctcattcaacgcattaatctgcggaagcgccgtgattctcttattctgggcggagtgattggcatctgcacgatcttgctgctgctttatgccttccactag

SEQ ID NO: 225114 - DNA, 1350 bp, synthetic construct
  misc_feature 1..1350: note = Description of Artificial Sequence: Synthetic coding sequence
  source 1..1350: mol_type = other DNA
atgacaagcttctatagcacatcctcctgtccgctgggctgtactatggctccaggggctagaaatgtgttcgtgtccccaatagacgttggctgccagcctgtggccgaagccaatgctgcttccatgtgcctgctagccaatgtggcccacgccaacagggtcagggtaggctctactcccttgggcaggccttccttatgcttgcccccaacatcgcatactgcgtgcccgttaccgggaacctgccacattcccggtaacatcgggatctgcggcgcttatggtaagaacacactcaacggtcacgagaaggagactatgaaattccttaacgacaggcttgcaaattacctggaaaaggtgcgacaattggagcaggagaacgcagaattggagactaccctcctcgaacgctccaaatgtcacgagagtacagtctgcccagactatcagagttatttccgtactatcgaggagctgcagcagaaaatactgtgctcaaaagctgagaatgccagactcatcgtccagatagacaatgctaagctcgcagctgatgactttaggattaagctggaaagtgaaagaagcctgcaccagcttgtggaggctgacaaatgcggcacccaaaaacttttggacgatgccacattggccaaagctgacctggaagcccaacaggagtctttgaaagaggaacagctgtccttgaagtcaaatcatgagcaggaggtcaagatcctaagatcacagttaggcgaaaagtttcgtatcgaactcgatatcgagccaacaatcgatctgaatcgggtgttgggggagatgcgcgcacaatacgaagccatggtggagacaaaccatcaggacgtcgaacagtggttccaagcacagtcggaaggaatttcgcttcaggccatgtcttgcagtgaggagcttcagtgttgccagagcgagatccttgagttgcgatgcaccgttaatgctcttgaggttgagagacaggcacaacatacccttaaggattgtttacagaactccctttgtgaggctgaagacaggtatggcacagaattggcccagatgcagtctctgatcagcaacctggaggaacagttaagcgagatacgagccgacttggaaagacagaaccaggagtatcaggtccttctcgacgtgaaagctcgtttggagaatgagatagcaacataccggaatctactcgagtccgaagactgcaaactcccttgcaatccttgtagtacacctgcctcatgcacatcatgcccatcatgtggtcctgtcaccgggggatctccaagcgggcacggagcctctatgggtaggtag

SEQ ID NO: 225115 - DNA, 639 bp, synthetic construct
  misc_feature 1..639: note = Description of Artificial Sequence: Synthetic coding sequence
  source 1..639: mol_type = other DNA
atggaccccctgtttcagcagacacacaaacaagtgcacgagattcagtcctgcatgggtaggctggagactgctgataagcaatctgtgcacattgtggaaaatgaaattcaagctagcattgatcaaattttcagtcggctcgaaaggttggaaatacttagcagcaaggaaccacctaataaacgacaaaacgctcgtttgagagtcgaccagttgaagtacgacgttcagcatcttcagactgctctgcgtaacttccagcaccggagacatgctagagaacaacaggaacgacaacgtgaggaattgctgagcagaacctttacaacgaacgatagtgataccaccatccccatggacgaatctcttcagtttaattccagcctacaaaaagttcacaacgggatggatgacttaatattagacggccataacattttggacggcctgagaacgcagcgcttaacccttaagggtacccaaaagaaaatcctggacatcgcaaatatgctgggcctgtctaataccgtgatgagactcattgaaaagagagctttccaggataaatactttatgattggcggaatgctcctcacctgtgtggttatgtttctggtcgttcaatatttgacttag

SEQ ID NO: 225116 - DNA, 588 bp, synthetic construct
  misc_feature 1..588: note = Description of Artificial Sequence: Synthetic coding sequence
  source 1..588: mol_type = other DNA
atggaccccctcttccagcaaacacacaaacaggttcatgagattcaaagttgcatgggcagattggagaccgctgacaagcagagcgtacatatcgttgagaacgagattcaggccagcatcgatcaaatttttagtaggctcgaacggctggaaattctaagttctaaagaaccaccaaacaagcgtcagaatgctcgtctgcgcgtggaccagctcaaatacgacgttcagcatctccagacagccctgcggaattttcagcatcgcagacacgccagagaacagcaggaacgacagcgggaggaactcctttccaggacctttacaaccaatgactctgacacaactattccgatggacgagagcctgcagttcaactcgagccttcagaaggtacacaatggcatggatgaccttatacttgacggacacaatatactggacgggctgagaacccaacggttaacacttaaggttgggagtctgcttggagaccgtgagaaagcctcctgcttcagtttgattcagcagttcagcaactgtgtctacattctcattacctgtccacaaatcgttatcttctag

SEQ ID NO: 225117 - DNA, 699 bp, synthetic construct
  misc_feature 1..699: note = Description of Artificial Sequence: Synthetic coding sequence
  source 1..699: mol_type = other DNA
atggatcccttatttcagcaaactcacaagcaggtgcatgaaatccagagctgtatgggccgtctggagacagctgacaagcaaagcgtccacatcgtggagaacgaaatacaggcctctatcgatcaaatcttcagcaggttggagcgcctggagattctctcctctaaggagccaccaaacaagcgtcagaacgctaggctgcgcgtggaccagctcaagtacgacgtgcagcatctccagaccgccctgagaaatttccagcatcggagacacgcacgcgagcagcaagagcggcagcgagaagagctgttgagccgcacctttacgacaaacgatagtgataccactattccaatggacgaatctctccagtttaacagtagtctgcagaaagtgcataacggaatggacgatctgattttagacggccacaatattctggacggactaagaacccagaggctcactctaaaggggacccagaaaaagattctagacatcgccaacatgctcggcctgtccaacactgttatgagactcatcgagaaacgtgcctttcaagataagtactttatgatcgaaacaaggagccatcatgttgctcagaacgggccagagctgctgtcaagtcgggatccccctgcgtctgcatcccgatccgcaggcatcattgagtttagtgagaagataacgtag

SEQ ID NO: 225118 - DNA, 984 bp, synthetic construct
  misc_feature 1..984: note = Description of Artificial Sequence: Synthetic coding sequence
  source 1..984: mol_type = other DNA
atggctgcggctgccgctatggccgagcaggagtccgcgaggaacggagggagaaacaggggcggtgttcaacgagttgaagggaagctgcgtgctagtgttgagaagggagactactacgaagctcatcagatgtaccgtacactgtttttccgatacatgagtcagagtaaacacaccgaggctagagagttgatgtactccggtgctctgctgtttttctctcacggacagcagaattccgcagcggaccttagtatgctggtgctggaaagtctggagaaggctgaggtggaagtggctgacgaactgctggaaaatctggctaaggttttcagtctgatggatcctaacagtcctgagagagttacctttgtttcaagagccctgaaatggtcttcgggtggcagtggaaagttgggacatcctcgtttgcatcagctgctcgcactgactctatggaaggaacagaattactgcgaatctcgctaccactttctgcacagcgccgacggtgagggatgtgccaatatgttggtggaatattctacgagtagaggcttccgttctgaagtggacatgtttgtggcacaggcagtactgcagttcctgtgtcttaagaataagtcctctgccagtgtcgtttttacaacatacacccagaagcacccatcgatcgaggatggcccacccttcgtggagccactgctgaattttatctggttcctcctgttagccgtcgatggcggtaaactaacagtgtttaccgttctgtgtgagcagtaccagccaagccttagaagggatcctatgtataatgaatatctggatagaatcgggcagctgttcttcggggtccccccaaagcaaacttcgtcttatggcggactcctggggaacttacttacatctctcatgggcagctcggagcaagaggatggtgaagaatctccgtccgacggctcccctatagagctggactag

SEQ ID NO: 225119 - DNA, 1779 bp, synthetic construct
  misc_feature 1..1779: note = Description of Artificial Sequence: Synthetic coding sequence
  source 1..1779: mol_type = other DNA
atggcattacccgaggaggctaaaattaaagatgcatatcacatgctgaagagacagggcatcgtgcaaagcgacccaccaatcccagtagatcgaacacttatcccatccccgcctcccaggccgaagaaccctgtttttgacgacgaggaaaagtccaagctgcttgctaaactccttaaaagtaagaatcccgatgaccttcaggaagccaacaagctgataaagagcatggttaaagaagacgaggcccgaattcagaaagtcacaaagagactgcacacactggaagaggtgaacaacaacgtgcgcctcctctccgaaatgctgctgcactattcccaagaggatagctccgacggtgatcgtgagctcatgaaggaacttttcgatcagtgtgagaacaagagacgtacactatttaagcttgcgagcgaaactgaagataatgacaacagcttaggggacattctgcaggcctccgataatctgtcccgtgtgatcaatagctacaaaacaattattgaaggccaggttataaatggggaggtagcaaccctcaccctgccagatagtgaaggcaactcccagtgcagcaaccagggaacccttattgatctcgccgagctcgatactactaacagtctcagctccgtgcttgcgcctgcccctacgcctcctagctccggtatccctatcctgccaccacctcctcaggcgagtggcccacccaggtctaggtcatcctcccaggctgaggccactctgggaccgagctccactagtaacgctctgtcttggttggatgaggagctgttgtgcctcggacttgccgatcccgctccgaatgttcccccaaaggaaagtgccggaaacagccagtggcacctgcttcagcgagagcagtctgatcttgacttcttctcacctagacctggaacagccgcatgtggcgcttcggacgccccactcttacagccgtctgccccttcatccagttcaagccaggcaccactgccacctccattccccgctccggtagtccctgcatccgtacctgcccctagtgctggatcaagcttattctccacaggtgtggcaccggcactagcccctaaagtggagcccgcagtccctggacaccacggtctggcactgggaaattccgcactgcaccatctggatgcgctggatcaactactcgaggaggccaaggtgaccagtggactagtcaaaccaaccacgtctccactcatccccactacaacaccagccaggccactgctgccattttctacaggcccaggctcccctctcttccaaccactgagcttccaaagccagggttcaccgccaaagggccctgaactttcactcgccagtattcacgtgcccctcgagagcattaaaccatccagtgccctacctgtcacagcttatgacaagaacggatttaggatcctgttccactttgccaaggaatgtcctcccggtagaccagacgtccttgtagttgtagtgagcatgctcaatactgccccacttcccgtgaagtcaatcgtgctgcaggcagccgtgcctaaatcaatgaaggtgaagctgcagcccccatccggaacagaactgagccctttttctccaattcaacccccagcggctatcacgcaagtaatgctgttggccaatcctttgaagaagcaggtgctatcattcttggggaaggcatgcctccagccatggggacaggcaatactgcttaccactagttgtctggcgtag

SEQ ID NO: 225120 - DNA, 1956 bp, synthetic construct
  misc_feature 1..1956: note = Description of Artificial Sequence: Synthetic coding sequence
  source 1..1956: mol_type = other DNA
atgaagaactgtggcaggagatttcataacgaggtcggcaagtttcggtttcttaatgagttgatcaaggtcgtttctccaaagtacctgggcgatcgagtgtctgaaaaggttaagacaaaagtgatagaattgttatattcctggactatggctctgcccgaggaggcaaagatcaaagacgcctatcacatgttgaaaaggcagggtattgtacaatcagaccccccaatccccgtagatcggacccttattcctagcccacctcctcgtccaaaaaaccccgtgttcgatgatgaggaaaagagcaagctcctggcaaaactcttgaagagtaagaatcccgatgatctccaggaagccaacaaacttatcaagagcatggtgaaagaagacgaagcccgaatccagaaggtgacaaagcggctgcatactctagaagaagttaacaacaatgtccggcttttgagtgagatgctgctgcactactcccaggaggacagcagtgacggagatagggagcttatgaaagagctgttcgatcagtgcgagaacaaaagacggactctatttaaattggcgtctgaaacagaggataacgacaatagtttgggagatatactgcaagccagcgataatctcagccgagttatcaatagctacaagaccatcatagagggtcaagtcatcaacggcgaggtcgccaccttgactctccctgattcagaggggaacagtcagtgcagcaatcagggaaccctgatcgacctcgctgagctggacaccaccaattccctgtcctccgtcctggccccagcccctacacctccaagctcaggcatcccgatcctcccacctccgcctcaggctagcggaccaccgaggagcaggagctcctcccaagccgaggccacactgggcccttcttctacttctaatgcactgtcttggctcgacgaggagcttctctgccttggtctcgctgatcccgcaccaaatgtgcctcccaaagagagtgctggaaatagtcagtggcatctgctgcagcgggagcagagcgatttagacttcttctctccacggcctggtaccgccgcttgtggcgctagtgatgctccattgctgcaaccctccgccccttcttcctcttcctctcaagcgccactgcctcccccattccccgctcctgtggtcccagcttccgtccctgctccttctgcgggttcttcattattcagtactggtgtggctcccgctctggcaccgaaagtagagcctgcggtgccgggacatcacggcctcgctcttgggaatagtgcgctacaccaccttgatgccctcgaccagctgctcgaggaggcgaaagtcacttctggccttgttaagcccaccacatctcctctcattccaacaactacccccgcacggccattactccctttttctaccggacccggatcgcccctatttcagcctttatcctttcaatcccaggggtcccctcctaaaggccctgaactctccctcgcatctatccacgttcccctggaaagtattaagccgtcatcagctctgccagtgacagcctatgacaagaatgggttccgcatactgtttcacttcgcgaaggaatgtccacctggcagaccagacgtgctagtggttgtggtgtctatgctgaacacagccccactgcccgttaagagtatcgtcctccaagccgctgtgcccaagtccatgaaagtgaaactgcagcctccatccggtactgaactgagcccatttagcccgatccagccccctgccgcaatcactcaggtcatgcttctggcgaacccgctgaaggagaaggttcgccttcgatacaagctgactttcgccttgggggagcagctgtcaactgaggtgggcgaggtcgaccagttccctccggttgagcagtggggaaatctatag

SEQ ID NO: 225121 - DNA, 1365 bp, synthetic construct
  misc_feature 1..1365: note = Description of Artificial Sequence: Synthetic coding sequence
  source 1..1365: mol_type = other DNA
atgagcgccggtgggccttgtccagccgctgcaggaggagggccaggcggtgcctcctgctctgtcggtgcgccaggcggtgtctctatgttccgatggctggaggttctagaaaaggaattcgacaaggcgtttgtggatgtggacttgctattgggggaaattgacccagatcaggctgatatcacgtacgagggcagacagaagatgactagtctctcctcttgtttcgcacagttgtgccacaaagctcagtctgtgagccaaataaaccataagttagaagcgcaactggtggatcttaagagcgagctgaccgagacacaggcagagaaggtagtgctggagaaggaggtccacgaccagctgctgcagcttcattcaatccagttgcagctgcacgccaaaacaggccagtcggccgactcgggaacaatcaaagctaaacttgaacgtgaactcgaagcgaacaagaaagagaaaatgaaggaagcacagctggaggcagaggtgaagctgctccggaaagaaaacgaggctctgagacggcatattgcagtactgcaggccgaagtctacggggctagactcgcagcgaaatacctggataaggaactagctgggagggtccaacagattcagctactagggagggatatgaagggacccgctcacgacaagctgtggaaccagctggaggctgagatccaccttcaccgccacaaaactgttatcagggcgtgtcgcggtagaaatgatctgaagcggccaatgcaggcaccccctggccatgaccaggacagtctcaaaaaaagccagggtgtcggacctattcgaaaagtgctgctgttaaaggaggatcacgagggcctcgggatttctatcaccggcggtaaggaacacggtgtgcccatactgatcagcgagatccaccccggtcaacctgccgatcgctgcggaggactccacgtgggcgacgccatcctggctgtcaacggtgtaaatctccgagatactaagcataaagaagcggtgacaatcttaagccagcagcggggagaaatcgagtttgaggtggtgtatgtggcccctgaagtggactcggatgatgaaaacgtcgaatatgaagatgaatccggtcaccgctatcgcctgtatctggatgaactcgaaggaggagggaaccccggagctagctgcaaggacacctccggggagatcaaagtcctccagggattcaataaaaaggcagtcacagacacacatgagaatggggacctcgggaccgcatcagaaacccccctagatgacggcgctagcaaactcgatgatctccacacactgtaccacaagaaatcatactag

SEQ ID NO: 225122 - DNA, 1389 bp, synthetic construct
  misc_feature 1..1389: note = Description of Artificial Sequence: Synthetic coding sequence
  source 1..1389: mol_type = other DNA
atgtccgcagggggtccatgtcccgctgctgccggtgggggaccaggtggggcttcgtgtagtgtcggtgctcctggcggtgtgtccatgtttcgctggttggaagtgcttgaaaaggaatttgacaaagccttcgttgacgtggatcttcttttgggagaaatcgaccctgatcaggcggatatcacctatgagggaaggcaaaagatgacctcactctcttcatgtttcgcccagctctgtcacaaggcacagtccgtttcccagatcaatcacaaactggaagcacagctcgttgacctcaaatcagaactgaccgagacccaagccgaaaaagtcgttttggaaaaggaggtgcacgaccaacttctgcagctacatagcatacagctgcaactgcacgccaaaacaggacagagcgctgactccggaacaatcaaggccaagttgtcgggaccctcagtagaggaactcgagagggaattagaagccaataagaaggagaaaatgaaagaggcacagctggaagccgaagtcaagctgctgaggaaagaaaacgaggcactacggcgtcacattgccgtgctccaggcagaggtctatggggcaagactggctgcaaagtatctggacaaagagttggctgggagggttcaacagatccaactgctggggagagacatgaaggggccagcacacgacaaactttggaatcagttggaggccgagatccacctccaccgccacaagacagtgatacgcgcatgtcggggacgcaatgatcttaagcggccaatgcaagcaccacccggtcacgatcaggacagtctgaaaaagagccagggggtggggcctatccgaaaggtattgttactgaaagaagaccacgagggcttaggtatttccattacaggaggaaaggaacatggggtccccattctcatctcggaaatacatccgggtcagcccgcagacaggtgcggtgggctgcatgttggagatgccatcctggcagtcaatggagtgaacctgcgcgatacaaaacacaaagaagccgtgaccattttatctcagcagcgcggagaaattgagtttgaggtcgtatatgtggccccagaggtggactctgacgacgaaaatgtggaatacgaggatgaatcgggacaccgctatcgtctgtacctggacgaactcgaaggtggtggtaacccaggggcttcctgcaaggatacttccggggagatcaaggttctccaaggattcaataagaaggctgtaaccgatactcacgagaacggcgacttaggtaccgcttccgagacacccctggacgacggcgcttcgaagctagatgatcttcatacactgtaccataagaaaagttactag

SEQ ID NO: 225123 - DNA, 1389 bp, synthetic construct
  misc_feature 1..1389: note = Description of Artificial Sequence: Synthetic coding sequence
  source 1..1389: mol_type = other DNA
atgagcgccggaggaccgtgtccagccgctgccggaggtggcccaggcggtgcttcctgctcagtgggagcaccgggtggagtctcaatgttcagatggctggaagttctcgaaaaggaattcgacaaggcattcgtggatgtcgatctgctcctgggcgagatcgaccctgaccaggccgatattacatatgaaggtcgccagaagatgacatctctgagctcttgcttcgcgcagctgtgtcacaaggcacaaagcgtctcccaaatcaaccataaactcgaggcccagctggttgatctgaaatctgaacttactgaaactcaggcagagaaagtcgtcctggagaaggaagtgcacgaccagctgttacagctgcactccatccagctccagctacatgctaagacgggacagtccgctgattcagggacgatcaaagcaaaattggtatctcgatcctccagtaagatggagagagagctagaagccaataaaaaagagaaaatgaaagaagcccagctcgaggcagaggttaaactgctcagaaaggagaacgaagctctgcgacggcacatcgctgtcctgcaggcagaggtgtatggggctaggctggcagctaagtatctggacaaagaactcgccggaagagtccagcaaatacagctgttaggcagggacatgaagggccctgcccacgacaagctgtggaatcaactggaagcggagattcaccttcatcgccacaaaaccgtaatccgcgcttgtcgtggacgaaatgacctgaagaggccaatgcaggctccgccagggcatgatcaggacagtttgaagaagagccagggagtgggaccaatcaggaaagtgctcctacttaaagaagatcacgagggcttgggtatctccattacaggaggaaaagaacacggagttcctatcttgatttccgagatccatccaggtcaacccgctgacaggtgtggcggactgcacgtgggagacgcgatcctcgcagtgaatggcgtgaacctacgtgataccaaacacaaggaagctgttacaattttgagccaacagaggggggagatcgagtttgaggtggtatatgtggcccctgaggttgattcagatgatgagaatgtcgagtatgaagacgaaagtggccatagatacagactgtatctggatgagcttgagggcggaggcaatcctggagcctcctgcaaggacacaagtggagaaatcaaggtacttcaaggatttaacaaaaaagccgtgaccgacacccacgagaacggcgatctgggcactgcctccgagacccccctggacgacggggcatcaaaacttgatgatctacatacattatatcacaaaaagtcttactag

SEQ ID NO: 225124 - DNA, 1659 bp, synthetic construct
  misc_feature 1..1659: note = Description of Artificial Sequence: Synthetic coding sequence
  source 1..1659: mol_type = other DNA
atggagcctgccatggagccagaaacattagaagcacggattaatagagctacaaatcccctgaacaaggaacttgactgggcttccatcaatggattttgtgaacagttgaatgaagattttgagggacccccactggccactagattgcttgcccacaaaatccaatctccacaggagtgggaagctatacaggccctgaccgtgctcgagacttgcatgaagtcatgtggaaaaagattccacgacgaggtcggcaaattcagatttctgaacgaactgataaaggtggtcagccctaaatatttgggaagtaggacctctgagaaagttaaaaacaaaattttagagctgctctattcatggactgtcggtctccccgaggaagtgaagattgcggaggcctaccagatgctcaagaaacagggtattgtcaaaagtgatcccaagttacctgacgatacgacattcccactgccccctccccgtcccaaaaacgtcatcttcgaggacgaagaaaagtctaaaatgctggctcggctgttaaaaagctcccatcctgaggatctccgtgccgctaacaaactcattaaggaaatggttcaggaggaccaaaagaggatggagaagatcagtaagagggtcaacgctattgaagaagtcaacaataacgtgaagttattgaccgagatggttatgtcccacagccaggggggagcagccgctggttctagcgaagatctgatgaaagagctctaccaaagatgcgaacgcatgcggcctacattatttcggctggcttcagacactgaggacaatgacgaggcccttggactgagcgatcccacccctcccagcggaccaagtttagatggcactggctggaactcctttcagagctccgacgccacagagccacccgcaccagcactggcccaggctccatctatggagagtaggccaccggctcagacttccctgccagcctcctcaggacttgacgacttagacttgctgggaaaaacactgctccagcagtcactcccaccagagtctcagcaagttcgttgggagaagcagcagccaacacctcggctgactctgcgagatctacaaaataaatcttccagctgctcctccccttcttccagtgctacttcactgctgcacacagtgtcccctgagcctccgcgtccgcctcaacagcctgtacccactgaactgagtttggctagcatcactgtacctctggaaagtatcaagccgtccaacatcctgccagtgacagtttacgaccagcatgggttccggatactcttccactttgcgagggatccgcttcccggacgcagcgacgtgctggtcgtggtggtcagcatgttgagtaccgctcctcagccaatcagaaacattgtcttccagagcgctgttcccaaggtgatgaaagttaagctgcagcctccaagtggcaccgagctgcccgcattcaaccctatcgtgcaccccagcgcaatcactcaggtattgttacttgcaaatcctcagaaggaaaaggtccggttacgctataaattgaccttcacaatgggcgaccaaacttataatgagatgggtgatgtcgaccagttccctccccctgaaacatgggggagcctgtag

SEQ ID NO: 225125 - DNA, 117 bp, synthetic construct
  misc_feature 1..117: note = Description of Artificial Sequence: Synthetic coding sequence
  source 1..117: mol_type = other DNA
atgaaatcatgcgggaagcgctttcatgacgaggttgggaaatttcgttttttaaatgagctcattaaagtggtgagccccaaatatttagggagccgcacttctgagaaggtgtag

SEQ ID NO: 225126 - DNA, 1821 bp, synthetic construct
  misc_feature 1..1821: note = Description of Artificial Sequence: Synthetic coding sequence
  source 1..1821: mol_type = other DNA
atggagcctgctatggagcccgagacccttgaggccagaatcaatagagcgacaaacccactgaacaaggaactggactgggcctccattaatgggttctgcgaacaattaaatgaggacttcgagggccctcccctcgcaacccgtctgctggcgcataagatccagtcccctcaagaatgggaagcgatccaggccctcacttatctggggagtcgaaccagcgagaaagtgaagaacaaaattctcgagctactctatagctggacggtggggcttcctgaagaggtgaagattgccgaggcctaccagatgctcaaaaaacagggaatcgtgaaatccgatcccaaactgcccgacgacacaaccttccccttgccccctcctcggccaaagaatgtgatttttgaggatgaagagaagtctaagatgctggcgaggctgttgaagagtagtcatcctgaggacttgagggccgcaaacaaactaatcaaagaaatggtccaagaagaccagaagcggatggagaaaattagcaaacgggtgaatgcaatcgaagaagtgaacaataatgtaaaactgctcacggaaatggtgatgtcccactctcaggggggtgccgctgcaggaagttccgaggacctgatgaaagagctgtaccagaggtgtgagcggatgcgcccaacactattccggctggcctccgacactgaagacaatgacgaggctctcgccgaaatactgcaggcgaacgataacctaacgcaggtcattaacctgtataagcagctcgtcaggggggaggaggtgaatggcgatgccactgccggatccatccccggaagtacatccgccctcctggacctgagcgggctcgacttgccaccagccggaaccacctaccccgctatgccaaccaggcctggggaacaggcttcacccgagcaacccagcgcgtctgtgagcctgctggatgatgagctgatgtcgctagggctgagtgatccaacaccaccttcaggaccttcacttgatggcactggatggaattcattccagtcttcagatgctactgaacctcctgctccagctcttgcccaggcgccatcaatggaatcccggcctccggcacagacaagcctgccagcaagttccggtttggacgaccttgatctgctcggtaagactctcttacagcagtccctgccaccggagagccaacaagtgcgttgggagaagcaacagccgaccccgcgactgacactacgtgatctccaaaacaagtcaagctcttgttcttctccgtcgtcctctgcgacctccctgctgcacacagtaagcccggagccacctcgacctccccagcagccagttccaaccgagctgtcactcgccagcattacagtgccgcttgaaagtataaagcctagtaatattctgcctgtgaccgtttatgaccagcatgggtttcggattctgttccactttgcacgtgatccactacctggacgatccgacgtgcttgttgtagtagtatcaatgttatcaactgctccacagcccatacgaaatatcgtgtttcagagtgcagtgccaaaagtgatgaaggtgaagctccagccaccatctggcaccgaactgcctgcttttaatcccatcgtacacccttccgccatcacacaggtcctgctgctcgcaaaccctcagaaagagaaggtgcgtcttcggtataaactgacatttacaatgggggaccagacatacaacgagatgggcgacgtggaccagttccctcccccagaaacatggggaagtttgtag

SEQ ID NO: 225127 - DNA, 1920 bp, synthetic construct
  misc_feature 1..1920: note = Description of Artificial Sequence: Synthetic coding sequence
  source 1..1920: mol_type = other DNA
atggagccagctatggagccggaaacactagaggcacggatcaatcgcgctacaaaccctctcaataaggagctcgactgggcttctataaacggattctgtgagcagcttaatgaggactttgaggggcctccgctggctactcgcctattggctcacaaaattcagtcaccacaggaatgggaggccatacaggcgctgactgtgttggaaacctgtatgaaatcctgcggcaagcggttccacgacgaagtgggaaagtttaggtttctgaacgagctgatcaaagtagtcagcccaaaatatctgggttccaggacctccgaaaaagtgaaaaataagattctagaactcttatatagttggacggtgggattgccggaggaagtgaaaattgccgaggcctaccaaatgttgaaaaaacagggaatcgtcaaatcagacccgaagctgccagatgataccacgtttccgctccccccaccgagacctaaaaacgtgatctttgaggacgaagaaaaaagtaaaatgctggccagactgctaaagtcatctcatccggaagacctacgtgccgcaaacaagctgatcaaggagatggtgcaggaggatcagaagcggatggaaaagattagcaaaagggtaaatgctattgaggaagtgaataacaatgttaaactgttgacagagatggtgatgtctcattcccagggaggcgctgccgctggctcgtcagaggacctcatgaaagaactctaccaacggtgcgagaggatgcggccaaccctattcaggctcgctagtgacactgaagacaacgatgaagcacttgccgagattcttcaggccaacgacaacttgacgcaagtcattaatctttacaaacagttagtcaggggggaagaggtgaacggcgacgcaactgctggaagtatccctgggtccacgagcgcactgctcgacctgagtggtctggacctgccgccagccggtaccacctatccggcaatgcccactagacctggcgagcaggctagcccagagcagccttcagcctcagtgagcttgctggatgatgaactcatgagtctgggtctgagtgatcccaccccaccttccggaccgtctttggacggcacaggatggaacagcttccaatcctctgatgcaactgaacctcccgctccagctctggcacaggcgcctagtatggagtctcgaccccctgcacagacttccctgcctgcgagctcgggcctcgatgacttggacctcctgggcaaaacactgcttcaacagtcgctaccacccgaaagccagcaggtcaggtgggagaagcaacagccaactccaagactcaccctgagggatcttcagaacaaatcatcctcctgcagctcaccttcgtcttctgccacttcccttcttcacacggtgagcccagaacctcccagacctccccagcaacccgtcccaacagaactttctcttgccagtatcaccgttccactcgaaagtatcaaaccctctaatatattgcctgtcactgtgtacgatcaacatgggtttcgcatcctttttcattttgcccgagacccgctgcccggaagatcagacgtcttagttgtggtcgtatcgatgctctcaactgctccccagccaattagaaacatcgtcttccaatctgccgtccccaaggtgatgaaggtaaaactgcagccaccttccggtaccgagttgcccgcatttaatcctatcgtccaccccagcgcaataacccaggtgctgcttttggccaatcctcagaaggaaaaagtcagactgagatacaagcttacattcaccatgggcgatcagacctataacgagatgggggatgtggatcaatttcctccaccagagacctggggctctctctag

SEQ ID NO: 225128 - DNA, 1971 bp, synthetic construct
  misc_feature 1..1971: note = Description of Artificial Sequence: Synthetic coding sequence
  source 1..1971: mol_type = other DNA
atggaacctgccatggaaccagaaaccttggaagcacgaatcaatcgtgccactaaccctctaaacaaagagttggattgggccagcattaacggattctgcgagcaactgaacgaagactttgaagggcctcctctagcaacccgcctcctggcccacaaaatccagtctccccaggagtgggaggccatccaggccctcactgtaaggaggggcgaagctacaatacggcctcctccatgtgatgacaccaaagtgctcgagacttgtatgaaaagctgcggaaagagatttcacgatgaagtcgggaagtttaggtttcttaacgagttgatcaaggtggtctctcccaagtatctagggagtcggacctctgaaaaggtaaagaacaaaatcctggagctgctgtatagttggacagtggggctgcccgaggaagtgaagattgcagaggcttatcagatgctaaagaagcagggtattgttaaaagtgacccaaaactccctgacgacacaacctttccgctccccccacccaggcctaagaatgtgatctttgaagatgaagagaagagtaagatgttggcccgattgctgaagagtagtcacccggaagaccttcgggcagccaataagcttatcaaggagatggtgcaggaagatcagaagaggatggaaaaaattagcaagagagtgaatgcaatagaggaggttaacaacaacgttaaactgctcacggagatggtgatgtcccactcccaaggaggagctgcggcaggaagctcggaggatctgatgaaggaactctatcaacgctgcgaacgaatgcgaccgacactgttccggttggcctctgacacagaggacaacgacgaggcactagcggagatcctgcaggcgaacgacaacctcactcaggtgataaacctgtacaagcagctcgtgaggggggaagaggttaatggcgacgcaactgcgggttcgatccccggatccaccagcgctctgcttgatctgagcggcctcgacctgcctccagcgggtacaacttaccctgccatgccaactcggcctggcgaacaagcgagcccagagcagccatccgcttccgtctcactcctggacgatgaactcatgagtctgggactctccgatcctacccctccgagcgggccttctttggatggaacaggctggaactcattccagagctccgatgcaaccgagccaccagcgcctgctttagcccaggcaccttctatggagtctagaccacctgcccagacaagcctgccagcttcttccgggctcgacgatttggacctgctggggaagactctcctgcagcagtcactccctcccgaatcccagcaagtgcgctgggagaaacagcaaccaacacccaggctgacactaagggatctgcagaacaagagctcttcgtgctcatcaccctccagcagtgccacctccctactgcataccgtgagcccagagccacccagacctcctcagcagccagttccaaccgagctctctctggccagtatcaccgttcctcttgagagcataaagccatccaacattctgccggttaccgtgtacgaccaacacggattcagaattcttttccattttgcccgagatcccctgcctgggaggagcgatgttctggtcgtggtggtgagcatgctctccacagccccacagccaatccgcaatatcgtgtttcagagcgcagtccccaaggttatgaaagtcaaactgcagcctccctccggcaccgagctgcctgcatttaatcccatcgtccacccatctgcgatcacacaggtactgctgttagccaaccctcagaaagagaaagtacgcctccgttacaaactgactttcacgatgggtgatcagacctataacgagatgggcgacgtcgaccagttcccaccccctgagacttggggaagcttgtag

SEQ ID NO: 225129 - DNA, 1701 bp, synthetic construct
  misc_feature 1..1701: note = Description of Artificial Sequence: Synthetic coding sequence
  source 1..1701: mol_type = other DNA
atgaaaagctgcggcaaacgtttccacgacgaagtgggaaagtttcgttttctaaatgagctgattaaagtcgtgagtccaaagtatctcggctcacgtacttccgagaaagttaagaacaaaattctggagctgctctatagctggaccgtggggctgccagaagaggtgaaaatcgccgaagcctaccagatgctgaaaaagcaaggcatcgtcaagagtgatcctaagctacccgacgatacgactttccccctgcctcccccacggccaaaaaacgtcattttcgaagacgaggaaaagagcaagatgctggcccgtctgctgaaatcctctcaccctgaggatcttcgggctgccaacaagcttattaaggaaatggtgcaggaagatcaaaaacggatggagaagatttccaagagagtcaatgccattgaggaggtgaacaacaatgtcaaactgttaactgagatggttatgtctcattcacaggggggagcggcagccggttcctcagaggatcttatgaaagaattgtatcaaagatgtgagaggatgaggccgacactgtttagactcgccagcgatactgaggataatgacgaggccctcgccgaaatcttgcaggccaatgataacttgacacaggtgatcaacctgtacaaacaactcgttaggggtgaggaggtgaacggcgatgctacagccggatccatcccaggctccacttcagctctgctcgacctcagcggtctggatctcccgccagcaggaacaacctacccagctatgccgactaggcctggcgagcaggcatctccggagcaaccctccgcttccgtgagtctgttggacgacgagttaatgagcctaggcttgtctgatccgactccgccaagcggcccatcccttgatgggactggatggaactcatttcagagttctgatgctacagagccgccagcaccggctctggcccaggctccttccatggaatcccggccacccgctcagacgagtctcccggcttcctcaggcctagatgatctggacttgctgggaaagactcttttgcaacagtccctgcccccagagtcacagcaggtaaggtgggaaaagcaacaacccacgccaaggctcactctgcgggacctgcagaacaagtcgtccagctgctcaagcccctcaagctcggccacttccctgctccataccgtatcccccgagccaccccgacctccacagcagccggttccgaccgagctgtccctggcgtccataaccgtgcccctcgaaagcattaaaccatcgaatatattgcccgtgacggtctacgatcagcacggcttccgaatccttttccactttgcgcgtgatcctctgcccggaagaagcgacgtactggttgtggttgtgtctatgctctcgacagccccacagccaattaggaatattgtgtttcagagtgccgtcccgaaggtgatgaaggtcaagcttcagcccccatcgggcactgagctcccagcttttaacccgatcgtgcacccatccgccatcactcaggttctgctgctggcaaatccccaaaaagaaaaagtgcgcctgcggtacaaactgacgttcactatgggtgatcaaacctataatgagatgggagacgttgatcagtttccacccccagaaacctggggcagcttatag

SEQ ID NO: 225130 - DNA, 123 bp, synthetic construct
  misc_feature 1..123: note = Description of Artificial Sequence: Synthetic coding sequence
  source 1..123: mol_type = other DNA
atgaaatcttgcggtaagcgttttcacgatgaggttgggaagttcaggttcttgaacgagctaataaaagtagtgtctcctaaatacctgggcagcagaacttctgaaaaggtaaaaaactag

SEQ ID NO: 225131 - DNA, 330 bp, synthetic construct
  misc_feature 1..330: note = Description of Artificial Sequence: Synthetic coding sequence
  source 1..330: mol_type = other DNA
atgaagtcctgtggcaagcggttccatgacgaagtcgggaaatttcgatttcttaacgagctaatcaaggtggtgtcccccaagtacttagggtctcgcacctctgagaaggtcaaaaacaagatcctcgaacttctatacagttggacggtaggactccctgaagaggttaaaatcgcagaggcctatcagatgctgaaaaaacagggtatcgtcaagagtgatcctaagctgccggatgatacaaccttcccactcccccctccaaggcccaagaatgtgatctttgaagacgaagagaagtctaagatgttggccagactgttatag

SEQ ID NO: 225132 - DNA, 270 bp, synthetic construct
  misc_feature 1..270: note = Description of Artificial Sequence: Synthetic coding sequence
  source 1..270: mol_type = other DNA
atggaacctgctatggaaccagagactctagaagctcggatcaatagagctactaatccattgaataaagagctcgactgggcatccatcaatgggttttgtgagcagctgaacgaagatttcgagggccctcctcttgctactcgcctgctggctcataaaatccagagcccacaggaatgggaagctattcaagcattgaccgtcagacgcggtgaagccacaatccggccacctccttgtgatgatacaaaaggaggacaggattag

SEQ ID NO: 225133 - DNA, 330 bp, synthetic construct
  misc_feature 1..330: note = Description of Artificial Sequence: Synthetic coding sequence
  source 1..330: mol_type = other DNA
atgaagagctgcggtaaacgattccatgatgaagtgggcaagtttagatttctaaatgaactgattaaggtggtatctcccaagtatctcggatcccgcacttcagaaaaggtcaagaataagatcctcgaactgttatattcttggacagtgggtttgcctgaagaagtgaagatagctgaggcataccaaatgctaaagaaacagggaattgtgaagtctgaccccaagttgcccgatgatacaaccttcccattaccccctccaaggccgaaaaacgtcatcttcgaggacgaggagaagagcaagatgctcgctagactgttgtag

SEQ ID NO: 225134 - DNA, 327 bp, synthetic construct
  misc_feature 1..327: note = Description of Artificial Sequence: Synthetic coding sequence
  source 1..327: mol_type = other DNA
atgaagagctgtggcaaacggttccatgacgaagtaggaaaatttcgatttctcaacgaactcatcaaagtggtgtcccccaaatatctgggctcgaggacctcggagaaggtaaaaaacaagattctcgagcttttgtattcatggactgtgggcctcccagaagaggtgaaaatcgcagaggcctaccagatgctgaaaaaacagggtatcgttaaatccgatccaaaactgccagacgacaccacattcccactaccgccacctagaccaaaaaatgtgatcttcgaggacgaagaaaagtccaaaatgttagctcgcctctag

SEQ ID NO: 225135 - DNA, 57 bp, synthetic construct
  misc_feature 1..57: note = Description of Artificial Sequence: Synthetic coding sequence
  source 1..57: mol_type = other DNA
atgaagtcatgtggtaagaggttccacgacgaggtggggaagttccgctttttgtag

SEQ ID NO: 225136 - DNA, 183 bp, synthetic construct
  misc_feature 1..183: note = Description of Artificial Sequence: Synthetic coding sequence
  source 1..183: mol_type = other DNA
atgaaatcatgcggtaagagattccatgacgaagtaggtaagttccggttcctgaacgagttaatcaaagtagtgtcccctaagtacctgggatcgaggacctctgaaaaagtgaaaaataagatccttgaactgctctactcatggaccgtgggactgcccgaagaagtgaaaatcgcctag

SEQ ID NO: 225137 - DNA, 87 bp, synthetic construct
  misc_feature 1..87: note = Description of Artificial Sequence: Synthetic coding sequence
  source 1..87: mol_type = other DNA
atgaaaagttgcgggaaacggttccacgacgaagttgggaagtttaggttcctgaatgagctgatcaaggtcgtaagcccaaagtag

SEQ ID NO: 225138 - DNA, 741 bp, synthetic construct
  misc_feature 1..741: note = Description of Artificial Sequence: Synthetic coding sequence
  source 1..741: mol_type = other DNA
atgacccccggaacagcaaatcgtgcgaccaacccgctgaacaaagaacttgactgggcatcaattaatgggttttgtgaacaactgaatgaggacttcgaaggcccaccattagctacacgtctgctggcacataagatccaatctccgcaagagtgggaggccatccaggctctcacagttctggaaacctgtatgaagtcttgcgggaaaagatttcatgatgaagttggcaaatttagattcttgaatgagctgattaaggttgtctctccaaagtatcttggatcacgcaccagcgagaaagtcaagaataagatattagaactcctgtattcttggaccgtggggctgccagaagaggtgaaaatcgctgaagcttatcagatgttgaagaagcaggggatcgtgaaatcagacccgaaactgccagacgataccacttttcccctccctcctccacgcccaaaaaatgtcattttcgaagacgaagaaaagagtaaaatgctcgccagattactgaaatcatcccatccagaggacctccgagccgctaacaaactcatcaaagagatggtgcaggaggaccaaaagcgcatggagaaaatttcaaagcgcgtgaatgctattgaggaggtgaacaataatgttaagctgctcaccgagatggtgatgtctcactctcaggggggagcggcagcaggaagtagcgaggacctcatgaaggagctctaccagtag

SEQ ID NO: 225139 - DNA, 213 bp, synthetic construct
  misc_feature 1..213: note = Description of Artificial Sequence: Synthetic coding sequence
  source 1..213: mol_type = other DNA
atgaaaagttgcggaaagagatttcatgatgaagttgggaaatttaggttcctgaacgagcttatcaaggtcgtgagtcctaaataccttgggagccggacttctgagaaggtaaagaacaagatcctggagcttctgtattcgtggacagtaggtctcccagaagaagtaaagatagcagaggcctaccaaatgttaaaaaagcagggatag

SEQ ID NO: 225140 - DNA, 2172 bp, synthetic construct
  misc_feature 1..2172: note = Description of Artificial Sequence: Synthetic coding sequence
  source 1..2172: mol_type = other DNA
atggccgaggcagaaggcgagagcctggagagctggctgaataaagccactaatccttcaaacaggcaggaagattgggagtacatcatcggcttctgtgaccagatcaataaagaacttgagggtcctcagatcgccgtgcgcctcctcgcgcacaaaatccaatctccccaggagtgggaggctctgcaagctttaactgtgctcgaagcctgtatgaagaattgcggcaggaggttccataatgaagtggggaagtttcggtttctcaacgagcttataaaggtagtgtctcccaagtatctcggagatcgggtctcagagaaggtgaagacaaaggttatcgaacttttgtacagctggacaatggccttacccgaggaggccaagatcaaagatgcctatcacatgcttaaacgacagggcatcgtacagagtgaccctcctatcccagtggatcgcaccctgatcccctcgccacctcctcgacccaaaaaccctgtattcgatgatgaagagaagtccaagttgctggccaagcttctcaaaagtaaaaatccagacgaccttcaggaggcaaataagctcattaagagcatggttaaagaggacgaggcgagaatacagaaggtaacaaaaaggctgcacacgttggaagaagtgaataataacgtccgccttttatctgagatgctgctccactactcccaggaagactctagcgatggggaccgggagttaatgaaagagctgttcgaccaatgtgagaataaacgaaggaccctcttcaaactcgcctccgagaccgaggacaacgataatagcttgggagacatcctgcaagcctccgataacttaagcagagtgattaactcatacaagacaattatcgaagggcaggtgattaacggggaagtggccacactgaccctcccggacagcgagggaaactcacagtgtagtaaccagggtaccttgatagacctggccgaactggacacgaccaactcgctatcgagcgtccttgcgccagctcccaccccccctagttccggcattcctattctccctccacctccacaggcaagcggccctcccaggtctagaagtagctcacaggccgaggccacacttggtccatccagtacctcgaatgcactgtcttggctggatgaagaactgttgtgcctgggcctcgcagacccagcgccaaacgtccccccaaaggagtctgcgggaaattcacagtggcacctcctacagagggagcagtcagacctcgatttcttcagtccccgtccgggtactgctgcatgcggcgctagtgacgcacccctcctgcaaccctcagctccctctagctctagctcccaggctccgctgccccctccgtttcctgcgcctgtggttcctgcctctgtgcccgctcccagtgcgggatcctctttattcagcaccggggtggcaccagccctagcaccaaaggtggaacctgctgtccctggtcaccatggcctggccctcggcaattctgctctacatcacctcgatgccttggaccagctgctcgaagaggctaaggtgactagtggcttagtgaagccaaccacatcccccctcattcccactacaacacccgcacggccactgctgccattttccaccgggccagggtcgccattgttccagccactctcgtttcagtcacaggggtcacctccaaagggaccggaactttctttagcttccatacatgtgcctttggaatctatcaaaccctcttccgctctgcccgtgactgcttacgacaagaacggattccggatcctgtttcactttgctaaggagtgcccccctggaaggcctgacgttctcgtggtcgtggtctctatgctcaataccgctccgcttcccgtcaagtccatcgtgttacaggccgcagtgccaaaatcaatgaaggtgaaactgcagccaccatcagggacagagctcagccctttctctccaatccagcctccggctgcaatcacacaggtgatgttactcgcgaatcccttgaaggaaaaggttaggctgcggtataagctgacatttgcgctaggggagcaactcagtacagaagtgggtgaagtggaccagttccctccggtggaacagtggggaaatctttag

SEQ ID NO: 225141 - DNA, 2073 bp, synthetic construct
  misc_feature 1..2073: note = Description of Artificial Sequence: Synthetic coding sequence
  source 1..2073: mol_type = other DNA
atggcagaggctgaaggcgagtctctggagtcatggttgaacaaggctactaatccttcaaaccggcaagaagactgggagtacatcattgggttctgtgaccagataaacaaggagttagagggccctcagatcgccgtcagactactggcccacaagatccagagtccccaagagtgggaagctttgcaggccctgacgtatctgggcgaccgggtcagtgagaaggtgaagaccaaagtaatcgagctgctgtactcttggactatggctcttccagaagaagccaagatcaaagacgcctatcatatgctaaaacggcaggggatcgtgcagagcgaccccccaattccagttgacaggaccctgatccctagcccacctccacgcccaaagaaccctgtgttcgatgatgaagaaaaatcgaagctactggcaaaactgctgaaatcaaaaaatccggatgacctgcaagaggcgaataaactcataaagtctatggtcaaagaagacgaggctaggatacagaaagtaaccaagcgcctccacacactcgaagaggttaacaataacgttagactcctttcagagatgctcctgcattactcacaggaagactcaagtgatggggatagagagctcatgaaagaactcttcgaccagtgcgaaaacaaaagaagaactttatttaaactggcctctgagacagaggacaacgataacagcttgggggatatactccaggctagcgataacctctcacgcgtcatcaattcatataagaccatcatagaaggtcaagtaatcaatggagaagtggccaccctaactctgccagacagcgagggaaattcacaatgtagcaatcaaggcacattgattgaccttgccgagctggataccacaaactcacttagtagcgtgctggcaccagcacctacgcctccctcttccggtatcccaatcctcccacctcctccacaagctagtggtcctccacgcagcagatcgagcagccaagctgaagccacactgggaccctcgtctacctcaaacgcattgagttggctggacgaagaactgctctgtctgggcctcgcggacccagcgccaaatgtcccgccaaaggaatccgctggaaattcccagtggcatttgcttcagagagaacaatcagacctcgattttttcagtcctcgccctggcactgctgcctgtggcgctagtgacgcccctctgctgcagccaagcgcccctagctctagttctagccaagcccctttgccccctccttttccagccccagtggttccagcgagcgtgcctgcaccttctgccggaagcagcctgttttcaaccggagtggctcctgcccttgctccaaaggtggaacccgcagtgccagggcaccatgggctagcccttggtaattctgcgctccaccatcttgacgccctagatcagctgttggaggaagctaaggtaacttctgggctagttaagcccactacctcccccctgatacctacaactactcccgcacgccctctgctgccattttctactggccctgggtctccactgtttcaacctttatctttccagagccagggttctccgccaaagggcccagagctttcactggctagcatccacgtacctctcgaatcgatcaagccaagctctgcacttccggttaccgcatacgacaaaaatggcttccgaatactctttcactttgccaaagagtgtcctcccggacgccctgacgtcctggtcgtggtggtgtccatgttgaacacagctcctctgccagttaaatccatcgtcctgcaggcagccgtgcccaagtccatgaaggtcaaattgcagcccccatcgggcaccgagctcagtcctttctcgccgatccagccaccggcagccatcactcaggtcatgctcctggcaaatcctttaaaggaaaaagtcagactgcgctacaaattaacctttgcccttggcgaacaactctctaccgaggtgggcgaggtggatcagtttcccccagtggagcagtgggggaatctgtag

SEQ ID NO: 225142 - DNA, 1956 bp, synthetic construct
  misc_feature 1..1956: note = Description of Artificial Sequence: Synthetic coding sequence
  source 1..1956: mol_type = other DNA
atgaaaaactgtgggagaagattccacaatgaagtcggaaagtttaggttcctgaatgagttgataaaggtggtgtccccaaagtacttgggggaccgggtgtccgaaaaagtcaaaacaaaagtgattgaattgttgtactcgtggacaatggcgctacctgaagaagctaaaattaaagacgcgtaccatatgctgaaacgtcaaggcatagtacagtccgatccccctattcccgtggaccgcacccttattccctccccaccgccacggccaaagaacccagtgtttgatgacgaagaaaagtcaaagcttctcgccaaattactgaagtcaaagaaccccgacgacctccaggaggcgaataagctaatcaagagcatggtcaaagaagacgaggcccgtatccagaaggtcactaaacgccttcataccttggaggaagtgaacaacaatgtacggttactgagcgagatgttgctgcactacagtcaggaagactccagtgacggagatagagagcttatgaaggagctgttcgatcagtgtgagaataaacgccgaaccctgttcaagcttgcctctgagaccgaagacaatgacaattccttgggagatatacttcaggcctccgataatctgtctcgggtgatcaactcctacaagaccataatcgaggggcaggtcataaacggagaagtggcaaccctgacgctgcccgacagtgaaggcaactctcagtgttctaaccaagggaccctcatcgacttagccgagctggatacaaccaatagcctgagttcagttctggccccagcacccactccccctagctctgggatccctatcctgccacccccacctcaggcttctggacctccgaggtctaggtccagctcgcaagcagaggcaactctaggcccaagcagcacctcaaacgccttgagttggctggacgaggagctcttgtgcctggggttggccgatcccgcaccaaatgtccctcccaaagagtccgccggaaatagtcagtggcatctcttacagagggagcaaagtgatcttgacttttttagccctagacccggtacagccgcttgcggggctagtgatgcgcctctgctccaaccctctgccccttcatcgtcgtcctctcaggcacctctacccccaccatttcccgctcccgtggttcccgcaagcgtgcccgcaccatctgccggtagttcactctttagtaccggcgtggcacccgcactcgctcccaaggttgagcccgcagtgccaggtcaccacggcctggctttggggaattccgctctgcatcacctcgacgcgctggaccagttattagaagaggccaaagtgacttcaggcctggtcaagccaaccactagccccctgatccccacaactacacccgctcgtccactcctgcccttctccactggtccgggaagtcccctctttcagcccctgtctttccagagccaggggagtccgcctaagggaccagagctgtccctggcctccatccatgttccgcttgaatccattaagccctcgtccgccctgcctgtaacagcctacgataaaaacggctttcggattctgttccattttgccaaggagtgtccccctggtcgtccggacgtcctcgtggttgtagtaagtatgctgaacactgcgcctctaccagtaaagagtattgtgttgcaagcggcagtgcctaagtccatgaaagtcaaactgcagccccctagcggcacagaactttcccccttttcccctatccagccaccagccgctattacacaagtgatgctgctcgctaaccccctcaaagagaaggtgcgcctgcggtataagcttacctttgcgcttggcgagcagctgtcaacagaggtgggggaagtagatcaatttccgccagtcgaacaatgggggaatctttag

SEQ ID NO: 225143 - DNA, 462 bp, synthetic construct
  misc_feature 1..462: note = Description of Artificial Sequence: Synthetic coding sequence
  source 1..462: mol_type = other DNA
atggctgaggccgaaggggaaagtttggagagttggcttaacaaggcaactaatccatccaatcgccaggaggactgggagtatatcattggcttttgcgatcagatcaacaaagaactagagggacctcaaattgctgttcggttgctggctcacaaaattcaaagtccccaagagtgggaagcccttcaggccttaacagtcctggaagcctgtatgaagaactgcggcagacgctttcacaatgaggtgggcaagtttcggttcttgaatgagctgattaaggtagtaagccctaagtacctgggcgatcgggtgtcagaaaaagtgaagacaaaggtgatcgaactcttatattcctggacaatggcactgcctgaagaagcaaagatcaaggacgcatatcacatgctgaaacggcaggcatttagccaggccgcagaaaagcagaagcccagatag

SEQ ID NO: 225144 - DNA, 1806 bp, synthetic construct
  misc_feature 1..1806: note = Description of Artificial Sequence: Synthetic coding sequence
  source 1..1806: mol_type = other DNA
atggcgctgccagaggaagctaaaattaaggacgcctaccatatgctcaagaggcagggaatcgtgcaatctgatcctccaattcccgttgaccgaacactcatcccatcccctcctccccgtcctaagaatccagtgttcgacgacgaggagaaaagtaaacttcttgccaagctgctgaaatccaaaaaccctgacgatctgcaggaagccaacaaactcatcaagtcaatggtgaaggaggatgaggctcggatccaaaaagtcacaaagagactgcatacgctggaggaggtgaataataatgtaaggctactgtccgagatgctgcttcattatagccaagaggactcctccgacggagatagggagctgatgaaggagctgtttgaccagtgtgagaacaaacggaggacactcttcaagctcgccagcgaaactgaggataacgataacagtcttggggacatcctgcaggctagtgataatctcagccgagtgattaacagttacaaaacgattatcgagggtcaggtcatcaatggagaagtggctacccttacgctgcccgactcagaaggaaattcccagtgctcaaatcaggggaccctaattgatctcgccgaactcgacaccacaaattccctgagcagtgtgttggcacccgcacccaccccacctagctctggcatccccatactaccccctcccccacaggcctccggacctcctagatcaaggagttctagtcaggccgaggccaccctgggacctagtagtacctctaacgctctgagttggttagacgaggagctcctgtgtcttggattggccgatccggcaccaaatgtgcctcctaaggaatccgctggcaactcccagtggcacctattgcaaagggaacagtcagatctcgacttctttagccctcggccaggaaccgccgcttgcggagcatctgatgcccctctgctgcagccaagcgccccttccagttctagctctcaggctcctctcccccctccgttccccgcaccagtggttcccgcttctgtcccagcaccgtccgccggttcatcactgttttcaactggcgttgcgccagcccttgctccaaaagtggaaccggctgtgcccggacatcatggcctcgcactggggaacagcgcgctccatcatctagatgctttagaccaattgctggaggaagctaaggtcacctctggcctggtcaaaccgacaacatcccctttgatcccaacaaccacgccagcccgacctttgcttcccttttcaaccggccctggcagccctcttttccaaccactcagctttcaatcccaggggtcccccccaaaaggtccagagcttagcctggccagcattcacgtgcctctcgagtctattaagccctccagcgctctgcctgtcactgcttacgataagaatggctttcgtatacttttccactttgctaaagagtgcccaccaggacggccagatgtcttggtcgtggtggtgtccatgctgaacaccgcgccactgcccgtgaagagcatagtgctgcaggcggctgtgccaaaaagcatgaaggtaaaacttcagcctccgagcgggaccgaactttctccattctcacccattcagcccccagcagccatcacacaggtcatgttgctggcgaacccattgaaggagaaggtccggctgcggtacaagctgactttcgccctgggagaacagctgtctacagaagtgggcgaagtcgaccagtttccacctgttgagcaatggggcaatctttag

SEQ ID NO: 225145 - DNA, 918 bp, synthetic construct
  misc_feature 1..918: note = Description of Artificial Sequence: Synthetic coding sequence
  source 1..918: mol_type = other DNA
atggccgcaggactagctcggctgctgctcctcctgggcctgtcagctggagggcctgctccagcgggagccgcaaagatgaaggtggtagaggagcctaatgcatttggagtcaataacccctttctgccgcaggccagtaggctgcaggcaaaacgagatcccagccccgtgtctggccctgtgcatctattccggctcagtggaaaatgctttagtcttgtcgagagcacatacaagtatgaattttgtcccttccacaatgtgacacagcatgagcagactttccgatggaatgcttacagcggaatcctgggcatctggcatgagtgggaaatcgccaataacaccttcaccgggatgtggatgcgcgacggcgacgcctgcaggagtagatccagacagtcaaaggtggaactggcctgcggaaagtcaaataggctggctcacgtgtcagaaccttcaacatgtgtgtacgcccttacctttgagacaccactggtttgtcatccccacgcactgctcgtttatcccacactaccggaggccctccaaaggcagtgggatcaggtcgagcaagacctcgcagatgaactgataacaccacagggacatgaaaaactgctccgcacactttttgaggatgccggttacctaaaaactccggaggagaatgaacccacccagttggaggggggacctgactctctcggcttcgaaactctcgagaattgcagaaaagcccacaaagagctgtccaaggagataaagcgcctgaagggcctcctgacccaacatggaatcccttacaccagacctactgagacaagtaaccttgagcacctcggccacgagaccccacgggctaagagtccggagcagctgaggggtgatcctggcctgcggggatctctctag

SEQ ID NO: 225146 - DNA, 4496 bp, synthetic construct
  misc_feature 1..4496: note = Description of Artificial Sequence: Synthetic coding sequence
  source 1..4496: mol_type = other DNA
atggacggtgcctctgccgaacaggatggcctccaggaggatcgctctcattcaggtcccagctctctaccagaggcccctctgaaaccaccgggacccttagttccaccagaccaacaggataaggttcaatgtgccgaagtaaacagggcgagcaccgagggagagtcacccgacggtcctggtcaagggggattatgtcagaacgggcctaccccccctttcccggatcctccgtcttcactagatccaaccacaagccccgttggcccagatgctagcccgggagtcgccggattccacgacaatctgcggaagtcgcagggcacatcagcggagggtagcgtcagaaaggaggctctgcaatctttgcgactctcacttcccatgcaagagacccagctgtgcagcaccgatagccctctgcccctggaaaaagaagagcaagttcgcctgcaggccagaaagtggctggaggagcaactgaagcagtaccgcgtgaaacgccagcaggagcgtagtagccaacccgcaacgaagacccgcctattttccactctggatccagagttgatgctgaaccccgaaaatctcccacgggcaagcacgttggcaatgactaaggagtactcattcctgaggacatccgtcccacgtggccctaaggtcgggtccctgggccttccggctcatcccagggaaaagaagacttctaagtcatccaagatacgatcattggccgactatagaactgaagactcaaatgctgggaatagcggcggaaatgtccccgctccggacagcacgaaaggctctctgaaacaaaataggtcctcagctgccagtgttgtgtctgaaatcagcctttccccagacactgacgataggctggaaaacacatccctggccggagatagcgtgtccgaggtagatgggaatgattccgattcctccagctacagttcagcatcaacaagaggcacctatgggatcctgagcaagaccgttggcacgcaggatacaccctacatggtgaacggacaagaaatccccgctgacactcttggacagtttcctagcataaaagacgtcctacaggccgcagcagccgaacatcaggatcaggggcaggaggtcaatggggaagtgcgttcgagacgtgacagcatttgttcttcggtttcacttgagtcaagcgctgccgaaacgcaagaggaaatgctgcaggtgcttaaggaaaaaatgcggcttgaagggcagctcgaggcactttccctcgaagcatcacaggcactaaaagagaaggccgaactgcaggcgcagctagcggctctgtctactaaattacaggcacaggtggaatgcagccattctagtcaacagcggcaagacagtctttcttccgaggtcgacaccctgaagcaatcctgctgggacctggagcgcgcaatgactgatcttcagaacatgctggaggcgaagaatgcctccttagcctcctcaaacaacgatctccaagtggccgaggagcagtatcagagattaatggctaaagtggaagatatgcagcgctccatgctctccaaggataacaccgtccacgatcttcgacagcagatgacagcactgcaatcccaactgcagcaagtgcagctcgagcgcacaacactgacctcaaagctcaaagcgtcccaagctgagatcagctccctccagagtgttcgccagtggtatcagcaacaattggcattagcgcaggaggcacgggtgcggttacagggggaaatggcccacatccaggtgggccaaatgactcaggccggattgctggaacatctgaaattggaaaatgtgagcttgagccagcagttgaccgagacccagcaccgctcaatgaaagagaaaggtagaatcgccgctcagcttcaggggatcgaggcagacatgttagatcaagaagccgctttcatgcaaattcaggaagcaaaaactatggttgaggaagacttgcaacggcgtctggaggaattcgagggcgagcgagagaggctgcagaggatggccgatagcgcggcttctctcgaacagcagctggagcaagtcaagcttaccttgctgcagcgagaccagcagctcgaggctcttcaacaggagcacctggacctgatgaagcaactgacacttacacaggaggctcttcaatcaagagaacagtctttggacgctctgcagacccattacgacgagttacaggcgcgtcttggggagctgcaaggtgaggctgcctctcgggaggacaccatctgtttgcttcaaaacgaaaagattatcctggaggctgctttacaagctgctaagagcggaaaggaggaactggacagaggtgccaggaggctagaggagggaacggaggagacatccgaaacattggagaagctgcgagaggagctggcgatcaagtctggccaggtagagcacctgcaacaagaaacagccgctcttaagaaacagatgcagaaaatcaaggaacaatttttacagcagaaggtgatggtggaggcttatcgtagagacgctactagcaaagatcaactcatctccgagctcaaggccacacgcaaaagattggattcagagctgaaagaactgagacaggaacttatgcaggtgcatggcgagaagcgtactgccgaggctgaactgagccgcctccaccgtgaggtagcccaggtaagacaacatatggctgacctggaaggacaccttcaatcagcccagaaagagcgtgatgagatggaaacccatctgcagtcattgcagtttgacaaagagcaaatggtcgccgtgaccgaggccaatgaggcacttaaaaagcagatcgaggaactccagcaggaggcgagaaaggccattaccgagcagaagcagaagatgaggcggttaggatcagatctgacttcagcccaaaaggaaatgaagactaagcataaagcatatgagaacgcagtcggcatcctgagtcggagactgcaggaggcgctggcagccaaggaggcggcagatgccgagctagggcagctgagagcgcaggggggaagttcagattcaagtttggcactacacgaaaggatccaggccctagaggcggagctgcaagctgtctcacatagcaaaactttacttgagaaggaactccaggaggtcatagccctgaccagtcaggagctagaggaatcacgcgagaaagtcctggagcttgaggatgagttgcaagaaagccggggattccgcaagaagattaagagactggaagaatccaataagaaactggcgctcgagctggaacatgagaagggtaagttaacagggctcggccagagcaacgcggctctccgcgaacataactcgatcctggaaacagccctcgccaaaagagaggcagacttggtacagctgaaccttcaggtccaagcagtgctccaaagaaaagaagaggaggacaggcaaatgaagcacctcgttcaggccctgcaagcctcactggagaaggagaaggaaaaggtcaactcattgaaggaacaggtggccgctgccaaggtggaggcagggcataacagacggcacttcaaagctgcctcccttgagctgagtgaggttaaaaaggagctccaagccaaagagcacttggtgcagaagctgcaggcagaggcagatgacctccagattagagaaggcaaacactctcaggagatcgctcagttccaggccgaattggccgaagcacgcgcacagttacagttgctgcagaagcagctcgatgagcagctttccaagcagcccgtgggtaatcaggagatggaaaacctaaaatgggaggtggaccagaaagaaagagagatccaatccctgaagcagcagttggacctcacggaacaacagggaagaaaagagttggaaggccttcagcagctgctgcagaatgtcaagagtgagctggaaatggcccaagaagacctgagcatgacacagaaagataagttcatgttgcaggccaaggtgtctgaattgaagaataacatgaaaacgctcctgcagcagaatcagcaactcaagcttgatctgagaagaggagccgcaaagacaaggaaggagccaaaaggtgaggccagttcgtccaacccagcaacaccaattaagattccggattgccctgtccctgcctcactgctagaggagctgttgcggccacctcccgcagtctctaaggagccactgaaaaacctgaacagttgcttgcagcagctaaagcaggagatggactcgctgcaacgacagatggaagagcacgcactgacagtccacgaatccctgtccagctggactcccctcgaacccgctaccgccagccccgtgccacctggcggacacgccggaccccgtggcgacccccagaggcacagtcagagccgagccagcaaagaaggccctggtgagta

SEQ ID NO: 225147 - DNA, 4173 bp, synthetic construct
  misc_feature 1..4173: note = Description of Artificial Sequence: Synthetic coding sequence
  source 1..4173: mol_type = other DNA
atggatggagcctccgccgagcaagatgggctacaagaggatcgctcacattccggcccttctagcctgcctgaagcgccactaaaaccgcctggtccccttgtgccccctgaccaacaggataaagttcagtgtgccgaagtgaatcgggcttcaactgagggggaaagccctgatgggccagggcaggggggactttgccaaaatggacctacccccccatttcccgaccccccatctagtcttgaccccacaacctcacccgtgggacctgacgcatctcccggtgtggccggatttcatgataatctcagaaagtctcagggaacgagtgccgaaggcagtgtgcgcaaggaggccctacagtctctgcgtctttcactgcctatgcaggaaacgcagttatgctctactgactcgccgctgcccctggagaaagaagagcaggtcagactgcaggcacggaagtggcttgaggaacaactgaaacagtatcgggtgaaacggcagcaagaacgctcctctcagccagccacaaagacccggcttttctcaactctggatcccgaactcatgctcaatcccgaaaacctgccaagagccagtacactcgctatgacaaaggagtactctttcctaagaaccagcgttccgaggggaccaaaagtcggcagcttggggctacctgcgcatcctcgggagaagaaaacttccaaaagttcgaaaatacgctctctggccgactacaggacagaagatagtaatgcaggcaactccggcggtaacgtccccgctcccgattcaaccaaggggagtctgaagcagaacaggagttccgccgcttccgtagtgtctgagatctccttgtctcccgataccgacgaccggctagagaacactagcttggcaggcgatagcgtgtccgaggttgatggcaacgactccgattcttcttcctacagcagcgcttctacacggggtacatatggtatcctttccaagacagtgggaactcaagatactccgtacatggtgaacggccaggaaatccctgccgacactctggggcagtttccctccatcaaggatgtgctgcaggccgctgccgcagaacatcaggaccagggacaggaggtgaacggagaggtcagatctaggcgagattctatctgtagctcagtaagcctggaatcttcggcagccgaaactcaggaagagatgcttcaagtcctgaaggagaaaatgcgcctggagggccaattggaagccttgtccctagaggcctctcaggccttaaaggagaaggcagaactacaggcccagctggccgcactgagcacaaaattacaggcccaagtcgaatgctcacattcgtcccaacagcgacaagacagcctgagcagcgaggtggacacactgaagcagtcctgctgggatctcgaacgggctatgaccgacctgcagaacatgctggaagccaaaaacgcctccctggccagttctaataacgatctgcaggtagcagaggagcaataccagcgtctgatggccaaagttgaagacatgcagcggtccatgctgagtaaagacaatactgtgcacgacttgcgacagcagatgactgccctgcagtctcaattacaacaagttcagctggagcgtactactctcacaagtaaactgaaagcttcccaggcagagatctcctctttgcaatccgtcagacagtggtaccagcaacagcttgccctcgctcaggaagctcgggttagactccagggcgagatggcacacattcaggttggacagatgactcaggccggtctgctggagcacctgaaactggagaacgtgagtctgtcccagcaactgaccgaaactcaacacagaagtatgaaagaaaagggtcggattgccgctcaactacagggcatcgaggctgatatgttagaccaggaggcggcttttatgcagatccaggaagccaaaacgatggtcgaggaggatctgcagcgcaggctcgaggaatttgaaggagaacgggagcgcctgcaaagaatggccgatagcgccgcttcattggaacagcagttggaacaagtgaaactgacactcctccagcgcgatcagcaactggaagccttgcagcaggagcacctcgacctgatgaagcagttaaccctgacacaagaggccttacaatctagagaacagtctctcgatgccttgcagacccattacgacgagctgcaggccaggttgggcgaactccagggcgaggccgcatctagggaggacaccatttgcctgctccagaacgaaaagatcatccttgaggccgctctgcaggcagccaaatctgggaaagaggagttggatagaggagccaggcggctggaggagggcaccgaggaaacatctgagacattggagaagctgcgggaagagctcgccattaagtcaggccaggtagaacacctccagcaggaaacggcagcactgaaaaagcaaatgcaaaaaatcaaggaacaatttcttcagcaaaaggtgatggttgaggcgtataggagggatgccacttcgaaggaccaattgatcagcgagctcaaagccacaaggaagcggttggactccgagctgaaggagttgagacaggagctcatgcaggttcacggagagaagaggaccgcagaggcagagctgtcgcggttgcaccgagaagttgctcaggtgagacagcatatggccgacctggaaggtcacctccagtcagctcagaaggagcgagatgagatggaaacccatctgcagtcgttacagtttgacaaggagcaaatggttgccgttactgaagctaatgaggccttaaagaagcaaattgaggagctccagcaggaggccagaaaagccattaccgagcagaagcagaagatgcggcgactcggctccgatttgacctccgcccagaaagaaatgaagacaaagcacaaggcttatgagaatgccgtgggcattctgagtaggcggctgcaagaagccctggccgctaaggaagctgctgatgccgaactgggccagctacgggcacagggtggatcaagcgatagtagtctcgcgctccacgaacgaattcaagccctggaggccgagctgcaggccgtgtcccactcaaagactctgctggagaaagagttgcaggaggttatcgcattaacctctcaggaattagaggagagccgggagaaggtgcttgaacttgaggacgagctgcaggagtctcgcggattccgcaagaaaatcaaaaggctggaagagtccaataagaaattggccctcgaactcgaacacgaaaaagggaagcttactgggctcgggcaatctaatgccgcactgagagagcacaattcaatacttgagacggcactggcaaagagagaggccgaccttgtgcagttgaatctgcaggtgcaggcagtgctgcagcgtaaggaagaggaagatcgccaaatgaagcaccttgttcaagccctgcaggcctccctcgaaaaggagaaggaaaaagtgaactcgctgaaggaacaggttgccgctgccaaggtcgaggccggacataatagaaggcactttaaggccgcttccctagaacttagcgaggtgaagaaggaattacaagccaaggagcacttggtgcagaagctccaggctgaagccgatgatctgcagatcagagagggaaagcacagtcaagaaatcgcacaatttcaggctgaactggcagaagctagagcgcagctacagttgttgcagaaacagcttgatgagcagctcagtaaacaacccgttggcaaccaggagatggaaaacctgaagtgggaggttgatcagaaggaacgggagatacaatccctgaaacaacagctagacctgactgaacagcagggacgcaaagaacttgaaggattacaacaactgcttcagaacgtcaagtccgaattagaaatggctcaagaggacttgtcaatgacacagaaggacaaatttatgctgcaggccaaggtctcagagctgaagaacaatatgaaaactttgctgcagcagaatcagcagcttaagctggacctccgcagaggtgcagcgaagactgtactacggccagcaagcctaccgggatag

SEQ ID NO: 225148 - DNA, 3405 bp, synthetic construct
  misc_feature 1..3405: note = Description of Artificial Sequence: Synthetic coding sequence
  source 1..3405: mol_type = other DNA
atggatggggcatcagcggagcaagatggactgcaggaggatcggagtcactcaggcccatcttctctcccagaagctcctctgaagcctcctggccctctcgtacctccagatcagcaagataaagtacagtgcgccgaagtgaaccgggcttcaacggaaggcgagtcaccggacggacctggccaggggggtctgtgccagaacggcccaacacctccatttcccgatccacctagctcactggacccaaccacatcaccggttggacccgacgccagcccaggcgttgccggtttccacgataacctgcggaagagccagggtacgagcgccgaaggttccgtccgcaaggaggctttgcagagcctgcggttgtctttacctatgcaggaaacccaactttgcagcaccgactcacctctccctctcgagaaggaggagcaggtgcgtctgcaggcgaggaagtggctagaagagcagctcaaacagtatagggtcaagcggcaacaagagcgtagctcgcagcctgctactaaaacccggcttttttccactttggaccccgagctcatgctgaatccagaaaatctgccaagagcttctactctcgccatgactaaggaatatagttttctgagaaccagcgttcccagagggccaaaggtaggcagccttgggctccccgcacaccccagagaaaagaagacaagtaagagttctaagatacggagtctagccgattaccggacggaggatagtaacgcgggaaatagcgggggtaacgtcccggcacctgactcgactaagggctcccttaagcagaatcgcagttcggctgcttcagttgtgagtgagatctccctgagtcccgacacggatgacagattggagaatacaagccttgccggtgactcggtgtctgaggttgatgggaacgactcggactcgtcttcttattctagcgcctcaaccagagggacctacggaatcctcagtaagactgtcgggacacaggacacaccttatatggtgaacggccaggagatcccggctgataccctgggtcaatttccttcgataaaagacgtactacaggcagctgccgctgagcaccaagatcagggccaagaagtgaacggagaggtgcgaagcagaagggactccatttgcagttccgtgagcctcgaatcgtcggccgctgagacacaggaggaaatgttacaagtgctcaaggagaagatgcgacttgagggccagcttgaggcgttgagtcttgaagcctcccaggcccttaaggagaaggccgagctgcaagctcagttggctgctttgagcacaaagctgcaggcacaggtcgagtgttctcattcctcccagcaacgacaggacagtcttagcagcgaagttgacactttaaagcaatcttgctgggatctggagagggccatgactgacttgcagaatatgctcgaggccaagaacgcctccttagccagttctaacaacgatcttcaggttgcagaggaacagtaccagagactcatggccaaggttgaggacatgcaacggtccatgctttcaaaggataacacagtgcacgacctccgtcagcagatgactgccctgcagtcacaactacagcaggtacaactcgaacgcacaacacttacaagcaaactgaaggctagccaggccgaaatctcatcgctgcagtccgtccggcagtggtatcagcaacaactagcccttgcccaagaagccagagtgaggctgcagggagagatggcccatattcaggtgggccaaatgacccaggccggtctgctggaacacctgaagttggaaaacgtgtccctatcccagcaattgactgaaacacagcacagatccatgaaggagaaggggagaattgctgcccagctgcagggtatcgaagctgatatgctcgatcaggaagcggcattcatgcagattcaggaagctaaaaccatggtggaggaagacctgcagcgacggttggaggaatttgagggagaaagggagcggctacagaggatggctgactctgcggcttccctggagcagcaactagagcaggtgaagcttacgttactgcagcgggatcagcaattagaggctctacagcaagagcatctggatctgatgaaacaactcaccctaacccaggaagctttgcaatcccgtgaacaatcactcgatgctctgcagacgcattacgacgagctacaggccagacttggagagcttcagggagaagctgcgagccgggaagacaccatctgccttttgcaaaacgaaaagattatcctggaagctgccttgcaggccgcaaagagcgggaaggaggagctcgacaggggagcccgtcggttagaggaaggcactgaggagacaagcgaaactctagaaaaactgagggaagaattggccataaagagcggacaggtcgagcacttgcagcaggagacagcagcactcaaaaagcaaatgcagaaaatcaaggaacagtttcttcagcaaaaggttatggtagaagcgtacaggcgggacgccacgagcaaggaccagcttattagcgagctaaaggcgaccaggaaaaggttggactccgagctgaaagagctgcggcaggaactgatgcaggtgcatggagaaaagaggacagctgaggccgagttgtcaagacttcatagggaggtggcccaagtccgccaacatatggctgacctggaggggcacctgcagagcgcccagaaagaacgagacgaaatggaaacacacttgcagtcactacagttcgataaagagcagatggtggccgtgacagaggccaacgaggccctgaagaagcaaattgaagaactccaacaggaagcgagaaaagcaattacagaacagaaacaaaagatgcggagactaggctcagatctgacgtctgctcagaaggagatgaagaccaaacacaaagcctatgagaacgccgtcggaattctgagccggaggcttcaggaagcgctggcagctaaagaagcagccgacgccgaactcggtcagcttagggcacaaggcggaagctcagacagctctcttgcgctccatgagcggattcaggccttagaggccgaactccaggctgtctcacactcaaaaactctactggagaaggaactacaggaagtcattgcacttacttcacaggaacttgaggaatcaagggaaaaggttctggaactggaggatgaagtacgcccaggccacctactttggcgccagagaggtgctggccacgtaagtcctgggcatgccgctacgcgggagactcggcgtacgaagctgcaccgcgtacccagcgtggccacctttggggtggccacattctag

SEQ ID NO: 225149 - DNA, 6692 bp, synthetic construct
  misc_feature 1..6692: note = Description of Artificial Sequence: Synthetic coding sequence
  source 1..6692: mol_type = other DNA
atgtttaagaaacttaagcaaaaaatttccgaggagcaacagcaacttcagcaagccctggcaccagcgcaggcctcctctaacagctccacaccaacgaggatgcgaagccggacatcatctttcaccgaacagctggacgagggaacgcccaatagagagtccggcgatactcagagtttcgcccagaagctccaactgcgcgtgccctctgttgagagtctcttccggtcaccaataaaggaatcgttgttcagaagctctagtaaggagtctcttgtccgaacatcttccagggagtctctgaaccggctggacctggactccagcaccgcaagttttgaccccccttctgatatggatagcgaagccgaggatctggtcggcaattcagatagtctcaataaggagcagctgattcagaggctgagacgcatggagagaagtctgtcttcttaccgcggtaaatacagcgaactagtgactgcctaccagatgctccaaagggagaagaaaaagttgcagggaattctcagtcagagccaggacaagtctctgcgccgtatcgccgagctcagagaggagctgcagatggaccaacaagcgaaaaagcatctgcaagaggaatttgacgcttccctggaggagaaagatcagtacatctcagttcttcaaacccaggtgtccctgctgaagcaaaggctgcggaatggaccaatgaacgttgatgtgctgaaacctctcccacaattggaaccacaggcagaggtcttcactaaggaggaaaatcctgaatctgacggcgagcccgtggttgaggatggaacgagtgtgaagaccctggagaccctccaacagcgggttaaacggcaagagaacctgctgaaacggtgtaaagagactatccaatcccataaggaacagtgcacactgttgaccagcgagaaagaagccctccaggaacagctggacgaaaggttgcaggagcttgaaaagatcaaggaccttcatatggccgaaaaaactaaattgatcacacagttgcgcgacgcaaaaaatctgattgaacagctggagcaagataaaggtatggtcatcgctgaaaccaagcgccagatgcatgaaactctggaaatgaaagaggaggagattgcccaactccgctcacgtatcaagcagatgacgacccagggagaggaactaagggaacagaaggagaaatctgaaagggccgcttttgaggagcttgaaaaagctctgagtactgcccagaaaaccgaggaggccagaagaaagctcaaggctgagatggacgagcagatcaaaactatcgagaagacgtccgaagaagagagaatatccctgcaacaggagctgagccgcgtcaaacaagaagtggtggacgttatgaagaagtctagcgaggagcaaattgccaagcttcagaaactccacgaaaaggagttggcccgtaaagaacaggagctgacgaagaaactccagactcgtgagcgggagttccaggaacagatgaaagttgcccttgaaaagagccagtccgaatatctcaagataagtcaggagaaagaacagcaggagagcctcgcccttgaggagctggaactgcagaagaaggcgattctaacagaatccgagaacaagctgagagacctacagcaagaagccgagacgtatcgcacccgcatcctggaactcgagagcagcctggaaaaatccctgcaggagaacaaaaatcagagcaaagacctcgcagtgcaccttgaggctgagaagaacaaacacaacaaggagattacagtgatggttgaaaagcataaaaccgagctggagtcactgaaacaccaacaggacgccctgtggacagagaagctgcaagtgttgaagcagcagtaccagacagaaatggaaaagctgcgtgagaaatgtgagcaggaaaaggagaccctactgaaagacaaagagataattttccaagcacacattgaggaaatgaacgagaaaacactggaaaagcttgacgttaaacagacagaactcgagagcctgtcctccgagctctccgaagtccttaaagcacggcataaactggaagaagaactgtccgtgctgaaagatcagaccgacaaaatgaagcaggagttagaagctaaaatggatgaacagaagaatcaccaccaacagcaggtggactcaataattaaagagcacgaagtaagcattcagagaaccgaaaaagccctaaaggaccagatcaaccagttggagctgctcctgaaagagagagacaagcacctgaaggaacaccaggcccacgtagagaatttagaggccgacataaagcgaagcgagggagagctgcagcaggctagtgcaaaactggacgtgtttcagtcctatcagagcgcaacccacgagcagaccaaagcatacgaagagcagctagctcagctgcagcagaaactgctcgatcttgagacggaaaggatcctgttaaccaaacaggttgcggaagttgaggcacagaaaaaggacgtgtgtacagagctggacgcccacaagatccaagtgcaggatttgatgcagcagctagaaaaacagaactctgaaatggaacagaaagtcaaatcactgacccaggtttatgagagtaaattagaggatggtaacaaggaacaggagcagacaaaacagattctcgtcgagaaagagaacatgatcctacagatgagggagggacaaaagaaggaaatcgaaatcctgacacaaaaactgtccgccaaggaggacagtatacacatcctcaacgaagaatacgagacaaaatttaaaaaccaggaaaagaagatggagaaggtgaagcaaaaggctaaagagatgcaagagacacttaaaaaaaaacttctggaccaggaggcaaaacttaaaaaggagctggagaacacagccctggagctcagccaaaaggagaaacagttcaatgcaaaaatgctggagatggctcaggcgaattcagccggaatctctgacgccgtgtcccgcctggagactaaccagaaggagcagatcgaatcactgaccgaggtgcaccgacgggaactgaacgacgtgattagcatctgggagaaaaaactgaaccaacaggccgaggaattacaggagatccacgagattcagctgcaggagaaggaacaggaggttgcagaactgaagcagaaaatcctcttgttcggctgcgagaaagaggaaatgaacaaagaaatcacgtggctgaaggaggagggtgtcaaacaagacaccactctcaacgaactccaggagcagctgaagcagaaatccgctcacgtcaactcactagcccaggatgagacaaaactaaaggcccatctcgaaaaactggaggtcgatctcaataaatcattgaaagaaaacacttttttgcaagaacagcttgttgagcttaaaatgctcgcagaggaggacaagcgcaaggttagcgaattaacatcaaaactgaaaactaccgatgaggaattccaatctctcaagtcgtctcacgagaaaagtaataaaagtctggaggacaagagcctggagttcaagaagttaagtgaggaactggcaattcagctggacatttgttgtaaaaaaaccgaagcgcttctggaggctaagactaatgagctgattaatataagtagctctaagactaatgccattctctcccggatcagccactgccagcaccggacaacaaaagtaaaagaagcactgcttattaaaacttgtacagtgtctgagctcgaagcacagctccgccagctgaccgaagagcaaaatactctcaacatttcctttcagcaagccacacaccaattggaagagaaggaaaaccagattaaatcgatgaaagcagatatcgagtcactggtgacagagaaggaggcactgcagaaagaaggcggtaatcaacagcaagccgcatctgagaaagaatcttgcatcacacagctgaagaaagagcttagtgaaaacataaatgcagttacgctgatgaaggaggaactgaaggagaaaaaagtggagattagctcactctctaagcaactgactgatctgaacgttcagcttcagaatagcatctccctcagcgagaaagaggctgctattagcagcctgagaaagcagtatgacgaggagaaatgcgaactgcttgaccaggtccaagatctctccttcaaggtggatacattgtcaaaagagaagatttccgccctggaacaggtggacgattggtccaacaagttctcggaatggaagaagaaagcccagagtcggtttacgcaacaccagaacacagtgaaggaactccagatccaattagagttgaagagtaaagaagcgtatgaaaaagatgagcagattaatttgttgaaggaagagctcgatcaacagaacaaacggttcgattgtcttaagggagagatggaagacgataaatctaagatggagaagaaggaaagtaacctggaaaccgagctgaaatcccagaccgctagaataatggagctggaggaccacatcactcagaaaactatcgaaattgaatctctgaacgaggtcctgaagaattacaatcagcagaaagatatcgagcacaaagagctcgttcagaaacttcagcacttccaggagttgggtgaggaaaaggataacagagtgaaggaggccgaggagaagatcctgacgcttgaaaaccaggtctacagtatgaaagctgagctcgaaaccaagaaaaaagaactggaacatgtaaacttaagtgttaagagtaaggaggaggaactgaaggctctcgaagaccggttggaaagcgaaagtgcagccaagctggctgagctgaaaagaaaggccgagcaaaaaatcgccgcaatcaaaaagcaattactttcacagatggaggaaaaagaggaacagtacaagaaggggacagaatcccacttaagcgaactgaacactaaattgcaagagcgggaacgcgaagtgcatatcctcgaggaaaagctgaagtccgtagagtccagccagtctgaaaccctgattgttccccgatcagcaaagaacgttgccgcatacaccgaacaggaggaagcggactctcaaggatgtgtacaaaagacgtacgaagagaaaatttccgtgctccagcgcaatttgactgagaaggagaagttgctgcaaagagttggacaggagaaggaggagaccgtgtcttcccactttgagatgcgctgccagtaccaggagaggctgattaaactggaacacgctgaagccaaacaacacgaagatcagtcgatgattggacaccttcaggaagaactggaggagaaaaataagaaatacagtctgattgttgcccaacatgtggagaaggagggaggaaaaaacaacatacaagcaaagcagaatctagagaacgttttcgatgacgtgcagaagaccctacaagaaaaagagctgacttgccagatcctggaacagaaaattaaagagctcgatagttgtctggtgaggcaaaaagaagtccatagagttgagatggaagagttaacatctaagtatgagaagctgcaagccctgcagcagatggacggacggaataagcccaccgaacttctggaggaaaatacagaggagaaatcaaagagtcatttagtgcagcccaagttgttgtccaatatggaggcacaacacaacgacttagaatttaagttggcgggagccgaaagagagaaacagaagttgggcaaagaaatcgtgcgcctgcagaaggacctccgtatgcttaggaaagaacatcagcaggagctggaaattctgaagaaagagtacgatcaagagcgcgaagagaaaatcaaacaggagcaggaggacctggagctaaagcacaactccactctcaaacaactcatgagagagttcaatacccaacttgcacagaaagagcaggagctggaaatgactattaaggaaacaatcaacaaggcccaggaggtggaggccgagctgttggagtcccaccaagaggagacgaatcagctcctaaagaagatagctgagaaggacgacgacctgaaaaggacagcaaagagatacgaagagattctcgatgccagggaagaagagatgaccgctaaagttagggacctgcagactcagctggaagagctccagaagaaataccagcagaaattggaacaggaagagaaccctgggaacgacaatgttactatcatggagttgcagacacagctagctcagaagaccaccttaatctccgattctaagctgaaggagcaggaatttcgggaacagattcacaatctggaagatcgcctgaagaagtatgagaaaaatgtttatgccactactgtggggacaccttacaaaggcggaaacctgtaccatacggacgttagcctgtttggagaacctacggaattcgagtacctgcgcaaagtgctgtttgagtacatgatgggccgagagactaagaccatggctaaggttattactacggtcctcaaatttccagatgaccagacacagaagatcttggagcgagaggatgcacggctgatgtttacatccccacgatccggcatatttta

SEQ ID NO: 225150 - DNA, 6731 bp, synthetic construct
  misc_feature 1..6731: note = Description of Artificial Sequence: Synthetic coding sequence
  source 1..6731: mol_type = other DNA
atgtttaaaaagttaaagcagaaaatttccgaagagcagcagcagttgcagcaagccctggctcccgcacaagctagctctaacagctcgactcctaccaggatgcggtcccgcacatcttccttcaccgagcagctagacgaaggtacacctaaccgagagaatgcctcaactcatgcatctaaaagccctgattccgtgaatggtagcgaaccctcaattccccagtcaggcgatactcaatcatttgcccagaagttacagctgcgagtccctagtgtggagtccctgttcagaagccccattaaggagagtttgtttcggtcttcctcgaaagagtctctcgtgagaacatcctcccgagaatccctaaatcgacttgatctggattcaagtaccgcatccttcgaccccccaagcgacatggattcggaggctgaggatctggtgggtaattctgactctttaaacaaagagcagcttatacagaggctccggagaatggagaggtctctgagtagctacagagggaagtactctgaactggtcaccgcctaccagatgctgcagagagagaagaaaaagttacaggggattttatctcagagccaggacaagtccttaaggagaatagcagaactgagagaggagttgcaaatggatcagcaggcgaaaaagcacctccaggaagagttcgacgcatcgctggaggagaaagatcaatacatatctgtgctacaaacccaggtgtccctcctgaaacagaggctgcggaacgggcctatgaatgttgatgtgctgaaaccgctgccccaactggagccacaggctgaggtcttcaccaaggaggaaaatcctgaaagcgacggtgagccagtcgtagaggatggtacgtctgtcaagactctggaaaccctgcaacagagggtaaaacgtcaggaaaacctccttaaacgctgcaaagagaccatccagtcgcacaaggagcaatgtacgctcctgacgtcagaaaaggaggcactccaggagcaactggatgagcgcctgcaggaattggagaagatcaaagatctacacatggcagagaagacgaagctgatcacccagttaagagacgcaaagaatctgatcgaacagctcgagcaagacaaaggaatggtgatagccgaaactaagaggcagatgcacgaaactctggaaatgaaagaagaagaaatcgcccagctccggtccaggatcaagcagatgacgacacagggcgaggaactcagagagcaaaaggaaaagagtgagagagccgcatttgaggaattagaaaaggctttgtcaactgcccagaaaacggaggaggctagaagaaagctgaaggccgagatggacgagcagataaagacaattgaaaaaaccagcgaagaagaaagaataagtctacagcaggagctgtcacgcgtgaagcaggaggtggtggatgttatgaagaaatcaagtgaggaacagatcgcgaaactccagaagttgcatgagaaggaacttgccagaaaagagcaggagctgactaaaaaactgcagacacgtgagagggaatttcaggagcaaatgaaggtcgccctagagaagagccagtccgaatacctgaaaattagtcaagaaaaagaacagcaggaatctttggctctggaagaactcgaattgcagaaaaaagccattctaactgagagcgaaaataagctccgggatctgcagcaggaagctgagacatatagaacgcgtatcctggagctggagtcctccttggaaaagtcactacaggaaaataagaatcagtctaaggatctggctgtgcatttggaggccgagaaaaataaacacaataaggaaatcaccgtgatggtcgaaaaacataaaactgagctggaatccttgaaacaccaacaagatgctctctggaccgagaaactgcaggtgttgaaacagcagtaccagaccgagatggaaaagttgcgggaaaaatgcgaacaggaaaaagagactcttttgaaagacaaggagattattttccaggcacatatagaagaaatgaatgaaaagacgttggagaagctggacgtgaaacaaaccgagctggagtccctgagcagtgagctgtccgaagtgcttaaagcgaggcacaaactcgaagaagagctgtccgtgttgaaggaccagaccgacaagatgaaacaggagctagaggcgaagatggatgagcagaagaaccaccaccaacagcaggtggatagtatcataaaggaacacgaagtgtcaatccagcggactgagaaggccctcaaggaccagatcaatcaacttgaactgctcttgaaagaaagagataagcaccttaaggagcatcaggcgcatgtggaaaacctggaggcggacataaaacgatccgagggggaactgcaacaggcaagcgctaagctggacgtattccagagctatcaaagcgcaacccacgagcagaccaaggcctacgaagagcagttggcgcagctacagcaaaagctcctcgaccttgagaccgagcgcattctgcttaccaagcaggtcgccgaggttgaagcccagaagaaggacgtgtgcaccgagctcgatgcacacaaaatccaagtccaggatctgatgcagcagcttgagaagcaaaacagcgaaatggaacagaaagtgaaaagccttacccaggtctacgaatctaagctcgaggatggaaacaaggaacaggagcaaacgaaacagattctggtagaaaaggaaaacatgatcctgcagatgcgcgagggacagaagaaagagatcgaaatcctgactcagaagttatccgccaaggaagattccattcacattctcaatgaggagtacgagacaaagttcaagaatcaggagaagaaaatggagaaagttaaacagaaggcgaaagagatgcaggaaaccttgaaaaaaaaactgcttgaccaggaggctaagcttaaaaaggagctggaaaatacagctctggaactgtcccagaaggagaagcagtttaacgccaaaatgcttgagatggcccaggctaatagcgccggtatttcagatgctgtgtctcgactggagacaaaccagaaggagcagatcgagtccttaacagaggtgcatcggagagaactgaacgatgttataagcatctgggaaaagaaactaaaccagcaggctgaggaattgcaggagatccacgaaatccagttgcaggaaaaggagcaagaggtggccgaactaaaacagaaaattctgcttttcgggtgtgagaaagaagaaatgaataaggagataacctggttaaaggaagagggggttaagcaggacactaccctcaacgagctgcaggaacagctaaaacagaagagcgcccacgttaatagcttagcccaagacgagaccaagttgaaagcccacctggaaaagctagaggttgacctgaataaatctctgaaggaaaacacattcctacaggaacagctggtggagctgaagatgttggctgaagaagataagagaaaggtgtctgagctgacctcaaaattaaagacaaccgatgaagaatttcaaagccttaaaagttcccacgagaaatctaataagtccctggaagacaaaagcctcgagttcaagaagctgagcgaggagctggctatccagctcgatatttgctgcaagaagacagaagccctcctggaggccaaaactaacgagctgattaacatctcctccagcaagaccaatgccattctttctcggatctctcactgccagcaccgaacaacaaaggtgaaggaggccctccttattaagacctgtacagtttctgagctggaagcccagttgcgacagctgaccgaggaacaaaacacactaaatatctcattccagcaggcaacacatcagctagaagaaaaggaaaaccagattaagagcatgaaggcagatattgagtcgcttgtgacagaaaaggaggccctgcagaaggagggagggaaccagcagcaggccgctagcgaaaaggaatcttgcataacacagctcaagaaggaactgtcagaaaatataaatgccgtgactctgatgaaagaggagctgaaggagaaaaaagtggagatcagctcgctctccaaacagctgacagacctgaacgtgcaactgcaaaactccattagtctttcggagaaagaggctgcaatctctagtctacggaaacagtatgacgaggagaagtgtgaactgctggaccaggtgcaggacctgtcgtttaaggttgacactctcagtaaggagaagatcagcgctctggagcaagtggacgactggtcaaacaagttctccgagtggaagaagaaagcccagtctcgctttacccagcaccagaacacggtgaaggaattgcagatccagcttgaattgaagagtaaggaggcctatgaaaaggacgaacagatcaatctgctcaaagaggaattagatcagcaaaataaaagattcgattgtctgaaaggggagatggaggacgacaagagcaagatggagaagaaggagagcaatctggaaaccgagctcaagagccaaaccgcaagaattatggagctggaggaccacatcacacagaagaccattgagatcgagtctcttaacgaggtgctcaaaaactacaatcagcagaaagacatcgagcacaaagagttggtccagaagctgcaacactttcaggaactgggggaggaaaaggacaaccgcgtgaaggaagcagaagaaaagatcctcacattggagaaccaagtgtattctatgaaagccgagttagaaacaaagaagaaggagttggaacatgttaacctctccgtgaaatccaaagaggaagaactcaaagccctggaggaccgactcgagtctgagtccgcagctaagctggcagagctcaagcggaaggcagaacaaaagattgctgccataaagaaacagctcttatcccagatggaagagaaggaagagcagtacaagaaaggcactgaaagccatttatcggaactgaacactaaactgcaggaacgcgaacgggaagtgcatattttggaagaaaagctgaaaagtgtggagtccagccaaagcgaaacactcattgtacccagaagcgccaagaacgttgctgcttataccgagcaggaagaagcagacagccagggatgcgtgcagaagacctacgaagagaaaatctccgtgctacaacgcaatcttaccgaaaaggaaaaactgctgcagcgagtcggccaggaaaaagaggagacagtgagcagtcatttcgagatgagatgccagtaccaggaacgactcatcaagttggagcatgcggaggccaagcaacacgaggatcagtccatgataggccatctacaagaagagcttgaagaaaaaaataagaagtatagcttaattgtggctcaacatgtggaaaaggagggagggaagaacaatattcaggcgaagcagaacctcgaaaatgtgttcgacgacgtacagaaaaccctgcaggaaaaggaactgacttgccagatcttggaacagaaaatcaaggagttggatagttgtcttgtacggcagaaggaggtacacagggtggagatggaggaattgacttctaagtacgaaaagctgcaggccctgcagcagatggatggcaggaacaagccaaccgagttacttgaggaaaataccgaggagaagagcaaaagtcatttagtgcagcctaaactgctgtccaacatggaggctcaacacaacgatctcgagttcaaactggcaggggctgagcgggaaaagcagaaacttggaaaagagatagtcagactccagaaggatctaagaatgctgcgcaaagaacaccagcaggagctcgaaattttgaaaaaggagtacgaccaggagcgggaggaaaaaatcaagcaggaacaggaagacctggaactcaaacacaatagcactctcaagcagctaatgcgagagtttaatactcagctggcacagaaggagcaggaactagagatgacaatcaaggagacgattaacaaagcacaggaagtggaggcggagctgctggagagtcatcaagaagaaacaaaccaactgttgaaaaagattgctgagaaggacgacgatcttaaacggaccgccaaacgctacgaggagatccttgacgccagagaagaagagatgaccgcaaaagtgagggaccttcagacacaactggaggagctgcaaaagaaatatcagcagaaactcgagcaggaagagaatcccggaaatgacaatacccaactagcccagaaaacgaccttgatctccgactcaaaactgaaagagcaggagtttcgagagcagattcacaatcttgaggacagactgaagaagtatgaaaagaacgtttatgccactactgttggaacaccctataaaggaggcaatctgtatcacacagacgtgagtcttttcggcgaaccgaccgaattcgaatacctacgaaaggttttgttcgaatacatgatgggcagggagacaaaaactatggcaaaggtcatcactaccgttttgaagttccctgacgatcagacacagaagatcctggagcgcgaggacgccaggctgatgagctggcttcggagttcctccta

SEQ ID NO: 225151 - DNA, 2196 bp, synthetic construct
  misc_feature 1..2196: note = Description of Artificial Sequence: Synthetic coding sequence
  source 1..2196: mol_type = other DNA
atgtcctggttcgtcgatctcgcaggtaaggccgaggatctgcttaacagagttgaccaaggcgctgcgactgcactgtcgagaaaagataatgcctccaatatttactctaagaatacagactatactgagctgcatcagcaaaataccgacctgatctatcagacaggacctaaatccacctatatctcctcagcagccgacaacattaggaatcaaaaagctactatcttggctggcactgccaatgttaaggtaggatcgcggacccccgtagaagcctcccaccccgttgagaatgcatccgtgcctcgcccaagttcccattttgtacggaggaagaagtctgaacccgacgatgaactcctcttcgacttcctgaacagttctcaaaaggaacccaccggccgtgtcgaaatcaggaaagaaaaaggaaagaccccggttttccagagcagccagacttcttccgttagcagcgtgaaccccagtgtgaccaccatcaaaaccatcgaggagaactcattcggcagccaaactcatgaggccgcaagtaatagcgacagttctcacgagggacaggaagagtccagtaaagagaacgtttcgagtaacgccgcttgcccggaccatacccctactccgaatgatgatggtaagtcacatgagctttctaatctgcgcttagagaaccagcttctacggaacgaagtccaatccctcaatcaggagatggccagcctgttacagaggagcaaggaaacgcaagaagaactcaataaagcgagggccagagtcgaaaagtggaatgcagaccattcaaagtcagatcggatgacccgcggtctgcgggctcaggtagacgatctcaccgaagctgtcgcagctaaggactcccaacttgccgtactgaaagtccgcctgcaagaagcagaccagctgctctcgaccaggacagaggccctggaggccttgcagagtgagaaatctcggatcatgcaggatcagtccgaagggaattctttgcagaaccaggctctgcaaacattccaagaacggctgcacgaggccgatgctactctcaaacgcgagcaggagtcttataaacagatgcagtctgagtttgcggctcggctaaataaagtggaaatggaacggcagaatctggccgaggctatcactttggctgagagaaagtatagcgatgagaaaaaacgcgtggatgagctgcagcagcaggtgaaactctacaagttaaatctcgagtcgagcaaacaggagcttattgactataagcagaaggccacgcggatattacaatctaaagaaaagctaatcaattcattaaaagagggcagtggctttgaggggctggactcttctacagcttcgtctatggagcttgaggaacttcgccatgagaaagagatgcagagggaagagattcagaaactcatgggccagatacaccagttgcgaagcgaactacaggacatggaggcacagcaagtgaacgaggcagaatccgcgagggagcagctgcaagatctgcacgaccaaattgcaggccaaaaggccagtaaacaggagctcgagactgagctggaacgcctgaagcaggaatttcactacatcgaagaagacttgtacaggactaagaatacactgcagtcacggattaaggatcgggacgaagagatccagaaacttagaaaccagctgacaaataagacgctgagcaactctagccagtcggaactggaaaaccggctgcaccagctgaccgagacactgatacaaaagcagacaatgctcgagtccttgtcaaccgagaaaaattccctagtctttcagttggagagattagagcagcagatgaactcagcctcagggagttcctccaatggttcttcaatcaatatgtcaggaatagacaatggggaagggacccgtcttaggaatgtcccggttcttttcaatgacactgagacaaatttggctggtatgtacggcaaagtgaggaaggctgcatcttccattgaccagttttccatcaggctaggcatcttcctgcgacgatatcctatcgccagagtgtttgtcataatttatatggcactcctacatctctgggtcatgatcgtgctccttacctacactcccgagatgcatcacgaccagccatacggcaagtag

SEQ ID NO: 225152 - DNA, 2076 bp, synthetic construct
  misc_feature 1..2076: note = Description of Artificial Sequence: Synthetic coding sequence
  source 1..2076: mol_type = other DNA
atgagctggttcgtcgatctagccggaaaagcggaggaccttttgaatcgcgtggatcagggggcagcaaccgccctgagcaggaaggacaatgcttctaacatctattctaaaaacacggattacactgaactgcaccagcagaataccgatcttatctaccagacgggccctaagtctacttacatatcctcagccgctgataatattaggaatcaaaaagctactatcctagcaggcaccgctaatgtgaaggtggggagcaggacacctgtggaggcaagtcaccctgttgagaatgccagcgtaccacgtcccagctctcatttcgtgcgcaggaagaagtctgaacccgatgacgaactgttgtttgacttcttaaatagctcacagaaggagcctactgggagagtggagatccgcaaagagaaggggaaaacccccgtttttcagtcaagccaaacctcctctgtttcttccgtgaatcctagtgtcacaactatcaaaaccatcgaggagaacagtttcggatcacagacccacgaggctgcttccaactctgatagctctcacgaagggcaggaggagtcctcaaaagagaacgtgtcgtcaaatgctgcctgtcccgaccatacaccgacacccaacgatgatggcaaaagccatgagttgtcaaatctaagactggagaaccagctcttaagaaatgaagtccaatccttgaaccaagaaatggcatctctgctgcagcgcagcaaagaaactcaggaagagcttaataaagcacgagcgcgagtggaaaagtggaacgcggaccactccaagagcgatcgtatgacacgagggttaagagcccaggtcgatgatctaacagaggccgtagccgctaaggatagtcaactggctgtcctgaaagtgcggctgcaagaggccgatcaactgctcagtacccggacagaagccctcgaggccctgcagtccgagaagagcaggatcatgcaagatcagtccgagggaaattcacttcaaaaccaggccttgcagacttttcaagaacggctccatgaggccgacgccacgctgaagcgagaacaggaaagctataagcagatgcagtccgaattcgccgctcgccttaacaaagtggagatggagcgccagaaccttgctgaagctatcaccttggccgaaagaaagtattcggatgagaagaagagggtggacgaactccagcagcaagtcaagttgtacaagctaaatctggagagtagcaagcaagagttgatcgactacaagcagaaggctactcgcatcctgcaatctaaggagaagctgattaacagtttgaaagagggatctggcttcgaaggactcgatagcagtaccgcgagctccatggaactcgaggaacttcgccacgagaaggagatgcagcgagaagagatacagaagctgatgggccaaattcaccagctccgtagcgaacttcaggacatggaagcacagcaggtgaacgaggctgagagcgctagagaacagctgcaggaccttcatgaccagattgcaggccagaaggcaagcaagcaggagctcgagaccgagcttgagcggctgaagcaggagtttcattacatcgaggaagacctgtataggacaaaaaacactttacagagtcgaattaaggacagggacgaggagatccagaagttaaggaaccagttaacaaacaagacccttagcaattcctcacaatctgagctggaaaatcgtctgcatcagctcaccgagacgcttatccagaagcagacaatgctcgagagcctctccacagagaaaaattcattagtgttccagttagaacgtttggaacagcagatgaacagcgctagcggctcaagctccaatgggagttcaatcaacatgtctggcatcgataatggagaaggcacaaggctccggaatgtacccgtactgtttaatgatactgaaactaatctggccggaatgtacgggaaggttcggaaggcagcaagttccatagaccagttcagactgtgctttacatcaggaagctag

SEQ ID NO: 225153 - DNA, 1923 bp, synthetic construct
  misc_feature 1..1923: note = Description of Artificial Sequence: Synthetic coding sequence
  source 1..1923: mol_type = other DNA
atgagctggttcgttgatcttgctggaaaggcggaagacctgctgaacagggtcgatcaaggcgctgcaaccgcattgtcaagaaaggacaatgcttcaaacatatattcaaagaacacagactacacagagctccatcagcaaaatacagaccttatctaccagacaggacctaagtctacctatatcagctctgctgctgataatattcggaaccagaaggccaccatcaaaactattgaagaaaatagcttcggcagccagacgcacgaagccgcatccaacagtgattcaagccacgagggccaggaggagtcatcgaaggaaaatgtgtccagtaacgctgcctgccctgaccacactcctactccgaatgatgacggcaaaagccatgaactgtctaatttaaggctagagaaccagctattgcgaaacgaagttcagagtcttaaccaggaaatggcatcccttttacagcgcagtaaggagacccaggaggaactgaacaaggcacgtgctagggtcgagaaatggaacgctgaccactctaaatcagatagaatgacacgcggtttgcgcgcacaggtagacgacttgacggaggcagtggcggctaaggactcccagctagccgttctaaaagtaaggctccaagaggctgaccagttgttaagtactaggactgaagcgctggaagcacttcagagtgaaaagtcacggataatgcaagatcaatccgaaggaaattcgctacagaatcaggccttgcagacctttcaggaacgattgcatgaagctgacgccaccctgaaaagagagcaggagtcgtataagcagatgcagtcagagttcgcggcacgcctgaacaaggtggagatggaaaggcagaacctggccgaggcaattacactcgccgagaggaagtacagcgacgaaaaaaagcgcgttgatgaactacagcaacaggtgaaactgtacaagctcaacctagagtcctcaaagcaggagttaatcgattataagcagaaggccaccaggattctccagagcaaggaaaagctcatcaatagtttaaaggaaggttcaggcttcgaaggtcttgactctagtactgccagcagcatggagctggaagaacttaggcatgagaaggagatgcagcgcgaggagatccaaaagctgatggggcagatccaccagctgagaagtgagctccaagatatggaagcccaacaggttaacgaagctgagagcgcccgagagcaactgcaggacctacatgaccagattgcaggccaaaaagcatctaaacaggagctggagaccgagctggagcggttgaagcaggagttccattatatcgaagaggacctgtaccgcaccaaaaatactctccagagccgtattaaagatagagatgaggagatacagaagctacgcaatcagctgactaacaagaccttgtccaatagctctcaaagcgagttggaaaacaggctgcaccagctgactgaaactctgatccaaaaacagactatgctcgagagtctgagtaccgagaagaactcacttgtgtttcaattagagaggctggaacagcaaatgaacagtgctagtggatcctcttcaaacggatccagtattaacatgagcggcatagataatggagaaggtactcgacttaggaacgtccccgtgttgttcaacgatactgaaacaaacctggctggcatgtacggcaaagtccgcaaggcggcttcatcaattgatcagttttccatcaggctggggatcttccttcggcgttacccgattgcccgtgtatttgtgataatttatatggccctgctacatctgtgggtgatgatagtactgcttacctacacgcccgagatgcaccacgaccagccatacggtaagtag

SEQ ID NO: 225154 - DNA, 504 bp, synthetic construct
  misc_feature 1..504: note = Description of Artificial Sequence: Synthetic coding sequence
  source 1..504: mol_type = other DNA
atggccacggaagttcataacttacaagaacttcgaaggtctgcctctttagcgacaaaggtgtttattcaacgggactattctgatggtacaatatgtcagtttcagacaaagtttccaccagagctggactcccgaatcgaacgccagcttttcgaggagacggtcaaaaccctgaacggattctacgccgaggcagagaaaataggcggtagctcatatctcgaaggttgtcttgcttgtgccacagcctatttcatattcctatgcatggagactcactacgagaaagtcctgaagaaaatttcccgttacatacaggagcagaacgaaaaaatatttgcaccacgcggactgctattgactgatccagtcgaaaggggtatgcgtgtgattgagatttcaatttacgaagaccgctgcagcagcggatcttcctcctctggaagctcaagtgggtctggctcttcctctggcggtggcggaggagcgggagcgcgatag

SEQ ID NO: 225155 - DNA, 1812 bp, synthetic construct
  misc_feature 1..1812: note = Description of Artificial Sequence: Synthetic coding sequence
  source 1..1812: mol_type = other DNA
atggctgaggaaaccggccaaagtaaactggcggctgccaagaaaaagtttaaagagtattggcagagaaatcgcccaggtgtccctgctgctgctaagcggaatacgaaggctaacgggagctcccctgaaactgctgcatccggagggtgtcactcctcagaggccagcagctccgccagctcttcacttcacgctcgccagtctccctgccaggagcaggcagcggtcctgaactctcgctcaataaagatcagccgacttaacgatacaattaaatccctcaagcaacagaagaaacaggtggaacaccaactcgaagaggagaagaaagcaaataacgagaaacaaaaagcagaaagggaattggaaggccaaatacaacgcctcaacaccgaaaagaaaaagctgaacacagacctctatcacatgaaacactctctccgctatttcgaagaggaaagtaaagatctcgctgggaggctgcagcgaagcagtcagcggatcggagaattggaatggtctctgtgtgccgtcgcagctacgcagaagaagaagcccgatgggttctcctctcgcagcaaagccttgctgaagcgacagcttgaacagtccattcgagagcagattctgctgaaaggacacgtcacacagctgaaagaatcactgaaggaagtgcagctggaacgtgaccagtatgccgaacagattaagggcgagcgagcgcagtggcagcagcgaatgcggaaaatgtcccaagaggtttgcaccttaaaagaggaaaagaagcacgatactcatagagtggaagaactggagcggagcctctcgaggctgaaaaaccagatggccgagccattacctccggatgccccagcagtatctagcgaagtggaactgcaggatctcaggaaggagctggaaagagtggccggagaacttcaagctcaggtggaaaataaccagtgtataagccttctgaacagggggcagaaagaacgacttagagaacaggaagaaaggctgcaggagcaacaggagcgcttgagagagagagaaaagaggctgcaacaattggctgagccgcagtctgatctggaggagctcaaacacgagaacaaatcagccctacagcttgaacagcaggtgaaggagctgcaggaaaagttaggtcaggttatggaaaccctgaccagcgcagagaaagaacccgaagcggctgtcccagcaagcggtacaggtggcgagtctagcggactcatggacctgttggaggagaaagccgacttgagagagcacgtggagaaactggaactgggttttattcagtacagacgtgagcgttgccatcagaaggttcaccggctgctgaccgagccaggcgactcagctaaggatgcttcaccaggaggcggacaccaccaagccggtcccggacagggtggcgaggagggcgaagcagccggagctgccggtgatggcgttgccgcatgcggaagctacagtgagggccatgggaagtttctggcggcagctcggaatccagctgcagagccatctccaggtgccccagccccacaagaactgggcgctgcagacaagcatggggacctgtgtgaggcatcacttaccaacagcgtcgaacccgctcaaggagaggccagggaggggtccagtcaggataatccgaccgctcagcccgtgcttcagcttttgggcgaaatgcaggatcatcaggagcatcccggtctgggcagcaactgttgcgtgccttgcttttgctgggcctggctcccgagaagaaggcggtag

SEQ ID NO: 225156 - DNA, 1485 bp, synthetic construct
  misc_feature 1..1485: note = Description of Artificial Sequence: Synthetic coding sequence
  source 1..1485: mol_type = other DNA
gagaagaaggctaacaacgagaaacagaaggctgagcgggagcttgaaggccaaattcagcgcttaaacaccgagaagaaaaagctgaataccgacctgtatcatatgaagcactcgctccggtactttgaagaagagagtaaggacttggcgggacgcctgcagagatcctcacagagaatcggtgaattagagtggagcctatgtgctgtggcagccactcagaagaaaaaaccagatgggtttagttcccggagtaaagcgttgctgaagcggcagttagaacaatcaattcgagagcaaatcctcctaaagggtcacgtgacacagctgaaagagagccttaaggaagttcagcttgagagagaccaatatgccgagcaaattaagggagagagggcccaatggcagcagcgcatgaggaagatgagccaggaggtgtgcaccctcaaagaagaaaagaagcacgacactcacagagtcgaagagttggagcgatctctgagcaggctgaaaaaccagatggctgagcctctacctcctgatgctcccgcagttagctcagaggtggagctgcaggacttgcgtaaggaactggaaagagtggccggtgaactgcaagctcaagtggagaataatcagtgcatttcccttctgaaccgcggacagaaggagagactaagagaacaggaagagaggctccaagagcaacaagagcggttaagggaacgggagaagaggctgcagcaactggccgaacctcaatccgatttggaggaactgcatgagaacaagagcgccttgcagctggagcagcaggtcaaagagttacaggagaaactgggacaggtgatggagaccctgacctccgccgaaaaggagcctgaggcggctgtgcctgcaagcggcaccggcggagagagctccggtctgatggacctgctggaggaaaaggccgacctgagggaacacgtcgagaagcttgagctgggcttcatacagtacagacgagagagatgtcaccagaaagtccaccgactactcacagaacccggagacagcgccaaagacgccagccccggaggtggccatcaccaggcaggaccaggacaggggggtgaggaaggagaggcagccggtgccgctggcgatggggtggcagcatgcgggtcttactctgaggggcacgggaagtttctggctgctgctaggaatcccgcagcagaaccgagccccggagctcccgctcctcaggaattaggcgcagccgacaagcacggagatctgtgtgaagcatccctgaccaactccgtcgagccagcccagggcgaggctagagaggggtcgagccaggacaaccctactgcgcagccagtgctgcagctcctgggagaaatgcaagatcaccaagaacatcccggtttgggatcgaactgctgtgttccatgcttttgttgggcttggctccctaggcggcgaagatag

SEQ ID NO: 225157 - DNA, 1812 bp, synthetic construct
  misc_feature 1..1812: note = Description of Artificial Sequence: Synthetic coding sequence
  source 1..1812: mol_type = other DNA
atggccgaagagacaggacagagcaagctcgccgctgcgaagaagaaattcaaggagtattggcagaggaacaggcccggtgtgcccgctgctgccaaaagaaacactaaagcaaatgggtcctcgcctgagacagcggcaagcggcggatgccactcctcagaagcaagttctagtgcttcatcttccttgcacgctaggcaatccccctgccaggaacaggccgctgttctgaactcgcggtcaattaagatcagcaggctcaatgataccattaagagtctcaaacagcaaaagaagcaggttgagcatcagctcgaagaagagaaaaaggccaataatgaaaagcagaaggccgagcgcgagctggagggccagatccaacgcctcaataccgagaagaagaagctgaacaccgatctctatcacatgaaacactcgctgcgttactttgaagaagagtcaaaagacttggctggacgtctgcagcgttcttctcagcgcataggcgagctggagtggagtttgtgcgctgtggctgccacacagaaaaagaagcctgacggctttagctctcgcagcaaggctctcctgaaacgtcagctggaacagagtattagggaacagattctgcttaaagggcatgttacgcagctgaaagaaagcctcaaggaagttcagttagaacgggatcagtacgccgagcagattaagggcgagagagctcagtggcagcagcgcatgcgaaagatgagccaggaagtttgtactctgaaagaagagaaaaaacatgacacacaccgggttgaggagctggaaaggagcttgagcagactgaaaaatcagatggctgagccacttcctcctgatgccccagcagtgtccagtgaggtagagttgcaagacctgcgaaaagaattggaaagagtggccggtgaattacaggctcaggtcgagaacaaccagtgcattagcttgcttaatcgcggacagaaggagcgtctccgggagcaggaagagagactgcaagagcaacaggaacggctccgtgagcgtgagaagcgtctgcaacagctggccgaacctcagtccgacctggaagagctcaaacatgaaaacaagagcgcgctgcagctggaacaacaggtgaaggagttacaggaaaagcttggccaggtcatggaaacgctgacctcagcagagaaggaacccgaggctgcagtcccagcgtctgggactggcggagagtcctcaggtctgatggatcttctggaggaaaaggccgatctgcgggagcatgttgagaagttggagcttggctttattcaataccggagagaacggtgtcatcagaaagtgcacaggctgctgaccgaaccaggagactccgcaaaagacgcatcgccgggtggcggacaccatcaggctggccctggtcagggcggagaggaaggagaggccgcaggtgctgccggtgacggcgtcgcggcatgtggatcatattccgaggggcatggtaaattcctggcagccgcaaggaatcctgccgcagaaccatcccccggtgccccagcccctcaagaattgggggctgcagataagcatggagatctctgcgaggccagcctcactaacagcgtggagcccgctcaaggggaagctcgagagggcagctctcaagacaatcccacagctcagcctgtgctacagctgctcggcgagatgcaggaccaccaggagcatccaggcctggggtccaactgctgcgtgccgtgtttttgttgggcgtggctgccccgacgacggagatag

SEQ ID NO: 225158 - DNA, 1902 bp, synthetic construct
  misc_feature 1..1902: note = Description of Artificial Sequence: Synthetic coding sequence
  source 1..1902: mol_type = other DNA
atgctgccagtcgatggagaagagcgcaaatcagaaggctccgacacggagggggaccgcactagtccttgcgccggtcccacctcttccgcaaccctaaaggacctagaggtgggtgggtccggctggcgctgttccgaccccgcaggccagccgagcaacctgttgccccagcgcggattgggagccccactacctgctgaaacagcacatacccagccaagccctaacgatcggagcttgtatttgtcccccaagtcttctagcgctagtagtagcttgcatgcacgccaaagtccttgtcaggagcaggccgctgttctcaatagcagaagtattaaaatcagccgactcaacgataccattaagtccctcaaacaacagaagaagcaggtagaacaccagttagaggaagaaaagaaggccaacaacgagaaacagaaggctgagcgagagcttgaaggacagatccaacgactgaataccgagaagaagaagcttaacacggatttgtatcacatgaagcactccctgcgctatttcgaggaggaaagtaaagatttagccggaaggctgcaaaggtcctcacagagaatcggggagctggagtggagcctctgcgctgtggctgctacacagaagaagaagccggacggattcagcagtcgaagtaaagctctcctgaaacgacaattggagcaatcaatcagggagcagatcctcctgaaagggcatgtaacgcagttgaaagaaagtctaaaagaagtgcaacttgagagggaccagtatgctgagcagattaaaggagagagagcccagtggcagcagaggatgcgcaagatgtcacaggaggtttgtacgctgaaggaagaaaaaaagcatgacactcaccgcgttgaggagttggagcgtagtttatctcgcctgaaaaatcagatggctgaaccactgcctccagacgcccctgccgtctcttcggaggtggagctgcaggatctccgaaaagaactggagagggtggccggagagctccaggcccaggtggagaataatcaatgtatttccctgctaaaccggggacagaaggagagactgcgtgagcaggaggagaggctgcaggaacaacaggagaggctgcgagagcgcgagaaacgcctgcaacagctggcggaaccccagagcgatctcgaggaactgaaacatgaaaacaaatctgcccttcagttggagcagcaggttaaggagctgcaggaaaagctggggcaagtcatggagaccctgacctctgcagaaaaggagccggaagccgcagtcccagcctctgggactggcggtgaatcttcgggactgatggacttgctcgaggagaaggcagaccttcgagagcatgtggagaaactggaattgggctttattcagtacaggcgggaacggtgccaccaaaaagtgcacaggctactgacagagcccggagacagcgccaaggacgctagccctgggggaggccaccatcaggctggtcctggccaagggggtgaggagggagaggcggcaggcgctgctggcgatggcgtggccgcttgtgggtcctatagtgagggtcatggaaagtttcttgccgctgctaggaacccagccgctgaacccagtcctggcgcaccagccccacaggaactgggagccgcagacaagcacggcgacctgtgcgaagcatcactaaccaattccgttgagcccgctcagggtgaagctcgggagggcagttctcaggataaccccactgcccagcccgttctgcaattgctcggggagatgcaggatcaccaggaacatcctggattggggagtaattgctgcgtcccctgcttttgttgggcttggttgcctaggaggaggagatag

SEQ ID NO: 225159 - DNA, 9779 bp, synthetic construct
  misc_feature 1..9779: note = Description of Artificial Sequence: Synthetic coding sequence
  source 1..9779: mol_type = other DNA
atgttgtcgcggcttagcggtttagcaaatgtcgtgttacatgagttgtcaggagatgatgatactgaccagaatatgcgagctccgcttgacccggagcttcatcaggagagcgacatggaattcaataacaccacccaggaggatgtccaggagaggctggcatatgctgagcaactcgttgttgagctcaaagatatcatccggcaaaaagacgtacagctccagcagaaagacgaggccttacaggaagaacgaaaagctgctgacaacaaaatcaaaaagttgaagttgcatgcgaaagctaagctgacaagcttaaacaaatacatcgaggagatgaaggcgcagggagggacagttttgcccaccgagccccagtccgaagagcaactttcgaagcacgacaaaagttctacagaagaagagatggagattgaaaagatcaagcacaagctgcaggagaaggaagagttgatcagcaccttacaggctcagctcacccaagcacaagccgaacaacctgctcaaagctccacagagatggaggagttcgtcatgatgaaacaacaactacaggaaaaggaagaattcatttcaacactgcaggcacaactctctcagacccaagccgagcaggctgcacagcaggtcgtaagggaaaaagacgcaagatttgagacacaagttaggctgcacgaggacgagctgcttcagctcgttacccaggctgatgtggaaacagaaatgcaacaaaaactgcgagtgctacagcgcaagttggaagaacacgaggagagcttggtggggagggcgcaggtagtggacctcctgcaacaggagttaaccgccgctgagcagcgcaaccagatcctgtcccagcagttacagcaaatggaagcagagcacaacacccttcggaacaccgtggaaacggagagagaagagtcgaagattctgctggaaaagatggagttggaagtggcagaacggaaactaagttttcacaatctgcaagaggaaatgcaccatctgcttgaacagttcgaacaggccggacaggcccaggctgaacttgagtctcggtatagcgctctcgaacagaaacataaggccgagatggaggaaaaaactagccacattttgagcttgcagaagactggccaggagttacagagcgcctgtgacgccctcaaggaccagaattctaagcttcttcaagataaaaatgaacaggccgtccagtctgcccagaccattcagcagctcgaggatcagcttcagcagaaatctaaagagatctctcagtttcttaatcgtctcccactccagcagcacgagactgcatcgcaaacatcctttcccgacgtgtacaatgaggggacgcaggccgtcaccgaggagaacattgcgtctctgcaaaaacgggtggtcgagctggaaaacgaaaagggggcactgctgctgagcagcattgagctggaggaactcaaagctgaaaacgaaaaactttccagtcagataaccctattggaggcacagaacagaaccggtgaggccgatcgcgaggtgtccgagatatcaatcgtggacatagcaaataaaaggagctcttctgcggaagagagtggacaggacgtcctcgagaatactttcagtcaaaaacacaaggagttgagtgtgcttctcctagagatgaaggaggctcaggaagagatagcctttctgaaactccagttgcagggcaaacgtgctgaggaggccgaccatgaggttctggaccagaaggaaatgaaacaaatggaaggggagggaattgctcctattaagatgaaggtttttctggaggatactggccaagattttcctctgatgcctaatgaagaatcttccctccctgcagtggagaaggagcaagcctccaccgaacatcagagtcgcacatccgaagagatttctctgaatgacgcaggggtcgaactgaaatcaacaaaacaggatggcgacaaaagcctgtctgctgttcctgatattgggcagtgtcaccaggacgagttggaaagactgaagtcccagatcctggaactcgaattgaactttcacaaagcccaagagatctatgaaaagaacctggacgagaaggcaaaagaaatttcgaatctgaaccaactgatcgaagagtttaaaaaaaatgccgacaacaatagttccgcgtttacagctttaagtgaggaacgggatcagctgctctctcaggtgaaggaattatcaatggtgacagagctgcgtgcacaggttaaacaactagagatgaatctagccgaagcagaacggcaacgccgactcgactacgagtctcaaacggcccatgacaacctactgactgaacagattcactccctcagtattgaggcaaagtcaaaagatgtcaagatcgaggtgctgcagaacgaattagatgacgtgcagctccaattcagcgaacagagcaccttgatacggtcccttcagtcccagctacagaacaaagaatccgaagtcctcgagggtgctgaaagggtccggcacatctcttcaaaggttgaagaacttagtcaggcactgagccagaaggagctcgagatcacgaagatggatcagcttctccttgagaaaaagcgagatgtggagaccttacagcagactattgaagagaaggaccagcaggttaccgagatttctttcagcatgacggagaagatggtacagctgaacgaggagaaattttcattaggtgttgagatcaagaccctcaaagagcaactgaacctgctctcccgcgcagaggaggctaagaaagagcaagtggaagaggataacgaggtaagctctggcctgaagcaaaactatgatgaaatgagccctgcaggacaaatttctaaggaagagctgcaacacgaattcgacctgctgaagaaggagaacgaacagcggaagcgaaagctgcaggccgcactgataaatcggaaggaattgctgcagcgtgtcagccggttggaagaggagctcgccaacctgaaggacgagtccaaaaaggaaatcccattgtccgagacagagcgcggtgaagtcgaagaggacaaagagaacaaagagtacagcgaaaagtgtgttacatcaaagtgtcaggagattgagatctacctgaagcagaccatcagtgaaaaggaagtcgaacttcagcatatcagaaaggatcttgaggagaaactggctgcggaagaacagttccaagcactggtgaagcagatgaatcagaccttgcaggataagactaaccagatcgaccttctccaggccgagatttcagaaaaccaggccatcatacagaagttaatcaccagcaacactgatgcgtccgacggtgatagtgttgctcttgtaaaagagaccgtggttatcagtcccccttgcactggcagttcagagcactggaagcccgagctggaagaaaagattctagcactggagaaagaaaaggagcaattacaaaagaagcttcaggaagccctgactagcaggaaagcaatcctgaaaaaggcccaagaaaaggaaaggcatctgcgggaagagcttaaacagcaaaaagatgattacaatcggttgcaggaacagtttgacgaacagtcaaaggagaacgagaatataggggaccagctgagacagctgcagattcaagttagggaatccattgacggtaaattgccatctactgatcagcaggagtcttgctcaagcacaccaggcctggaggagccgctgttcaaggctacagaacagcaccacacacagcccgttctggaatccaatctgtgccctgattggcctagccacagtgaagatgcttctgctctacaaggtggcaccagtgtcgcccagatcaaagcccagctgaaagagatcgaggctgaaaaggtcgaactggaactgaaagtgagctccacaacatctgaactcaccaaaaaaagcgaggaggtatttcaactgcaggagcagatcaacaagcaggggctggagatcgaaagcttgaagacagtgtcacatgaggctgaagttcacgcagagtctttacagcagaagctagagtcctcgcaactgcagattgcaggtctcgagcatcttagagagctgcagcccaaactcgatgagttgcagaaactgatcagtaagaaggaagaagacgtctcttacctctccggacagctctcagaaaaggaggcagccttgaccaagattcagaccgaaattatcgagcaggaggatctgatcaaggcactccatactcagctggagatgcaggcaaaagaacacgacgaaaggatcaaacagctgcaggttgagctgtgcgaaatgaagcagaagccagaagagatcggcgaggagtcacgggctaaacaacagatccagaggaaattgcaggcagctcttatatccaggaaagaggcactgaaagaaaataagtctctgcaagaggagctgagcctggccagaggcactatagagcggttgactaagtcactcgctgacgtagagagtcaagtttccgcccagaacaaagaaaaggacacggtcttaggccgtttagctctgttacaagaggagcgtgataagctgatcactgaaatggacaggtcccttctggaaaaccaatcgctctcgagctcgtgtgagtctctgaagctggcactggaagggttgactgaggacaaggaaaagttggttaaagagatagagtcgctcaaaagtagcaagattgccgagtccacagaatggcaggaaaaacacaaggagctgcagaaggaatacgagattctcctgcagagttatgaaaacgtctcgaacgaggccgagcgcattcaacacgtggtcgaagcagtcaggcaagaaaagcaagagctatatggaaaacttcggtcgacggaggcgaacaagaaagaaactgagaagcaactgcaggaagccgagcaggagatggaagagatgaaggagaagatgcggaaatttgcaaagtctaagcagcagaagatcctggaactggaggaggaaaacgacagactgagagctgaggtccaccctgcgggtgatactgctaaggagtgcatggagacactgttgagcagcaacgccagcatgaaggaggagttagaacgggttaagatggagtacgagacactgtccaaaaagtttcagtccctcatgagcgaaaaagactccctctcagaggaggtgcaagatttaaagcaccagatcgagggaaatgtttccaaacaggcaaatctggaagcaactgagaagcacgacaatcagactaatgtcaccgaggaagggactcaatcaataccaggagaaactgaagagcaggattcgctgagtatgagcaccagaccaacatgcagcgaatcggtgcctagcgccaagagcgccaacccggctgtgtccaaggacttcagcagtcacgatgaaataaataattacctgcaacagattgaccagttgaaggagaggattgctggtcttgaggaggaaaaacagaaaaacaaggagttttcccaaactctggaaaacgagaaaaacaccctgctctcccagatctctacgaaggatggggaactcaagatgctgcaggaagaggtaactaagatgaacctactgaatcagcagatccaagaggaactgagtagagtaaccaaactgaaagagaccgccgaagaagagaaagacgatcttgaggagagactcatgaaccagctggcagagcttaacgggtctatcggaaactactgccaagatgtgacggatgcccagatcaagaacgaactcctggagtccgagatgaaaaatctgaaaaaatgtgtctccgaactggaagaggagaaacaacaattggtgaaggaaaagacgaaggttgaaagcgaaatcaggaaggaatacctggaaaaaattcagggggctcagaaagagccgggtaataaaagccatgccaaggaattgcaggagctgctgaaagaaaagcagcaggaagtgaagcaattacagaaagattgcattagataccaagaaaaaatttccgcactggaacggacagtaaaagcgctagaatttgtgcagaccgagtcacagaaggatctggaaataactaaggagaatctggcccaggctgtggaacaccgcaaaaaagcccaggctgagttagcatcattcaaggtcctgctcgacgacacccagagcgaggccgcacgggtccttgcggacaacctgaagcttaagaaggagctccagagcaataaggaatctgtgaagagccagatgaaacaaaaagacgaagatctggagcgcagattggaacaagcagaagaaaaacacctgaaagagaagaagaacatgcaggagaagctggatgctctgagacgggaaaaggtccaccttgaagagacgattggcgaaatccaggtgactttgaataaaaaagacaaggaggtgcaacagctgcaggagaacctggactccactgttacacagctggctgcatttacaaagagcatgtcctctctccaggacgacagagacagggtaatcgatgaggccaagaagtgggagaggaagttctctgatgccattcaatctaaggaagaggagatacgcctcaaggaggacaactgctccgtgcttaaggatcagctcagacagatgagcattcatatggaggagttaaaaatcaacatctccaggctagaacatgataagcagatatgggaatcaaaggctcagactgaggttcagctgcagcagaaagtgtgcgacaccctacagggagagaataaagagctcctgagccagttggaagagactcggcacctgtaccatagcagccagaacgagctggctaaactcgaaagcgaactaaagtcccttaaggaccagctaactgacctcagcaactccctggagaagtgtaaggagcagaaaggtaacctggaaggaattatcagacaacaggaagcagacattcagaattctaaattctcatacgagcaactggaaaccgatttacaggcctctcgcgagctcacttctaggttacatgaagagattaatatgaaagagcagaaaattatttccctcctctctggtaaggaggaggccatacaagtggccatcgccgagttgaggcagcaacatgataaagaaatcaaggagctagaaaacctcctgtctcaagaggaggaggagaatatcgtccttgaagaggagaacaagaaggctgtggataagacaaaccagctaatggaaacactgaagaccattaaaaaggagaatatccagcaaaaggcgcagttagactctttcgttaaaagcatgtcatccctacagaatgaccgcgataggatcgtgggcgattatcaacagttagaggagcgacacctcagcataattctggagaaggatcagttgatacaggaggccgctgccgaaaacaacaagcttaaggaagagattagaggactgcggtcccacatggacgatctgaatagcgagaacgctaaactggatgcggagctgattcagtacagggaggatctgaaccaggtcataacaataaaggattcacaacagaagcaactgctggaggtgcagctgcagcagaacaaggaactggagaataaatatgcgaaactggaggagaagctgaaagagtcggaagaggctaacgaggacctcagaaggagcttcaatgccctccaggaagaaaaacaggacctgtccaaagaaatcgagagccttaaggtgagtatttctcagttgaccaggcaggtgacagccctacaagaagaggggactctaggactttatcacgcccagttgaaagttaaagaggaagaggtgcaccgactcagcgcactcttcagtagctcccagaaaagaatcgcggaactggaagaagaactggtttgcgtccagaaggaggcggcaaaaaaagtcggcgagattgaagataaacttaagaaggagctgaagcacctgcatcacgatgcaggaattatgcgtaatgaaacagaaactgccgaagagagggtagccgagttagccagggacctggtcgagatggagcagaagttgttgatggtgaccaaggaaaataaaggtttgacagcccagatacagtccttcggccgttccatgagcagcctacaaaattccagagaccatgcaaatgaggaactagatgagctgaagcgtaagtacgatgcctcccttaaagaactggctcaactgaaggaacagggattgttgaatagagagagggacgcgttattgtccgagactgcattttctatgaattcaacagaagagaactcacttagccatctagaaaaacttaaccaacagctgctttctaaggacgaacagttactacatctctccagtcagcttgaggacagctacaaccaggtccagagcttctcaaaggccatggcctccctgcagaacgagcgggatcacttatggaacgagctagagaaattccgaaaaagcgaggagggcaagcaaagatctgccgctcaaccaagcaccagcccagccgaggtgcagagccttaagaaagccatgtcatccttacagaatgacagagaccggcttctgaaggagctgaagaaccttcagcagcaatatttgcaaatcaatcaggagatcactgagcttcaccctttgaaagcccagctacaggaatatcaagataaaacaaaggcctttcaaattatgcaggaagagctgcgccaggaaaacttgagttggcaacatgagctccatcagctcaggatggagaaaagcagctgggagatacatgaaagacgtatgaaagaacagtatctcatggctattagcgataaagaccagcagctctcccacctccagaacttaattcgcgagttacggtctagctcaagtcagacccaaccactcaaggtacagtaccagcggcaggctagcccagagacctctgcctctcctgatggcagccagaatctcgtgtatgagaccgagttgttgcgcacacaactcaacgactcactgaaggagatccaccagaaagagctgaggattcagcagctgaacagcaatttcagtcagctcctggaagagaaaaatacattgtcgatccagctgtgtgatacttctcaatctctcagagaaaaccagcagcactacggggacttactcaatcattgcgctgtgctggaaaagcaggtccaggagctgcaagccggacccttgaacatcgacgtggcccctggagccccacaggagaaaaatggcgtgcacaggaaatcagaccccgaggaactgcgggagccacagcaaagcttttcagaggctcagcagcagctgtgcaatacacgccaggaggtcaacgaactaaggaagctgctagaggaagagagagaccagcgcgttgccgcagaaaatgctctgagcgttgctgaagagcaaattaggcggctcgagcactccgaatgggattcttctaggacacccataattggcagttgcggaacacaagagcaggccttactgatcgacctcacctcaaattcctgccggaggactagaagcggagtgggttggaagagggttctgagaagtctgtgtcacagccggacacgggtgcctctcttggctgctatttacttcctgatgatccatgtgctgctgatcctctgctttacaggtcatctcta

SEQ ID NO: 225160 - DNA, 2919 bp, synthetic construct
  misc_feature 1..2919: note = Description of Artificial Sequence: Synthetic coding sequence
  source 1..2919: mol_type = other DNA
atgaaggcacaggggggtacagtgctgccaacagagccccaaagtgaggaacaactctccaagcatgacaagtctagcacagaagaggaaatggaaatcgagaagataaaacataagctgcaggagaaggaggagctgatctctaccctccaggctcagctgacgcaggcccaggcggagcagcccgctcaaaagctgcgcgtgcttcagcgtaagctggaagagcatgaggagagcctcgttggtcgggctcaggtcgtggatctcctgcagcaggaactgacagcagcagagcaacgtaatcagatcctgtctcagcagctacagcagatggaggcagagcataacactctccggaacaccgtcgagaccgaaagggaggaaagcaagattctactggagaaaatggaactggaggtagccgaaaggaagctgtcgttccacaatctgcaggaagagatgcatcatttactcgagcagtttgaacaagctggccaggcccaagcagagctggaatcacgctacagcgctctcgaacagaaacataaggccgagatggaggaaaagaccagccatatcctgtctctgcagaaaacaggccaagagctccaaagcgcctgcgatgccttgaaagatcagaactctaaactcttgcaggacaaaaatgagcaagctgtgcagagtgcccaaaccattcagcagctggaggatcagctgcagcagaagtccaaggagatttcacagttcttgaaccgcctgccactgcaacagcatgagacagcttcacaaactagcttcccagatgtctacaatgagggcacacaggccgtcaccgaggaaaacattgcgagtctgcagaagagggttgtggagctggagaacgaaaagggagctctgctgctgtcaagtattgagcttgaggagttaaaggctgaaaacgagaaactttcgagtcagatcacacttctggaagcacaaaacaggactggcgaagccgatcgggaagtgagcgaaatttccatcgtggacatcgccaacaagcggagctcatctgcggaagagtctggccaagacgtcctcgaaaataccttttcccagaagcacaaggagctaagcgtcctcctcctggaaatgaaggaggcccaagaagagattgccttcttgaaactgcaacttcagggtaaacgcgctgaagaggcagaccacgaggtgctggaccaaaaagaaatgaaacagatggagggggaggggatagccccaattaagatgaaggtgttcctcgaggacaccggtcaggattttcccctgatgcccaacgaggagtcctcacttccagctgtcgaaaaggaacaggcaagtaccgaacatcagtcacgaactagtgaagagatcagcctgaacgatgctggagtcgagctcaaatcaaccaagcaggacggtgacaagagcttatctgcggtcccagatattgggcagtgccaccaggacgaactagagcgccttaagtcgcagatcctggaactcgaactgaactttcataaagcacaggagatttatgagaaaaacctggatgaaaaagcaaaggaaatctccaacttaaaccagctcatcgaagagtttaaaaagaacgctgacaataacagctctgcttttactgcgttgtccgaggaacgtgaccagttactatctcaggtgaaggagctctctatggtgaccgagcttcgggcacaggtcaaacaactggaaatgaatctcgcagaggcagagaggcagcggcgtcttgattatgagtcgcaaaccgcccatgacaatttacttactgaacagatacattctctttcaatcgaggctaagtcaaaagatgtcaagatcgaagtcctccagaatgagttggatgatgtgcagctccagtttagtgaacagtcaacactgatccggagcctccaaagtcagctccagaacaaggagtcagaggtgcttgagggtgccgaacgtgtgcggcacattagtagcaaagtggaagagttaagccaggccctatctcagaaggagctcgaaattaccaagatggatcagctgttgttagaaaagaaacgggatgttgaaaccttgcagcagactatcgaggagaaggaccaacaggtcacggagatatccttcagcatgacggagaagatggtccagctgaacgaggagaagttttcactgggagtggagatcaagacacttaaggagcaactcaacttgctcagccgtgccgaagaggcaaaaaaggaacaggttgaggaggacaacgaagtcagcagtggactaaagcagaactacgacgagatgtcacctgccggacaaatctcgaaggaggagttacagcatgaatttgacctcttaaaaaaggagaacgagcaaagaaaaagaaagctgcaggccgctcttattaatcgcaaagagttgctccaacgtgtgtcaaggctggaggaggagttggcaaatctcaaggatgagtcaaaaaaagagataccactgtctgaaacggagcggggtgaggttgaagaagacaaagagaataaagaatacagcgagaagtgcgtgacaagtaagtgccaggaaatcgagatttatctgaagcaaaccatttctgagaaagaagtcgagctgcagcatattcggaaggacttggaggagaagcttgcagcggaagaacaattccaagcgctcgtgaagcagatgaatcagaccctccaggacaaaacgaaccagattgatctactgcaggccgagataagcgagaaccaagctattattcagaagctgataacctcaaacacagacgcctctgatggcgacagtgtggccctggtgaaggagactgtggtgattagccctccttgcactggtagctcagagcattggaagccatag

SEQ ID NO: 225161 - DNA, 126 bp, synthetic construct
  misc_feature 1..126: note = Description of Artificial Sequence: Synthetic coding sequence
  source 1..126: mol_type = other DNA
atgctgtcaaggctcagcggcttggcgaatgtcgtgttgcatgagctttcgggagacgacgatactgatcaaaatatgagagcccctcttgatccggaacttcaccaggagtcagacatggagtag

SEQ ID NO: 225162 - DNA, 4923 bp, synthetic construct
  misc_feature 1..4923: note = Description of Artificial Sequence: Synthetic coding sequence
  source 1..4923: mol_type = other DNA
atgctttcgcgtctgtccggtttagctaatgtcgtgctgcacgaactgtccggcgacgacgacactgaccagaatatgcgggctccgctggatccggagctgcaccaagagtctgacatggaatttaacaataccactcaggaggatgtgcaggagcggcttgcttacgccgagcagctggtcgtagagctgaaggacattatcaggcaaaaagacgttcaactccagcaaaaagacgaagcactacaagaggaaagaaaagcggcagataacaagataaaaaaactgaaactccatgccaaagcaaaactgacctcactcaacaaatatatcgaagagatgaaagcgcagggcggaactgtccttccgactgagccacagtccgaggagcaactgagtaaacacgacaaatcctccaccgaggaggagatggaaatcgagaagataaaacacaagcttcaggaaaaagaagagcttatttccactctgcaggcacaactcactcaggcccaggccgagcagccggcacagtcatcaacagagatggaggagttcgtcatgatgaagcagcagctccaggagaaagaggaattcatcagtactttgcaagcacagctcagccagactcaggcagagcaagcagcccagaagctaagggtcctgcagcgtaaactggaggagcacgaggagagcctagtgggacgagcacaggttgttgatctgcttcagcaggaactgaccgctgctgaacagagaaatcagatcctgtcacagcagctccagcagatggaggcagaacacaacactctgagaaacaccgtggagaccgagcgagaggagtctaaaattctgctggaaaaaatggaattagaggtggccgaaaggaaattatcatttcataatctccaggaggagatgcatcatttgttggagcagtttgagcaggctgggcaggcacaggctgaactggagtcacgttatagcgccttagagcaaaaacataaggcagaaatggaggagaagacgtctcatatcctctctctgcagaaaaccggtcaagagttacagtccgcctgcgatgcattaaaggaccaaaactctaagctgctccaggataagaatgagcaagccgtccaaagtgcccaaactatccagcagctggaggaccagctgcaacagaagtcaaaggaaatatcgcaatttctgaaccgtctacctctacagcagcacgaaaccgcatcccagacgtccttccctgatgtctataacgaagggacacaggctgtgacagaggaaaatatagcttcgctgcagaagagggtcgtcgagctggaaaacgaaaaaggagctctgcttttgagcagtattgagcttgaggaactgaaagccgaaaatgagaaactcagcagccaaataacccttctcgaggcgcagaaccgcactggagaggcagacagggaggtctcagagatctctattgtggacatcgcaaacaaacgaagcagttctgccgaagagtcagggcaggatgtgttggagaatacatttagccagaaacacaaggaattgagcgtgctgttacttgaaatgaaggaagcccaggaagagatcgctttcttgaaacttcagctacagggcaaaagagccgaagaggcagatcacgaagtgttagaccaaaaagaaatgaaacagatggagggcgaaggaatcgctcccattaaaatgaaggtcttcctggaggataccgggcaagacttccccttgatgccaaatgaggagtctagcctcccagccgtggaaaaggagcaagctagcacagagcaccagtctagaacctcagaggagatttccctgaatgacgccggagtggagttgaagtcgacgaagcaggatggagataaatcactgtctgctgttcctgatatcggccaatgccatcaagacgaattagagcgcttgaagagtcagatcctcgagcttgagctgaatttccataaggctcaggaaatttacgagaagaacttggacgaaaaagccaaggaaatctccaaccttaatcagctcatcgaggaatttaagaagaacgccgataataacagctcagcctttactgcactcagtgaagaacgtgatcaactcctcagtcaggttaaggagttaagcatggtgacggaactaagggcccaggtaaagcagctcgagatgaacctggccgaggccgaacgacagaggagactggattacgaatctcagacagcccacgataacctgctcacagagcagatccattctctgagcatcgaggccaaatccaaggacgtcaagatcgaggtgctccagaatgaactagacgacgtgcagctgcagttcagtgagcagagcacactgatcagaagtttgcaatctcaactccagaacaaggaatctgaagttctggaaggcgcagagcgagtgcggcacatatctagtaaagtggaagaactttctcaggcgctgagtcagaaggagcttgaaatcacaaagatggaccagctgctgctggaaaagaaacgggacgtcgagacattacagcaaacaattgaggagaaggatcagcaggtgaccgaaatctcctttagtatgacggagaaaatggtgcagttgaatgaagagaagtttagtctgggtgtggaaatcaaaacactgaaagagcaactgaacttgctgtcccgggctgaggaggccaaaaaagaacaagtggaagaggacaacgaagtatcttccggcctaaaacaaaactatgatgaaatgagcccagcagggcagatatcaaaggaggagcttcagcacgaatttgacctgcttaagaaagagaatgagcagaggaagcgaaaactgcaggccgcactgattaacagaaaggaactactgcagcgggtgtctagattagaagaagagctcgctaatttgaaggacgaaagcaaaaaagagatccccctcagtgaaacagagcggggagaggtggaagaagacaaagaaaataaagagtattctgagaagtgcgtcacctctaaatgccaggagatcgaaatctatctaaagcagaccatcagcgaaaaggaggtggaactgcagcacattcgaaaagatctggaagagaagttggccgctgaagaacagtttcaggctctggtgaaacaaatgaatcagacactgcaggataagaccaatcagattgatcttctgcaggctgagatctcagaaaaccaggccattatccagaagctcatcacttcaaatactgacgccagcgatggcgattctgtagcgttagtgaaagagacagtggtcatctcacccccatgtacaggctccagcgagcattggaagcctgaactggaggaaaagatactggcactcgaaaaggaaaaagagcagctccaaaaaaagctgcaggaagctcttacctcaagaaaggccatacttaagaaagcccaggagaaagagcgtcacctcagggaagaactgaagcagcagaaggacgactacaacaggttacaggagcaatttgacgagcagtctaaggaaaacgaaaacattggagaccagctccggcaattacagattcaggtgcgagaaagcatcgatggcaagctcccttctactgaccagcaggaatcttgcagcagcaccccagggctcgaggagcctctgttcaaagctaccgaacagcatcacacccagccagtgcttgaaagtaacctgtgcccggattggccatcccattctgaggacgccagcgccctgcagggaggaactagcgtcgcacagattaaggctcaactcaaggagattgaagccgaaaaggttgagctcgaactgaaggtctcttcgacaacgtccgagctcactaagaagtccgaggaggtctttcaactgcaggagcagatcaataagcagggcctcgagatcgagtctctcaaaaccgtttcccacgaagccgaagtgcacgccgagagcttacagcagaaattggagagttcacagctccagattgcaggccttgagcatctgcgcgaactccagcccaagctcgacgagctgcagaagctcatttctaagaaggaggaggacgtgtcatacctgtctggacaattgtcggaaaaggaggctgctttaactaagatccagactgagatcattgaacaagaagacttgattaaagctctgcacacccagctcgagatgcaagcaaaggaacatgacgaacgtatcaagcagttgcaggtggagctctgcgagatgaagcagaagccagaagagattggggaggagtcacgtgctaagcagcagattcaacgcaaactccaagccgcactgattagcagaaaggaagcacttaaagaaaacaagagcctgcaggaagagctttcactggcccgaggcacaattgagcgtttaaccaaaagcctcgccgatgtggagagtcaggtgagtgcacagaataaggagaaggataccgtcctgggcaggctggccctcctgcaggaggagagagataagttaataacagagatggacaggtccctgttggagaaccaaagcctgagctcgagttgcgaatctctcaagctggcattggaaggtctgactgaggataaagaaaagcttgttaaggaaatcgagtccctgaagtcctctaagatagccgaaagcactgagtggcaggagaaacataaagagttgcagaaggagtacgagattctgctccagagctacgagaacgtgagcaatgaggccgagcgaatccagcacgttgtggaagcggtacggcaggagaaacaggaattgtatggcaaactgagatctacagaagcaaacaaaaaagaaacagaaaagcagctgcaggaagccgaacaggaaatggaagaaatgaaagagtag

SEQ ID NO: 225163 - DNA, 9809 bp, synthetic construct
  misc_feature 1..9809: note = Description of Artificial Sequence: Synthetic coding sequence
  source 1..9809: mol_type = other DNA
atgttatcgcgcctgagtggcctggcaaacgtggtgctgcacgaactcagtggcgacgacgataccgaccagaacatgcgggctccactggacccagaactgcaccaagagtcggatatggaattcaataatactacgcaggaggatgttcaagagcgtcttgcttacgccgagcaacttgttgtcgagctaaaagacatcatccgacaaaaggatgttcaactccaacagaaggatgaggcactacaggaagagagaaaagctgccgacaacaagataaagaagctgaaattgcacgcgaaagccaaattgactagcctgaacaaatacatagaggagatgaaggcccagggaggaacagtgttaccaaccgagccacagagcgaggagcagctatctaagcacgataagagcagcacggaagaggagatggaaatcgaaaagataaagcacaaattacaagagaaagaagagctcatcagcactctccaggctcaactgactcaagctcaggcagagcaacctgcgcagtcctccacagagatggaagaattcgtgatgatgaaacagcaactgcaagagaaggaagagtttatttccacacttcaggcccagctgagccaaacgcaggccgagcaggcagcccagctgtcctctatgcagcaggttgtgagggaaaaggatgcaaggttcgagacacaggtccgcctgcacgaggacgagctcttacagttagtcacacaggcggatgttgagactgagatgcagcaaaagctcagagtgctccaaaggaaacttgaagaacacgaggagtcccttgtaggcagagcccaggtggtggatctgctacaacaggagctgacagccgcagaacagaggaaccagattctctcacagcagctgcagcagatggaggcagaacataacaccctaaggaatacagtggagacagaaagggaagagagcaagatattgttggaaaagatggagttagaagtggcagagcgtaagctgtcgttccacaatctgcaggaggaaatgcatcacttgttagagcagtttgaacaggctggtcaggcgcaggccgaattagagtctcgctattccgcccttgagcagaagcacaaggccgagatggaggagaaaacttcacacatcctttccctgcagaagaccggtcaggagctgcagtccgcctgtgatgccctcaaagaccagaactctaagctgctccaggataagaatgagcaagcagtccagtcagcccaaacaatccaacaactcgaagatcagctccagcaaaaatccaaagagatctctcagtttttgaatcgtctgccattacagcaacacgaaactgcgagtcagaccagtttcccggatgtttacaacgagggcacgcaggccgtaacagaagagaacattgcctcactgcagaaacgggtggtcgaactggaaaacgagaaaggcgcactgcttctgtcctccatcgagctcgaggagctgaaagccgagaatgagaagctttccagtcagatcactctgctggaggcccaaaatcgcacgggcgaggctgatagggaggtatctgaaattagcattgttgatattgcaaataagcggtcctcctcagcagaggagagcgggcaagacgtgctggaaaacacgttttctcaaaaacataaggaactgtctgttcttctccttgagatgaaggaggcccaggaagaaattgcttttctgaaattgcagctgcaggggaagagggccgaagaggcagatcacgaggttctggaccagaaggaaatgaaacagatggagggggaagggatcgcccctattaagatgaaagtcttcctggaggacacaggccaggacttccccttaatgcccaatgaagaaagctcgctccccgcagttgagaaagagcaagccagtaccgagcatcaatcacgcacttctgaggaaatctctctgaacgatgcaggtgtggagcttaaatcaaccaagcaggacggcgataaatcactttccgccgtcccagatattgggcaatgccatcaagacgagctggagcgcctcaagagccagatcctagaattggagttaaattttcataaagctcaggaaatttatgagaagaatctcgacgagaaggcgaaggagataagtaacttgaatcagctgatcgaagagttcaaaaagaatgccgataacaactcctcagcgtttacagctctgagcgaagagagggaccagctcttgtcccaggtgaaggagctgtcaatggtgaccgagcttcgcgctcaggtgaagcaattagagatgaaccttgctgaggccgaacgccagagacgccttgactacgagtctcagaccgcccacgataacttgctgacggagcagattcactccctgagtattgaagccaagtctaaggacgttaagatagaggtcttgcaaaacgagctggatgacgtgcagctgcagttttctgaacagagcactctgatccggtccctgcagtctcaactgcagaacaaggagagcgaggtactggagggcgctgagagagtgaggcacattagttccaaagtggaagagttatcccaagccctgtcacagaaggaactggaaatcacaaagatggatcagctgctgctcgagaagaagcgcgacgtggagaccctgcaacagactatcgaagaaaaagatcagcaggtgacagagatctcttttagcatgacagagaaaatggtgcagctgaatgaggaaaagttttcattgggcgtggaaatcaaaaccctaaaagagcagctgaatctcctcagccgggctgaggaggcaaagaaggagcaggtagaagaggacaatgaagtaagctctggtctcaaacagaactatgatgaaatgagcccggctggtcagatctcaaaggaggagctgcagcacgagtttgatctgctgaagaaggagaatgagcagcggaagcggaaactgcaggctgcacttattaacaggaaggagcttctgcagcgagttagccgcttggaggaggagctggcaaatttgaaggatgaatcgaagaaggaaatccccctgagtgaaactgagaggggtgaagtggaggaggataaggagaacaaagaatactcagagaagtgcgttacctcaaagtgtcaggaaatcgagatttacctaaagcagacaatcagcgaaaaggaggttgagttgcagcatatccgaaaggatctggaggagaagttggcggctgaagaacaattccaggctctggtgaagcaaatgaaccagacactgcaggacaagaccaaccagattgatctcctccaggcagagatcagcgagaaccaggcgatcatccagaagctgatcaccagtaataccgacgcctcagacggcgatagcgttgccctcgtcaaggaaacagtcgttatcagcccaccttgcacaggctcatccgagcactggaagcccgagctcgaggagaagatcctggcactcgagaaagaaaaggaacagctgcaaaagaagcttcaggaagctttaacatcccgcaaggcaatacttaaaaaagctcaggaaaaagagaggcacctgagggaggagctaaaacaacagaaggatgactacaatcgcctgcaggaacagttcgatgagcagagcaaagaaaacgagaacattggtgatcagctcaggcaactacaaatccaagttcgagagtctatcgatggtaaactgccgtcaaccgatcagcaagagtcttgctccagtacaccaggattggaagaacctctattcaaagccaccgaacagcaccacactcaacccgttctcgagagcaacttgtgtcctgattggccatctcattcggaagatgcttcggccctgcagggcggaacatcagtggctcaaattaaggcgcagttgaaagaaatagaggctgaaaaggttgaattagagctcaaagtcagcagcacaacaagtgaactgactaaaaagtcagaggaggtatttcagttgcaggagcaaattaacaaacagggacttgagattgagagcctgaagaccgttagtcatgaagccgaggtgcacgctgaatctctgcagcagaagctcgaatcttcacagctccagatcgccggacttgagcatctgcgcgaactgcagcctaaactcgacgaactccagaaattgattagcaaaaaggaggaggacgtttcctatctcagtggacagctttcagaaaaggaggccgcactgaccaaaatccagaccgagatcatcgagcaggaggacctgatcaaagcactacacacgcaattggagatgcaagccaaagaacatgatgaacggattaagcaattacaggtcgaactgtgcgagatgaagcagaaaccggaggagatcggtgaggaatctagggccaagcaacagatccaacggaagctgcaagccgctttgatctcacggaaggaagcactcaaagaaaacaaatccttgcaagaggagctttcattggctagaggaacgatagagaggttgactaaatccctagctgacgtggagagtcaggtgtcagcacagaacaaggaaaaggatacagtcttaggccgtttggccctcctccaagaagagcgggataagttaataacagagatggataggtccttactcgagaatcaaagtttgtcctctagctgtgagagtctgaagctcgctctggaagggctgaccgaggataaagagaaactggttaaggagatagagagtttgaaatctagcaaaatagctgagtcgacggagtggcaggaaaaacacaaggagttgcagaaggagtatgagatactgctccagtcctacgaaaacgtttcaaatgaagcagagagaatccagcacgtcgtcgaggccgtgcggcaggaaaaacaggagctctacggcaaacttcgctcaacagaggccaacaagaaagaaactgaaaagcagctccaagaggccgagcaggagatggaagagatgaaagagaagatgcggaagtttgccaagtcaaagcagcaaaaaattctggaactcgaggaagagaatgatcgcctcagagccgaagtgcatcctgcaggagacactgccaaggagtgcatggaaacactgttgtcctccaacgcaagcatgaaagaggagctggagagggtgaagatggagtacgaaaccctgtcaaagaaattccagtcattaatgtcagagaaagacagtttaagcgaggaggttcaggatttaaaacaccagattgaaggaaacgtgtcaaagcaggccaacctcgaggcgacggagaaacatgacaaccaaaccaatgtgaccgaggaggggactcagtcaattcccggagagacggaggaacaggacagcctgtctatgagtacccggcctacgtgtagcgaatcagtgccatccgctaaatctgctaatcccgctgtgagtaaggacttctcaagccacgacgaaattaacaactacctccagcagatcgatcaactgaaagaacggattgcagggttagaagaggagaaacaaaagaacaaagaattcagtcagaccctggagaacgagaagaatacccttctgagccaaatatccaccaaagatggcgaattaaagatgcttcaggaagaggtcaccaaaatgaatcttctgaaccagcagatccaggaagagctcagtagggtcactaagctgaaagaaactgccgaagaggaaaaagatgatctcgaagagagactaatgaaccagttggccgaacttaacggatcaataggcaattactgtcaggatgtgacggatgcacagattaaaaatgagttactcgagtctgagatgaaaaatctgaaaaaatgtgtgtctgaactcgaagaagaaaagcaacaactggtgaaagaaaagactaaggtggaaagcgaaattagaaaagagtatctcgaaaagattcaaggcgctcagaaagaaccaggcaataaaagtcacgctaaagagctccaggagctgctgaaggaaaagcaacaagaggtgaagcagctgcaaaaggactgtatccgctaccaggaaaagatctcagctctggaacgcaccgtgaaggccctcgaatttgtccagaccgagtcgcagaaggatctggagatcacaaaggagaatctggcacaggccgttgagcacagaaagaaggcacaggccgagctcgccagttttaaagtgctacttgatgacacccagtcggaagccgcaagggttctggctgataaccttaaactgaagaaggagttgcagtctaataaggagagtgtaaagagccagatgaagcagaaagacgaagatttagagaggcgtttggagcaagctgaagaaaaacaccttaaggagaagaaaaacatgcaagagaaactcgatgctctgaggcgggagaaggtgcacctggaggagaccattggggaaatccaggtgacgctgaataagaaggataaggaagtccagcagctgcaggaaaatctcgactcaactgtcacccaactggcggcatttactaaaagtatgtctagcctgcaggacgaccgcgaccgcgtcatcgacgaggctaagaagtgggagaggaagttcagcgacgcaatacagagtaaagaggaagagattagattgaaagaagacaattgttccgtgctaaaggatcagctgcggcagatgagcatccacatggaagagctcaagattaacattagtcggttggagcacgataagcagatatgggagagtaaggcccagaccgaggtccagctgcaacagaaagtctgcgataccctacagggagagaacaaggagttgctgtctcagctagaggagactcggcatctgtaccatagtagccaaaatgagctggcaaaactggaatcagaactcaagtccctgaaagatcagctgactgatctgtcaaactcccttgagaagtgcaaggagcaaaaaggaaatctcgaaggtataatcagacagcaggaggccgatattcagaattctaagttcagttatgagcagctagagacagatcttcaggcttcccgggaactaacttcacggctgcacgaagaaattaatatgaaggagcaaaaaataatctctctgctttctggtaaagaagaggcaatccaggtcgctatcgccgaactcagacagcagcacgacaaggagatcaaggaattggagaacctcttgagtcaggaagaggaagagaatattgtcctggaggaagaaaataaaaaagcagtggataaaacaaaccagctgatggaaacccttaaaaccattaagaaggagaatatacagcagaaagctcagttggactcattcgtcaagtctatgtcatcgctgcagaacgatcgcgaccgcatcgtcggggattaccaacagctggaagaaaggcatctgtccattatactcgagaaggaccagctgatacaggaggccgctgccgagaataacaaactgaaagaggaaattaggggcctccgcagccacatggatgacctgaatagcgagaacgctaaattggatgcagagctgatccagtatcgcgaagatctgaatcaggttatcactatcaaggacagccagcagaagcagctgttggaagtccagctccaacagaataaagagctcgagaacaaatatgccaaactagaagagaaattgaaagagtccgaagaagccaatgaagatttaaggcgtagctttaacgctttgcaggaagaaaagcaggacctatccaaagagatcgaatctctgaaggtgtccatctcccagcttactcgacaggtaactgctctgcaagaagaggggaccctggggctctaccacgcccaactgaaagttaaagaggaggaagtgcacaggctgtccgcgctcttctctagcagtcagaagagaatcgcagaactggaggaagagttagtatgtgtgcagaaggaggctgccaagaaggtcggcgagatcgaagataagctgaagaaggagctcaagcatctgcaccacgacgccggaatcatgaggaacgagaccgagaccgctgaggagagagttgccgagctggcccgagatctggtagagatggagcagaagctgctgatggtgacgaaggagaataaaggactcactgcccaaatacaatcattcggacgcagcatgtcatcattgcagaatagccgggatcacgccaatgaggagttggatgaactgaagagaaagtacgatgcttctttgaaagagctggcccagctcaaggagcagggactcctcaatagagaacgtgatgcactcctatcagagaccgccttcagtatgaatagcacagaggagaattctctaagtcacctagaaaaactgaatcagcaattactgagcaaagatgagcagctgctgcatttgtcaagtcagttggaggattcgtacaatcaagtacaatccttcagcaaggccatggccagtctccagaacgaacgggaccacttgtggaatgaattggagaagtttagaaaaagcgaagaaggaaaacagaggtccgctgcccagcccagcacttcccctgcagaggtgcaaagtcttaagaaggctatgtcttctcttcaaaatgaccgtgacaggcttctgaaagaattaaagaatctccaacaacagtatctacagataaatcaggagataaccgaactgcatccgctcaaagcacagttgcaagaataccaagacaaaacaaaggcctttcagataatgcaggaagagctccgtcaggaaaacctgtcctggcagcatgagctccatcagctgagaatggagaagtcatcttgggagattcatgaacgtaggatgaaggagcaatatctgatggctatcagcgataaagatcagcagttatctcatctccagaatctgatccgggaactgcggtccagcagttcgcagacccagcccttaaaggtacagtatcaaagacaggcttccccagaaacgagtgcctcccccgacgggtcccagaatctcgtctatgaaactgaactcttaaggacccagttgaatgacagtttaaaagaaatccaccagaaagaactgcgcattcaacagctcaattctaattttagccagctcttggaggaaaaaaacacactgtccatccagctatgtgatacctctcaatcccttcgtgaaaatcagcaacactatggagatctgctgaatcactgtgccgtgctcgagaagcaggtacaagagctccaggccgtctctaaggagaaggggccactcaacatagatgtggctccaggggcaccgcaggaaaagaacggcgttcacagaaagagcgaccccgaggagctgcgcgagcctcagcaatccttcagtgaggctcagcagcagctgtgtaacacccgacaagaggtaaacgaacttaggaaactgctcgaagaggagcgtgatcagcgggtggccgcagagaatgccttgtccgttgccgaggagcagattcggagactcgaacattcagagtgggatagctcaagaactccaatcatcgggtcatgcggaactcaggaacaagccctccttattgatctgacttcaaacagttgtagaaggacaagaagtggggtgggttggaagcgagtactacggtccttatgccatagccgcacacgggttcctctgttggcagctatctattttcttatgatccatgttctcctaatactatgcttcaccgggcacctcta

SEQ ID NO: 225164 - DNA, 741 bp, synthetic construct
  misc_feature 1..741: note = Description of Artificial Sequence: Synthetic coding sequence
  source 1..741: mol_type = other DNA
atgtcatgggccgctgtcctggctgtcgcagccgctcgctttgggcacttttgggggtgtaggtggcccggacctatggcacaaggatgggcgggattcagcgaagaagagttgcggagactcaagcagacgaaggacccgtttgaaccccaaaggaggttacctgctaagaaatctcgccagcaactgcagagagaaaaggctcttgtggaacaaagccaaaagctggggctgcaagatgggagtacgtctttactgcctgagcagctactcagtgcaccgaaacagcgggtaaacgtgcagaagcctccattctcgtccccgaccttgcctagccatttcaccttaacctctcctgtcggcgacggccagccacaaggcatagaatcccagcccaaggaactgggtctggaaaattcccatgatggacacaataacgtcgaaatactcccacccaaacccgactgcaagttggagaagaaaaaagtagagctacaggagaagagtcgttgggaggtcctccagcaggaacagcgactgatggaagagaaaaataagcggaagaaggcactattagcaaaggccattgctgagcgctcgaagcggacccaggccgagacgatgaagctgaagcggatccagaaggaacttcaggccctagacgatatggtcagcgctgacattggaatacttagaaatagaattgatcaggccagtctcgattattcttacgctcgatag

SEQ ID NO: 225165 - DNA, 1185 bp, synthetic construct
  misc_feature 1..1185: note = Description of Artificial Sequence: Synthetic coding sequence
  source 1..1185: mol_type = other DNA
atgtcttgggctgccgtacttgcagttgctgctgctagattcggacatttctggggctgtcgctggcccggacccatggctcaaggttgggctggcttttcagaggaagaactccggcgacttaagcagaccaaggaccctttcgaaccccagagacgtcttcccgcaaaaaaatcccgccagcaacttcaaagggagaaggccctggttgaacagagccagaagttagggttgcaggacggaagcacaagcttgttgccagagcaactcctctccgcacccaagcaaagagtgaacgtgcagaagcctccgttttcgtctccgactctgccttcccactttaccctcacatcccctgtgggcgacgggcaaccacagggcattgagtctcagcccaaagagctgggactggaaaattctcatgacggccataataatgtcgagatcctacccccaaagccggattgtaagctggaaaagaagaaagtggagctacaagagaagagcagatgggaagtgctccagcaagaacagcgactgatggaggagaagaacaagagaaaaaaggctctgctggcgaaagcaatcgccgagcggtccaagagaacccaggccgaaacaatgaaactgaagcgcatccaaaaagagttgcaggccctagatgacatggtgtcagcagatataggtattctgcggaatcgaatagaccaggcgtcactcgactactcatacgcccgaaagagattcgacagagccgaggctgagtacatcgcagcaaagctggacattcagcgtaagactgaaatcaaagagcagctgacggaacacttatgtactattattcagcagaatgaactgcggaaagccaaaaaactcgaagaactgatgcagcagctcgatgtcgaggccgacgaagagacactggaactggaagtggaagtggagagactcctacacgagcaggaagtcgagtctcgcaggcccgtggtgcgtctcgagagaccctttcaacccgcagaagaatcagttactctcgagttcgctaaagagaatagaaagtgtcaggaacaggctgtcagtccaaaagtggacgaccagtgcgggaactctagtagtatcccgttcctgtcaccaaattgtcccaatcaggaagggaacgatatttccgcggcactggccacgtag

SEQ ID NO: 225166 - DNA, 861 bp, synthetic construct
  misc_feature 1..861: note = Description of Artificial Sequence: Synthetic coding sequence
  source 1..861: mol_type = other DNA
  misc_feature 1..255: note = DNA
  misc_feature 256: note = RNA
  misc_feature 257..861: note = DNA
atgcctctggatgccacatggaacatcactgtgcagtggttagctgtggacatcgcttgtcggacactgatgtttctgaaacttatggcaacctactccgcagccttcctcccggttgtgattgggttggaccggcaggccgctgtgctcaatcctctcggatcgagaagcggggtccgaaaactgctaggtgctgcttggggcttgtccttcctgctcgcgttccctcaactgttcctcttccacaccgttcactgagccggacccgttccatttactcagtgtgtcaccaaagggtcttttaaggcccagtggcaggagacgacctataatctgttcacattttgctgcctgttcctgttgccgttgacagcaatggccatttgttactccagaatcgtgttgtccgtgagcagaccacagacacggaagggttcgcatgcaccggcaggagagttcgcattacctaggtcattcgataactgcccgcgagtcaggctgcgtgcactgaggctggccctgctcattctcttgacattcattctgtgctggacaccatattacctgctgggaatgtggtattggttcagccccaccatgctgaccgaggtgcccccatcactgagccatatcctcttcctactgggcttattgaatgcccctctcgatcccctcctttacggggctttcaccctggggtgtaggcgtgggcatcaagagcttagcattgattcgtcaaaggaaggttctggccgaatgttgcaagaggaaatacatgccttccggcagctcgaagtccagaagacagtcacaagcagacgcgcaggggagacaaagggaatctccatcacctccatttag

SEQ ID NO: 225167 - DNA, 879 bp, synthetic construct
  misc_feature 1..879: note = Description of Artificial Sequence: Synthetic coding sequence
  source 1..879: mol_type = other DNA
  misc_feature 1..273: note = DNA
  misc_feature 274: note = RNA
  misc_feature 275..879: note = DNA
atgtccgctggtaacggtacaccgtgggacgctacttggaacattaccgtgcagtggttggctgtagacatcgcatgtcgaacactgatgtttctgaaactcatggccacctacagcgcagcctttcttccagtggtcatcggcctagatagacaggccgctgtgttgaatccgctgggctcccgttccggagtcagaaaactgctgggcgcagcgtgggggctgagcttcctactggcttttccccaactgttcctttttcacacagtccattgagccggtccagtgccctttacccagtgtgtgacgaaaggttcgttcaaggcccagtggcaggagactacctacaatttattcacattttgttgtctttttcttctgcccttgaccgccatggctatttgctactcccgcatagtcctgagcgtttcccggccacagacccgaaaaggttcccacgccccagcaggggagttcgctctgccgagaagcttcgataactgcccaagagtgcgcctaagggcgctccgcctagcgctgctgatcctcttaacttttatcttgtgttggacaccctattatctcctgggaatgtggtattggttcagccctacaatgctgacggaggtccctcccagcctgtctcatatcctcttcttgctgggcctcttaaacgccccactcgaccccctgctttatggtgcgtttacactgggatgtaggcgtggccaccaggaactgagcatagacagctccaaggaaggttccggtagaatgctgcaggaggagatacatgctttccggcagctggaagtgcagaagacagtgacttcgagacgggcaggggagacaaagggaatttccataacatctatttag

SEQ ID NO: 225168 - DNA, 363 bp, synthetic construct
  misc_feature 1..363: note = Description of Artificial Sequence: Synthetic coding sequence
  source 1..363: mol_type = other DNA
atggctagttccagacggggacttctgcttttgctgcttctgaccgctcacctcggaccatcagaggcacagcactggagtcacggctggtaccccggtggcaagcgcgctttgagcagcgcccaggatccacaaaacgccctcaggcccccagggagggccctggacactgctgctggttctcccgtccaaacagcgcatgggctccctagcgatgcccttgcaccactcgacgattcaatgccttgggaaggccgtaccaccgcccagtggtctcttcatcggaagcgacatctggcacgcaccctgctaacagccgctcgtgagccacggcctgccccaccatcaagcaacaaggtctag

SEQ ID NO: 225169 - DNA, 342 bp, synthetic construct
  misc_feature 1..342: note = Description of Artificial Sequence: Synthetic coding sequence
  source 1..342: mol_type = other DNA
atggcaagtagccggagggggcttttgttgttactgctgctgacagctcacctggggcctagtgaagcacagcattggagtcacggatggtatcctggcggtaagcgtgcactgagtagcgcccaggacccccagaacgcgcttaggccgccagcaggttctccagttcagactgcccacggacttccctccgatgctctcgctccccttgacgactctatgccatgggagggccgtactactgcacaatggtccctgcacaggaaacggcacttagccaggactttgcttaccgccgcaagggagcctcgcccagcccctccctccagtaacaaagtgtag

SEQ ID NO: 225170 - DNA, 339 bp, synthetic construct
  misc_feature 1..339: note = Description of Artificial Sequence: Synthetic coding sequence
  source 1..339: mol_type = other DNA
atggccagttccaggcgcggtcttctgctactccttctcctgacagcccatctcggcccatcagaagcccagcactggagccacgggtggtaccccggaggaaaaagggccttgagctcagctcaggaccctcagaacgccctgcgcccaccaggcagcccagtgcagacggctcatggtctcccctccgacgccttagcccctctggacgattccatgccgtgggagggcagaactaccgcccagtggtcacttcatcgtaaaagacatctcgccaggaccctcctaaccgccgcacgcgaacccagacctgcccctcccagctcgaataaagtctag

SEQ ID NO: 225171 - DNA, 339 bp, synthetic construct
  misc_feature 1..339: note = Description of Artificial Sequence: Synthetic coding sequence
  source 1..339: mol_type = other DNA
atggccagcagcagacgtggcttgctgctactgctgctgttgactgctcatctggggccatctgaggcacagcattggtctcatgggtggtaccctggcggtaaaagagcactgtccagcgctcaagatccccagaacgccctccgcccaccagggtcacctgttcagaccgcgcacggccttccttcagatgctttagcaccattggatgactcaatgccctgggaaggcagaacaactgctcaatggagccttcataggaaacgccatctggcaagaacgcttctaacagccgcacgcgagcctaggccagctcccccatcttcaaataaagtgtag

SEQ ID NO: 225172 - DNA, 342 bp, synthetic construct
  misc_feature 1..342: note = Description of Artificial Sequence: Synthetic coding sequence
  source 1..342: mol_type = other DNA
atggccagctcgaggcggggacttctcctcctgctattactgacagcccatctgggtccatcggaagcacagcactggtcccatggctggtatcccggagggaagagggcgctttccagcgctcaggaccctcaaaacgcgctgcggccacccgcaggaagtccagtgcaaactgcccatggcctcccatcagatgccctggctccgctggatgatagtatgccctgggaaggccgaaccactgcccaatggtctttacaccgcaagaggcacctggccaggaccctgctgaccgcagcgcgagaaccacgtccagcacctccatcaagcaacaaggtgtag

SEQ ID NO: 225173 - DNA, 945 bp, synthetic construct
  misc_feature 1..945: note = Description of Artificial Sequence: Synthetic coding sequence
  source 1..945: mol_type = other DNA
atgtataaaatggaatactcttaccttaattccagcgcttatgagtcttgcatggccggaatggacacgtcctcactggcctctgcatacgcggatttctccagctgctcccaggccagcggctttcaatacaatcctataaggactacgttcggggcaacaagtggatgcccgtcacttaccccaggctcttgctccctggggacactccgagatcaccaatccagtccgtatgccgctgtgccttataaactgttcaccgatcacgggggacttaacgagaagcgcaagcagcgccgtattcgcactacctttaccagtgctcagctgaaagaactggagcgggtgttcgccgaaacccattaccctgacatctatactcgagaggagctggccctgaaaatcgacctgactgaggcccgtgtgcaggtgtggttccaaaacagacgagccaagttcagaaaacaagaaagggccgctgctgctgccgcagccgcagctaagaacggaagctcaggaaagaaatccgactcctctagagatgatgagtctaaggaggccaaatctaccgaccctgattctactgggggtccaggccctaaccctaaccccactccctcctgtggcgcaaatgggggaggaggaggagggcctagtcccgctggagctcccggagcagcagggcctggcggtcctggtggtgaaccagggaaaggaggtgccgctgccgcagccgctgctgccgcagccgcagccgctgctgcagctgctgcagcggctggcggactggctgccgcagggggtcccggacagggttgggccccaggaccagggcctatcaccagcatcccagacagcctgggtggcccatttgcctctgtcctgtctagcctccagcgcccaaatggcgctaaggcggctctggtcaagtcctcaatgttttag

SEQ ID NO: 225174 - DNA, 750 bp, synthetic construct
  misc_feature 1..750: note = Description of Artificial Sequence: Synthetic coding sequence
  source 1..750: mol_type = other DNA
atggccaacagcgcctcacccgaacaaaaccagaaccattgctcagccatcaacaatagcattcccctgatgcagggtaatctccccacacttacactaagtggtaaaatccgagttactgtgactttttttctgtttctcctatcagccacgtttaatgcaagctttctcctgaaactgcaaaagtggacccagaagaaagaaaaaggcaagaagctgtctaggatgaagctgctgcttaaacatttaacactggctaatctgctggagaccttgatcgtcatgccactagacggaatgtggaatatcacagtccaatggtacgctggcgaactcctgtgtaaagtgttgtcctacttaaagttgttctcaatgtacgcccctgccttcatgatggtggttatcagtctcgacaggtctcttgctattaccagaccactagcactcaagtcaaactccaaggtgggtcagtcgatggttggtctcgcctggatccttagtagcgtttttgcgggtccacagttacctctacaccatccgagcttccaccatgccgatctccagtgcaagaatcatctgcaccctgatacaggccctagttcgggcccaccacggacaacgacagaatccgtccaggagcaatatactaagagcacagccgaggacagcaaaaatgacggttgtatctgccacttcatttattgcttgctggattctctgttgtgtccgagaaacctggttctcgtctag

SEQ ID NO: 225175 - DNA, 2055 bp, synthetic construct
  misc_feature 1..2055: note = Description of Artificial Sequence: Synthetic coding sequence
  source 1..2055: mol_type = other DNA
atggaagaaaatctcattagcatgcgagaggatcactctttccacgttagatatcggatggaggccagttgccttgagctggccctcgagggggagagactatgtaaatcaggcgattgtcgggcaggcgtgtccttctttgaggctgctgtgcaggttgggaccgaagacctcaaaaccctttcagctatttacagccaactgggaaacgcctacttttatctccacgactatgccaaggctcttgaataccatcatcacgatttaactcttgctcggacaatcggcgatcagctgggcgaggccaaagcatcgggcaatcttggaaatacactcaaggttctgggcaactttgatgaggcaatcgtgtgttgtcagaggcatcttgacatctcccgggagctgaatgacaaagtcggtgaggcacgagccctgtacaacctagggaacgtctatcacgcaaaaggtaaatcttttggctgccccggaccccaggatgttggagagttccccgaggaagtccgggacgcactgcaggctgctgtcgacttttacgaagagaatcttagtctcgttacagcgctgggggaccgggcagcgcagggacgagcatttggtaacctgggcaatactcactacttattagggaacttcagggatgcagtgatcgctcatgagcagcggctgctgatcgctaaggaattcggtgacaaggcggcagagcggagagcatatagtaatctgggtaacgcttacatcttcctaggcgagtttgaaaccgcaagtgagtactacaagaaaacgctgctgctcgcgagacagctcaaagatagggccgtggaagctcagagctgctatagcttaggtaatacttacaccctactgcaggactatgaaaaggcgatcgactaccatctgaaacatctggctattgcccaggagcttaacgaccggatcggcgaggggagggcttgctggtctctaggtaacgcctacaccgccttaggcaaccatgaccaggccatgcattttgccgaaaagcatctcgagatttctcgggaggtgggcgacaaatcaggcgagctgacagcaaggcttaatttatccgatctgcagatggtgttgggtctgagctatagtaccaataattctattatgtccgagaacaccgaaatcgattcaagcctcaacggagtgaggcctaaactcggaaggagacactcaatggaaaatatggagttgatgaaactcacacctgaaaaggttcagaactggaattctgaaattctcgccaaacagaaaccattaattgccaagcccagcgcaaagctacttttcgtcaacaggctcaagggcaaaaagtacaaaacgaactcttccactaaagtgctgcaagacgctagcaactccattgatcaccggatcccaaatagtcagcggaagatatctgcagatacaattggggatgaaggtttttttgatttactgagtcggtttcagagcaatcgcatggacgatcagcgttgctgcctgcaagaaaaaaactgccacaccgcatccactactacctcaagcactcccccaaaaatgatgctgaaaacctctagcgtgccagtcgtcagcccaaacactgatgagttcttggatctgctggccagttcccagagtagacgactggatgatcaacgggcatccttctcaaacttgcccggactgcgcctcacacagaacagtcagagtgtattgagccacttaatgactaatgataacaaggaggctgacgaagactttttcgacatattggtgaagtgccaagggtcacgactggacgaccaaaggtgtgcgcctcctccggcaaccaccaaaggccctactgtcccagatgaagacttcttctcgttgattctgagatcccaaggcaagcgcatggacgagcagcgcgttttgctccagagagaccaaaatagggacaccgactttgggctgaaagactttcttcagaacaatgctttgctcgaattcaagaatagtggaaaaaaaagcgcagatcattag

SEQ ID NO: 225176 - DNA, 2055 bp, synthetic construct
  misc_feature 1..2055: note = Description of Artificial Sequence: Synthetic coding sequence
  source 1..2055: mol_type = other DNA
atggaggagaatctaatctccatgcgggaggaccactccttccatgtgcgatatcgcatggaggcttcctgtctggagttagcactagaaggggaacgcctatgcaaatctggagattgcagagccggagtctccttttttgaggcggctgtgcaggtcggaaccgaagatctaaagactttgtccgctatctatagtcagctggggaatgcatatttctatctacacgactatgctaaggctctggaataccatcaccatgacctgaccctggcgcgtactatcggtgaccagctgggagaagctaaggccagcggcaaccttggcaacacactgaaagtcctgggcaacttcgatgaggccatagtctgttgtcagcggcacctcgatatcagccgagaacttaacgataaagttggggaggcgcgtgcactgtacaacctcgggaatgtctatcatgccaaaggcaaaagtttcggatgtcctggaccgcaggacgtgggggaatttcccgaagaggtgcgagatgcccttcaggccgctgtggacttctacgaagaaaacctgagcctcgtgacagcactgggcgaccgggctgcacaagggagggcattcggtaaccttgggaatacacattacctgctcggaaatttccgggatgctgttattgcgcatgagcagcggctgttgatcgcaaaagagtttggggataaggctgcggaaagacgggcttacagtaatctggggaatgcctatatcttcttgggagaattcgaaaccgcttctgagtattacaaaaagacactcttactcgccagacagctgaaggatcgagccgtcgaagcccagtcatgttattcattgggaaacacatatactttgctccaggactacgaaaaggctatcgactatcaccttaaacacctagccatagcacaggagctcaatgatagaatcggagaaggaagagcttgttggagcctaggcaatgcttacaccgctctcggcaatcacgatcaggcaatgcattttgctgaaaagcatctcgagatttcaagagaagtaggggacaaaagcggagaactgacagctagactcaatctgtccgacttgcaaatggtactggggctatcatacagtacgaataattccatcatgagcgagaacaccgaaattgatagctctctgaatggtgttaggcctaagctgggacgcaggcacagcatggagaacatggagctgatgaaactgacaccagaaaaggtgcagaactggaacagcgaaatcctggccaaacaaaagccactaatcgccaaaccgagcgctaagctgttattcgtcaacaggcttaagggtaagaagtacaagacaaactcttcgacaaaggtcttgcaggacgcctctaactccattgaccataggattcctaacagccagcggaaaatctctgcagatacaatcggagacgaggggttcttcgacctgctgtccaggttccaatccaataggatggacgatcagcggtgctgcttgcaagagaagaattgtcatactgcctcaacaactacgagttctactccccctaagatgatgttgaaaacctccagcgtgccagttgttagcccaaataccgatgaatttctggacctcttggcttcatctcaatccagaagactggatgaccagcgtgcctccttcagcaacctccccggactcagactgacacagaactctcagtctgtcttgtctcatcttatgaccaacgataataaggaggctgacgaggacttctttgacattttggtaaagtgccaggggtctcgactggatgatcagcggtgcgctccccctcccgctaccaccaaaggacccacggtgccggatgaggatttcttcagccttatcttgaggagccagggcaagcgcatggacgagcaaagagtgttgctgcagcgagatcagaaccgcgatacggacttcggcctaaaggattttctgcaaaacaatgccctcctggagtttaagaactctggcaagaaatccgccgaccactag

SEQ ID NO: 225177 - DNA, 228 bp, synthetic construct
  misc_feature 1..228: note = Description of Artificial Sequence: Synthetic coding sequence
  source 1..228: mol_type = other DNA
atggaggagaatttgatctctatgagggaggaccattctttccacgtaagataccggatggaggcgtcatgcttggaactcgcactggagggagaacgtctgtgtaagtccggcgactgtagagcaggcgtgtcgtttttcgaggccgcagttcaggtgggaaccgaagacctgaaaactctgagcgccatctatagccaactcgggaacgcttatttttacctgtag

SEQ ID NO: 225178 - DNA, 642 bp, synthetic construct
  misc_feature 1..642: note = Description of Artificial Sequence: Synthetic coding sequence
  source 1..642: mol_type = other DNA
atggaagagaacttaatcagcatgcgagaggaccactctttccacgtgcggtatcgcatggaagcctcatgcctggaactcgctctggaaggggaaaggctgtgcaagtctggggattgtagagccggtgtgtccttttttgaggctgctgtacaggtgggcacagaggacttgaagactttaagcgctatctactcccagcttgggaacgcctacttttatctgcatgactacgcaaaggccctggagtatcatcaccatgaccttacactagcccgtacaattggggaccaacttggagaagcaaaggcttcgggaaacctgggcaatacactgaaagtactcggaaatttcgacgaggcgatagtatgctgtcagagacatctggatatctcccgcgaacttaatgataaagttggggaagccagggccctttataacctaggaaacgtctaccacgccaagggaaagtcattcggctgtccaggccctcaggacgtcggggaatttcccgaggaggttcgcgatgctctgcaggccgcagtcgacttttacgaggaaaacctgagccttgttaccgccctcggtgatagagcagctcagggtcgagcatttggcaatctgggcaacacgcattattag

SEQ ID NO: 225179 - DNA, 159 bp, synthetic construct
  misc_feature 1..159: note = Description of Artificial Sequence: Synthetic coding sequence
  source 1..159: mol_type = other DNA
atggaagagaacctgatttctatgcgggaggaccactcttttcacgttagatacagaatggaggcatcctgcttagaacttgcactggagggagaaaggctgtgtaagtctggtgactgcagagccggtgtctccttctttgaggcggctgtccaatag

SEQ ID NO: 225180 - DNA, 1290 bp, synthetic construct
  misc_feature 1..1290: note = Description of Artificial Sequence: Synthetic coding sequence
  source 1..1290: mol_type = other DNA
atggcaagcctctgggagagccctcagcagtgcatcatcctgtcccctctttcaggttggtggttttcaatcggaattagcatcttaacatcatccgcccttgtactgaaacctcaaatgctcaagggggagctgcagacgcgtccatcacagcggccatcgcggaaggcttttaggcggaataatttcgagtatactcttgaagccagtaaatccctgcgacagaagccaggggactcaaccatgacatacctcaataaaggccagttttatccaattactctaaaggaagtttcttcttctgaaggtatccaccatccaattagcaaggtgcgctctgtgatcatggtggtttttgccgaggacaaatcacgagaggatcaactgcgccactggaagtattggcactcccggcaacacactgcaaaacagcgctgcatcgatatcgccgactacaaggagtcctttaacaccatctcaaatatcgaggaaatcgcctacaacgctatttcttttacttgggacataaatgacgaggcaaaagtgttcatttctgttaactgtctcagcactgatttttcatcccagaagggtgtgaagggccttcccctgaatattcaggttgatacctattcctacaacaaccgatctaataagcctgtgcatagggcatactgccagatcaaggtgttctgcgacaagggagccgaacgtaagatccgggatgaggagcgaaagcagagtaagcgcaaggtgtccgatgtgaaggtgcctctgcttccgtctcacaagcggatggatattacggtctttaagccatttatcgatctggatacccagccagtgctgttcatacccgatgtgcattttgcaaaccttcaaagaggcactcatgtgctgcctattgccagcgaggagcttgagggtgagggcagcgtcctgaagagaggaccatatggcactgaggacgatttcgccgttccaccatccactaagttggcaaggattgaagagcccaagcgggtgctcctgtacgtgagaaaagagagcgaagaggtgtttgatgcacttatgcttaaaaccccctctctcaaggggctcatggaggccatttcagataaatatgacgtgccgcatgataagatcgggaaaatctttaaaaagtgtaagaaaggaattctcgtgaatatggacgacaatatcgtaaaacattattctaatgaggataccttccagttgcagatcgaggaggccggtggatcatataagcttacattgaccgaaatctag

SEQ ID NO: 225181 - DNA, 1857 bp, synthetic construct
  misc_feature 1..1857: note = Description of Artificial Sequence: Synthetic coding sequence
  source 1..1857: mol_type = other DNA
atgacccaagaatatgataataagcgcccagtactcgtcctccaaaatgaggccctctacccccaaagacggagttacacctcagaggacgaggcttggaagtctttcctggagaatcctctgacggccgctactaaggcaatgatgagtataaatggcgacgaagacagtgcagctgctctgggcttactgtatgactactacaaggttccgagggaacgtcgctcctccaccgccaaacctgaagttgagcatcctgagccagatcattccaagcgaaactcgattccaattgtgaccgagcaaccactgatttcggccggtgaaaaccgggtgcaggttttgaagaatgtaccatttaatatcgtgctgccacatgggaatcagctaggaattgataagcgcggacatctgaccgcacctgacaccactgttaccgtgtctatagcgactatgcctactcatagcatcaagacagagacacagcctcacggctttgccgtcgggatcccccctgccgtgtatcatccagaaccgacagaacgggtggtagtgttcgataggaatctgaacacggatcagttttcaagcggcgctcaggcccctaatgcgcaacgtagaacacctgactctactttcagcgagacatttaaggaaggggttcaagaggtcttcttcccatccgatctatcccttagaatgcccggaatgaacagcgaggattacgtgttcgacagtgtgagtggcaataatttcgagtacacactggaggcctctaaatctttgaggcagaaaccaggcgactcaacaatgacctatctaaataagggacaattctatcccataacactgaaagaggtgtcttcctccgagggaatacatcaccccatcagcaaggtacgaagcgtgattatggttgtattcgccgaggacaaaagtcgggaagatcagcttaggcactggaaatattggcacagccgacagcacaccgcaaagcaaaggtgcattgatattgctgattataaagaatctttcaacactatcagcaatatcgaggagatcgcctacaacgctattagctttacttgggacattaatgacgaagccaaagtttttatctctgtgaactgcttgtcaacagacttctccagccaaaaaggggtcaagggcctgccgctgaacatacaagtggacacctatagttacaataatagatccaacaagccagtgcaccgcgcatattgccagatcaaggtgttttgcgacaagggtgccgagagaaagataagggatgaggaacgaaagcagagcaaacgcaaagtcagcgacgtcaaagtgccactgctcccgtctcacaagcgcatggacatcactgtattcaagccgtttatcgacctggacacccaacctgttctcttcatccctgatgtccactttgcgaacttgcaaagaggtactcatgtgctgcctattgctagtgaagagctggaaggtgaagggtctgtgttaaagcgcggaccttatgggaccgaggacgacttcgctgtgccacccagtacaaagctggcccgtatcgaggaacctaagagagtcctgctgtacgtccgtaaggagtccgaagaggttttcgatgccctgatgctgaaaactccttcgctcaagggactaatggaagctatctccgacaaatacgacgtgccgcacgataaaattggcaaaatctttaaaaaatgtaaaaaggggatcctggtgaatatggacgacaatatcgtcaagcattattcgaatgaagacaccttccagctgcagattgaagaagccggaggctcgtacaagttaactctgaccgagatttag

SEQ ID NO: 225182 - DNA, 1857 bp, synthetic construct
  misc_feature 1..1857: note = Description of Artificial Sequence: Synthetic coding sequence
  source 1..1857: mol_type = other DNA
ctgccaaaggaagtggagaacaagcggccagtcctggtgttgcaaaatgaggcattgtacccacagagacgtagttataccagcgaggacgaggcctggaagtctttcctggagaatccattaactgccgctacaaaagcaatgatgtccatcaacggcgatgaggatagcgcagcagcccttggactgctgtatgactactacaaagtgcctagagaacgcaggagctccacagccaagccggaagtggagcacccagagcctgaccactccaagagaaattctatccccattgtaacggagcagcccctgatttcagccggagagaatagagtacaggtgttgaagaacgttcctttcaatattgtgcttccccacggaaaccagctaggtattgataaaagaggacatttgaccgctcccgacactaccgtgaccgtgagtatcgcaacaatgcccacacacagcatcaaaaccgagactcaaccacatggcttcgcagtgggcatccctcctgcagtgtatcaccccgagcctactgaacgagtggttgtgtttgaccggaaccttaataccgatcaattttcatctggggcacaggccccaaacgcacagaggaggacgcctgactccacgttttccgagacattcaaggagggagtccaggaggtgttttttcccagtgatctgagcctgcggatgcccggaatgaactctgaggactacgtcttcgatagcgttagcggcaacaacttcgaatacacactggaggccagcaaatctctgagacaaaaacccggtgactctacgatgacatatttgaataaaggtcaattctatccgattacgcttaaggaggtgtctagtagcgaaggcattcaccatcccatatcaaaggttcggagtgttatcatggtcgtctttgctgaagacaagtctcgagaggaccagctgcgtcactggaagtactggcactccaggcagcataccgctaaacaaagatgcatcgatatcgcagattacaaggagtccttcaacactatttccaacatagaggagatcgcttacaacgccatatctttcacgtgggacataaacgatgaggccaaggtctttatctcagtgaactgtctgagtacagatttttcatcccagaagggcgttaagggacttcctctgaatattcaggtcgatacgtactcatacaacaaccggagcaataaacctgttcatagggcatactgccagattaaagtgttctgtgacaagggggcagaaaggaaaatacgggacgaggagaggaagcagtcaaagcgtaaggttagtgatgtgaaagtgcctcttttacccagtcacaagcgcatggacatcaccgtcttcaagccatttatcgacctggacacacagcccgttctgtttataccagacgtgcacttcgctaacttacagagggggacacatgtactgcccatcgcatccgaggaactggaaggggagggatcagtgttgaaacgcggaccatacgggaccgaggatgactttgctgttccaccaagtacgaaactcgccagaattgaagaaccaaagcgcgtgcttctgtatgtgcgcaaagaaagtgaggaggtcttcgacgccctgatgctaaaaacccctagtctaaaaggattgatggaggccatcagtgataagtacgacgtcccacatgataaaatcggcaaaattttcaagaaatgcaaaaaaggcatactggttaacatggacgacaatatcgtcaaacattattccaacgaagataccttccagctgcagatcgaggaagccggaggcagttataagctgactcttactgaaatctag

SEQ ID NO: 225183 - DNA, 1878 bp, synthetic construct
  misc_feature 1..1878: note = Description of Artificial Sequence: Synthetic coding sequence
  source 1..1878: mol_type = other DNA
atgtcccaggaatccgataataataaaaggctggtggcactggttcccatgccatccgaccctccgttcaacacccggagagcttacacgtctgaggatgaagcctggaagtcttacctggagaaccccctaactgccgcaaccaaggccatgatgagcatcaatggagacgaggattctgcagcagccctggggcttctttacgactattacaaggtccccagggataagcgattactttccgtgtctaaagcctctgacagtcaagaggatcaggaaaagcgcaattgtctgggcacctccgaggcgcaatctaacctgtcagggggtgagaatcgggtacaggtgctcaagacagtgcccgtcaacctctcgctcaaccaggaccaccttgaaaacagcaagagggagcaatacagtatctcatttcctgagagttcagcaataatccctgttagtggcattacagtggtgaaggccgaagactttactcctgtgttcatggcacccccagtgcactatcccagaggggatggcgaagagcagcgagtggtgatctttgagcagactcagtacgacgtcccaagtctggctacacacagcgcatatctgaaagacgaccagcgttccacaccggatagcacctatagtgaatcctttaaagacgccgctacggagaaatttcggtccgctagcgttggcgctgaagagtatatgtacgaccagacaagtagcgggactttccaatatacactggaggccacaaagtccctgaggcagaagcagggggagggtcctatgacttacttgaacaaaggacagttctacgccatcacgttaagtgagactggagataacaaatgctttcgtcatcccatctctaaagtgagatctgtcgtcatggtggtgtttagtgaagacaagaaccgcgatgagcagttgaagtattggaaatattggcactctaggcagcatacggcgaaacagcgggtcctggatatcgcagactataaagaatccttcaataccatcggaaatatcgaggaaatcgcctacaatgcagtgagttttacgtgggatgtgaatgaagaggccaagattttcatcactgtgaactgtctcagcactgacttttcatctcaaaaaggagttaaaggcctcccgctgatgattcagatcgacacatacagttataataatcggagcaacaagccaatccatagggcctattgccagattaaggtgttctgcgacaagggggctgagcgcaaaattagagacgaggaacgcaagcaaaaccgaaaaaagggcaagggccaggcgtctcaaacccagtgcaattccagctccgatgggaagctggctgccattcccctgcagaagaaatcagacatcacctacttcaagactatgccggacctgcattctcagccagtgttattcatccctgatgtgcatttcgctaatttgcaacggacaggccaggtttactacaataccgacgatgaaagagagggaggttctgtcctggtgaagaggatgtttagaccgatggaagaggaattcggaccggtgccaagcaagcaaatgaaggaagaggggactaaaagagtgctgctgtatgtccggaaagagaccgacgacgtgttcgacgctctgatgctcaagagtcccaccgtcaaaggcctgatggaagctatctcagagaagtacggactccctgtggagaagatcgccaagctgtataagaaatccaaaaaagggattctggtgaacatggatgataatatcatcgaacactacagtaacgaggacacatttattcttaacatggagagcatggtggaaggctttaaggtcactctgatggagatctag

SEQ ID NO: 225184 - DNA, 1830 bp, synthetic construct
  misc_feature 1..1830: note = Description of Artificial Sequence: Synthetic coding sequence
  source 1..1830: mol_type = other DNA
atgccctccgaccccccatttaacacaagaagagcatacaccagcgaagatgaggcttggaagagttacttggaaaacccgctcacagccgcaacgaaggccatgatgtccatcaacggggacgaagacagtgcggcagcgttagggttactgtacgactactacaaggtccccagagacaagcgtttgctctccgtttctaaagcgagcgattctcaggaggaccaggagaaaagaaattgtctcggtacctcagaggcccagtccaacctctctggtggcgagaaccgcgtgcaagtgctaaaaaccgtgccagtcaatctgtctctgaatcaggatcacttggagaactcaaagcgcgaacaatactccatctccttcccagaatcctccgctatcattcctgtttcagggatcactgtcgtgaaggctgaggatttcaccccagtttttatggccccaccagtgcactacccccgtggcgacggagaagaacagcgcgtggtaatcttcgaacagacccaatatgatgttcctagtttagcaactcattcagcctacctgaaagatgaccagaggtcgacccctgattctacatatagcgaatccttcaaagacgctgccactgagaaatttcgttctgcctcagtgggcgcagaagaatatatgtacgatcagactagttcaggtaccttccagtatactcttgaggctacaaaatctctgaggcagaaacagggcgaaggacccatgacctacctgaataaaggccagttctacgctataacgctgagcgaaactggggataacaagtgcttcagacaccccatttccaaggtaagatccgtggtaatggtcgtcttctcagaagacaaaaatcgggacgaacagctgaaatactggaagtactggcattcaaggcaacacacggcgaagcagcgcgtgcttgacattgcagattataaagagtccttcaacactataggtaatatagaagagatcgcatataacgcggtctcatttacctgggacgtgaatgaagaagctaaaatctttatcaccgtgaactgccttagcactgacttctcttcgcagaagggagtaaaaggcctgcctctaatgatccagatagacacatacagttacaataatcgaagcaacaagcctatacaccgtgcttactgccaaattaaagtcttttgtgacaagggcgctgagcgcaaaatccgtgacgaagagcggaaacagaacaggaagaagggaaagggacaagcctcccagacccagtgtaatagttcaagtgacggaaagctggccgcaatccctttgcagaagaagtccgacatcacatatttcaagacgatgcctgatttgcactcccagcccgtgttgtttataccagatgttcatttcgccaacctacagcggacaggccaagtctactataataccgacgatgaaagggaaggaggtagcgtgctggtgaagcgcatgtttcgtcccatggaggaggaatttggcccagttccatctaaacagatgaaagaggagggtactaaacgggtgctcttatacgtgcgaaaggagactgacgacgtcttcgatgcactgatgctcaagagtcctaccgtcaagggattaatggaggctatctctgagaagtacgggcttcccgttgaaaaaattgcgaagctatacaagaaatccaagaaaggcatccttgtcaatatggacgacaatatcattgagcactatagcaatgaggacacctttatccttaatatggaatcaatggttgagggttttaaggtgacactgatggagatatag

SEQ ID NO: 225185 - DNA, 1878 bp, synthetic construct
  misc_feature 1..1878: note = Description of Artificial Sequence: Synthetic coding sequence
  source 1..1878: mol_type = other DNA
atgggaaaggatggtaggagtaacaaaagacttgtggcccttgtccctatgccgagtgacccaccctttaacacgaggcgcgcatacacctcggaggatgaggcttggaaaagctacttagaaaaccccctaacagccgcaaccaaggccatgatgtccataaacggggatgaggactccgccgctgcactggggctgctgtacgactactataaggtgcccagggacaagagattactgtctgtcagcaaggcctccgacagtcaggaagatcaagaaaagcgcaattgtctgggcacgtcagaggcccagagtaacttgtcggggggagagaatcgtgtccaagtcctcaagactgtccccgtaaacctgtcactcaaccaggatcacctggagaacagcaagcgtgaacaatattccatttctttccccgagtccagcgccattatcccagttagcggaataaccgtggtaaaggccgaggacttcacccctgtttttatggctccccctgtgcactacccccgtggagacggagaggagcagagagtggtgatcttcgaacagactcagtacgacgtgccttctttggcaacacactcagcgtatttaaaagacgatcagcgcagtacccctgatagcacttatagtgaatctttcaaggatgcagcaactgagaaatttagaagtgcatccgtaggagctgaagaatacatgtacgatcagacatcttcaggaacattccagtacacgcttgaagcgaccaaatcccttaggcagaaacagggcgagggcccaatgacctacttaaacaaggggcagttctacgcaatcaccctgtctgaaaccggtgacaacaaatgtttcagacatccgatcagcaaggtgcgtagtgtggttatggtcgtattttccgaggacaaaaacagggatgagcagctgaagtattggaagtattggcattcaagacagcacaccgctaagcaaagagtgctggatatcgccgattataaggaaagtttcaacaccattggcaacatcgaagagatcgcctataacgctgtcagctttacatgggatgtcaatgaggaggccaagatcttcatcactgtgaattgcctgagcaccgactttagctcacagaagggggtgaagggcctgcccctcatgatccagatcgatacatactcatacaacaatcggagcaataaacccattcatcgggcttactgccagatcaaggtgttctgcgacaagggcgctgaacgcaaaatccgagacgaggaacggaaacagaatcggaaaaaaggaaagggccaggccagccagacccagtgtaattcatcctctgacggaaagctcgcggcaatccccttgcagaaaaagtcagatatcacctatttcaagactatgccagatctccactctcagccagtactgttcataccggatgttcactttgctaatctccagcggactgggcaggtatactacaatacagacgacgagcgggaaggtggctctgtgctggttaaacgcatgttccgccctatggaagaagaattcgggcctgtcccctctaaacagatgaaagaagagggtacaaagagggtacttctgtacgtgaggaaagaaaccgacgacgtgtttgacgcattaatgctgaaatctcctaccgtcaaagggctgatggaggccatttcagaaaaatatggcctcccagtggaaaaaatcgcaaaattatacaaaaaaagcaagaaggggatcttggtcaatatggacgacaatattatagaacactattcaaacgaggatacttttatcctgaatatggagagtatggtcgagggcttcaaggtgacactgatggagatctag

SEQ ID NO: 225186 - DNA, 21 bp, synthetic construct
  misc_feature 1..21: note = Description of Artificial Sequence: Synthetic coding sequence
  source 1..21: mol_type = other DNA
atgtctcaggagtccgactag

SEQ ID NO: 225187 - DNA, 1737 bp, synthetic construct
  misc_feature 1..1737: note = Description of Artificial Sequence: Synthetic coding sequence
  source 1..1737: mol_type = other DNA
atgcttaggcgcttggacaaaatccgattccggggtcataaacgggatgacttcctggacttagcggagagccccaacgcctcagacacagaatgttcagatgaaatcccactcaaagtcccccgaaccagtccccgagactccgaagaactgagggacccagccggacctggcaccctgataatggccaccggcgtccaggacttcaatcgcaccgagtttgaccggctgaatgaaatcaagggccatctggagatcgcccttcttgagaaacacttccttcaggaagagctgcgaaaactgcgcgaggagacaaacgcagaaatgctgcggcaggaactggaccgagaacggcagagacggatggagctggagcagaaagtacaggaggtgctcaaagcaagaacagaagaacaaatggcgcagcagcctcccaagggacaggctcaagcatccaatggagcggagagacggtcacaaggtctctcgtctagacttcaaaaatggttctatgagcgctttggtgaatacgtggaagacttcagattccagccggaagagaatacggtggagaccgaagagcccttaagtgccaggagactcaccgagaatatgcgcaggctgaagaggggggcaaaaccagtgacaaattttgtgaagaacctttcagcgctctctgactggtattctgtatacacatccgccattgcctttaccgtttacatgaacgcggtatggcacggctgggcaatcccactcttcttattcctggccatcctccgcctcagcctgaattatttgatagcacgaggatggcgaatccagtggagcattgtgccagaggtctctgaacctgtcgaacctcccaaggaagatcttactgtgtccgaaaaatttcaactagtgttggatgttgcacagaaagcacagaatctcttcgggaaaatggccgatattttagaaaagatcaaaaacctcttcatgtgggtgcagcccgagattacacagaagttgtatgtcgcgctttgggcggctttcctggcttcttgcttctttccttacaggctggttggattggccgttggcctgtatgccggaatcaaattcttcctgattgatttcatcttcaagcgctgccccaggctgcgagccaagtatgacaccccatatatcatttggaggtcactccctacggacccgcagctgaaggagcgaagttctgctgccgtttcccgtcggctccagactacatcctcgagatcctacgtgcccagcgcacccgcaggcctcgggaaggaggaggatgcgggtaggtttcattctaccaaaaaaggtaatttccacgagatctttaatctcaccgaaaatgagagaccactggccgtctgtgagaatggatggcgctgttgtttgatcaacagggaccgcaaaatgcctacggactacattaggaatggagtgctctacgtaaccgagaactacctctgtttcgaatcgtccaagagtggctccagcaaaagaaacaaggtcattaagttggttgatatcacggacattcagaagtataaggtactctcggtgctgccaggcagtgggatgggcatcgcagtctcaactccaagcactcagaagccactagtctttggggctatggtgcacagggacgaggcctttgagacaatactgagccagtacattaagatcacgtctgctgccgcttccggcggagattcttag

SEQ ID NO: 225188 - DNA, 1737 bp, synthetic construct
  misc_feature 1..1737: note = Description of Artificial Sequence: Synthetic coding sequence
  source 1..1737: mol_type = other DNA
atgcttagacgcttggataagatccgcttcagaggccacaagcgggatgacttcctggacctcgccgagagtcctaatgcttccgacaccgagtgctcagacgagatccccctcaaggtgcctcgcacatcacctcgtgacagcgaagaactgcgcgacccggcagggcctgggactctgatcatggcaacaggggtgcaggattttaaccgaaccgagtttgaccgtcttaatgagattaaaggccacctggagattgcacttctggagaagcacttcctgcaggaagagctcagaaagctccgggaagaaaccaatgcggaaatgctacggcaagaactcgatcgggagcggcagagaagaatggagctggagcagaaggtgcaggaagttctgaaagctcgaaccgaggaacaaatggcgcagcaaccgcctaaggggcaggcacaggcctctaatggcgctgagagaaggagccaaggtttgagcagtcgactgcagaaatggttctacgagcgtttcggagagtacgtagaggatttccgcttccaacccgaagagaataccgtggagacggaggagcccctatccgctcgtagactaactgaaaatatgagaagattgaaacgcggagctaaacctgttacgaatttcgtgaagaacctaagcgcactcagtgactggtattcagtatatacaagcgctatagcttttaccgtgtatatgaacgccgtatggcacggttgggccatacccctgttcctgtttttggcaatcctgagactgtctctgaattatttgatagccagaggctggaggatacagtggagcattgttccggaggtctccgaacctgtggagccacccaaggaggacctgaccgtgtccgaaaagtttcagttagtcctggacgttgcacaaaaggcccagaatttgttcgggaagatggctgacatcttggaaaagattaaaaatctgttcatgtgggtccaaccggaaataacccaaaagttatacgtagcactctgggccgcttttttagctagttgtttcttcccatatcgactcgttgggttggcggtcggtctctatgccggaattaaattctttttgatcgatttcatttttaaaaggtgccctcggttgcgggcaaagtacgacaccccctatattatctggagaagcttacccactgatcctcagctgaaggagcgtagctccgcggctgtatccagaaggcttcagactaccagctcccggtcctatgtgcccagcgctcccgctggcctgggcaaggaagaagacgccggaaggtttcactccacaaaaaaagggaactttcatgaaatatttaacctgactgaaaacgagcgcccacttgccgtgtgtgaaaatggctggcggtgctgccttatcaaccgagatcgaaagatgccaacggactacatcagaaatggggtgctttacgtgaccgagaattatctttgcttcgagagcagcaagagtggatcatcgaagcgcaacaaggtgattaaactggtagacattactgacatacagaagtacaaggtactgtctgtgctgcctgggtctggaatggggattgccgtgtccacgccatccacacaaaagcccctggtctttggcgctatggtacatcgcgatgaggcgtttgagactattttgtcccaatatatcaaaatcacaagcgcggctgcttctggcggagacagctag

SEQ ID NO: 225189 - DNA, 102 bp, synthetic construct
  misc_feature 1..102: note = Description of Artificial Sequence: Synthetic coding sequence
  source 1..102: mol_type = other DNA
atgctccgcagactcgataaaatcagattccgcggtcacaagagggatgactttcttgatttggctgaatcccccaatgcttctgacaccgaatgttcttag

SEQ ID NO: 225190 - DNA, 1782 bp, synthetic construct
  misc_feature 1..1782: note = Description of Artificial Sequence: Synthetic coding sequence
  source 1..1782: mol_type = other DNA
atgtggactcttgtgtcatgggtggcgttgaccgcaggccttgtggccggaaccaggtgtccagatggacaattctgtcctgttgcttgttgccttgacccaggcggagcttcctattcgtgttgcagacccctgctcgacaagtggcctacaacactttcccggcatctgggaggcccttgtcaagtagatgctcattgttctgctggccactcttgtatctttaccgtttccgggacctcctcttgttgcccttttccagaggcggtcgcctgcggcgatgggcaccattgttgccctcggggatttcactgctcagctgacggaagatcctgctttcaacgctcaggaaacaactccgttggtgcaatccagtgtcccgattctcaattcgaatgtcccgacttttccacttgttgtgttatggttgacggttcgtggggatgttgtccgatgcctcaggcaagctgctgtgaggaccgcgttcactgttgtcctcatggagctttttgcgacctggtgcataccagatgcatcacacctactggaacgcatcccctggcgaaaaagctccccgctcagagaactaacagagctgttgccctgagttcctcagtgatgtgccccgatgcgagaagtcgttgccctgatggaagcacgtgttgtgaattgccctcaggcaagtatggatgttgccctatgccgaatgcaacttgttgttccgatcaccttcattgctgtccacaagatacagtatgcgatctcattcagtctaagtgtctcagcaaggaaaatgccacaaccgacctgctgacaaagctgcccgcacacacggtaggggatgttaaatgcgacatggaagtatcttgccctgacggttatacctgttgcagactgcagtccggcgcttgggggtgttgcccattcacccaggccgtctgctgtgaggatcacatccattgctgccctgctggattcacctgcgacacccaaaaggggacctgcgagcagggacctcaccaggtgccatggatggagaaagcaccagcccacctctcactgccagatccccaggccctgaagagagatgtcccatgcgacaacgtgagttcctgtccttcatctgatacatgctgtcaactgacctccggcgagtggggatgttgccccataccagaggccgtctgctgttccgaccaccagcactgttgtcctcagggctacacatgcgtggctgagggtcagtgtcagagaggtagtgagatcgtggctgggttagagaaaatgcctgcgcgtcgcgcaagcctctcccacccccgagatatcggatgtgaccagcacacatcgtgtccagtcggacagacatgctgtccatctctggggggatcttgggcgtgttgccaacttccccatgccgtatgctgcgaggaccgccagcactgttgccctgctggctacacatgtaatgtgaaagccaggagctgcgagaaggaggtggtctctgcccagccagccactttcctcgccagatccccacacgtgggcgttaaggacgtggaatgtggggaaggacatttttgtcacgataatcagacatgctgccgagacaacagacagggctgggcatgctgcccatacaggcagggcgtctgctgcgcagatcggaggcactgctgtccagcgggatttcggtgtgccgctcgcggaacaaaatgtttgcgcagagaggcaccacgatgggacgcccctctgcgcgacccagcccttagacagctcctgtag

SEQ ID NO: 225191 - DNA, 1317 bp, synthetic construct
  misc_feature 1..1317: note = Description of Artificial Sequence: Synthetic coding sequence
  source 1..1317: mol_type = other DNA
atgtggacactcgtcagctgggttgcccttaccgctggcctggtggcgggaactcgctgccctgacggccaattctgcccagtggcttgttgcttggatccgggaggagctagttatagttgttgtcggcctcttttggataaatggcccacaaccttgtctcggcatctgggaggtccctgtcaggtggatgcacactgcagcgctggccattcatgtatttttaccgtctctgggacatctagttgctgcccgttccccgaggctgtggcatgcggcgatggacaccactgctgcccaagaggattccattgtagcgcagatgggcgaagttgtttccaacggtccggaaataactcagtgggggctatccagtgtccggactctcagtttgagtgtccggatttcagtacatgctgtgtgatggtggatgggtcttgggggtgctgccctatgccccaggcctcttgttgcgaggacagggtgcattgttgcccacacggcgctttctgtgacctagttcataccagatgcatcacacctaccggtacacatcctctcgctaagaaacttcccgctcagaggaccaacagggccgtggccctctcctcttcggttatgtgcccggacgccagaagtcggtgcccagatggcagcacttgctgtgagctcccaagcgggaagtatggctgttgcccaatgccgaacgcgacctgctgctctgatcacctgcactgctgtccccaggacaccgtttgcgacctgatccagagcaaatgcctgagcaaagagaatgcaacaacagatctcctcacaaagcttccagcccatactgtgggcgacgttaagtgtgatatggaagtgtcatgccctgatggatatacctgctgtcggctgcaatctggagcttggggctgctgcccatttacacaggcagtttgttgtgaagaccatatccattgttgtcccgctgggtttacctgtgacactcagaaaggtacatgcgagcagggcccacaccaagtaccttggatggagaaggctcctgctcacctgtcacttcctgacccgcaggctctgaaacgggacgtgccatgcgataacgtatccagctgcccttcctcagatacctgctgcagagataaccgtcaaggctgggcctgttgcccatatcgacaaggcgtgtgttgtgctgatcggcgacattgctgtcccgctgggtttagatgtgccgctagaggaacgaaatgcttgcgcagagaagcccctcgctgggacgctcccttgagagatcctgccttgagacagctgctgtag

SEQ ID NO: 225192 - DNA, 1242 bp, synthetic construct
  misc_feature 1..1242: note = Description of Artificial Sequence: Synthetic coding sequence
  source 1..1242: mol_type = other DNA
atggcgattaccgccgcacacggcgcaagcaccgcagtccagaccggggatcccgcttcaaaggatcaggtcactaccccttgggtcccatcttcagcactgatagtgtcgagtaatgcaaggacttcccccagagccgtgctgtggagcatggcaccgggtggcgcagccccttgcccaaggctcccagcggtgaagacagggtgcacagctgtgtgtgatctgatacagagcaaatgcctatcaaaagagaacgctaccaccgacttgctcactaagctgccagctcacaccgtgggcgacgtgaagtgtgacatggaggtctcctgcccagacgggtacacttgctgccgccttcaatccggtgcctggggctgctgtccgtttacgcaggctgtctgttgtgaggaccatattcattgttgccctgccggtttcacttgcgatacccagaaagggacttgtgagcaggggcctcaccaggtcccatggatggagaaggcgccagcccatctgagtctaccggatcctcaggccctgaagagagatgtgccttgtgacaacgtctcttcctgcccttcatctgacacttgctgccagctgactagcggtgagtggggatgctgcccaatccctgaggctgtttgctgctctgatcaccagcattgctgtccacagggttacacttgcgtggctgagggccagtgccaaagggggagcgaaatcgtggccggactggagaagatgcctgccagaagggcctccctgagccaccctagggatatcggctgtgaccaacatacttcgtgtcccgtcggccagacctgctgcccatcccttggcggttcttgggcttgctgccagctacctcacgctgtgtgttgtgaggacaggcaacattgctgcccggcaggatacacatgtaacgtcaaggctagaagttgtgagaaggaagtcgtcagcgctcaacccgcaacctttctggctcgctccccccatgtgggggtaaaggacgtggagtgtggcgaaggccacttttgtcatgataatcaaacatgttgtcgagacaatagacaggggtgggcgtgctgcccctatcggcagggcgtgtgttgcgcagatcggaggcactgctgcccagctggctttcgctgcgccgcaagagggactaagtgtttgcgcagagaggccccacggtgggacgctcctttgagggatcccgcacttagacaactcctgtag

SEQ ID NO: 225193 - DNA, 789 bp, synthetic construct
  misc_feature 1..789: note = Description of Artificial Sequence: Synthetic coding sequence
  source 1..789: mol_type = other DNA
atgcggaacagttatcggtttcttgctagcagcctgtccgtggtggtgtccctgctactaattcccgaggatgtctgcgagaagattatcggcggaaatgaagtcaccccccactcccgcccatatatggtcctcctctcgctagacagaaagacaatctgtgccggtgccctcattgccaaagattgggtgctgacggcagcccactgcaatttaaacaaacgctcacaagttatactgggggctcactctatcaccagggaagagcccaccaagcaaatcatgctcgtgaagaaagagttcccctacccttgctacgaccccgcaactcgcgagggtgacctcaaactcctgcagttaatggagaaggccaagatcaataaatacgtgacaattctccacttacctaaaaaaggagatgacgtcaaacctggaaccatgtgccaagtggctgggtgggggcgaacacataactccgcctcctggtccgataccctgcgggaggtaaacatcactatcatcgatcgcaaggtgtgtaacgatagaaatcactacaactttaatccagtgataggaatgaacatggtctgcgccggatcacttagaggcggtcgggactcatgcaacggggatagtggctctccactgctttgcgagggagtctttcgcggtgtgacctcgttcgggctagaaaacaaatgtggcgacccaaggggcccaggcgtctacatactattgtctaaaaagcacctaaactggattatcatgacaatcaagggagcagtgtag

SEQ ID NO: 225194 - DNA, 741 bp, synthetic construct
  misc_feature 1..741: note = Description of Artificial Sequence: Synthetic coding sequence
  source 1..741: mol_type = other DNA
atgcagcctttcctgctgctgctggccttcctactgacacccggtgcaggtactgaggaaatcatcggtggccatgaagccaagccacatagcagaccttacatggccttcgtgcaatttctgcaggagaaatccaggaaaaggtgtgggggaatcctggtgaggaaggatttcgttctgacagctgctcattgtcagggatcaagtattaatgtgactctcggggcacacaacatcaaggagcaggagcgcacacagcagtttataccagtgaaaagacctataccacacccagcctacaatccaaaaaatttcagcaatgatatcatgctgctgcagctggaacggaaggccaaatggacaaccgctgtaaggcccttgcggctaccctcctctaaagctcaggtcaagccaggacagctctgctccgtcgctggctggggctacgttagtatgtctactctcgcgacgaccctgcaagaagttctactcacagtgcaaaaggattgccagtgcgaacggctattccacggcaactattctcgggcaactgagatctgtgtgggcgatcctaaaaagacccagaccggcttcaagggggattccggcggacctttagtgtgcaaagatgtggctcagggcattttatcctatggcaataagaagggaactccaccaggggtgtatatcaaggtgtcccatttcttaccatggatcaaacggacaatgaagcgtctgtag

SEQ ID NO: 225195 - DNA, 459 bp, synthetic construct
  misc_feature 1..459: note = Description of Artificial Sequence: Synthetic coding sequence
  source 1..459: mol_type = other DNA
atgcaacccattctgctgttgctggcgtttttgttacttcctcgtgcggatcagctggaaagaaaagcaaagcgaacccgcgctgtccagcctctgagactgccctcgaacaaagcacaggttaaacctggccagacttgttctgtggcaggctggggccaaacagcccctctcggcaaacattctcacacattacaggaggtgaaaatgaccgtgcaagaggaccgaaaatgtgagtccgatcttcggcactactacgattccaccattgagctctgtgtgggtgatcccgaaatcaagaaaacctccttcaagggtgattcaggaggccctttggtgtgcaataaggtggcccaggggatcgtgtcttatggccgaaataatggtatgcccccacgcgcatgtacaaaagttagcagctttgtgcattggataaagaagaccatgaaacgttattag

SEQ ID NO: 225196 - DNA, 609 bp, synthetic construct
  misc_feature 1..609: note = Description of Artificial Sequence: Synthetic coding sequence
  source 1..609: mol_type = other DNA
atgcagcccatcctgctcctgttagcattcctccttctgccgcgagccgatgcgggagaaatcatcggaggacatgaagcaaaaccacattcccggccatacatggcatatcttatgatatgggaccagaaaagtttaaaacgatgtggcggtttcctgatcagggacgatttcgtgctgacagcagcacattgctggggccgactggagagaaaagcaaaaaggacacgtgcggttcagccactgcgcctaccgtcaaacaaagcacaggtcaagcccggacagacttgttctgtggccggttggggccagactgcccctctggggaagcactcgcacacactgcaggaagtgaaaatgacagtgcaggaggacagaaaatgtgaaagcgacctgcgccactattacgacagcaccatcgaactgtgtgtgggcgacccggagatcaaaaagacctccttcaagggagactcaggcggaccgctggtttgcaacaaagtggcccagggcatcgtcagctacggcagaaacaatggcatgccgcctcgcgcttgcactaaggtcagtagctttgtgcactggatcaagaagactatgaaaaggtactag

SEQ ID NO: 225197 - DNA, 846 bp, synthetic construct
  misc_feature 1..846: note = Description of Artificial Sequence: Synthetic coding sequence
  source 1..846: mol_type = other DNA
atgaaaagcctgagcctcctgcacctattccccctgccgcgagcaaagcgggagcagggcggtaacaattcatcctctaaccagggctccctgcccgaaaagatgcaacccatcttactcttacttgcattcctgttgctgcctagagcggacgccggtgagataataggtggacacgaagcaaagccacattctcgcccttatatggcctacttaatgatatgggatcagaagtctcttaagcgttgtggaggattcttaatcagagacgactttgtgctcaccgccgctcactgttggggaagcagtattaacgttacccttggggcacacaatatcaaagaacaggaacccacacagcagtttattccagtgaagcggcctatcccccaccctgcctataaccctaagaacttttctaacgatataatgctcctgcagctggaaaggaaggcaaaaagaacacgcgcagtccagccgttaaggctaccatccaacaaagcccaggtgaagcccggacaaacctgttccgtcgcaggctggggtcagacagcacccttggggaagcatagccacacccttcaggaggttaaaatgacagtgcaggaagacaggaagtgtgagtctgatctgcgacactattacgactctacaatagagttatgcgtcggtgatcccgagataaagaaaaccagctttaaaggagacagcggtgggcctcttgtctgtaacaaggtcgcccagggcatcgtgtcctacgggcgaaataatgggatgccaccgcgtgcctgtactaaggtatccagtttcgttcattggatcaagaagaccatgaagagatactag

SEQ ID NO: 225198 - DNA, 708 bp, synthetic construct
  misc_feature 1..708: note = Description of Artificial Sequence: Synthetic coding sequence
  source 1..708: mol_type = other DNA
atgcagaccttccccagtggtgagatcattggaggccacgaggcaaagccacacagtaggccctatatggcctacctcatgatttgggaccaaaaaagccttaagcgctgcggcggatttctaattcgcgacgattttgtgttaaccgccgcacactgttggggaagttctatcaatgtcactctcggcgctcataacatcaaagagcaagaaccaacgcaacagtttatcccagtcaagcgcccaatcccccatcctgcttataaccctaagaacttttctaacgacattatgctcctgcaactggagcgcaaagctaaacggactcgtgccgtgcagccgctgcgattgccatccaataaggcacaggtcaagcctggccagacctgttctgtggctgggtggggccagaccgctccactgggcaagcatagccacactctacaggaagtaaagatgactgtccaggaggaccggaagtgtgagtccgacttgcggcactactacgattccactatcgagctctgcgtgggtgaccctgaaattaagaagacgtcctttaagggtgactccggaggccctctcgtttgcaataaggtggctcagggtatcgtatcttacgggagaaataatgggatgcctcctcgagcctgcacgaaggtcagttcattcgtccattggatcaagaaaacgatgaagagatattag

SEQ ID NO: 225199 - DNA, 483 bp, synthetic construct
  misc_feature 1..483: note = Description of Artificial Sequence: Synthetic coding sequence
  source 1..483: mol_type = other DNA
atgcagccattcctgttgctgctcgcttttcttcttactcccggtgcgggtacagaggagataattggcggtcatgaggccaaaccgcatagtaggccctacatggctttcgtacagttcctgcaggaaaagagccgcaagcgttgtggaggaatcctggttaggaaagacttcgtgttaaccgctgcacattgtcaagggtcatctatcaatgtcacactgggcgctcataatatcaaagagcaggagcgcacacagcagttcatacccgtgaaaagacctatcccccatcccgcatacaatccaaaaaacttcagcaacgacataatgctcctgcaaggtgacagcggaggaccactggtgtgcaaagacgtagcacagggcatattgagttacggcaataaaaaaggcacaccgcctggcgtctatattaaggtgagccacttccttccatggatcaaacgtaccatgaaacgtttatag

SEQ ID NO: 225200 - DNA, 768 bp, synthetic construct
  misc_feature 1..768: note = Description of Artificial Sequence: Synthetic coding sequence
  source 1..768: mol_type = other DNA
atgcagccgttgttactacttctggcatttttgttgcccacaggcgcagaagcaggggaaataatcggaggccgagaatcacgccctcatagcaggccgtatatggcctacctacaaatccagtctcccgcaggtcaatctagatgtgggggattcctggtgcgggaggactttgtgctaacagccgcacactgttggggcagcaacattaacgttacactgggtgcccacaatatccagaggagagagaatactcagcagcatattaccgctaggcgggctatccgtcatccccagtacaatcagcgtactattcagaatgacattatgttgctgcagttgtccaggcgcgtgcggagaaaccggaatgttaaccccgtcgcactccctcgcgctcaggaaggtctgagacctgggaccctgtgtacggtagccggttgggggagggtatcaatgagaagaggcacagacaccctgcgcgaggttcagttaagagtgcagcgcgaccgacaatgcttgcgcatcttcggtagctatgaccccagaagacagatttgtgtaggagaccggagagagcgcaaggccgcattcaaaggcgatagcgggggtcctcttctgtgcaacaatgtggcccacggcatcgtgagttatggcaaaagctcaggagtgccacccgaagtgttcacgcgtgtgtcatccttcttgccgtggatcagaactaccatgcgtagttttaagctgctagaccaaatggagacgcctctatag

SEQ ID NO: 225201 - DNA, 348 bp, synthetic construct
  misc_feature 1..348: note = Description of Artificial Sequence: Synthetic coding sequence
  source 1..348: mol_type = other DNA
atgcagccattcttgctcctgcttgccttccttctgacccctggcgcaggtactgaggagatcatcggtgggcatgaagctaaacctcacagcagaccttatatggcgtttgttcagttcctccaggaaaaatccaggaagcgatgcgggggtatccttgtgcggaaggacttcgtgctgacagctgcacattgccagggtagaggggattctggcggaccccttgtgtgcaaagacgtcgcccaaggcatattaagttatgggaacaagaagggtacgccaccaggagtatacatcaaagtctcgcactttttgccatggataaaacgcaccatgaagcgcctttag

SEQ ID NO: 225202 - DNA, 774 bp, synthetic construct
  misc_feature 1..774: note = Description of Artificial Sequence: Synthetic coding sequence
  source 1..774: mol_type = other DNA
atggaggcctgtgtgtccagcctactcgtgctggcccttggagccctctcagtcggcagttctttcggaactcagatcatcggaggcagggaggtgatcccacactctcgtccctacatggcttctctccagagaaatggctctcacttgtgtggaggagtgctcgtgcatccaaagtgggttctgactgccgctcattgtttggctcaaagaatggcccaactgagactggttctggggctgcatacgcttgacagtccaggcctaacatttcacattaaggcagccatccagcatccccgatataagccagttcccgctctcgagaacgatctagccttattgcagctggacgggaaggtgaaaccaagtagaacaatacgacccctggccttgccaagcaagcggcaggtcgtggcagctggaactcgatgttccatggcaggctggggactgacacaccaaggcggtaggttgagccgggtgttgagggagctcgacctacaggtgctggacacccggatgtgcaataactcgaggttctggaacggctcgctctcaccttccatggtgtgcctggctgccgattcaaaagatcaggccccatgcaaaggggactccgggggtcccctggtatgcggtaaaggaagggtgctggcgagggtactgagcttttcttcgagggtttgtactgatatattcaaaccaccagtggcaactgccgtcgccccttacgtgtcttggattcggaaagttacggggcgaagcgcatag

SEQ ID NO: 225203 - DNA, 3108 bp, synthetic construct
  misc_feature 1..3108: note = Description of Artificial Sequence: Synthetic coding sequence
  source 1..3108: mol_type = other DNA
atggccgctgagacactgaatttcgggcctgaatggctgcgggctctgtccgggggaggatccgtcgcctcccctcctccaagtccagcaatgcctaagtacaaactggctgactataggtacgggagagaggagatgttggccctctacgtcaaggagaataaggtacccgaagagctgcaagacaaggaatttgccgctgtcttgcaggatgagccgttacaacctctcgctctggagcccctcactgaagaagagcagcggaactttagtctgtccgtgaatagcgtggccgtcctgcggctgatgggaaagggggctggccctcccttggctgggacctcacggggacgtggtagtacccgcagcaggggacgaggcagaggagattcttgtttctaccaacgatcgattgaagaaggtgatggcgcttttgggaggtctcctagagaaatccagcggtcacagagctgggatgacaggggtgagagacggtttgaaaagtccgcgcgtagagatggagcacgttgtgggttcgaagagggtggggctggtccacggaaggagcatgccagaagcgatagcgaaaattggagaagcctcagagaggagcaggaggaagaagaggaagggagctggagactgggcgcagggccaaggcgggatggagatcgatggcggagtgccagccccgacgggggacctcggtccgcagggtggagagaacatggtgagcgcaggcgaaaatttgagttcgatctgaggggggaccggggtggctgtggagaagaggagggcagagggggaggtgggagctctcatctccgacggtgtagggcccctgaagggtttgaggaagacaaggacgggctgccagagtggtgtctagacgatgaagatgaggagatgggaacttttgatgcttctggcgcttttctgccactgaaaaagggccctaaagaacccattcctgaagaacaggaactggattttcagggactcgaggaggaggaggaaccctccgaaggcctagaagaggaaggtcctgaggccggaggcaaagagcttactcctcttccccctcaggaagagaagtcttccagtccttcccccctgcccaccctgggaccactttggggcacgaacggagatggagatgaaacggccgagaaggagccaccagcagcggaggatgatatcagggggatacagttgtccccgggtgtgggttcaagtgcagggccacctggggacttggaggatgacgagggtttaaaacatctgcagcaggaggccgagaagcttgtcgctagcctgcaagattcctctctggaggaggagcagtttactgcggcaatgcaaacacaaggcttgcgccattcagccgcagcaaccgctctcccgctgagccatggtgccgctcgtaagtggttctacaaggatcctcagggtgagattcagggcccttttaccacgcaagaaatggctgaatggttccaggccggatatttctcaatgtcactcctggttaagcgcggttgcgacgaaggattccagccgttgggcgaggtgatcaaaatgtggggaagggtaccattcgccccaggtccctcccctccaccgctgctcgggaacatggaccaggaacggttgaaaaagcagcaagagctggccgctgctgccttatatcaacagctacagcaccagcaatttttacagctcgtgagcagccgccagctccctcagtgtgcattaagggagaaagcagcattaggggacctcacaccacctccgcctcctccgcctcagcagcaacaacagcagttgacagcattccttcagcagctccaggccctaaaacccccaagaggaggagatcaaaatctgttgcccacgatgagtaggtcactttctgtgcccgacagtggtcgcctttgggatgtgcatacatctgctagtagccagtccggaggcgaggcctccctctgggacatccccatcaattccagcacccaggggcctatcctggagcagctgcagctgcagcataaattccaggaaaggagagaagtggaactgcgggcaaaacgcgaggaggaagaacgtaagaggagggaggagaaacggaggcaacagcagcaggaggagcagaaacgtaggcaggaggaggaggagctcttccgcagaaagcacgtgcggcagcaggagttgctgctcaagctcctgcagcagcaacaggctgtccctgtccctccagcaccctcaagtcctcctcccttatgggccggactagccaagcaaggtctgtcaatgaagaccctcctggagctccagctggaaggagaaagacagctacataaacagccaccacctcgggagcctgccagggcacaggcccctaaccatagggtgcagctggggggtctgggaactgctcccctgaaccagtgggtttcagaagccggaccgttatggggcggtccggacaagtccggtggcggttccagtggtctggggctctgggaggatacacccaaatcaggaggttctctagttcgcggtctcgggctcaagaattcacggtcttctccttcgcttagtgatagttattcccatctgtcaggcagaccgatcaggaaaaagactgaggaagaggagaagctgctgaagctgctgcaagggatccccagaccacaggatggtttcacacagtggtgtgagcaaatgctacacactttatctgcgactggatctctggacgtccctatggcggtcgctattctgaaggaggtggagtcaccatacgatgtgcatgattacatccggagctgcctcggagatacgctggaagcgaaggagtttgccaaacagtttctagaaaggcgggcaaagcagaaggcttcgcaacagagacagcagcagcaggaggcctggctgagtagtgccagcctgcagacagcattccaggcaaaccatagcacaaagctggggcctggagaggggtcaaaagccaaaaggcgcgctctgatgctccattccgacccatcaatcctgggatacagcttgcatggatcttccggcgagatcgaatctgtggatgattattag

SEQ ID NO: 225204 - DNA, 2265 bp, synthetic construct
  misc_feature 1..2265: note = Description of Artificial Sequence: Synthetic coding sequence
  source 1..2265: mol_type = other DNA
tcttcattccccagccccaggctgccccaggtgttccataggctagatgacgaggatgaggagatgggcactttcgatgcctctggcgcttttctgcctcttaaaaagggccctaaggagccaattcccgaagaacaggagctcgatttccagggactcgaggaggaagaagaaccgtccgaaggtctggaggaggagggccctgaggcgggtggcaaggaattaactcctctcccgcctcaggaggagaagtcgagcagcccgagtcccctacccactctcggcccactgtggggcactaatggggatggagacgaaaccgctgaaaaggaacctcccgctgcggaggatgatattcggggtattcagttatcacccggagtggggtcatccgcaggtccacctggcgacctagaagacgacgaaggactcaagcaccttcagcaagaagccgaaaaactggtcgcctccctgcaagacagctcccttgaagaggagcagtttacggctgctatgcagactcagggcctccgccactcagctgccgcaacagcattacccctctcccatggcgctgcacggaaatggttttacaaggatcctcagggagaaatccagggaccgtttaccacacaggagatggccgagtggttccaagcaggctatttctccatgagcctgttggtgaagcgaggctgcgacgagggattccagcccctcggggaggttatcaaaatgtggggtagggttccctttgcccctgggccatctccgccaccactgctgggaaatatggaccaggaacgacttaaaaagcagcaggaactggctgctgccgctctataccagcaactgcagcatcagcagtttttacaattggtgtcaagtcggcagctcccccagtgtgctctgagggagaaggccgcactgggcgatttaacaccgccaccaccgcctcctcctcagcagcagcagcaacagctgacggcatttcttcaacagctgcaggcactgaaaccacctcgcggaggcgatcaaaatctgcttcctacaatgtctcggtccctgagcgtcccggattctggacggctatgggatgtacacacgtcggcgtcttcacagtcagggggtgaggcatctctgtgggatatcccaatcaactctagcacacagggacccatactggagcagctgcaactccagcacaaattccaagaaaggcgcgaagtggagttgcgagctaagagagaggaggaggagaggaaaagacgcgaggaaaagagaaggcagcagcagcaggaagaacagaaacgcaggcaagaggaggaagaactttttcggcgtaaacatgttcggcagcaagagctgctcctcaagcttttacagcaacagcaagcggtgcctgtgcctccagcccctagcagcccacctccattatgggccggtttggcaaagcagggcttgtccatgaagaccctgctggagctgcagctcgagggagaacgccagttacataagcaaccgcctccacgcgaacctgcaagagcacaggcccctaatcaccgtgtgcagttaggcggactaggcaccgcccctctgaatcaatgggtgagcgaagctgggcctctttgggggggtcccgacaagtcagggggaggaagttccggcctgggactgtgggaggacaccccaaaatccggcggatcattagtgagggggctgggattaaaaaacagtcgctcatccccaagcctttctgattcttactctcacctgtctggcaggcccatcagaaagaagaccgaagaggaggagaaactgctcaagctgctgcaaggcatcccccgaccccaggatggatttactcagtggtgtgaacagatgctgcacacgcttagcgctactgggtcactggacgtgccgatggccgtggcaatcctgaaggaggtggaaagtccctacgacgtccacgactacattcggtcctgccttggagatactctggaagcgaaagagttcgctaagcaattcttggagaggagagctaagcagaaggcctcccagcagcggcagcagcagcaggaagcttggctgtcttccgcatcactccaaaccgccttccaggctaaccattccaccaagctgggacctggggagggaagtaaggcaaagaggcgcgctctcatgctgcatagcgatccgagcattctgggatattcactgcacggctcatcaggcgaaatcgaatcagtagatgactactag

SEQ ID NO: 225205 - DNA, 3900 bp, synthetic construct
  misc_feature 1..3900: note = Description of Artificial Sequence: Synthetic coding sequence
  source 1..3900: mol_type = other DNA
atggccgctgagacacagacgctcaacttcgggccagagtggttgcgcgctctgtcctcaggaggctcaatcacatctccacccttgtctccagcattacccaagtacaagctcgcagattacagatatggcagggaagaaatgctcgctctctttttgaaagataacaagattccgagcgacctcctggacaaggaattcctgcctatcctgcaagaagaaccccttccccctctggcattggtcccctttaccgaagaagagcagcgaaacttctcgatgagcgttaactctgccgctgtgctgcgattgaccgggagaggaggagggggaaccgtggttggagcccctcggggtcgctcctctagccgcggtcgcggtcgaggcaggggcgagtgcggattttaccaaaggtccttcgatgaggtcgaaggtgtgttcgggaggggcggaggccgagagatgcacagatcacagtcttgggaggagcggggagaccgcagatttgagaaacctggccgaaaggacgtcggaagaccgaacttcgaggagggaggcccaacgagcgtgggtcgaaaacacgagttcattagaagcgaatcggagaactggcgcatctttcgggaggaacagaatggcgaagatgaggacggcggatggagattagctggtagtagaagagatggagaaagatggagacctcattcgccagacggaccacggagcgccggatggcgcgagcacatggagaggcggcgaagatttgaatttgattttcgggatagagacgatgagcgtggctacaggcgagtgcgctccggcagcggctcaatcgatgatgacagagactcacttcctgaatggtgtctggaggacgctgaggaagaaatgggtacctttgactcctcaggcgcatttttgtcgctcaagaaagtccagaaagagccgattcctgaagagcaggagatggatttccggcctgttgacgagggtgaagaatgctctgattcagagggctcacacaatgaagaggccaaagagccggataaaactaacaagaaggagggggaaaagaccgaccgcgtgggtgtggaagcaagcgaggaaacgccacagacaagcagcagctctgctagaccaggtacaccttctgatcatcaatctcaggaggcctcccagtttgagcgaaaagacgagccaaaaaccgaacagacagaaaaagctgaagaggagacacggatggaaaactccctgcccgcaaaagtgccatcacgcggtgatgaaatggtcgccgacgtgcagcagccattgtcccagattccctcggacactgcgtctccgctgctgatactgccccctccggtgcccaatccctccccgacactcagaccggtagaaacccctgtggttggggcacccggaatgggtagtgtgtccactgaacccgacgacgaagagggcctaaaacacttagaacaacaggccgagaagatggtggcttacctgcaggacagtgcgctggatgacgagcggctcgcctcgaagttacaggagcaccgcgctaagggagtgtctattccattaatgcacgaggccatgcagaaatggtattacaaagaccctcagggtgaaatacagggtcctttcaacaaccaggagatggctgaatggttccaggccggatatttcactatgagccttctggtgaagcgcgcttgcgatgaatcctttcagcctcttggtgacattatgaagatgtgggggcgtgtccctttttcacccggtcctgcgccaccgccacacatgggtgagctggatcaagaaaggttaacccgacaacaagagctcaccgctttgtatcagatgcagcacctacagtatcaacagtttttaatccagcagcaatacgcgcaggtgcttgcccagcagcagaaggctgccttatcgagtcagcagcagcaacagcttgctcttctacttcagcaatttcagacactgaagatgcgtatttccgatcagaacataatcccttcagtcaccagatccgtgagcgtgcccgatacaggcagcatctgggagctccaaccaacagcatcccagcccacagtatgggaaggaggatctgtctgggacttgccactggatactacaacaccaggcccagccttggagcagttgcagcagctcgagaaagcgaaggccgctaaattggagcaagaacgccgtgaggctgagatgagagccaagagagaggaggaggaacgcaaaagacaggaggaattgagacgccagcaggaggagatactgaggaggcagcaagaagaagagcgcaagaggagggaagaagaagaattagccagacggaagcaagaggaagctctgagacggcagcgggagcaggagatcgctctgcgtaggcaaagggaggaggaagagcgccagcaacaggaggaagctcttcgacgcctcgaggaaaggaggcgcgaggaggaagaacgacgaaagcaagaggagctactgagaaagcaggaggaggaagcagcaaagtgggccagagaggaagaagaagcgcagaggagactggaagagaaccgtctccggatggaggaggaagcagcccgactgaggcatgaggaagaggagcgaaagagaaaggaactagaggtgcaaagacaaaaggagctcatgagacagcggcagcagcagcaggaggcactgagaaggctgcagcaacagcagcaacaacagcaactggctcagatgaagctgcctagttcttcaacctggggccagcaatccaacactacagcctgtcagtcccaggccactttgtctttagctgagattcaaaaattggaggaagaacgcgagaggcagctgagagaagaacagaggcgccagcagagagagctgatgaaagctctccagcagcagcagcagcagcaacagcagaaattgagcggttggggcaacgttagcaaaccatctgggaccacaaagtcgctgttagaaattcaacaggaagaagcaagacagatgcagaagcagcaacaacagcagcagcagcatcaacagcctaaccgcgcaagaaataacacccactcgaatttgcacactagcatcggaaatagcgtgtgggggagcatcaataccggaccacctaaccaatgggcctctgatctcgtgtcgagcatctggagcaacgccgatacaaagaactctaatatgggcttttgggacgacgctgttaaagaagtcgggcctaggaactccactaacaagaataaaaacaatgcctcactaagcaagtccgtgggagtgtctaaccgtcagaacaagaaagtagaggaggaggaaaaactgttaaaattgtttcagggcgtgaacaaagcacaggatggcttcactcagtggtgtgagcagatgttacatgccctgaacaccgcaaataatctggatgtgcccacctttgtgagctttctgaaggaggtggagagcccttatgaagtccatgactatattagagcctatctgggcgatacttccgaggcaaaggagttcgcgaagcagtttctcgaacgcagggccaaacaaaaagcaaaccagcagagacaacagcagcagttaccacagcagcagcaacagcagcctccacagcagcccccacagcagccccagcagcaggactcagtgtggggcatgaatcattcgacacttcactcagtgtttcagaccaatcaaagcaacaatcagcagtcgaactttgaggccgtgcagagtggcaagaagaaaaagaagcagaaaatggtccgcgcagaccccagcttgctcgggttcagcgtgaatgccagcagcgaacggctcaatatgggcgagatagagaccctcgacgattactag

SEQ ID NO: 225206 - DNA, 3966 bp, synthetic construct
  misc_feature 1..3966: note = Description of Artificial Sequence: Synthetic coding sequence
  source 1..3966: mol_type = other DNA
atggcagcggagacacagactcttaactttggccctgagtggctgcgtgctctgagtagtggaggcagtatcacttccccccctttgagccctgcgctcccaaagtacaagctggctgattatagatacggcagagaggaaatgctggccctgtttctgaaggacaataagattccgagcgatcttcttgacaaggagttcctccccatactccaggaggagccacttcccccactggctctggtgccttttacagaggaggagcagagaaactttagtatgtctgtcaacagcgccgcagtcctgcgccttactggaagaggcggaggcggaactgtagtaggagcaccgcgaggcagatcctcaagtcgcggacggggtagaggacgaggggaatgtggattttaccagagatcttttgacgaggtggagggggtgttcggaagaggaggcggacgcgagatgcatcgcagccagagctgggaggagagaggcgacagaaggttcgaaaagcctggcagaaaggatgtaggaaagaagaatggctattactgtatgtactctccagtgctcttgctggggcagccactctgtcaggggcgacctaattttgaggagggcggaccaacctcagtggggagaaaacacgaattcataagaagcgaatcggagaattggcgcatttttagagaagagcaaaacggggaggatgaagacgggggatggaggctggctggctctaggcgggacggggagaggtggcgccctcactcccctgacggccctcgatccgctggttggagggaacatatggagaggaggcgccgattcgagttcgacttccgcgaccgcgacgacgagagaggctatcgtcgtgtacgttccggctccggctccattgacgacgaccgggatagcttgccagagtggtgtctagaagatgcagaggaagaaatgggcaccttcgactcctcaggtgcctttctttcacttaaaaaggtgcagaaggaaccaattcccgaagagcaggagatggatttcaggcctgtggacgagggggaggaatgtagcgactcggaaggatcccacaatgaggaggcaaaggagcctgataaaacaaataagaaagaaggcgaaaagacagacagagtcggagtagaggcaagcgaggagacccctcagaccagttcctcttctgcccgtcctgggacgccgtccgatcaccagtcccaggaagcctcccagtttgaacggaaggatgagccaaaaaccgaacagaccgagaaggctgaggaggagactagaatggaaaattctttgcccgctaaggttccaagccgcggtgacgaaatggtggcagacgtccagcagcccttgtctcagataccaagtgatacagcttctcctctgctcatccttcccccaccagttccaaatccgagtccaacccttaggccagtcgagaccccagtcgtaggggcaccaggcatgggtagcgtttccaccgagcccgatgatgaagaaggcctgaagcacctagaacaacaggcagaaaaaatggttgcctatctgcaggacagcgcactggatgatgagcgattggccagcaaattgcaggagcaccgggcaaaaggcgtctcaatccccctcatgcacgaagccatgcagaaatggtactacaaggatcctcaaggcgaaatccagggtcctttcaataaccaggagatggccgagtggttccaggccggatacttcaccatgagtctgctcgtgaagcgagcatgtgatgaaagctttcagcctctcggcgatatcatgaagatgtggggacgtgtccccttctcacctggccctgctcctcctccacatatgggagaattggatcaggagcgcctcacacgccagcaggaactgacggccctttaccagatgcagcacttgcagtaccagcagttcctgatccagcagcagtatgcccaggtgctcgcccaacagcagaaagctgccttaagcagccagcagcagcagcagcttgcactgctgttgcagcagtttcaaaccctgaaaatgcggatcagcgatcaaaatattataccaagcgtgacgagaagcgtgtcagtccccgatactggctccatctgggagctgcagcccactgcttcacagcctaccgtgtgggagggaggcagcgtctgggacttgccattggacactacgactcctggccctgcacttgagcagctccagcagcttgagaaggctaaggctgccaagctggagcaggagcggcgagaagccgagatgcgagctaaaagggaggaagaagagagaaaacgccaggaagaactgcgtaggcagcaggaggagatcctcagacggcagcaggaagaagagcggaaaagacgcgaagaggaggagcttgccagacgaaagcaagaggaagcactgcggagacagagagaacaggagatcgcgctgcgacggcagcgggaggaggaagagaggcagcaacaagaggaggccttaagaaggcttgaagaacggaggcgcgaggaggaagagcggcgaaagcaggaggagctgctgcgaaaacaggaggaagaggcagccaaatgggcaagagaagaagaggaagcccaacgcaggctcgaagaaaacagactacgcatggaggaggaggcggcacggcttcggcacgaagaggaggagcggaagaggaaagagctggaggtgcagcggcagaaagagctgatgcggcagcgacagcagcaacaggaggcactgcggcgtcttcagcagcagcagcagcagcagcagcttgctcagatgaaacttccatcatcgagcacctgggggcagcaatcgaacaccactgcatgccaatctcaggctactctgagtctggccgagatccaaaagctggaagaagagcgcgagcggcaactgagagaggagcagcgccgacaacagcgggagcttatgaaagcccttcagcagcagcagcagcagcagcagcagaaactgtctggatggggaaatgtttcaaagccttccgggaccacaaagagcctgttggaaatccagcaagaggaagcccgacagatgcagaagcagcaacaacagcagcagcagcatcaacaacctaatagggccagaaacaacactcatagcaacctgcacacgtcgatcggcaattcagtctgggggtcaatcaacaccggtcccccaaaccaatgggcgtctgatctggttagcagcatttggtctaatgcagatacaaagaacagcaacatgggtttctgggatgatgcagtgaaggaagtcggacctcgcaacagcactaacaagaataagaacaatgcatccctttcaaagtcggtgggtgtgagcaataggcaaaataaaaaagtggaggaagaggaaaaacttctgaaactgtttcagggtgtcaacaaagcgcaagacgggtttactcaatggtgtgaacaaatgctacacgcgctgaataccgcgaataatctcgatgttccaacgttcgtttcgttcctcaaggaggtcgagagtccctacgaggttcacgattatataagagcctatctgggcgatacaagtgaggccaaggaatttgccaaacagttcctcgagcgaagagccaagcaaaaagctaaccagcagcggcaacaacagcagttgccacaacagcagcagcagcagccgccacagcagcctccacaacaaccacaacagcaggatagcgtgtggggtatgaaccacagtacacttcacagtgtttttcagaccaatcagtctaacaaccaacaaagtaacttcgaggccgttcaatcaggcaagaagaagaagaaacagaagatggtccgcgcagatccaagcctcctcggcttcagcgtaaacgcctcatccgagagactgaatatgggcgagattgagacactcgacgattattag

SEQ ID NO: 225207 - DNA, 3966 bp, synthetic construct
  misc_feature 1..3966: note = Description of Artificial Sequence: Synthetic coding sequence
  source 1..3966: mol_type = other DNA
atggcggcagagacccagaccctgaactttgggccagagtggctccgcgctctgtcatcaggcggtagcataacttccccgccattgagccctgcgctcccaaagtataagctggccgattacaggtatgggcgagaggagatgctggcactgtttctgaaagacaataaaataccgtcagacttgctcgacaaggaattcctcccgatactacaggaagagcctctgcctcccctggcactggtaccttttaccgaagaggagcagcgaaatttctcaatgtccgtcaactccgcggcagtactgcgtttgaccgggagaggcggtggagggacagtggttggagctcctagaggcagatcctcttccaggggcaggggaagagggaggggcgaatgcgggttctatcaacgctcctttgatgaagtcgagggtgttttcggaagaggaggaggcagggagatgcataggtctcagtcttgggaagagcgcggtgatcgcagattcgagaaacctggcaggaaagacgtggggaaaaagaacggctactactgcatgtatagtccagtcctgctgctgggccagcctctctgtcaagggagacctaattttgaagagggaggccctacatctgtgggcagaaagcacgagttcatccggagcgaaagtgagaactggcgcatttttcgggaggaacagaatggtgaagatgaggatggaggttggagactagcaggtagccgccgagatggcgagcgttggagaccacactcaccagatggtccacgctccgcaggctggcgggaacatatggagaggaggagaaggtttgagtttgactttcgggaccgggacgatgagcgagggtacagacgcgtgagaagcggatccggttctatcgatgatgaccgcgactccctccctgagtggtgcctagaggacgccgaggaggaaatgggcaccttcgactcttccggtgctttcttgagcctcaagaaagtgcagaaagaacctattccggaagaacaggagatggactttagaccagtcgatgaaggcgaagagtgttcagacagcgagggatcacacaacgaggaagccaaggagccagataaaactaataagaaggaaggagagaaaaccgaccgcgttggagtggaagcatcagaagaaacccctcagactagctctagctccgcacgcccaggaacaccttccgaccatcagtcccaggaggccagtcagtttgaacgtaaagacgagcccaaaaccgagcagaccgagaaggctgaggaggaaaccagaatggaaaactccctgccagcaaaagtcccgtctagaggggatgaaatggtggcggatgtgcagcagccactgagtcagattccatccgacactgcctctcctctcctgattctccctcctcctgtgcccaatccaagcccaacactcaggcctgtcgagacgccagtagtcggcgctcctggaatgggaagtgtgagtacagagcctgacgacgaggagggtctaaagcacctggagcagcaggcggagaaaatggtcgcttatttgcaggacagcgccctggacgatgaaagattggcctctaaactgcaggaacatcgggctaaaggcgtctcgatccccctaatgcatgaggccatgcagaaatggtactataaggatcctcagggcgagatccaaggcccttttaataaccaggagatggcagaatggttccaggcaggttactttacgatgtcacttctggttaagcgtgcctgcgatgaaagcttccaaccgcttggagacataatgaaaatgtgggggagagtgccattctcgcccggacctgcccctccgcctcacatgggagaattggaccaggagagactcactcgtcaacaggagcttacggccctgtaccaaatgcaacacctgcaataccagcagtttttgatacagcagcagtatgcacaggtactcgcacagcaacagaaagcagccctgtcatctcagcagcagcagcagctggctttgctcttgcagcaattccagacgctaaaaatgaggatctccgatcagaacattatcccttccgtaacacgctcagtgtctgtgcccgataccggaagcatttgggagctgcagcctaccgctagccagcccaccgtttgggagggcggaagtgtatgggacctgcctttggacaccacgacccccggacccgcactggagcagctccagcaactggagaaggccaaagctgctaagctcgaacaggagaggagggaggccgagatgagggcaaaaagagaggaagaggaacgcaagcgccaggaagagctgcggcgacaacaggaggaaatacttcgaaggcaacaagaagaggaaaggaaacgcagagaagaagaggaactcgccaggcgtaagcaggaggaagcccttcgacgacagcgtgagcaggagattgcgctcagacgccagcgagaagaagaagaacgccagcaacaggaggaggcgctgcggaggttggaggagcggaggcgagaggaagaggagagaagaaagcaggaagaactccttcgtaagcaggaggaagaagctgcgaaatgggccagggaggaggaagaagctcaacgcagattggaagaaaatagactgcgcatggaggaggaggccgcaagactgcgacatgaagaggaggaacgaaaaaggaaggaacttgaagtccaacgacagaaagagctcatgcggcagagacagcagcagcaagaggcccttaggcgacttcagcaacagcaacagcagcagcagctggctcagatgaaattacccagtagtagtacctgggggcagcagtccaacactactgcctgccagtcacaggctacgctttctctcgctgagattcagaagctagaagaagagcgagaacgccagctgagggaagaacagcgtcgacaacagagggaattaatgaaggcactgcagcagcaacagcaacagcagcagcagaaattaagcggctggggaaatgtgagtaagccaagtgggaccaccaagtccttgctagagatacaacaggaggaagcccgacagatgcagaagcagcagcaacagcagcagcagcaccagcagcctaatagggcaaggaacaatacccatagcaatttgcatacatcaattgggaattctgtctggggcagcataaatacaggccctcccaaccagtgggctagtgatctggtgtcatctatttggtccaacgccgatactaaaaattcaaacatgggcttttgggacgatgccgtgaaggaggtaggtcctcggaatagtacaaacaagaacaaaaataatgcgagcctgtctaaatccgtgggcgtgagcaatcggcagaataagaaggtggaagaggaggaaaaactgctgaagctctttcagggagtgaacaaggcccaggacgggtttacccagtggtgtgaacagatgttgcatgctctcaatacagccaacaacctcgacgtgcccactttcgtgtctttcctaaaagaggtcgagagtccctatgaggtccacgattatattcgggcatacctaggggacacaagcgaggcgaaggaattcgccaagcagttcttggaacggagggcaaagcagaaggccaatcagcagcggcagcagcagcaattaccacagcagcagcagcagcagcctccacagcagccaccccagcaaccccaacagcaggatagcgtgtgggggatgaatcactctactctgcacagcgtgttccaaactaatcagtctaacaatcagcagagcaattttgaggcggtgcagtctgggaagaagaagaagaagcagaagatggtccgcgcagatccaagcctcctggggttctcggttaatgcctcctccgaacgcctcaacatgggtgagattgaaaccctggatgactattag

SEQ ID NO: 225208 - DNA, 3900 bp, synthetic construct
  misc_feature 1..3900: note = Description of Artificial Sequence: Synthetic coding sequence
  source 1..3900: mol_type = other DNA
atggccgcagagacacagacattaaactttggcccagagtggctgcgcgctctctcaagcggcggatctattacttccccacccctctccccagcgctaccaaagtacaaacttgccgactacaggtacggcagggaggagatgctcgcacttttcctgaaggataacaaaataccctccgacttgttagacaaggaattcttacccattttgcaagaggaaccactgcctccgctagcactagtaccattcacagaggaggaacagagaaacttctcaatgtcagtcaactctgctgccgttttacgactgaccgggagaggaggagggggtactgtcgtgggggctcctcgcggaaggagcagcagccgcggacgtggcaggggcagaggcgagtgtgggttctaccaacggagcttcgatgaggttgaaggggtgtttggccgtgggggtgggcgtgagatgcataggtcacaatcgtgggaagagcggggagacagacgattcgagaagccagggaggaaagatgttggacgtcccaatttcgaggagggcggacccacatccgtgggcagaaagcacgaatttattcggagcgagtcagaaaattggagaatcttcagggaggagcagaacggggaggatgaggatggagggtggcggttagcgggatctcggagagacggagagaggtggaggcctcattctccggatgggcctagatctgccggatggagagagcatatggagcgcaggcgccgattcgagttcgactttcgggatagggacgatgaacggggataccgcagggttcggtcagggagcggttctattgatgacgatagagattcgctgccggaatggtgccttgaggatgctgaggaagagatgggaacattcgacagcagcggtgcctttctctccctgaaaaaggttcagaaggagcccatccctgaagagcaggagatggacttcaggcccgttgacgaaggcgaggagtgctctgatagtgagggctctcacaatgaagaggctaaggagccggacaaaactaataaaaaggagggtgagaagactgaccgcgtaggggtggaggcctcagaggaaacaccacagacaagcagtagtagcgccaggccgggaacccccagcgatcatcagagccaggaggcaagccaattcgagagaaaagacgaacctaagacagaacagacggaaaaggccgaggaggaaacacggatggagaactcccttccggctaaagtcccttcgaggggtgacgagatggtggccgacgtccagcaacctctaagccagatcccttccgacacggcgagcccacttcttatcctccccccacccgtgccaaaccctagtcccacactgaggccggtcgaaactccagtggttggcgcacccggaatgggctcggttagtactgaaccggatgatgaggagggccttaaacacttggagcaacaagccgagaaaatggttgcgtaccttcaggacagcgcattggatgacgaacggttggcctcgaaattgcaggagcatcgggcaaagggtgtgtcaataccgctgatgcacgaggccatgcaaaagtggtactataaggacccccagggggaaatccagggcccattcaataaccaagagatggctgagtggttccaggcaggctatttcaccatgtccctgctcgtaaagcgggcttgcgatgaatccttccagccgctcggagacattatgaagatgtggggtcgcgttccctttagcccgggtccagctccgcctccacatatgggcgagctggaccaggaaaggctgactaggcagcaggagcttactgctttataccagatgcagcacctacagtatcagcagttcctcattcagcagcagtacgcacaagtcctagcccaacagcaaaaagccgctttgagttctcagcagcagcagcagctggccctcctgctgcagcagttccagacactaaagatgaggatttccgatcaaaatataatcccctcagtgacaagaagtgtgagcgttccagatacaggcagcatttgggagctgcagcctaccgcttcccagccgaccgtgtgggaggggggtagtgtgtgggatctccccctcgataccacgactcccggtcctgcccttgagcagctgcagcagcttgagaaagcaaaggccgcaaagctggagcaggagaggcgggaggccgaaatgagggctaagagggaagaggaagagcggaaaaggcaggaggaactccggcgacaacaggaagaaattcttcgcaggcagcaagaagaagagcgcaagagaagagaggaggaagagctcgctaggcggaagcaagaggaggctctccggcgacagcgtgagcaagagatcgctctgagacgtcagcgagaagaagaggaacgccaacagcaggaggaagccctacgacgtttagaagaaagaaggcgagaagaggaagagagacgcaaacaggaagaactcctgcggaagcaagaggaggaagcagcaaagtgggctcgggaggaagaggaggcccagagacgccttgaggaaaataggctccggatggaggaggaggcagccagactcagacacgaggaggaggaaaggaaacggaaggaactggaagtacagcgccagaaagaattaatgaggcagcgacaacaacagcaagaggcccttcgtcgcctccagcagcagcaacaacagcagcagctggctcagatgaaattgcccagcagctcgacctggggccagcagagcaacaccacagcctgtcaatctcaagcgaccttaagtctggccgaaatccagaaacttgaggaggagcgggaaagacagctccgggaggagcagcgcagacagcaacgcgagctgatgaaggcactgcagcaacagcaacagcagcagcagcagaaactgtcgggatggggtaatgttagcaaacccagtggaactacgaagtctcttctcgaaattcaacaagaggaggccaggcagatgcaaaagcagcaacagcagcaacaacagcaccagcagccgaaccgggctcggaacaacacgcactctaacctgcatacttcaatcggaaacagcgtgtggggaagtatcaatactggacccccaaaccaatgggcatcagacttggtgagttccatatggagcaacgctgacacaaagaattcaaacatgggattttgggacgatgcagttaaagaggtaggcccaaggaattctaccaataagaataaaaataacgcttccttgtctaagtctgttggcgtttctaaccgccagaataaaaaggtggaagaagaagagaagctattgaagctttttcaaggtgtgaataaagcccaggacgggtttactcagtggtgcgagcagatgcttcacgctctgaataccgcaaataacctggatgtgcccacctttgtgtcctttcttaaggaggttgagagcccttatgaagtgcatgactatattcgggcttaccttggggacacatcggaagccaaagaattcgctaagcagtttctggagaggagagccaaacaaaaagctaaccagcaaaggcagcagcaacagctgccacaacagcagcaacaacagcctcctcagcagccaccacagcagccacagcagcaggattcggtgtggggcatgaatcactcaacactacattctgtcttccagactaatcaaagcaacaaccagcagtccaactttgaggcagtgcagtcaggaaagaagaaaaaaaaacaaaaaatggtgagggcggatcctagtcttctagggtttagcgtcaacgcttcctccgagcggctgaatatgggtgaaattgagaccctggatgactattag

SEQ ID NO: 225209 - DNA, 2163 bp, synthetic construct
  misc_feature 1..2163: note = Description of Artificial Sequence: Synthetic coding sequence
  source 1..2163: mol_type = other DNA
atggccgcagaaactcagaccctcaactttggaccagagtggctgagggccctgagctctggaggctctatcacgtctccaccattgtcacccgcactccctaaatacaagctggctgactatcgctatgggcgagaggagatgctggccttgttcctcaaggataacaagataccatccgatctcttggataaagagttcctgccaatactgcaggaggagccactaccaccactcgccttggttccattcactgaggaggagcagcgaaatttctctatgagcgtgaactcggcagccgtactcaggctgaccggccgtggaggcggaggaacagtggtcggggcaccgaggggtcggtcgtccagccggggacgcggtcggcctaatttcgaagaggggggtccgactagtgtgggacgcaaacatgagtttatccgtagtgagagtgaaaactggcgaatcttcagggaagaacaaaacggggaagacgaggatggagggtggcggttggccggttctagaagggacggcgagaggtggaggcctcatagcccagggtggcgggaacacatggaacggcgtcggagattcgaatttgatttccgggatagagacgacgaacgcggataccgaagggtcagatccgggagtggaagcatcgacgacgacagggacagcctgccagagtggtgtttagaggacgctgaggaagaaatgggcacattcgatagctcaggtgcttttttatccctgaaaaaggtccagaaagaaccaattcccgaagaacaggaaatggattttaggccagtcgacgaaggagaggagtgcagtgatagcgagggtagccacaacgaggaggcaaaggagcctgataagaccaataagaaggaaggtgaaaagacagacagagtcggcgtcgaggccagcgaagaaacccctcagacttctagttcttctgctcgcccaggtacgccctcagatcatcagagccaggaagcttcccagtttgaacgcaaggatgaacccaaaactgaacagacggaaaaagcagaagaagagaccagaatggagaacagcctgcccgctaaggtgcctagcaggggagacgagatggtggctgatgttcagcaacctttatcccagattcccagcgacacagcctcccctctgctgatcttacctccccctgtccccaatccaagccctaccctgaggccagtcgagactccagtggtgggcgctcccggaatggggtcggtttccactgaaccggacgatgaggaaggcttaaaacatttggaacaacaggcagagaaaatggtggcatatttgcaagattcggccttggatgacgaaagacttgcctcaaaactgcaggaacaccgggctaaaggggtctcgatccccctgatgcacgaagccatgcaaaaatggtattacaaagaccctcagggtgagatccaagggccattcaacaaccaggagatggcggagtggttccaagcaggctacttcactatgtcactgttggtgaaacgagcctgtgatgagagtttccaacccctcggagacatcatgaagatgtgggggagagtcccctttagccccggaccagcaccgcctccgcatatgggcgagctggaccaggagagactgactagacagcaagagctaacagccctgtatcagatgcagcacttacaataccagcagtttctcatacagcagcagtacgcacaagtgctggcccagcaacagaaggctgcactgagttcacaacaacagcagcagctagcattgcttctccaacagttccagaccctgaagatgcgcatctctgatcagaatatcattccttctgttaccaggagcgtgagcgtccccgacaccgggtcaatctgggagctacagccaacagccagccagcccacagtctgggaaggaggttcagtgtgggatctccccctggatactaccactcctggccctgcactggagcagctgcagcaactggagaaggccaaggccgctaaattagaacaggaacggagagaggcagaaatgcgtgcaaagagggaggaagaggagcgaaagaggcaagaagagctccgtaggcagcaggaagaaatcttaaggcgccagcaggaggaggaaaggtag

SEQ ID NO: 225210 - DNA, 282 bp, synthetic construct
  misc_feature 1..282: note = Description of Artificial Sequence: Synthetic coding sequence
  source 1..282: mol_type = other DNA
atggcagctgagactcagacactgaacttcggacccgaatggttgagggccctgtcatccgggggatcgattactagtccacccctgagccccgcactccctaagtataagctggctgattaccgctatgggagagaggagatgttggctcttttccttaaggataacaaaattccatcagatttactcgataaggagttcctgccaatacttcaagaggagccattgccccctcttgccctggtcccctttacagaagaagaacagaggaactttagctag

SEQ ID NO: 225211 - DNA, 303 bp, synthetic construct
  misc_feature 1..303: note = Description of Artificial Sequence: Synthetic coding sequence
  source 1..303: mol_type = other DNA
atggccgcagagactcagaccctgaactttggccctgagtggctgcgcgctttgtcatcaggcggatcaatcacctccccgccattgagccccgcactcccaaagtacaagcttgccgattatcgctacggaagagaagagatgctagcactttttctgaaggataataaaatccctagcgatctgctggataaggagttcctgcccattctacaggaagagccattaccgcctctggccctggttccatttacagaggaagaacagaggaatttcagtatgagcgtgaactcagctgcttag

SEQ ID NO: 225212 - DNA, 42 bp, synthetic construct
  misc_feature 1..42: note = Description of Artificial Sequence: Synthetic coding sequence
  source 1..42: mol_type = other DNA
atggccgcagaaactcagacgctcaacttcggtcctgagtag

SEQ ID NO: 225213 - DNA, 348 bp, synthetic construct
  misc_feature 1..348: note = Description of Artificial Sequence: Synthetic coding sequence
  source 1..348: mol_type = other DNA
atggcggctgaaacccagacactgaattttgggccagagtggcttagggccctctcatctgggggaagcattacaagtcctccgctttcacctgccttgcccaagtacaaactagctgattatcgatatggaagagaggagatgctggccctatttctgaaggacaacaagatacccagcgatctcctcgataaagaatttctccctatcctgcaggaagaaccacttcctccactggcactggttccatttacggaggaggagcagcgcaacttcagcatgtcagtcaattccgcggcagtattacggttaacgggtagaggcggaggcggaaccgtcgtgggctag

SEQ ID NO: 225214 - DNA, 321 bp, synthetic construct
  misc_feature 1..321: note = Description of Artificial Sequence: Synthetic coding sequence
  source 1..321: mol_type = other DNA
atggctgccgagacccagactttaaacttcgggccagaatggctgcgagccctgtcctctgggggatccataacgtctcctcccctctccccagctctgccaaaatacaagctcgccgattatagatatggccgtgaggaaatgctggcactgttcctaaaagataataagattcccagcgacctcctggacaaggaatttctacccatcctgcaagaggagcccctgcctcccctggcgctagtaccctttaccgaggaagaacagcggaatttctctatgagcgtcaattcagcagccgtgctgagattgaccggatag

SEQ ID NO: 225215 - DNA, 342 bp, synthetic construct
  misc_feature 1..342: note = Description of Artificial Sequence: Synthetic coding sequence
  source 1..342: mol_type = other DNA
atggcagccgagacgcagacattgaactttggcccagagtggctgcgggctttatcatcgggcggatcgatcaccagcccccctctctctcctgcccttcctaagtacaaattggccgattaccgttatggcagggaggagatgcttgccttgtttctaaaagataacaaaatacccagtgatctgctggacaaggagttcctgccaatcctgcaggaagagcccttgccacccctggcgctcgtgcccttcaccgaagaagaacagcggaacttctcaatgagtgtgaattccgcggcagtgttgcgtctcactggtcggggagggggaggcaccgtgtag

SEQ ID NO: 225216 - DNA, 2619 bp, synthetic construct
  misc_feature 1..2619: note = Description of Artificial Sequence: Synthetic coding sequence
  source 1..2619: mol_type = other DNA
atgacaaaactccctgatgaccccggaagaccaaattttgaggaaggtggccctacatcggtgggtcgcaagcacgagttcattcgttccgaatctgaaaattggcgcatcttccgagaggaacagaacggcgaagacgaagacggaggatggagactggccggatcccggagggacggggagagatggcgccctcactcaccagatggtcctcgctccgcgggttggcgcgagcatatggagcgtaggcgcaggttcgagttcgattttcgggaccgcgacgatgagcggggttatcggcgagtcaggtctggttctgggagcatagacgatgacagagattctctacctgagtggtgcctggaagatgcggaggaggagatgggtacattcgattccagcggcgctttcctttctctcaaaaaggtacagaaagaacctatccctgaagaacaggagatggactttagacctgtggacgagggcgaggagtgctcagactctgagggtagccacaatgaggaggctaaagaaccggacaaaacaaataaaaaagaaggcgagaaaaccgaccgagttggagttgaagcgagcgaggagacaccacagacttcatcaagcagcgccaggccagggaccccctccgaccatcaaagccaggaggcgtcccagttcgagagaaaggacgagcctaaaactgaacagacagaaaaagcagaggaggagacccgcatggagaattcactgcctgccaaggtgccctctcggggagacgagatggtggcagatgtgcagcagccattgagccagatcccgtctgacacagcaagtcctctcctgatcctaccaccgcctgtcccaaatccttccccaactctgagaccagttgagacacctgtggtgggcgcaccaggaatgggctcggtgtcgactgaacctgatgacgaagagggactgaagcacctggagcagcaggctgagaagatggtggcgtatcttcaggatagcgccctcgacgacgagcgcctggcttctaagctccaggagcacagagccaaaggagtctctatccctttaatgcacgaggcaatgcagaagtggtactataaggatccccagggcgaaatccaaggtccatttaacaatcaggaaatggcggagtggtttcaggccggatacttcacgatgagtctccttgtcaagcgcgcttgtgacgagagctttcagcccttaggtgacattatgaagatgtggggtcgcgtcccttttagtcctgggccagcccctcccccacacatgggagaactggaccaggagagactcactcgtcagcaagaactgactgccttataccagatgcagcatcttcagtaccagcagtttctaatccaacagcaatatgcacaggtcctcgcccaacagcagaaggccgctctcagttctcagcagcagcagcagttggccctgctcctccaacaatttcagacattgaagatgcgcatcagtgaccagaacataattccctctgttacgagatctgtgagcgtccccgacaccggaagcatttgggagctgcagcctacagcctcacagccaacagtgtgggaaggtggatctgtctgggacctgcctctggatacaaccacaccaggacctgcattggagcaactgcaacaactggagaaagcaaaggccgctaagctggagcaggagaggagagaggctgagatgagagccaaaagggaagaggaggaaaggaagaggcaggaggaactgcgcagacagcaagaggagatcctgaggcgccaacaggaggaggagaggaagcggagggaagaggaggaactggctagacggaagcaagaagaggcactaaggaggcagcgggagcaggaaatcgcattacggagacagcgggaagaggaggaaagacaacagcaggaggaagccctaagacggctcgaggaaaggaggcgggaagaggaggaacgcaggaaacaggaggaattgctgcgaaagcaggaggaggaagcagcaaaatgggccagggaggaggaggaggcccagcggaggctggaagagaacagactccggatggaagaggaagccgcaaggctccggcatgaggaggaagagcgcaagagaaaagaattagaggttcaaaggcagaaggaactgatgcgacagagacaacaacaacaagaagctctccgcagattgcagcagcagcaacagcagcagcagctcgctcagatgaaactcccatcttcttctacctggggccaacagagcaatacaaccgcttgtcagagccaagcgacgttgtcacttgctgagattcaaaagctcgaagaggagcgggagcgccagctgcgcgaggaagaatcttccgcctctttttgtttctacgccactgccaaggcacccgcagaaggggttgatgaatcatcctccgctgccgctgctacagcgactgcagagactctcagactgggagagtgccagcagaccttccgctaccacgaaatcagttctggcgatccagcagggcgtggtcaggcaaatgcaaaagctgccgctgcggctgctgcaacgcccgctaccaagcagagctcttag

SEQ ID NO: 225217 - DNA, 2364 bp, synthetic construct
  misc_feature 1..2364: note = Description of Artificial Sequence: Synthetic coding sequence
  source 1..2364: mol_type = other DNA
atggcggcagagacccagactctaaacttcggcccagagtggctgcgtgcactgtctagtggaggctctatcacctctccccctctttctcctgccttgcctaagtataagttggctgactataggtatggacgcgaagaaatgcttgccctgtttctcaaagacaataagattccatctgatctgctggataaagaatttcttccaatcttacaggaagaacctctgcccccactagcacttgtcccgttcacagaagaggaacaaagaaacttcagcatgtcggtgaacagtgccgctgtgctccgtctgactgggcgaggcggtggcggaacggttgtgggcgcaccaagaggtcggtcctcttcaaggggcagggggaggggcaggggagagtgcgggttttatcagcgatcctttgatgaggtggagggcgtgtttgggcgaggcggaggtcgagaaatgcatcggtcgcaatcctgggaggagcgcggtgataggaggttcgagaagcctggcaggaaggatgtaggcaggccgaactttgaggagggcggaccaacctccgtgggcagaaagcacgagttcatccgaagcgaaagcgagaattggagaattttcagggaagagcaaaatggcgaggatgaggatggaggctggcgactcgccggatcgcggagagatggtgagcgctggcgcccacattcacctgacggacctaggtccgccggttggagggaacacatggagcggcgacggagattcgagttcgacttccgggatagggatgatgagcgaggttatagacgggtccggtctggctcaggcagtattgacgacgatcgcgactccttgcccgagtggtgccttgaagatgcggaggaagagatggggacgtttgactcaagtggggcttttctgtctctgaagaaagtgcagaaggagccgattccagaggaacaagagatggattttcgacccgttgatgagggtgaagagtgttccgattccgaaggctcacacaatgaggaagccaaggaacctgataagactaacaaaaaagaaggtgagaagacggacagggtgggtgtggaagccagcgaggagacccctcagacttccagctccagcgctcgtcctggtaccccttcagatcatcagagccaggaggccagccagttcgaacgcaaggacgagcctaagacggagcagacagagaaagcagaggaagagacgcgtatggaaaatagtctgcctgcgaaggtgccctctaggggagacgagatggtcgccgacgtacagcaacccctgtcacagatcccatcagatacagcgtctccactgcttatcttgcccccaccagtccccaacccaagcccaacactgcgcccagtagagactcccgtggtcggggctcctggaatggggagtgttagtacagagccggacgacgaggaggggctcaaacacctggaacagcaggccgagaagatggttgcatatctacaggattctgctttagacgatgagcggctggccagcaagctccaggagcatagagctaaaggcgttagtattccgctcatgcacgaggctatgcagaaatggtactacaaagacccacagggggagatccaggggccatttaataaccaggaaatggcagagtggttccaggccggatactttacaatgtcactgctggttaagagggcctgtgacgaatccttccagcccctgggcgatatcatgaaaatgtggggtagggtgccctttagccccggtccagcgccaccacctcacatgggggaactcgatcaagagaggctcaccaggcaacaggaactaaccgccctgtaccagatgcagcatctgcagtatcaacagttcctgatccaacagcagtacgcccaagtcttggcccaacaacagaaagccgcactctcctcccagcagcagcaacagttagctctccttttgcagcagttccagacactgaaaatgcgaataagtgaccaaaacatcattccctccgtcaccaggtcagtgagcgtccctgacactggctccatttgggagctacagcctaccgctagccagccaacggtgtgggagggtgggagcgtttgggacctgcccttggacaccaccactcctggcccagccctggagcagttgcagcagctggaaaaagctaaggccgcaaaacttgaacaagaacgcagagaggctgagatgcgggctaaacgggaagaggaagagcggaagaggcaggaagagctaagacggcagcaagaggaaattttgaggagacagcaggaagaggaaaggaaacggagggaggtcggcaagcgggactcgtag

SEQ ID NO: 225218 - DNA, 3882 bp, synthetic construct
  misc_feature 1..3882: note = Description of Artificial Sequence: Synthetic coding sequence
  source 1..3882: mol_type = other DNA
atggccgctgagacgcagactcttaactttggtcccgaatggttgagggccctaagcagcggaggcagtattacctcacctccactgagccctgccctgcccaaatacaaactcgccgactatagatacgggagggaggaaatgcttgccctcttcttaaaagacaacaagatcccgagcgatttgctggataaggaattcctccctatattacaggaggagcctctccccccattagcactcgtgcccttcaccgaggaagagcagagaaactttagtatgtccgtgaactcagctgccgtgttacgactgacgggcaggggagggggaggtacagttgtgggagcccctcgaggtcgatcatcgagtagggggaggggacgaggacggggagagtgcggattctaccagagatctttcgacgaagttgagggagtctttggaagaggcggaggtcgggagatgcacaggagccagagttgggaggagaggggtgatcgaaggtttgaaaagcctgggagaaaggatgtcggccgacccaatttcgaggaggggggtccgaccagtgtcggcagaaagcatgagttcattcggagtgagagtgaaaattggcgcatatttagggaggaacagaatggcgaggacgaagacggtgggtggcgcctggccggttcaaggcgggacggagagaggtggaggccacattcccccggttggcgggagcatatggaaagacggagaagattcgagtttgactttagggacagggatgatgagagagggtataggcgggttcgctccggctctggatctatcgatgacgatcgcgattccttgcctgagtggtgcttggaagatgccgaggaggaaatgggcacgtttgatagctccggggcttttctgagcctcaaaaaggtgcagaaggagccaatcccagaggaacaggaaatggatttccgccctgtggacgagggggaggagtgctcagatagtgaaggttcccataatgaggaagccaaagaacccgacaagacgaacaaaaaagaaggtgagaaaactgaccgcgtgggagtggaagcctccgaggagacaccgcagactagctcctcaagtgccaggcccggaactccaagtgatcaccaatcacaagaagccagccagttcgagcggaaggatgaacctaagaccgagcagaccgaaaaagccgaggaagagacacgaatggagaactcccttccggctaaagtgccctcacgcggagacgagatggtggccgatgtgcagcaacccttgtcacagattccttccgacacagcttccccgttgctcattttgcccccaccagttccaaatcccagcccaacacttcgccctgttgagacccctgtggtgggggcacccggtatgggctccgtgagcaccgagccagacgatgaggagggccttaaacacctggagcaacaggcagagaagatggtggcctatctacaggactctgcccttgacgacgaaagactcgcctcaaaattacaggagcatcgagctaagggcgtctccattccattaatgcacgaggcgatgcagaaatggtactataaggatccacagggagagatccagggacccttcaacaatcaggaaatggccgaatggttccaagccggatattttaccatgagcctgctggttaagagagcctgcgacgagagcttccagccccttggggacatcatgaagatgtggggcagagtgcctttctctcccggacccgctccacctccgcatatgggggaactcgatcaggaacgattgacacgccaacaagagctaacagcactgtaccagatgcagcatctccaataccagcaattcctcatacagcagcaatatgctcaagtgctggctcagcaacagaaggccgctttatcttctcagcagcaacagcagctggcgctgttactgcagcagtttcagacactgaaaatgcggatttccgatcagaacatcatcccgagtgtgacccggtcagtgtccgtgcccgacaccgggtcaatttgggaactgcaacccacggcttctcagcctacagtgtgggagggcggttccgtgtgggatcttccgctggacacgactacacccggtccagcccttgagcagttgcagcagctggagaaagccaaagcggcaaaactcgaacaggagagaagagaggcagagatgcgagccaaaagagaagaagaagagcggaagaggcaggaggaactccggaggcagcaggaggaaatcttgcgcagacagcaggaagaagagcggaagcggcgagaagaggaagagctagccaggaggaaacaggaggaggccttacgccgtcagagggaacaggaaatcgctctgagaagacagcgggaggaagaagaacgacaacagcaggaagaggcacttcgcagactggaggagagacggagggaagaggaggagaggcgcaagcaagaggaacttcttaggaaacaggaggaagaggccgctaagtgggcacgcgaggaggaagaggcccagcgcaggctcgaggagaataggctgcggatggaggaggaagccgcaagactccgacacgaggaggaggagcgaaaacggaaggaactggaggtacagcggcagaaagaactgatgcgacagagacaacaacagcaggaggccttgcgccgtctccagcaacagcaacaacagcaacagttggctcagatgaagctgccaagcagctctacatgggggcagcaaagtaatacgaccgcgtgccagtcccaggctacactgagtctggccgaaattcaaaagctggaggaagaacgcgagaggcaactgcgcgaagaacagcggaggcagcagcgcgagttaatgaaggccctgcaacagcagcagcaacagcagcagcagaagttgtcaggctgggggaacgtttctaagcctagcggtactaccaaatctctgctggagattcagcaggaagaagccaggcaaatgcagaaacagcaacagcagcagcagcagcatcaacagcctaaccgcgctcgtaacaatacgcatagcaacttgcataccagcatcggcaacagcgtctggggatctattaacactggccctccaaatcagtgggccagcgatctggtaagctcgatttggtccaatgccgacacaaaaaattcaaacatgggattctgggatgacgctgtgaaggaagttggcccacggaactcaacaaacaagaacaaaaataacgcgtccctgtctaagtctgtgggagtctctaacagacagaacaagaaagtcgaagaagaagaaaagctgttgaaactgtttcagggcgtcaataaagcccaggatggattcacacaatggtgcgaacaaatgctgcacgcactcaacacagcaaacaacctggacgtgccgacttttgtgtctttcctcaaagaggtcgagagtccatatgaagtgcacgactacattcgcgcatatcttggtgacacctccgaagccaaggagtttgccaaacaatttctcgaaaggagggctaagcagaaggccaatcagcaacggcagcaacaacagctgccacaacagcagcagcagcagccacctcaacagccacctcagcaacctcagcagcaagacagtgtttggggtatgaaccattcgaccctccactcagtcttccagaccaatcagtctaataaccagcagagcaacttcgaggccgtgcagtcaggaaagaaaaagaagaagcaaaaaatggtgcgagccgacccttccctgctcggcttttctgtcaacgcctcttcagagcggcttaacatgggagaaattgagacactggatgactattag

SEQ ID NO: 225219 - DNA, 3963 bp, synthetic construct
  misc_feature 1..3963: note = Description of Artificial Sequence: Synthetic coding sequence
  source 1..3963: mol_type = other DNA
atggccgcagaaacccaaacactgaatttcggcccagaatggttaagagctctgagtagcggaggtagcattacatccccccctctgagtcctgcgcttccgaaatacaagctggccgattaccgctacgggcgagaagaaatgctggctctctttctcaaggataacaaaatccccagcgaccttttggacaaagagttcctgcctatcctgcaggaagagcccctgcccccactcgctcttgtgccatttaccgaggaggagcagcgcaattttagcatgtccgttaactctgcagccgtcctcagattgaccgggaggggaggtggaggtaccgttgtcggggctcccagggggagaagctcatcccgcggacgagggcgagggcgaggcgaatgtggtttctaccagcgcagtttcgacgaagtcgaaggcgtatttggtcgaggaggaggacgggagatgcacaggtcccagtcctgggaggaaaggggcgaccggaggtttgaaaagccaggcaggaaggacgtgggcaaaaaaaatggatactattgcatgtattcccccgtgctgctactggggcagccactctgccagggtcggcctaactttgaagaggggggacctacgagcgtcggcaggaaacacgaattcattcgcagcgagtctgaaaactggcgcatttttagagaagaacaaaacggggaagacgaggacggtggatggaggctcgctggatcgcgccgagacggagagagatggcggccacacagtcccgatggtccccgaagcgccggatggcgcgagcacatggaaaggcggagacggttcgagtttgactttcgagaccgtgacgatgagaggggctatcgaagggtccggtctggatctggctctattgatgacgatcgggactcgctgcccgagtggtgcctggaggatgcagaggaggaaatgggtacgttcgatagttcaggcgcattcttgtccctgaaaaaggttcaaaaggagccaatcccggaggagcaggaaatggacttcagaccggtggatgaaggcgaggaatgcagcgactcagaagggtcccataatgaagaagccaaggagcccgataagaccaataagaaagaaggcgagaaaaccgacagagtgggtgtcgccagtgaagagacgcctcaaacctcgagcagttctgctcgaccgggaacgccctcagaccaccagtcccaagaagcatcacaattcgagagaaaagatgaacctaagactgagcaaactgagaaagctgaggaagagactcggatggaaaattcccttcctgctaaagtgcccagcagaggagacgaaatggtggcagacgtgcaacagcctctgtcccagatacccagcgacacggcatcacccctcctgattctgccccctcctgtgcccaacccttcccccaccctcagaccagttgagacgccagtcgttggcgctcccggtatgggatcagtgtcaaccgagcctgatgacgaagaagggctgaagcacctggagcagcaagctgagaagatggtggcatatcttcaggattccgccctggacgatgagaggctggcttcaaagttgcaggagcatagggcgaaaggagtcagtattccgctgatgcacgaagcaatgcagaagtggtactataaggacccccagggagaaatccagggcccatttaacaaccaggagatggctgagtggttccaggcaggctacttcactatgtctttactagtgaagcgagcttgtgacgagtccttccagcctctgggcgacattatgaagatgtgggggcgagtgccctttagcccaggcccagctcctccccctcacatgggcgagcttgaccaggagagactgacccggcagcaggagctgacggcactatatcagatgcagcatctgcagtatcagcagttcttgatccagcaacagtatgctcaggtcctcgcacagcaacagaaggctgctcttagttcccagcaacagcagcagcttgcactacttctccagcaattccaaaccctcaaaatgcggataagcgatcagaatataatcccatccgttacccgtagtgtttctgtgccagatactgggtcaatatgggaactccagccgacagcttcacagcccacagtctgggaggggggtagcgtgtgggaccttcctctggacaccacaactccaggtcctgcactggagcaactacaacagttagaaaaagcaaaagcggcaaaactagagcaagagcggagagaggcagagatgagagccaaacgggaggaggaagaacgtaagagacaggaggaactccggaggcagcaagaagaaatcctgcggaggcagcaggaggaggagcggaagcggagggaggaggaggagttggcccgtcgcaaacaggaggaagccttaagaaggcagcgggagcaggagatagccctgcgacggcaaagggaggaggaggagcggcagcaacaggaggaggcactgcgacgtttagaggaacgccgaagagaggaagaggaacggcgtaaacaagaggagctgctgcgtaagcaggaagaagaggccgcaaaatgggcccgagaagaggaggaggcccagagacgtctggaagaaaaccgtctgcgcatggaagaggaagcagcacgcctgcgccacgaagaagaggagaggaagagaaaggaattggaggtgcagcgtcagaaggaactgatgagacagcgccagcagcagcaggaggcgctgcgccgtctgcagcaacaacagcagcagcagcagctggcgcagatgaaactaccttccagcagtacttggggtcagcagagcaatactaccgcatgccagtcccaggccaccctgtcactggccgaaatccagaagttggaggaggaacgggagcgtcagctgagggaggagcaacgccgacagcagcgcgagctcatgaaggctctgcagcagcagcaacaacagcaacagcagaaattatccggctggggaaatgtgtccaagccttccggcacaaccaagtcccttctggagatccagcaggaggaagccagacagatgcaaaaacagcaacagcaacagcagcagcaccagcagcctaacagggcacgcaacaacacacattcaaatctgcatacgagcatcggcaatagcgtctggggtagtatcaacaccgggccaccaaatcagtgggccagcgacctagtgtcctctatttggagcaacgccgacacaaaaaactctaacatgggattctgggacgatgctgtgaaggaagtgggccctaggaatagcaccaacaaaaacaagaacaacgccagcctgagtaagagcgtgggagtttcgaatcggcagaacaagaaagtcgaagaagaggagaagctcctcaaactgttccagggggtgaacaaagcgcaggacggctttacacagtggtgcgagcaaatgcttcacgctttgaataccgcgaataatttagacgtgcccaccttcgtttcctttttgaaggaggtcgagtcgccatacgaggtgcacgattacatccgtgcatacctgggagatacttcagaggctaaggagtttgctaagcagtttctagaaaggcgagccaaacagaaggccaaccagcagcgtcaacagcaacagctcccccaacagcagcaacagcaacctccgcagcaacccccacagcagccgcagcagcaggactccgtctgggggatgaaccactcaacacttcatagcgtgttccagacaaaccagtcaaataaccagcagagcaatttcgaagcagtgcagagtgggaagaaaaagaaaaaacagaagatggttcgcgcagaccccagcttgttgggttttagtgtgaacgctagctctgagcggcttaatatgggggagatcgagacattagacgactattag

SEQ ID NO: 225220 - DNA, 2085 bp, synthetic construct
  misc_feature 1..2085: note = Description of Artificial Sequence: Synthetic coding sequence
  source 1..2085: mol_type = other DNA
atgagtggtggcgaggtagtatgctctggctggttacgtaagagcccacctgaaaaaaaactcaagcgttatgcttggaaacgtcgctggtttgtcctcaggagcggcagactaaccggggatcctgatgtgctggaatactataaaaatgatcacgcaaaaaaacccatccgcattattgacctcaacctgtgccagcaggtcgatgccggacttaccttcaataaaaaagagtttgaaaattcttacatcttcgacatcaataccattgaccggattttctatcttgtggccgactctgaagaagagatgaataagtgggtaaggtgtatttgtgacatctgcggctttaatccaactgaggaggacccggttaaaccaccaggtagttcattacaagctcccgctgacctgcccctggccattaacaccgcaccaccttccactcaggccgactcttcaagtgccaccttgccaccaccctaccaacttatcaacgtaccaccccacctcgagactctgggtattcaggaggaccctcaggattatcttctgctcattaactgccagtccaaaaagcctgagcccacccgaactcacgccgatagcgcaaagtccacctccagcgaaactgattgcaacgacaacgtgccatctcacaagaaccccgcaagttcacagtctaagcatggtatgaatggattttttcagcagcagatgatctacgactctccacctagtagagccccatccgctagcgtcgattcatccctgtacaacctgccgagatcctattctcacgatgttttgcctaaggtgagcccaagctcaacggaggctgatggcgaattgtacgtcttcaatacacccagcggtacttcctccgtagagacacagatgagacatgtgagcatttcttacgacattccccctacccccggaaacacgtatcagattccacgtaccttccccgaaggcacccttggacagactagcaagttagataccatcccagacattccccctccacggcctcccaagccacaccctgcccatgaccgatctccggtggagacgtgtagcataccgagaaccgcgtccgacaccgactccagctactgcatcccgacagcgggtatgagcccctcaaggagcaataccatcagtaccgtggaccttaacaagctgcggaaggatgccagctcccaggattgttacgacatccccagagctttccccagtgataggagctcctctctggaaggctttcacaaccattttaaagtaaagaatgtgctcacagtcggttcagtctcctcggaagagctcgatgagaattatgttcctatgaaccccaattctcctccccgtcagcactcatcctcatttactgaaccaatccaagaggctaactacgtccccatgacgcccggaactttcgattttagtagttttggaatgcaggtgccccctcccgctcacatgggtttccggtcgtctcccaaaactccccctcgaaggcccgtcccagtggcagactgtgaaccaccaccggttgaccgcaacctgaagcctgatcgaaaggtgaagccagctccactggagatcaagcccttacctgagtgggaggagctgcaggctcctgttaggtcacctatcactcggagttttgcaagggatagcagccgttttccgatgtccccccgtcctgactctgtgcacagcaccaccagctctagtgactcgcacgactctgaagaaaactatgtcccaatgaaccctaacctgagctccgaggacccaaatctcttcggatccaattccctggacggaggctcgtcccccatgataaaacctaaaggcgacaaacaggtggagtatctggatctcgatctcgattccggcaaatcgactccccctagaaagcaaaagtctagtggatccggctcgagcgttgctgacgagagggtcgattacgtggtcgtggatcagcagaagacactcgcactgaagagtactcgtgaagcctggacggatggtagacagagcaccgagtccgagactccggctaaatccgttaaatag

SEQ ID NO: 225221 - DNA, 2175 bp, synthetic construct
  misc_feature 1..2175: note = Description of Artificial Sequence: Synthetic coding sequence
  source 1..2175: mol_type = other DNA
atgagcggcggagaggtcgtttgttcaggctggcttcggaaaagccctcctgagaaaaagctgaaaagatacgcctggaaacgaagatggttcgtgctcaggtcaggccgactgacaggcgacccagacgttcttgagtactacaagaatgatcatgccaagaaacccatcaggatcattgatctcaacttgtgtcagcaagttgacgctggtcttacctttaacaaaaaagagtttgagaactcctacatatttgatatcaatactatcgatcggatattttatttggtggcagattccgaggaggagatgaacaagtgggtgcgctgcatttgtgatatttgtgggttcaatcccacggaagaagacccagtaaaaccacccggaagttctctccaggcgccagcagatctgccacttgccatcaacactgctcccccttccactcaggccgatagctcctctgctactcttcctcctccttaccaactgattaatgtgcctccacacttggaaacccttggaattcaggaggatccacaggattacctgctgcttatcaactgccagtcaaagaaacccgaaccaacccgcactcatgctgattctgcaaaatctacatctagcgagactgactgcaacgacaacgtcccctctcataagaatccagcgagcagccaaagcaaacacggaatgaatggcttttttcaacagcaaatgatctatgatagcccaccatcaagggcaccttccgcttctgtagactctagcctttacaacctgccccgaagttatagtcacgacgttctgccgaaggtgtcacctagttctaccgaagctgacggcgagctgtatgttttcaatacaccaagcgggacttcttccgtcgagacccagatgcgccatgtgtcgatctcatatgacattcctcctacgcccggaaacacttaccagatccctaggacatttcctgaggggacattgggacagacttccaaattggacacaatcccagacatcccgccacccaggccccctaagccccatcccgctcatgaccgctcacctgtggaaacatgctctattccccgaacggcgtctgatacagattcttcgtactgtatccccaccgcaggaatgagtccatctagatctaacaccatctctactgtggacctgaataaacttcgcaaagacgctagctcccaggattgctatgatatccctcgcgcattcccttccgaccggtcatcctccctggagggttttcataaccatttcaaagtgaaaaacgtccttacggttggcagtgtgtcaagcgaggagctcgatgagaactacgtcccaatgaaccccaacagcccccctcggcagcacagcagctcctttaccgaaccgattcaagaagctaattacgtgccaatgacccctgggacctttgatttctcctctttcggcatgcaagtgccaccacctgctcacatgggcttccggtcaagccctaagacccctccaaggagaccggttccagtggcagattgcgagccgcctcctgttgatagaaatttaaagcccgataggaaaggccagagccctaaaatcctgaggctcaaaccccacgggttggagagaaccgacagccagaccatcggagatttcgcaacgagacgcaaggtgaaacccgctccgcttgaaatcaagcctttgccagagtgggaggagctgcaagcgcctgtgagatcgccaatcaccaggtcattcgctcgggactcaagcagattcccgatgagcccgagaccggactccgtccactcgacaacctcctcttcagactcgcatgactctgaggaaaactacgtacccatgaacccgaacctctcttctgaggaccctaacctgtttggctctaactcattggacgggggatcctcccctatgattaagccaaaaggagacaagcaggtggagtatctggacttggatcttgactcaggcaaaagcacgcccccacgcaaacagaagtcaagcggctctggctccagcgtcgctgatgagcgagtggattatgtggtggtcgaccagcagaagacccttgctttaaaaagtaccagagaggcctggactgacggaaggcagtctaccgagtctgaaactcctgccaaatcagttaagtag

SEQ ID NO: 225222 - DNA, 1776 bp, synthetic construct
  misc_feature 1..1776: note = Description of Artificial Sequence: Synthetic coding sequence
  source 1..1776: mol_type = other DNA
atgaataagtgggttaggtgtatatgtgatatctgcggctttaatccgacagaggaggatcctgtgaaacccccaggctcttccctccaagctcccgcagatttacctttagccattaacaccgccccaccatccacccaggctgatagctcctccgccacactgcctccgccataccagctgatcaacgtccctccacatctggagacactgggaattcaggaagacccacaggactacctacttctgataaactgtcagtctaaaaagccagagcccactcgcacccacgccgactcggctaaatcaacaagctctgaaaccgattgcaacgacaacgtaccaagtcacaaaaatcctgcttcatcccaaagcaaacacggtatgaacgggttttttcaacagcaaatgatttacgatagtccccctagtcgtgcaccatccgccagcgtggattccagcttatataatctgcccaggtcctactcccacgatgtgttaccaaaggtgagccccagttctaccgaggcagatggagagctgtacgtgttcaatacaccttccggtactagttccgtggagacacagatgcgacacgtgtccatcagctacgacatccctcctaccccaggtaacacttaccagattccaaggacgttcccagaaggcacactgggacagactagcaaactggacaccatccctgacattccaccgccaaggcctccaaagccccaccctgctcatgataggtcccctgtggaaacctgcagtattcctagaacggcctccgatacagacagttcttattgtatcccgaccgctggtatgtccccatctcgcagcaatactattagcactgtggacctgaataaactcagaaaagacgcatccagccaagactgttatgacattcccagagcttttccttctgatcgtagcagctccctggaaggctttcacaaccactttaaagtgaaaaatgtgctgactgtggggagcgtgagttctgaagaactcgacgagaactatgtgccaatgaacccaaactctccacctagacaacactcctccagcttcaccgagccaattcaggaagctaattacgtccccatgacccccggaacctttgacttcagcagctttggcatgcaggtgccgcctccagctcatatggggttccgaagcagccccaagacacccccaagacgcccagtgccggtggcagattgtgagcccccacccgtggaccgaaacctgaagcccgataggaaggtcaaaccagccccattagagatcaaaccgctgcccgaatgggaagagttgcaggccccagtccggtcacccatcacgcggtcttttgcaagagactcctcccgcttcccgatgagtccacgaccagattcagtgcatagtaccacctcttcctccgatagccacgacagcgaggagaattatgtcccaatgaatcctaacttgtcctccgaagacccgaacctgttcggtagcaatagcctggatgggggaagcagccccatgataaaaccaaagggcgataagcaggttgagtacctggatctcgatctcgatagcggtaaatcaaccccccctaggaagcagaagagctcggggtccggctcctccgtcgctgatgaacgagtcgactacgtggtggtggatcagcagaaaaccctcgcccttaaatctactagagaagcctggactgatggccgacagtctaccgagtctgaaacacccgctaagagcgtgaaatag

SEQ ID NO: 225223 - DNA, 1917 bp, synthetic construct
  misc_feature 1..1917: note = Description of Artificial Sequence: Synthetic coding sequence
  source 1..1917: mol_type = other DNA
atgagtggggaccctgacgtcttggagtactacaagaacgaccattccaaaaagccccttagaatcataaacctgaatttctgcgagcaggtcgatgctgggctaaccttcaacaagaaggagctgcaggatagttttgtcttcgatataaagacgagtgaacgaacattctatctcgtcgccgagactgaagaagatatgaacaaatgggtgcaatcaatttgccagatttgtggatttaaccaggccgaagagtcaactgatagtttgagaaatgtgtcatccgccggtcatgggcctcgcagctctcccgctgaactgtcttctagtagtcagcacctgcttcgtgagcgcaaatcatcagcgccttctcacagcagtcagccgactttatttacgttcgaaccgccagtctccaaccacatgcaacctaccctctccacctcggcccctcaagaatacctgtatttgcatcagtgcattagccggagggccgagaatgcccgtagtgcaagtttttcgcagggcacgagggcctcctttttaatgagaagtgacactgctgtgcagaagttagctcagggcaatgggcattgcgtcaacggtataagtgggcaagtgcatggattttatagcctgcctaagccgtctcggcacaatactgagtttagagactctacatacgatctgcctcggtctttggcttcacatgggcacacaaaaggctcgttaacaggatccgagaccgacaatgaagatgtgtatacctttaaaacgccaagtaataccctctgtcgcgaattcggagatctcttagtggataacatggacgtgcccgctactccattgagcgcttatcagatacctcgaacttttacacttgataaaaaccacaacgctatgacagttgcaactcccggagacagcgccatagctccccctccccgacctcccaagcccagccaggcagaaacaccgcgatgggggtccccccagcagaggccaccaattagtgagaacagtaggtccgttgccgcaaccattcccagaagaaacacactacctgccatggataacagccgcctccaccgcgcatcctcctgtgagacttacgaatatccacagcgcggtggagagagcgctgggagatcagccgagtccatgtcagatggggtggggagctttctaccagggaagatgattgtggggaggagcgattcaacaaacagcgaggataactacgttccgatgaatcctggcagtagtactctgctcgcaatggagcgggctggagataacagccaatcggtgtatattcctatgtccccaggggctcatcacttcgatagtctggggtacccgtctactacactgccagtccaccgtggccctagtcgcggtagcgagattcagccccctcccgtcaacaggaatctaaagccagacagaaaagctaagccaacccctctggacctccggaacaacacagtcatcgacgagctaccgttcaagagcccaatcacaaaaagctggtcgcgggcaaatcacaccttcaattcatcctctagccagtattgtcggccaataagcacccagtcaattacctccacagactctggagatagcgaggaaaactacgttcccatgcagaatcctgtgagcgcctcacccgttccatccgggaccaactctccagcaccgaagaagagtaccggttcagtggactacctcgcactggattttcaaccatcgagtccttccccccatcggaaaccctcaacctccagcgtgacatctgatgaaaaggttgattacgtacaagtggataaggagaagacgcaagccctccagaacaccatgcaggaatggacagacgtgcggcagagtagcgaacccagcaaaggtgcgaagctttag

SEQ ID NO: 225224 - DNA, 2031 bp, synthetic construct
  misc_feature 1..2031: note = Description of Artificial Sequence: Synthetic coding sequence
  source 1..2031: mol_type = other DNA
atgtctggcggaggagatgtcgtctgcaccggatggttacggaaatcaccacctgagaaaaaactcaggcggtacgcctggaagaaacgctggtttattctaaggtcaggcaggatgtcaggcgaccccgacgtgcttgagtactacaaaaacgatcactcaaaaaagcccttgcgcatcattaatttgaatttttgtgagcaagtggatgcgggtctgactttcaacaaaaaagagctgcaggatagctttgtgtttgatattaagacaagcgagcgtaccttctacttagtggctgaaaccgaggaagatatgaacaagtgggttcaaagcatctgccagatctgtggcttcaatcaggccgaagagagcacagattccttgaggaacgtctcctcagcaggccatggtccgagatccagccccgctgaactgagtagctcttctcagcatctgctccgcgagagaaagtcttctgccccaagtcactccagtcagccaactctgttcacattcgaaccgccagtctctaatcatatgcagccaaccctgagtacctctgcccctcaggaatacctttacctgcaccaatgtattagtcgcagagccgagaacgctagaagcgcgtcattctcccagggaactcgcgcttcgtttctaatgcgctcagacactgcggtacaaaagttggcccaaggaaacggacactgtgtcaatgggattagcggacaggtccacgggttttattctctccctaagcctagcaggcacaacactgagttcagagactccacgtatgatctgccccgaagtctcgctagccatggacatacgaagggttctctgactggatctgagaccgacaacgaggacgtttacacgtttaagactccaagcaataccctgtgtcgcgagtttggggatctgcttgtagacaatatggacgtaccagccacaccactgtccgcataccaaattcccagaacattcacactggacaagaaccacaatgctatgactgtggctacccccggagactccgcaatcgctccgccacctcgtcccccaaaaccttcccaggctgagaccccaaggtggggctccccgcaacaaagacctccgatcagcgagaacagtcgcagtgtggccgctactatccctagacggaacaccttaccggctatggacaatagcagactgcacagggccagcagctgcgaaacctacgagtacccccaaagagggggtgagagcgcgggtcgaagtgccgaaagcatgtctgacggggtgggatcgttcctgcccggaaagatgattgtaggccgatctgatagcacaaactctgaggacaactacgtgcctatgaatccagggagtagcacgctgctggcaatggaacgagcgggagacaactcccaaagcgtgtatatccccatgtcgccaggcgcacatcactttgattctttgggctacccgtcaacaacccttcctgtccatcgaggaccttctaggggttcggaaattcagccgccaccagtgaataggaacttaaagcccgatcgaaaagcaaaacccactcccctcgaccttagaaataatacggtcattgacgaactgcccttcaagagtccaatcacaaagtcgtggagccgggcaaatcacactttcaattcatcatcatcacagtattgtaggccaatatccactcagtcaattacttcaacggattctggcgattcggaagagaattatgtacctatgcagaatccggtgtcagcctcacctgtgccctctgggacaaactcacccgctcctaagaagtccaccgggagcgtagactacctggctctggacttccagccttccagtccgagccctcatagaaaaccatccacatctagtgttacctctgacgaaaaagtggattatgttcaggtggacaaggaaaagactcaggcactgcagaacaccatgcaggagtggacggacgttcgtcaatccagcgagccctccaaaggggctaagctgtag

SEQ ID NO: 225225 - DNA, 396 bp, synthetic construct
  misc_feature 1..396: note = Description of Artificial Sequence: Synthetic coding sequence
  source 1..396: mol_type = other DNA
atgagcggggaccccgatgtgctggagtactacaaaaatgaccactccaagaagcccctgcgcattatcaacctcaacttttgtgagcaagtcgatgccggtctgacgttcaataaaaaggagcttcaggatagcttcgtttttgatattaaaacttctgagcgcacattttacttggtagcagagaccgaggaggatatgaacaagtgggtccagtcaatttgtcaaatttgtggctttaaccaggccgaggagagcacggactccctacggaacgtctcgagtgctggccacggaccaagaagtagtcccgcagagcttagctcgtcttcccagcacctcttgagagaacggaaatcctccgccccttcccactcctcccagcctaccctttag

SEQ ID NO: 225226 - DNA, 309 bp, synthetic construct
  misc_feature 1..309: note = Description of Artificial Sequence: Synthetic coding sequence
  source 1..309: mol_type = other DNA
atgtccggcgaccctgatgtcctagagtattacaagaatgatcatagcaagaaacctctacgcatcatcaacctaaacttctgcgagcaggtggatgccggactgacattcaataaaaaagaacttcaggactctttcgtcttcgacatcaagacctcagagcggaccttttacctcgtggcggaaacagaggaagacatgaacaagtgggtccagagtatctgtcagatctgtggctttaatcaggctgaagagtctactgacagcctcagaaatgtcagttcggccggtcatggcccacgtagttag

SEQ ID NO: 225227 - DNA, 993 bp, synthetic construct
  misc_feature 1..993: note = Description of Artificial Sequence: Synthetic coding sequence
  source 1..993: mol_type = other DNA
atggaggcggttgcgaagttcgatttcactgcctcaggcgaggatgagctctctttccacaccggtgatgtcctgaagatcctctctaatcaagaagaatggtttaaagccgagctgggcagccaagaaggttatgtgcctaaaaatttcatcgacattcagttcccaaagtggttccatgagggactgagccgtcaccaggccgaaaacctactgatgggcaaagaagtgggatttttcattatcagggcgtctcagagctctccaggcgatttttccatcagtgtgaggcatgaggatgatgtccaacacttcaaagtcatgcgggacaacaaaggcaattatttcctttggaccgaaaagtttccatcgttgaacaagctggtcgactactaccgcactaactccatcagccgccaaaaacagatatttcttcgggacagaacgcgggaggaccaggggcatcgcggtaactccttagatcggaggtctcagggaggcccacatctgagtggagccgtcggcgaagagattagacccagtatgaatcgcaaactctcagatcatccacccacacttccgttacagcagcaccagcaccagcctcaacctccacagtacgctcctgcgcctcagcagctacaacagccaccacaacagaggtatctccaacaccatcattttcaccaggagagacgcggaggttcactggacatcaatgacggacactgcggcaccggtcttggttcagaaatgaatgctgcactcatgcacaggcgtcataccgacccagtgcaactgcaagccgctggcagggtgagatgggctcgcgcattgtacgactttgaggcactggaggatgatgagctgggttttcattccggcgaggtggtggaggtcttagactcgagcaatccctcatggtggaccggacgcctccacaataaattgggcctgtttccagcgaactatgtggcgcctatgacaaggtag

SEQ ID NO: 225228 - DNA, 654 bp, synthetic construct
  misc_feature 1..654: note = Description of Artificial Sequence: Synthetic coding sequence
  source 1..654: mol_type = other DNA
atggtttcccggagacccctgtctaccccgggacgcgagttgacacatggccaaggcggatggctgctccaccaccctgggcagccagagctgccgcgtgggctgctacatctgtgccagggccacagaggaaactctttggacaggcggtctcagggtggccctcacttgtccggggctgtcggggaagagatacgtccctctatgaacaggaagttgagtgatcacccacccacacttccgctccaacagcaccagcatcagccccaacctcctcaatacgccccagctccacagcagctccagcagcccccacagcagcgatacctccagcaccatcattttcaccaagaacgcaggggaggatctctagacattaacgacggccattgtggaacaggcctcggcagcgaaatgaacgccgcattgatgcaccggaggcacacagacccggtccagcttcaggccgctgggagggtgagatgggcccgtgcgttgtacgacttcgaggcacttgaggatgatgagttgggttttcactccggagaagtggtggaagtgttggacagttcaaacccgagctggtggactggcagactgcacaataagctcggtttgttcccagctaactacgtagctcccatgacccgctag

SEQ ID NO: 225229 - DNA, 993 bp, synthetic construct
  misc_feature 1..993: note = Description of Artificial Sequence: Synthetic coding sequence
  source 1..993: mol_type = other DNA
atggaagccgtggctaaatttgacttcactgcaagtggtgaggatgaactatcttttcatacaggagatgtgctaaagattctctccaatcaagaggaatggttcaaggccgagctggggagccaggagggttacgttcccaagaattttattgatatccaattcccaaaatggtttcacgaaggactctcccgccatcaggccgagaatctgctcatgggaaaagaggtaggttttttcatcatacgcgcatcacaaagtagtccaggcgacttcagtatcagcgtccggcatgaagatgatgttcagcatttcaaggttatgcgggacaacaagggcaactacttcctttggaccgagaagttccccagcctgaataaacttgtcgattattatcgaacaaattccatctcccgccaaaagcaaatcttcctgagagatagaacccgcgaggatcaggggcacaggggcaactccctcgatcgcagatcacagggcggaccacacctttccggggctgtcggcgaggaaatacggcctagtatgaaccggaagctgtctgatcaccctcccaccctcccgctgcagcagcaccagcaccagccacagccaccccagtacgctcccgcacctcagcagctgcagcagcctccccagcaacgatatctccagcatcaccattttcatcaggagcgacgcggagggagccttgatatcaatgatgggcactgtggtacagggctgggctcggagatgaacgccgctttaatgcataggaggcacacagatcccgtgcaattacaggccgcaggcagagttcggtgggccagggctctgtacgacttcgaggcgcttgaagacgacgagctgggtttccacagcggcgaggtggtcgaggtgctggacagctctaacccctcatggtggactggacgactccacaacaaattgggcttattcccagcaaactatgttgcccctatgaccagatag

SEQ ID NO: 225230 - DNA, 294 bp, synthetic construct
  misc_feature 1..294: note = Description of Artificial Sequence: Synthetic coding sequence
  source 1..294: mol_type = other DNA
atggaagccgtagccaaatttgatttcaccgctagcggtgaagatgagctgtccttccacacaggcgacgtgctgaagattctctccaaccaggaggagtggttcaaggcagaactgggcagccaggagggatacgtgcctaagaacttcatagacattcagttcccgaagtggttccacgagggattgagtcgtcaccaggccgagaatctcctcatggggaaagaggtaggatttttcatcataagagccagccagtccagccctggggacttctccataagcgtgaggtag

SEQ ID NO: 225231 - DNA, 795 bp, synthetic construct
  misc_feature 1..795: note = Description of Artificial Sequence: Synthetic coding sequence
  source 1..795: mol_type = other DNA
atgctggagttcgtcagtttgcttgccaggaaggactcaaacaactcagtttctaagccacggcacaaactgaaccccttttcctccaaacgccatgaggacgacgttcagcattttaaggtcatgagagacaacaagggaaattactttctgtggacagagaagtttcccagtctcaataaactggttgactactacaggacaaactcaatctcccgacagaagcagattttcctgagggacagaaccagggaggatcagggacacagaggcaattcgcttgatcgcagatcacagggcggaccacacctgtctggcgctgtcggtgaggagattagaccatccatgaacaggaaactgtccgaccatccccctactttacctctgcaacaacatcagcaccaaccccagccgcctcagtacgcaccggctccacagcagcttcagcaaccaccacagcagagatatctccagcatcaccacttccaccaggaacggaggggcggatctctcgacatcaacgacggacattgcgggaccggactcggctccgagatgaacgccgctttgatgcacaggagacacactgatcctgtgcagctgcaggcagccggaagggtcaggtgggctcgggctttatacgacttcgaggctcttgaagatgacgaactaggatttcattccggggaggtggtggaagtcctggattcttccaacccatcctggtggactggccgactccacaacaagctgggcctgtttccagccaactatgtcgcccctatgacacgctag

SEQ ID NO: 225232 - DNA, 837 bp, synthetic construct
  misc_feature 1..837: note = Description of Artificial Sequence: Synthetic coding sequence
  source 1..837: mol_type = other DNA
atggaagccgtcgcgaaattcgatttcactgccagtggagaggacgagttatcatttcacacaggcgatgtcttgaagattcttagtaaccaggaagaatggttcaaggccgagctgggctcacaagaggggtatgtgcccaaaaatttcattgatattcagtttcctaagcatgaagatgatgtgcagcacttcaaagtcatgagagacaacaaagggaactatttcctttggacggaaaagtttccctctctgaataaacttgtggactactatcgaactaactctattagccgccagaagcagatattcctgcgtgatcggacaagagaggaccagggacacaggggcaattctttggatcgaaggtcacaggggggacctcatctgagtggagctgtgggagaggagatccgacctagcatgaacaggaagctctcagatcatccacctaccctgcctcttcagcagcaccaacatcaaccccagcccccacagtacgccccagcaccacaacagctacagcagccacctcagcagcgatatttacagcaccatcactttcaccaggagcgcagggggggaagtctggatatcaacgacggtcattgcggcaccggactcggcagcgaaatgaatgccgcactgatgcaccgtaggcacacagatcctgtgcagctccaggctgccggtagagtgaggtgggcaagagccctgtacgacttcgaggctctggaggaggtgctggactccagcaatccctcatggtggacagggcgactgcacaacaagcttggactgtttccagccaactatgtggcccctatgactagatag

SEQ ID NO: 225233 - DNA, 915 bp, synthetic construct
  misc_feature 1..915: note = Description of Artificial Sequence: Synthetic coding sequence
  source 1..915: mol_type = other DNA
atgctggagtttgtgtcactgctggcacgcaaagacagtaataattcagtatctaagccaagacataagctgaaccctttttcatcaaaaagatggtttcacgagggcttgagccgccaccaggcggaaaacttgctgatggggaaggaagtcggcttctttattatacgggctagccagtcatcacctggcgatttctccatctcggtccgccatgaagacgacgtgcagcacttcaaggtgatgcgggataacaaggggaattatttcctttggaccgagaagttcccctctttaaacaagctggtcgactattaccgtaccaacagtatctcccgtcagaagcagatcttcctgcgggatagaacacgcgaggaccaaggccatcggggaaactctctggataggagaagtcaagggggaccgcacctgtctggggcagtgggggaggagattagaccatccatgaatcggaagctgagcgatcacccaccaacgctgccattgcagcagcatcaacatcaacctcagccccctcagtacgccccagccccacaacagctgcaacagccaccccaacagaggtacttgcagcaccatcacttccaccaggagcggagaggtggatcactcgacattaacgacgggcactgcggcacgggcctaggctcagaaatgaatgcagcgcttatgcatcgtagacacactgaccctgtgcaattgcaggccgcaggacgtgtccgatgggcacgggctctgtacgatttcgaggccctggaggacgacgagctgggattccactccggcgaggtagttgaggtgcttgactcatcaaacccatcctggtggaccggacgtctgcataacaagctgggcctgttccctgccaattacgtggcccctatgactagatag

SEQ ID NO: 225234 - DNA, 777 bp, synthetic construct
  misc_feature 1..777: note = Description of Artificial Sequence: Synthetic coding sequence
  source 1..777: mol_type = other DNA
atgggcaaagaagtggggttttttatcatccgggcttctcagtcctcacctggagatttctccatttcggtgagacatgaggacgacgttcagcactttaaagtaatgagggataacaaagggaattattttctgtggacagaaaagttccccagcctcaacaaactggttgactactaccgcaccaactcgatttccaggcaaaaacagatatttctacgggatcgaacacgggaagatcaggggcatcggggtaactccctggatcgtcgctcacaggggggtccccatctgagcggcgcagtgggcgaggaaatcaggccgtcaatgaatcggaagctgagtgaccacccacctacattgcctcttcagcagcaccagcatcaaccacaaccaccacagtatgctcccgctccccaacagctccagcagcctcctcaacagagatacctgcaacaccaccatttccatcaagaaaggcgcggtggctcgctcgatatcaatgacgggcactgcggtacaggcttgggtagtgaaatgaatgcggctctcatgcaccgccgtcatacggaccccgtacaacttcaggccgcaggccgtgtgagatgggccagggcgctgtatgactttgaggccctcgaagacgacgagctggggtttcatagcggcgaggtggtggaggtgttagatagcagcaacccctcttggtggaccggaaggctgcacaacaaactcggtctattccccgcaaattatgtcgcacctatgaccagatag

SEQ ID NO: 225235 - DNA, 507 bp, synthetic construct
  misc_feature 1..507: note = Description of Artificial Sequence: Synthetic coding sequence
  source 1..507: mol_type = other DNA
atgttctggaagttgagtttgtcccttttcctggtagcagtgcttgtgaaagtcgccgaggccagaaaaaatagacctgcaggagctattccaagtccttataaagatggaagctctaacaactctgagcggtggcagcatcagatcaaagaagttcttgcatcaagccaggaggccctggtagtcaccgaacgcaaatatctgaagagcgattggtgcaaaacccaacccctcaggcaaacggtctctgaagaagggtgccggtcccggacgatactgaaccggttttgttatggtcagtgtaactccttttacataccaaggcacgtgaagaaggaagaagagtcctttcagtcatgtgcattctgtaaacctcagagggttaccagtgtgctggtggagttggagtgtcctggcctcgatccaccattccgcctcaagaaaatccagaaggtgaaacaatgtcggtgtatgagcgtcaacttatccgattctgataagcagtag

SEQ ID NO: 225236 - DNA, 1443 bp, synthetic construct
  misc_feature 1..1443: note = Description of Artificial Sequence: Synthetic coding sequence
  source 1..1443: mol_type = other DNA
atggccggtacccggtgggtacttggtgctttactcagagggtgtggatgtaactgtagctcctgcagacgaactggagctgcatgtcttcccttctactccgccgctggctctatcccatccggtgtgtctggtcgcaggcgtctccttctgctgctgggcgctgcggcagctgccgcatcacagactagaggattacaaaccggtcctgttccacccggaagactggcaggaccgccagccgttgcaacatccgccgctgctgctgcagccgcaagttattccgctcttagagcaagccttctccctcagtctctcgctgctgctgccgctgtgcccacacgctcttattctcaggaaagtaaaactacctacctggaagacctaccccctcctcctgagtatgagttggctcccagcaagctggaagaagaggttgacgatgtgttcctgatccgcgctcagggtctcccttggtcgtgtaccatggaagatgtgttgaacttcttcagcgattgtcgcatccgtaatggagagaatgggattcattttctcctaaacagagatggcaagcggagaggcgacgcattgattgaaatggagagcgagcaggacgtgcaaaaagctctcgagaagcacagaatgtatatggggcagcgctatgtcgaagtttacgaaattaacaacgaagatgttgacgctctaatgaagtccctgcaggtgaagagctctccggtggtcaatgacggagtggtccggctgcgaggcctgccttacagctgcaatgaaaaagatatcgtggattttttcgcgggactgaacattgtggacattacatttgtgatggactacagaggacggagaaaaaccggcgaggcgtacgtgcagttcgaagagcctgaaatggccaaccaggccctcctgaaacaccgagaggagattggtaaccgatatattgagatcttcccctccagaaggaatgaagtgcgtacccacgtaggatcttacaaggggaagaaaattgcttctttccctaccgctaagtacatcacagagcctgaaatggtgttcgaggaacacgaagtgaatgaggacatacaacccatgaccgccttcgagtccgagaaagagattgagttgcccaaggaggtgccagagaagctgccagaagccgcagactttggcactacctcctcacttcattttgtgcatatgagggggctgccgttccaggcaaacgcccaggacataatcaattttttcgctcctctgaaacctgtaagaattacaatggaatacagcagctctggcaaggcaaccggtgaggcggatgtccactttgagacccacgaggacgccgtggctgctatgcttaaagataggtcgcatgtgcatcataggtacatcgagctctttctcaactcttgtcctaagggcaagtag

SEQ ID NO: 225237 - DNA, 957 bp, synthetic construct
  misc_feature 1..957: note = Description of Artificial Sequence: Synthetic coding sequence
  source 1..957: mol_type = other DNA
atggaggacgtcttaaatttttttagtgactgccgaatcaggaatggtgagaacgggatccatttccttttaaacagagatgggaagaggagaggggatgctctgattgagatggaatctgaacaggacgtccaaaaagcacttgagaagcacaggatgtatatgggacaacgatatgtggaggtttacgagattaataatgaagatgtggacgccctgatgaaatctttgcaggtgaaaagcagtccagtggtcaatgacggcgtcgtgagacttaggggcctgccctactcctgcaacgagaaagatattgtagactttttcgctgggttgaacatcgtcgacatcacgtttgttatggactataggggacgtcgcaaaactggggaggcctacgttcagttcgaagagccggaaatggcgaatcaggccctgcttaagcaccgggaagagatcggtaatagatatatagagattttccctagccgtcgcaatgaggtacgtacacacgtcggatcatacaaaggaaagaagatcgcatcattccccactgcaaaatatattacagagcccgagatggtgtttgaagagcatgaggtcaatgaggacatccagcctatgacagcgttcgaaagtgagaaggagatcgaattgccaaaggaagtgcccgagaaactacctgaggcagctgattttggtacaaccagttcactccattttgtgcacatgcggggattacctttccaggcgaacgcccaggatatcatcaatttcttcgcccctcttaaacccgtcaggatcaccatggagtacagcagtagtggtaaagccacaggcgaagctgatgtccacttcgagacacacgaggatgcagtcgctgctatgctgaaagataggtctcatgtccatcaccggtatattgagttattcttgaatagttgtcccaaaggcaagtag

SEQ ID NO: 225238 - DNA, 1362 bp, synthetic construct
  misc_feature 1..1362: note = Description of Artificial Sequence: Synthetic coding sequence
  source 1..1362: mol_type = other DNA
gcagctgccgtgcccactcgatcttattcccaggttcgaggtagacgggaaggccctggtgccaggtctctgccaggacgagttcacgcaccgcctcgcccaagcgtccccccttgcgcgccacggggtcatgctcgcggaagcgcaactttggctgcacacccccctccttcaacactgtgtagctattgggctttagaacaggggaaactgagtcaggcctctggattgctgctggtgctgtttagtccacgtgtgtcaggacggctcggctctgaaagcaagacgacgtatctggaagacctgcctcctccaccagagtatgaattggcaccttctaaactggaagaagaggtcgacgatgtgttcttaatacgagcccaaggactcccttggagctgcacaatggaggacgtactcaattttttcagcgactgccgaatcagaaatggcgaaaacggaattcacttccttctgaaccgtgatggaaaaagacgcggagacgctctgatcgaaatggagtccgaacaggatgtgcagaaggcgctagagaagcatcgcatgtatatgggtcagcgatatgtggaagtctacgaaataaataatgaagatgtggacgctcttatgaagtctctgcaggtgaagagttcccccgtggtgaatgatggtgtcgtgaggctcaggggtctgccatacagctgtaacgagaaagacatcgtggatttctttgccggattgaacattgtcgacattacctttgtcatggattatcgcggacggaggaaaacaggcgaggcttacgtgcagttcgaggaacctgagatggcaaaccaggctctcctcaagcaccgggaggaaattgggaatagatacatcgaaatattcccttcgaggaggaatgaggtccgcactcatgtgggctcctacaaggggaagaaaatcgcctccttcccaacggcaaaatacattactgaacctgagatggtgtttgaggaacacgaagtcaatgaggacatccagcccatgacagctttcgaatccgagaaagaaatagaacttcctaaagaagttcccgaaaagttaccagaagcagcagatttcggaacaactagcagcctgcacttcgtgcatatgcgcggactccctttccaggcaaacgcccaggatatcataaatttttttgcacctctgaagcccgttcggatcaccatggagtattcctcttctggaaaagctaccggtgaggcagatgtgcacttcgagacccacgaggacgccgttgcagcgatgcttaaagacagatcgcatgttcaccaccggtacatcgaactgttcctgaactcatgccccaagggcaaatag

SEQ ID NO: 225239 - DNA, 957 bp, synthetic construct
  misc_feature 1..957: note = Description of Artificial Sequence: Synthetic coding sequence
  source 1..957: mol_type = other DNA
atggaggacgtgctcaatttcttttctgactgtaggatccggaacggcgagaacggaatccatttccttctcaatcgtgacggcaagcgacgaggggacgccttgatagagatggagtctgagcaagacgtacagaaggctctagaaaaacacaggatgtacatgggacaaaggtacgtggaagtgtatgaaattaataatgaggatgtcgacgcccttatgaaaagcctgcaggtgaagtcctcccccgtcgttaacgatggggtggtgcggcttagaggcctgccctacagctgcaatgagaaagacatcgttgatttttttgctggtctcaatatcgtggatatcacattcgtaatggattacagaggcaggagaaaaacaggcgaggcctatgtgcaattcgaggagccggagatggcaaaccaagccctgctcaagcatcgagaggagattggcaaccggtacatagaaatctttcccagtcgaagaaatgaggtgaggacccatgtgggatcttacaaggggaagaaaattgcctcttttcccactgccaagtatatcacggagccagagatggtgtttgaggagcacgaagtgaacgaggatattcagcctatgaccgcttttgaaagtgaaaaggagatagagcttccaaaggaggttcccgagaaactcccggaagcggcagacttcggtactacctcaagtttgcactttgtccacatgagaggacttccgtttcaggcaaacgcccaggacattataaactttttcgcaccgctgaaaccagtcaggatcacaatggagtacagtagttccggcaaggcaacgggagaagccgatgttcacttcgaaactcacgaagatgctgtggctgctatgctgaaagacaggagtcatgtgcaccaccggtatatcgagttattccttaatagctgccctaagggcaagtag

SEQ ID NO: 225240 - DNA, 1254 bp, synthetic construct
  misc_feature 1..1254: note = Description of Artificial Sequence: Synthetic coding sequence
  source 1..1254: mol_type = other DNA
tgaccaccaccgtccaccctctgttcctattgggcattagaacaaggaaaactttctcaggcgtccgggctcttactagtgctattttccccacgtgtgagtggtaggctggggtccgtatcggttgccggtgtgaatgtcgaagctctgttccccgcttggcctatggagtctaagaccacgtaccttgaggacctgcctccaccccctgagtacgaattagccccaagtaaactggaggaggaggtggatgacgtatttctaattcgtgcacaagggctcccatggtcttgcactatggaagacgtgctgaattttttctccgattgccggattcggaacggagagaacggcatccattttttgctgaaccgggatggcaaacggagaggcgacgctctgatcgaaatggaatccgagcaggatgtgcaaaaggccctggagaagcaccgaatgtacatggggcagcgctatgtggaggtgtacgagatcaataacgaggatgtggacgccttaatgaaatcactgcaggttaaatcttctccggtggtaaatgacggcgtggtcagactgcgcggtttgccatatagctgtaatgaaaaggacatcgtagacttctttgctggtctcaacatcgtggacatcaccttcgtgatggattaccgtggtcgcagaaagacgggagaggcttatgtgcagttcgaggagcccgaaatggctaaccaggcgctgctgaaacaccgagaagagattgggaacaggtacattgagatcttccctagccgtagaaacgaggtgcggacccacgtaggctcttataagggcaaaaaaattgcttcgttccctaccgcaaagtacattacagaacccgagatggtttttgaagaacatgaagttaacgaggatatccagccgatgacagctttcgaaagcgagaaggagatagagctccccaaggaagtgcccgaaaaattaccggaagccgcagactttggtacaactagttcccttcactttgttcacatgcgcggactccctttccaggcaaacgctcaagacattataaacttttttgcccctttgaaaccagtccggatcacaatggagtacagtagttctgggaaggcaactggcgaagctgatgtgcacttcgagacacacgaggacgctgtcgccgcaatgctcaaggatcgatcacacgtccaccatcggtatatagaactgtttctgaactcgtgtcccaaagggaagtag

SEQ ID NO: 225241 - DNA, 1239 bp, synthetic construct
  misc_feature 1..1239: note = Description of Artificial Sequence: Synthetic coding sequence
  source 1..1239: mol_type = other DNA
atggccggtacccgctgggtgctaggtgcactgcttcgaggctgtggatgcaactgttcctcatgccggcgtaccggagcagcatgcctgccgttctattccgccgctggctcaatacccgctgcagcggtgccgacccgatcttactcacaagagtcaaagacaacatatctggaagacctacctcctcccccagagtacgaactcgccccatctaaactagaggaagaagtggacgatgtctttctgatccgtgcgcaaggcctaccatggagctgtacgatggaagacgtgctgaatttcttttctgactgtcgcattagaaatggcgaaaatggtattcattttctgttgaacagggatggcaagagacgcggagatgcattgatcgaaatggaatcagaacaggatgtccaaaaggccctggagaaacaccgtatgtatatgggccagcgctatgtagaagtatacgaaataaacaatgaggatgttgatgcgctaatgaaatccctgcaggtcaagagtagcccagtggtgaatgatggcgttgtgagactaagaggattgccctactcctgtaacgagaaagacatcgtggacttttttgcaggccttaatatagtggacattacttttgtaatggactaccgcggaaggcggaagacaggcgaggcatacgtgcagtttgaagagcctgaaatggcaaatcaggctctgctgaaacaccgggaagagatcggcaaccgctatattgagatcttcccttccaggcgaaacgaggtccgcacccatgtgggatcctacaaagggaagaagattgccagttttcctaccgctaaatacattactgagcctgagatggtttttgaagaacacgaggtgaacgaggatattcagccaatgactgcctttgaatccgaaaaagaaattgagctcccaaaggaagtgcctgagaaactgcctgaggccgctgattttggcacaacaagttcactccattttgttcacatgcggggacttccgtttcaggccaatgcacaagatataattaatttctttgctcccctcaagccagtgcgtataactatggagtactcttcttcggggaaggcgaccggcgaggctgacgtccactttgaaacgcacgaggacgctgtggctgccatgctcaaagatagaagccacgtgcaccatcggtatatagaacttttccttaattcctgtccaaagggcaagtag

SEQ ID NO: 225242 - DNA, 1089 bp, synthetic construct
  misc_feature 1..1089: note = Description of Artificial Sequence: Synthetic coding sequence
  source 1..1089: mol_type = other DNA
atggagtccaaaactacatatctcgaagatctgccaccccctcctgagtatgagctcgctccatccaagctggaggaggaggtggatgacgtgtttttgatcagagcccaaggcctcccctggtcttgcaccatggaggacgtgctgaacttttttagtgactgccgtatacgcaacggtgagaacggaatacacttcttgcttaatagagacgggaaaaggcggggagatgccctgatcgagatggaatccgaacaggatgtccaaaaagcactggaaaaacacagaatgtatatggggcagcggtatgtagaagtctatgagatcaacaatgaggacgtggatgccctgatgaaatccctgcaagtcaagtcctcccctgtagtgaatgacggagtggttagactgcggggattaccatatagctgtaacgagaaggacatcgttgactttttcgctggacttaatattgtggatatcacttttgttatggactataggggtcgaaggaagacgggggaggcttatgtacagtttgaagagcctgagatggccaaccaggcgttacttaaacacagagaggagatcggcaacagatatatagagattttcccctcgagacgcaatgaagttagaacccatgtaggttcatataaaggaaaaaaaatcgcatcatttcctacagccaagtatatcaccgaacctgagatggtgttcgaagagcatgaagtgaatgaggacattcaaccgatgaccgccttcgaatccgaaaaagagatcgaactgcccaaagaggtgcctgagaaattgcctgaggccgcagattttggaacaacttcaagtctgcatttcgtgcacatgcgcggtcttccattccaggccaatgctcaggacattatcaattttttcgcccctctgaagcccgttaggatcactatggagtattcttcttccggcaaggctacaggcgaagcagacgttcacttcgagacgcacgaagatgccgtggctgctatgctgaaagatcggagccacgttcaccatcgctatatcgaattattcttaaactcttgcccgaaaggcaagtag

SEQ ID NO: 225243 - DNA, 1401 bp, synthetic construct
  misc_feature 1..1401: note = Description of Artificial Sequence: Synthetic coding sequence
  source 1..1401: mol_type = other DNA
atgctgcgctctacatcaaccgtgaccctgttgagcggaggggctgcacggacgccgggagcaccatctcgtcgagcaaatgtgtgtcgtcttagattgacagtacctcctgaatcccctgttccagagcagtgtgagaaaaagatcgaaaggaaagagcagctgcttgatctctctaacggagaacctacccgaaagctccctcaaggggtcgtgtacggcgtggtgaggaggtcagaccaaaatcaacagaaggaaatggtggtgtatggttggtctacatctcagctgaaagaggaaatgaactacataaaagacgtacgagccaccctcgagaaggtaagaaaacggatgtacggggattatgatgaaatgcgccagaaaataagacagctcacacaggaactgtccgtgtcccatgcgcagcaggaatatttggagaatcatattcaaacccagagcagtgccctggaccggtttaacgcgatgaactcagctctggcgtccgactctataggcctgcaaaaaacactcgtggacgtcaccctcgaaaattccaacattaaagatcagatccgcaatttacagcagacgtacgaggcctcaatggataaactacgggaaaaacaacgacagttggaggttgcccaggttgagaatcagctgttgaaaatgaaggtcgagtcctctcaagaggcaaacgcagaggtgatgagggaaatgactaaaaagctgtacagccagtacgaggaaaagctgcaagaggaacaaaggaagcactccgccgaaaaggaggccttactcgaggaaactaatagtttcctgaaggctatcgaagaggccaacaaaaagatgcaggccgcagagatttcacttgaagaaaaagaccagcgcatcggagagcttgaccggttaattgagaggatggagaaagagagacatcagctgcagcttcagctcctcgagcatgagaccgaaatgtcaggcgagctgaccgactccgataaggaaagataccagcagctggaggaggcctctgcatccctcagggagagaatccggcatttggacgacatggttcactgtcagcagaagaaggtcaaacagatggttgaggaaatagagtcacttaaaaaaaagctccaacagaagcagttgcttatcctgcagctgcttgaaaaaattagcttcctggagggtgagaacaatgagctgcaatccaggttggactatctgacagaaacacaggcaaagaccgaagtcgagacccgggagatcggtgtaggatgcgatctcctcccctctcagactggtcgcactcgcgagatcgtgatgcccagtcggaactacaccccatacacacgggtgctggaactcactatgaaaaagactcttacttag

SEQ ID NO: 225244 - DNA, 1194 bp, synthetic construct
  misc_feature 1..1194: note = Description of Artificial Sequence: Synthetic coding sequence
  source 1..1194: mol_type = other DNA
atgctgcgcagcacctcgaccgtgacactgctgtcaggcggagccgctaggaccccaggcgcacccagtaggcgtgctaacgtttgccgtctgcgtctgacagtgccaccagagtcacccgtgcccgagcaatgcgagaagaagattgaaaggaaggaacagctgctcgatctctctaacggtgagcccacacggaaactgccccagggcgtcgtgtatggagtagtgagacgtagtgatcagaatcaacaaaaggagatggtggtttatggatggtccacttcacaactcaaagaagaaatgaattacattaaggacaagacactggtagacgtgactctagagaactcaaacatcaaagaccaaatacgcaatctgcagcagacctacgaagcctctatggacaagctgcgagagaagcagcggcaactggaggtcgcacaggtagagaatcagctgttaaaaatgaaggtcgagagcagccaggaagctaatgcagaggttatgcgtgaaatgaccaaaaagctgtacagccaatacgaagagaaattgcaggaagagcaaagaaaacacagcgccgagaaagaggcactgctcgaggaaaccaattcatttttgaaggccatcgaggaagctaataagaaaatgcaggcggcagagatcagtcttgaagaaaaagatcagcgcattggcgaattggaccggcttattgagcgcatggagaaggagaggcaccagctccaactgcagctgctcgagcacgagacagagatgtctggcgaattgactgactccgataaggaacggtaccaacagttagaagaggccagtgcaagtctccgcgaacgcattaggcatctggacgatatggtgcactgtcagcaaaaaaaagttaagcagatggttgaggaaatagagagtctcaagaagaaactgcagcagaagcagctgctaattttacagctgctcgagaagatcagttttttagagggggagaataatgagctccagtcaagactcgactacctcacggaaacccaggcaaagacagaggtggagactcgcgagattggagttggctgcgacctactgcccagccagacagggcgaactcgggaaatagtaatgccgtccagaaattatactccctatacaagagtgttggagttgacgatgaagaagactctcacttag

SEQ ID NO: 225245 - DNA, 1248 bp, synthetic construct
  misc_feature 1..1248: note = Description of Artificial Sequence: Synthetic coding sequence
  source 1..1248: mol_type = other DNA
atgctgagaagcacgtctaccgtcactctgctgtccggcggtgccgctcggacacccggagctccatcaaggagagctaacgtgtgccgtctgcggttgacagtccctcctgaaagccctgtccctgaacagtgcgagaagaaaattgagcgcaaggagcagctgctggatctcagcaacggagagcctactagaaagcttccacagggcgtggtgtacggggttgtgcgcagatccgaccagaaccagcagaaagagatggtcgtgtacgggtggtcaacttcccagttaaaggaagagatgaattacattaaagacgtgagccatgcccagcaggagtacttggagaaccacattcaaactcagagcagtgccctcgacaggtttaatgccatgaatagcgcattagcctcagactctatcggccttcaaaaaaccctggtggacgttacactggaaaatagcaacataaaagaccaaatccggaatctccagcagacctatgaggcctcaatggataagcttagggagaagcaacggcagcttgaagttgcacaggtagagaaccagttactcaagatgaaggttgaatccagtcaggaggccaatgcagaggtcatgagggaaatgacaaagaagctttattcgcaatacgaggagaagttacaggaggaacagcgcaagcattctgctgagaaagaggcgctgttggaggaaactaactctttcctgaaggcaatcgaggaagccaacaaaaagatgcaagccgcagagatctcacttgaggagaaagaccaacgcatcggtgagctggatcgtctgatcgaaaggatggagaaagagcgccatcaactacagctacaactgctcgagcacgagacggagatgagcggtgagcttactgactcagataaggagcggtaccagcagctggaagaggccagcgcttcactgagggagaggatccggcatctcgatgacatggtccattgccagcaaaagaaggtgaagcagatggtcgaagaaaacaatgaactgcagtcacgtctagattacctaaccgaaactcaagccaagacagaagtcgaaacaagagaaatcggggtcggatgcgacctgctcccgcgacagtctaggaaatttgagaaggtcctgaatgagtttgtgcagttgttgccactgcctcaccacctgttgtgggctttcggcaatgtgtgttggcgtcggcatttcgggctgctacaatag

SEQ ID NO: 225246 - DNA, 1317 bp, synthetic construct
  misc_feature 1..1317: note = Description of Artificial Sequence: Synthetic coding sequence
  source 1..1317: mol_type = other DNA
atgctgcgctctacctccacagtgacccttctctccggaggtgccgcacggacccctggagcaccctcgcggcgtgcgaatgtgtgtaggctgcgtttgacagtcccacccgaatccccggtgccagaacagtgtgaaaaaaagatcgagcgcaaagagcagctcttagatctcagcaatggagagcccactcgcaagctgccgcagggagttgtctacggtgtggtcaggcggtcggatcaaaaccagcagaaggagatggtcgtctatggttggtctacatcacaactgaaggaggaaatgaattatatcaaggatgttcgcgcaaccttagagaaagtccgaaaacgcatgtacggcgactatgacgagatgcggcaaaaaatccgtcagctaactcaagagctcagtgtctcacacgcccagcaggagtacctggaaaaccacattcaaacacagtctagcgcactcgacaggtttaacgcaatgaattctgcgctcgcatcggattcaatagggcttcaaaaaactctggtcgatgtcactttggagaactccaacatcaaagaccaaattcgaaatctacagcagacctacgaggcctcaatggacaaactgagagagaaacaaaggcaactagaggttgcacaggtggagaatcagctgctcaaaatgaaggtagaatcctctcaagaggcaaacgccgaagttatgagggagatgacaaagaagctgtattctcagtacgaagagaaattgcaggaggagcagagaaaacattccgctgagaaggaggcactcctggaggagacaaactccttcctgaaggccatcgaagaggccaataaaaaaatgcaagcagccgaaatctccctagaggagaaagatcaaaggattggtgaattggataggcttattgagcggatggaaaaggagcgacaccagctgcagttacaacttctcgagcatgagacagaaatgtcaggggaactgacagattcggacaaggaaaggtatcagcagctggaggaggcaagcgcatcacttagggagagaattcgccacctcgatgatatggtacattgccaacagaagaaggtgaaacagatggtcgaggaaaataatgagcttcagtctcgactggattacttgacagagacgcaggcaaaaactgaggtggaaaccagggagatcggagtgggttgcgatttactgccaagtcagaccggcaggacgagggagatcgtgatgccatcaaggaactacaccccatacacgcgggtgctggagctcacgatgaaaaagaccctaacctag

SEQ ID NO: 225247 - DNA, 1338 bp, synthetic construct
  misc_feature 1..1338: note = Description of Artificial Sequence: Synthetic coding sequence
  source 1..1338: mol_type = other DNA
atgctgcgcagcactagcactgttactctgctaagcgggggagccgcacgcacacccggagccccatctcgccgagcaaatgtttgtcggttgcgcctgacagttcccccagaaagcccagttcctgaacagtgtgaaaaaaaaattgaacgaaaagagcagcttctcgatctgtcaaatggtgagcctacccgcaagctgccacagggggtcgtgtacggggttgttaggcgatcagatcagaatcaacagaaggagatggtcgtttacggatggtctacctctcagctgaaggaagagatgaattacatcaaggacgtgcgagccactctagagaaggtgagaaaacgtatgtacggggattacgacgaaatgcggcagaaaatcaggcaacttacccaggaactgagcgtgagtcacgcccagcaggagtaccttgaaaaccatatccagactcagtctagcgcgctcgacagatttaatgccatgaacagcgcactagccagtgacagcatcgggttgcaaaagacactggtcgatgtgactttagaaaactcaaacataaaggaccaaatccggaacctacagcaaacctatgaggcgagcatggataagctccgggaaaaacagcgccagctggaggtcgcacaggtagagaaccagctgctgaagatgaaagttgagtcaagccaggaggcaaatgctgaagtaatgcgcgagatgacgaaaaagctgtactcccaatacgaagagaagctgcaggaggagcagagaaagcactcagcagagaaagaagcattgctcgaggagacaaattcctttttgaaagctatcgaagaggccaacaagaaaatgcaggccgcagaaatcagcctcgaagagaaagatcagcgcattggtgaactggacagattaattgaacgcatggagaaagagaggcaccagctgcagttgcagctgcttgagcacgagacagagatgagcggggagctgaccgactcagacaaggaaagatatcaacaactcgaggaggcttcagcctctctgagggaacgaattcggcacctggacgatatggtccattgtcagcagaaaaaggtgaaacagatggtcgaagaaatagagtctctgaagaagaagctccagcaaaagcagctgttgatcttgcagctattggaaaagatatcgttccttgagggggagaacaacgaactacagagccggttagattatctgacagagacccaggcaaaaacagaggtggaaacccgcgagataggcgtgggttgcgacctgctcccacgccgatgtaagcagtcttcccaaagaaaaaattag

SEQ ID NO: 225248 - DNA, 1653 bp, synthetic construct
  misc_feature 1..1653: note = Description of Artificial Sequence: Synthetic coding sequence
  source 1..1653: mol_type = other DNA
atgcttcgcagcacctccactgtcacacttctatccggcggtgccgctcggacacctggagcaccgtcaagaagagctaacgtctgccgactgagactgaccgtacccccagagtccccggtgccagagcaatgtgagaagaaaattgaacggaaggagcagctcctcgacctttcaaacggagagccgactcggaaactgccccagggcgtagtatacggagtggtaagaagatccgatcaaaaccagcagaaagagatggtcgtatacggctggtcaacgagtcagctgaaggaagagatgaattatataaaggacgtgcgagccaccctggaaaaggtaaggaaacgcatgtacggtgactacgatgagatgagacagaagatcaggcaactgacccaggagcttagcgtctcacacgcccagcaggaataccttgagaaccatatacagacccagagctccgcccttgatcgcttcaatgcaatgaacagcgctctcgcatccgactcaattggcttgcagaagacactagtggacgtgactctagagaactctaacatcaaggatcagattaggaatcttcagcaaacttacgaagcctccatggataaactgcgcgaaaagcaacgacagctcgaggtggcccaggttgagaaccagctgctcaaaatgaaagttgagtcctcgcaggaagctaatgctgaggtgatgcgggaaatgaccaaaaagctgtactcacagtatgaggaaaaactgcaggaagagcagcgcaagcattctgccgaaaaagaggccctgctggaggagactaacagtttcctgaaggcaattgaagaggctaataagaaaatgcaggctgcagaaatttcactcgaagagaaggaccagcgcatcggggagttagacaggttgattgaaagaatggaaaaggagaggcatcagctgcagcttcagttacttgagcatgaaacagaaatgagtggcgagctgaccgactcagataaggaacgctatcagcagctcgaggaagcctccgcctcactccgagaacggattcggcaccttgacgacatggtacactgccagcaaaaaaaggtcaaacaaatggttgaagagattgaatccttaaaaaaaaaactgcaacagaagcagctgttgatattgcagctcctcgagaagatcagctttctagaaggggaaaataacgagctgcaatctcgacttgactatctgacagagacccaggctaagacagaagtcgagacacgggaaatcggggttggctgtgacctgttgccaagactgcccttccgccagaatgattccagctctcattgccagaagagtgggtcaccgatctcctccgaggaaagacgcagacgcgataaacaacaccttgacgatatcaccgccgcaaggctgttaccacttcatcacatgccaacacagctcttgtctatcgaagagagtctcgcgctacagaaacaacagaagcagaattacgaagagatgcaggccaagttagcagcccaaaaattggctgagaggcttaatattaagatgagaagttacaaccctgagggcgaatcgagcgggaggtaccgagaggtgcgcgatgaggacgatgactggtcttctgacgagttttag

SEQ ID NO: 225249 - DNA, 1308 bp, synthetic construct
  misc_feature 1..1308: note = Description of Artificial Sequence: Synthetic coding sequence
  source 1..1308: mol_type = other DNA
atgttacgatccacaagtaccgtgacccttctcagtgggggagctgccaggacccctggcgcaccctctaggcgggcaaatgtctgtagactgcgcctgaccgtacccccagagtctccagtacccgagcagtgcgagaagaaaattgaacgcaaggagcagctgttggacctgagcaatggcgagccaacgaggaaactgcctcagggcgtagtctacggcgtcgtcaggaggagtgaccagaatcagcagaaagagatggtggtgtatggctggtctacaagtcagctgaaggaggagatgaactatatcaaggacgtctctcatgcccagcaggaatacttagaaaaccacatccagacgcaatcttcagccttagaccgattcaatgctatgaactcagccctggcctccgattccatcggcctgcagaaaacactggtggacgtgacgctcgagaacagcaacattaaggaccaaatccggaatctgcagcagacgtacgaagcatccatggacaaattgcgtgagaaacagcgtcaacttgaagttgcacaggtggagaatcagctgctaaagatgaaagtcgaaagtagccaagaagctaatgccgaagtcatgcgtgaaatgacgaaaaaattatacagtcagtacgaagagaagctccaggaggaacagagaaagcacagtgctgaaaaggaagccctactagaggaaacaaattcattcttgaaggctattgaggaagccaataagaagatgcaggcagcagaaatctcactggaggagaaagatcagaggatcggggagctggatagactcatcgaacgcatggagaaagaaagacaccagctgcagctgcagctgctggagcatgaaaccgaaatgtcaggcgagctgaccgattcagacaaagagagataccagcagttggaggaagctagcgccagcctgagagaacggatccgacaccttgacgatatggtgcattgccagcaaaagaaggtaaagcagatggtagaggaaatcgaatcgctgaagaagaaattgcagcaaaagcagttgttgatcctccagcttctggaaaaaatatccttcctggaaggcgagaataatgaactgcagagccgtctggattatcttacagagactcaggcaaagactgaagtggagactagggaaatcggagttggctgtgaccttctgccgtcacaaaccggaagaacacgtgagattgtgatgccctcacggaattatactccctacactcgggtcctggagctaactatgaaaaaaactctgacttag

SEQ ID NO: 225250 - DNA, 1401 bp, synthetic construct
  misc_feature 1..1401: note = Description of Artificial Sequence: Synthetic coding sequence
  source 1..1401: mol_type = other DNA
atgcttaggtccacctcaacagtaacattgctctctggtggagcagctcgcacccctggagcgccaagccgccgagccaatgtgtgtcggctgagactgacagttcccccagagagccctgtgcctgagcaatgcgagaagaagattgaacgtaaagagcagctgctggatttatccaacggcgagccgacaaggaagctccctcaaggcgtcgtctacggcgtggtcagacgctcagaccagaatcagcaaaaggaaatggttgtttacggctggtctactagccagctcaaagaggaaatgaactatatcaaggatgtacgcgcaactcttgaaaaggtccgcaaaagaatgtatggagattatgatgagatgcgacaaaagattcgccagctcacgcaagaattgagcgtgtcacatgctcagcaggagtacctggagaaccacatccagactcagtcttctgccttggatcgcttcaacgccatgaacagcgcactggcttcagattccatagggctgcagaaaacacttgtggatgttacactggagaatagtaacataaaggaccagatcaggaaccttcagcagacctacgaagccagtatggataagcttagggagaagcagaggcagttggaagtcgctcaagtagaaaaccagttgctgaaaatgaaggtagaatcaagccaagaggcaaatgccgaggtgatgagagaaatgaccaagaaactgtacagccagtacgaagagaagctgcaggaggaacagcggaagcatagcgccgagaaagaggcccttctcgaggagacaaattctttcctgaaggcaatcgaagaggcgaacaaaaaaatgcaggccgctgagatctccttagaggagaaagaccaacggatcggggaactcgataggctaatcgaaagaatggagaaggaaagacaccagctgcaattgcagctgctggaacatgaaaccgagatgtctggcgaattgacggactcagacaaggagcggtatcaacagttggaagaagctagcgccagcttgagggagcgtattaggcacctcgatgacatggtacattgtcaacaaaagaaagtgaaacagatggttgaggagatcgaaagcctaaaaaagaaattacagcagaagcagctcttgatcctgcaactgctggagaagatcagctttctagaaggagagaataatgaactgcagtctaggttggattatctgacagagacacaggctaaaaccgaagtggaaactcgtgagatcggtgtggggtgtgatctcctccctagccagaccgggcgaacacgagaaattgtcatgccctccaggaactatacaccatacacccgggtgcttgagctcacaatgaaaaagacactcacatag

SEQ ID NO: 225251 - DNA, 1317 bp, synthetic construct
  misc_feature 1..1317: note = Description of Artificial Sequence: Synthetic coding sequence
  source 1..1317: mol_type = other DNA
atgctgaggtctacttccaccgtcactcttttgtccggtggagcagctcggacgcctggagcccctagccggagagctaatgtctgcaggctgcggcttaccgtgccgccagaatctcctgtacccgaacagtgtgagaaaaagattgagcggaaagaacagctattggacttgtctaacggcgagccgactcggaaattgcctcagggcgtggtgtatggtgtggttcggaggtcggaccagaaccagcagaaggaaatggtggtgtatggatggtcaacctcccagctgaaggaggagatgaattacattaaggacgtgcgagctaccctggaaaaagtgaggaagcggatgtatggagactatgacgagatgagacagaagatcagacagctcacccaggaattatctgtctcacatgcgcaacaggaataccttgagaatcatatccagactcagtcaagcgctctagaccggtttaatgctatgaactcggccctggcgtccgatagtattggcctgcagaaaacccttgtggacgtgaccctcgaaaactctaacattaaggatcaaatcagaaatttgcagcagacctatgaggcatcgatggataagctgcgcgagaagcagcgacagctcgaggtggcgcaagttgagaatcaacttctgaagatgaaagtggaatctagccaggaggccaatgccgaagtcatgcgggaaatgaccaagaaactttactcccagtatgaagaaaagcttcaagaggaacagaggaagcacagcgcagagaaggaggcactcctcgaggagactaattcctttctgaaagcaattgaggaagcaaataagaagatgcaagcagcagaaatttcgctcgaagagaaggatcaacgaatcggagagctggaccgtctcatagaacggatggagaaggaaaggcaccagttgcagttacaattacttgaacacgagactgagatgagcggggagttgactgactctgacaaagaaaggtatcagcagcttgaggaggccagcgccagccttcgtgagcggattcggcacttagacgacatggtgcattgccaacagaagaaggttaaacagatggtggaggaaaataacgaactgcagagccgattagactatctaaccgagacccaggctaagacagaggtggagacaagagaaattggggtcgggtgtgatctgctcccctcccagacggggcgaacaagagagatagtcatgccaagccggaattacacaccttacacacgcgtgctggagttgaccatgaaaaagacactgacttag

SEQ ID NO: 225252 - DNA, 1401 bp, synthetic construct
  misc_feature 1..1401: note = Description of Artificial Sequence: Synthetic coding sequence
  source 1..1401: mol_type = other DNA
atgctcagaagtacttcaacagtgacattgttgagcggcggagccgctaggacccccggagctcctagtcgcagggccaacgtctgccgactacggctgaccgtgcctcctgaaagtcccgtgcccgagcaatgtgaaaagaaaattgagcgcaaagaacaactgctcgacctgagcaatggtgaacctacccgcaagcttccccagggggtcgtctatggagtggtgcggaggagcgatcagaatcagcagaaagaaatggtggtctatggctggagcactagccagctcaaagaggaaatgaactacatcaaagacgtccgagcaacgttagagaaggtccgcaaacgcatgtacggagactatgacgagatgcgccagaaaataaggcaactgactcaagagctcagcgtcagccatgcccagcaagaatatttggagaaccacatacaaacgcagtcctccgccctggaccgcttcaatgctatgaattctgctttagcttccgatagcatcggtcttcagaagacactagttgatgtgaccctggaaaactccaatattaaagaccagatcaggaacctccaacagacgtatgaagcttcaatggacaaacttagggaaaaacagcgccagctcgaggtcgcacaagtcgagaatcagcttctgaagatgaaggttgaatcctcccaggaggccaacgccgaggtcatgagagaaatgacaaagaaactatactctcagtacgaggagaagctccaggaggaacagcgcaaacacagtgctgagaaggaggcgctcctcgaagaaacaaactccttcctgaaggcaatagaagaggccaacaagaagatgcaggcagccgagatttcactggaggagaaagatcaacgcatcggagaactggatagactcatcgagcgcatggaaaaggagcggcatcagctacagctgcagctgctggagcacgagacagaaatgtcgggggaattaactgactccgataaggaacggtatcaacaactggaagaggcctctgccagtctgagagagaggattcgacatctggacgacatggtgcactgccagcaaaagaaggtcaaacaaatggtagaagaaattgaatccttaaagaagaagctgcagcagaaacagctcctcatcctgcagctcctggaaaaaatttcgtttctggagggcgagaacaacgagcttcagagccgtcttgactacctgacggagactcaggcaaaaaccgaggtcgagacacgcgaaattggagtaggctgtgatcttctgccctctcagacagggaggacacgcgagatcgtaatgccatcccggaactataccccttacacccgtgtactggagttaaccatgaagaagacattgacatag

SEQ ID NO: 225253 - DNA, 2328 bp, synthetic construct
  misc_feature 1..2328: note = Description of Artificial Sequence: Synthetic coding sequence
  source 1..2328: mol_type = other DNA
atggagaaattcggtatgaacttcggcggtggaccctctaaaaaagatctgctagagaccattgaaacgcagaagaaacagctgctacagtatcaggctcgcctgaaagacgtcgtacgggcttataaaagcctgctgaaggagaaggaggcgctagaggcatctataaaggtgctgagcgtctcgcacgaagctgatgtgggcctcgctggtgtacagctgcccggactcacattccctgactccgtggacgatcgctgcagcacccacagtgaagacagtacaggcaccgccacatcattggacaccgctgcttccctgactagtacgaaaggagagttcggcgttgaggatgatagacctgcacggggtcctccaccacccaagagtgaggaggccagctggagtgaatcaggcgtctcttcgtcaagcggcgacggtcctttcgctggcggagaagtggacaagagacttcaccagctgaagacgcagctcgctactcttacctcatcactggcaacagttacccaagagaagtctcgtatggaggcctcatatttggccgacaaaaagaaaatgaagcaggatctggaagacgcttctaataaagctgaggaggagcgcgctcgcttggaaggggagttgaaaggccttcaggagcagatcgctgagaccaaggcaaggctcatcacgcagcagcatgacagggctcaggaacaaagcgaccacgccctcatgctccgtgaactgcaaaaattgcttcaagaggaaaggactcagagacaggacctggaactgcgtctggaggaaaccagggaggctctggctggacgcgcatacgccgcagaacagatggaaggctttgaactgcagaccaaacagctcacacgtgaagtcgaagaactcaaaagtgagttgcaggccataagggacgagaagaatcagccggacccaagacttcaagagctgcaggaggaagcagccaggttaaagagccattttcaggcacaacttcagcaggagatgagaaaaaccgcgctcgctgaagaccaactcaggcagcaatcccaggtggaggaacagcgtgtcgcagctttggagaatcaaatctccgaagtcagcgagcttttgggcacatatgaaaaagctaaacagaaagaccagctggccatacagaagttgaaggagcggattctgcaattagatctcgaaaacaagaccttagccctagcggcatcctcaagaagtcctctggatagtcatggcgaagagtcaagcctggatgtgaatgtgctcaaggataagatggaaaaactcaagaggctgctgcaggttgcagcccgtaaatcccaagtaacactggatgtcgagaagctgtgtgacctggaaataatgccctcttctgaggcagcagatggggaaaaggctaccgcactatactatcagcaggaacttaaacagctcaaagaggagtttgagagatataagatgcgtgctcaggtagtacttaagtctaagaacactaaggacggtaatctggggaaagaacttgaggctgcacaggaacagttagcggaactaaaggagaaatatatctccctgagactgagttgtgaagagctggagcatcaacaccaacaggaggccgacgattggaaacaagaactcgcccgactccagcagctgcatcgccaggaacttgagcggtgtcaactagattttagagaccgcacgttgaagctcgaagaggagctccataaacagagggaccgcgcactggctgtgttgactgagaaggatttggaactggagcaacttcgctctgtcgcattggcctccggcctgcctggccgtcgctcacccgtcggagggggtggtcctggtgaccctgcagataccagctcaagcgacagtctaacccaggccctacagctggctgctgccaacgaaccaacctttttcctttatgctgaacaactggccaggaaggaagtagagattacctcactcagaaaacagaaacaccgcctcgaggtggaggtgcaccagctccaagaccgcctgctggaggagggcgagcgccatagggaggaagtggccgctttgcagtctcacatcgagaaaaacatacgggatcagtctcgcgagggagccaacctggagtatctgaagaacatcatctatcggttcctcactctgccagactctctcggcaggcaacaaacactaaccgccatcctgacaattttgcatttttctcctgaggaaaagcaggtgatcatgcggctaccgacctctgcgtcatggtggcccagcgggaaacgttag

SEQ ID NO: 225254 - DNA, 5054 bp, synthetic construct
  misc_feature 1..5054: note = Description of Artificial Sequence: Synthetic coding sequence
  source 1..5054: mol_type = other DNA
atggaggacctggtgcaggatggcgttgctagtccagccactccgggaactggcaaatcgaagctagaaacgcttcctaaggaggatttgatcaagttcgctaagaaacagatgatgctcattcagaaggcaaaatcccgctgtaccgagctggagaaggaaatcgaggaactccggtccaagcctgttacggaaggcactggagacatcatcaaggctttgacagaaaggttggatgctctcctgctcgaaaaggcggaaaccgagcagcagtgcttaagcttgaagaaggaaaacatcaagatgaaacaggaggtggaagattccgtgacaaaaatgggggacgctcataaggaactagaacaatctcatattaattatgtaaaggagattgaaaatctcaagaacgagctgatggccgtgagatctaagtacagcgaagataaggccaacttgcagaaacagctagaagaggccatgaacacccagctggagttgtccgaacaattgaagttccagaataactccgaagacaatgttaaaaagctgcaggaggagattgaaaagatccggccagggttcgaggaacagatcctatatctccagaaacagctggatgccacgactgatgagaagaaggagacggtgacgcaactccagaacataatcgaagccaacagccagcactaccagaagaatatcaattctctgcaggaggagctcttacagcttaaagcaatccaccaggaggaagtgaaggaattgatgtgccagatcgaggccagcgctaaggagcatgaagcagagattaataaacttaatgagctcaaagagaatctcgtgaaacagtgcgaggcaagtgagaaaaacatccagaagaagtacgagtgcgaacttgagaacctgcgaaaggcaactagtaacgctaatcaagacaatcagatctgttctatattactacaagagaatacatttgtcgagcaggtggtcaatgaaaaagtcaaacatttggaggacactctcaaggaacttgagtctcagcattctatcctgaaggacgaagtgacatacatgaataatctcaagctgaaactggaaatggacgcccagcacatcaaggatgagttctttcatgagcgggaggacttggagtttaagatcaatgagctgttactggcaaaagaagagcagggctgtgtgatcgaaaaactcaaaagtgaactggccggtctgaataaacagttttgttatactgtcgaacaacataaccgagaggtgcagtccttgaaggagcagcaccagaaggagattagtgaactgaacgagacattcttgagtgattctgagaaagagaaactaacactcatgtttgagatccagggcctgaaagaacagtgcgaaaatcttcaacaggagaagcaggaggccatactgaactacgagtcactgcgcgaaattatggagattcttcaaactgagcttggtgagtctgcaggaaagatcagccaggagtttgaatcaatgaagcaacaacaagcgtccgacgtgcacgaactccagcaaaaactgagaactgcttttacagaaaaagatgctcttctggaaactgtcaataggctgcaaggagaaaatgagaaactcctgtctcagcaggagttggtccccgaattggagaacacgataaagaatctgcaggaaaagaacggcgtgtatttgctgtccctaagccaaagagacaccatgttgaaggaactcgagggaaaaattaactctttgaccgaagaaaaggatgactttatcaacaaactcaagaattcgcacgaagaaatggacaatttccacaagaaatgcgagcgggaagagaggctgattttagagctagggaaaaaggtggagcagaccatccagtacaactcagagctagagcaaaaagtgaacgagcttacgggcggtctggaggagactttgaaggaaaaagatcagaatgaccagaaacttgagaagcttatggtacagatgaaggtgcttagcgaagataaggaggtacttagtgcagaggtcaaatccctctatgaggagaacaacaaactgtccagtgagaagaagcagctttcaagagatctggaggtcttcttgagtcagaaagaggacgtcatcctgaaggagcacattacccagcttgagaagaagctgcaactgatggtggaagagcaggacaacttaaataagcttctcgaaaacgagcaggttcagaaattgtttgtcaagacgcagctttatggattcttaaaggaaatggggagcgaagtgagtgaggattccgaggaaaaagacgttgtcaatgttctccaggcagttggtgagtctctcgcaaagatcaatgaggaaaagtgtaatctcgctttccagcgggacgaaaaggttctggaattggagaaggaaattaaatgcctgcaggaggaatcagtggttcagtgtgaggaattgaaatcactcctgcgagattacgaacaggagaaagtgctgttaaggaaggagctcgaggagatacaatccgagaaagaggctctccagagcgaccttctggagatgaaaaatgccaatgagaagactagactcgaaaaccagaacttgctcattcaggtggaggaagtgtctcagacctgctccaagtccgagattcacaacgagaaagaaaagtgcttcattaaagagcatgagaacttaaaacccctcctagagcaaaaagagctgcgagatcgtagggccgagctgatcctcctgaaagattcgctagccaagtccccatctgtgaaaaacgatccgcttagcagtgtcaaggaattagaagaaaagattgagaacctggagaaagagtgtaaggaaaaagaagagaaaatcaacaaaattaagttggttgccgtaaaggctaaaaaagagcttgattcaagccggaaggagacacagaccgttaaagaagagttggagtctctgaggagcgagaaggatcagttgtccgcctcgatgcgggacctcattcagggagctgagtcttataagaatctgctcctggagtacgaaaagcagtctgaacagctggacgttgaaaaagaaagggctaataactttgaacatcgtatcgaagacctaaccagacagctgcggaattccaccctccaatgcgagactattaactccgataatgaagacctactcgccagaatagagacactgcagagtaatgccaaacttctggaagtacagatcctcgaagtccagagagctaaggccatggtggacaaagaattagaggccgaaaaactgcagaaagaacaaaaaatcaaggaacatgcaaccactgttaacgaattagaagaactccaggtccaactccaaaaacagaagaaacagctacaaaaaactatgcaggagctggagcttgtgaagaaagatgcacagcagacgactctcatgaatatggaaatagctgattacgaaagacttatgaaagaactgaaccagaagctgaccaataagaataataaaatagaagatcttgaacaggagatcaagatccagaaacagaaacaagagaccttgcaggaggagatcaccagcctgcagtccagcgtgcagcagtatgaggaaaagaatacaaaaataaaacagctgctggttaagactaaaaaggagctcgctgactctaaacaagccgagacagatcatctcattctgcaggcaagcctaaagggcgaactggaagcaagtcaacagcaggtggaggtgtacaagatccaacttgcagaaatcacatcagagaaacacaaaatccatgaacacctgaaaacgagcgccgaacagcatcagcggaccctgagcgcctatcagcaaagggtaacagcactgcaggaagaatgcagggccgcaaaagctgaacaagcaactgtcacaagtgagtttgagagttataaggtgagagtccacaacgtgttaaagcaacagaagaacaaatcaatgagtcaggctgaaacggagggcgcaaagcaggagagggagcaccttgaaatgctgatcgatcagctgaagatcaaactgcaagattctcagaacaatctccaaatcaatgtctccgaactccaaactctgcaaagtgagcacgacactctgctggagagacataataagatgctgcaagagacggttagcaaggaagcagagttgcgagaaaagttatgctccatacagtctgagaacatgatgatgaaatctgagcacacccagaccgttagccagctgacatctcaaaacgaggtgctgagaaattcgtttcgggatcaggtgaggcacctgcaggaagaacatagaaaaacagtagagacactccagcagcaactatctaaaatggaagcacaactgtttcagctgaaaaacgagcccaccacccggtcccctgtgtcatcccagcagagcctcaagaacttgcgcgagcgaagaaatactgacctccctctgttggatatgcacacagttaccagagaggagggagaaggaatggaaacaaccgacaccgaaagcgtaagcagcgctagcacctatacccaatccttggaacagctgcttaatagccccgagacaaaattagaaccacccctctggcacgctgaattcacgaaggaagagctcgttcagaagctttccagtaccaccaaatctgccgaccatcttaacgggctactgcgagaaactgaagccaccaatgctatccttatggaacaaatcaaattgctcaaatcagaaattcggagacttgaacgcaatcaggagcgcgagaagtccgctgctaacctagagtatctgaagaacgtcctgctccagttcatctttctgaagcctggctcagagcgcgaacggctgctgcctgtcatcaacacgatgctacagctgtctccggaagaaaaggggaaattggcagctgtggcccagggagaagaggaaaacgcctctaggtcaagtggctgggcgagctatcttcactcttggtcagggttgcggta

SEQ ID NO: 225255 - DNA, 2052 bp, synthetic construct
  misc_feature 1..2052: note = Description of Artificial Sequence: Synthetic coding sequence
  source 1..2052: mol_type = other DNA
atgtgtcagatagaggcaagcgcaaaagaacacgaagctgagattaataagcttaatgaactaaaagaaaatttggtgaaacagtgtgaagcctctgagaaaaatattcagaagaaatacgagtgcgagctggagaacctgcggaaagccacctctaatgccaaccaagataaccaaatctgctctatcttgctgcaggaaaacacgtttgtggaacaagtcgtgaacgaaaaagtgaaacacctggaagacaccttaaaagaactcgagtctcagcattccattttgaaagacgaagttacatacatgaataatttgaagctcaagctcgagatggatgcccagcacattaaggatgaattctttcacgagcgggaggatttggagttcaagatcaacgagctgctgctagcgaaggaggagcaaggctgcgtaatagagaaactgaagtcggaactagcaggtctcaataaacaattttgttataccgtcgaacagcacaatcgggaagtccaaagcctcaaagaacaacatcaaaaggagatttctgagcttaacgaaacctttctgtcagactctgagaaagagaagctaaccctgatgttcgagatacagggcctgaaagagcaatgtgagaatctgcaacaggagaaacaggaggctatactaaactatgagtcactccgcgagattatggagatcctccagaccgaactgggtgaatctgccggtaaaatttctcaggagtttgaatccatgaaacagcagcaggctagcgacgtgcatgaactgcagcagaagttgcgcaccgcatttaccgaaaaagatgcattattggaaaccgtgaatcgcctccagggagagaatgaaaagctgctctctcaacaggagctggtgcccgaactcgaaaataccattaaaaatcttcaagagaagaatggagtatatctgctgagcctctctcagagggacacgatgctcaaagagcttgagggtaaaatcaacagcttaaccgaggagaaggacgactttattaataagcttaaaaatagtcatgaagaaatggacaatttccacaagaaatgtgagagagaagaacggctgatcttggaactcggaaagaaggtcgaacagacaatccagtacaattcagaactcgaacagaaagtgaatgagttgacaggaggactggaagagacattaaaagagaaggaccagaatgatcagaagctggagaagttgatggtgcagatgaaagttctgagcgaagacaaagaggtgctaagcgcagaggtgaaaagcctctacgaagaaacaattaattcagtgcagaagaagcagctgagcagggatttggaggtgttcttgagccagaaagaagatgtcatactgaaggagcacattacccaattagagaagaagctccagcttatggtggaagagcaagacaacctgaataagctgctcgaaaacgagcaagtgcaaaaattgttcgtgaagacacaactgtacggcttcctaaaagaaatgggaagtgaagtttctgaggattccgaagaaaaggacgtcgtcaacgtgcttcaggccgtcggagaaagtctggccaaaataaatgaagaaaaatgtaacctggcctttcaacgtgatgagaaggtgttggagcttgaaaaagaaattaagtgtctgcaggaggagtcagtggtgcaatgtgaagaactaaagagcttactgcgcgattacgagcaggagaaggttctgcttcgcaaggagctcgaggagattcaatccgagaaagaggccctccagagcgatctactagagatgaagaatgccaatgagaagacacgacttgagaaccaaaacttgctgatccaggttgaggaagtttcccagacatgctctaagagcgagatccacaacgagaaagagaaatgttttatcaaagagcacgagaacctaaagccactgctggagcagaaggagcttagagacagaagagcggaactgattttgctcaaggacagcttggcaaaaagcccctctaaaaagtag

SEQ ID NO: 225256 - DNA, 1347 bp, synthetic construct
  misc_feature 1..1347: note = Description of Artificial Sequence: Synthetic coding sequence
  source 1..1347: mol_type = other DNA
atggaagacctggttcaagatggcgttgcctcaccagctacgccaggaactggcaagagtaagctggaaacactgcctaaggaggatctgatcaagttcgccaaaaagcaaatgatgctgatccagaaggcaaagagccgttgtaccgaactggagaaggagatcgaggagcttcgtagcaaacctgtgaccgaaggtacgggggatattattaaagcccttaccgagcggcttgacgccctgctcttggagaaggctgagacggaacagcaatgtttgagtcttaaaaaggagaacattaagatgaaacaggaggtcgaagacagtgtcaccaaaatgggcgacgcacataaagagttggaacagtcccacattaactatgttaaggagatcgaaaacctgaaaaacgagctaatggccgtaaggtccaaatactctgaggataaagccaacctccaaaagcaactggaggaggctatgaacacacagctggagctgagcgaacagctgaaattccagaataactcggaggacaacgtgaaaaagttgcaggaggagatagagaaaatccgccctggctttgaagaacagatcctgtacctccagaaacaactagacgctacaaccgatgaaaagaaggaaaccgtgacacagctgcagaacatcatcgaggcaaactcacagcactaccagaaaaacatcaatagcttgcaggaagaactcctgcaattgaaggctatccatcaagaggaagtgaaagaactgatgtgtcaaatcgaagcctctgcgaaagaacatgaagcggaaattaataaactgaatgagttaaaggaaaatctggtgaagcaatgtgaagcctcagagaagaatattcaaaaaaagtatgagtgcgagctggagaatttgagaaaagcgacaagtaatgctaaccaggacaaccaaatttgttcaatactcctgcaggaaaatacgtttgtagaacaggttgtgaacgaaaaagtgaaacacctggaagacacgctcaaggagcttgaaagccagcattcaatcctcaaagacgaggtcacttacatgaataaccttaaattgaaattggagatggatgcccagcacatcaaggatgagttcttccacgaacgggaggatctcgagtttaagataaacgagctgctacttgctaaagaggagcaaggttgcgttattgagaagctgaaatctgaactggcagggttgaataagcagttctgttatactgtcgagcagcacaacagggaggtgcagagcttaaaagagcagcatcagaaggagatctctgagttaaacgagacattcctgtcggatagttag

SEQ ID NO: 225257 - DNA, 1878 bp, synthetic construct
  misc_feature 1..1878: note = Description of Artificial Sequence: Synthetic coding sequence
  source 1..1878: mol_type = other DNA
atggctcaggcccttagtgaggaggagttccaaaggatgcaggcacagctcctggagctgcgcactaataactaccaactgtccgatgagctgcgcaaaaatggcgtggagctgacctccctcaggcaaaaggttgcgtatctggacaaggaattcagcaaggctcagaaagcacttagtaagtctaagaaagcgcaggaggtcgaagtgctgctgtcggagaatgaaatgctgcaggctaagctgcatagtcaggaggaggacttcagactgcagaattctaccctgatggccgaattcagcaaggagaggtacggcaaagaggcaggaaagttttcggcagtatcagaaggccagggcgacccacctggtggtcccgctccaacagtattggcgcctatgccactggcagaagtggagctcaagtgggagatggaaaaggaggaaaagcggttgttatgggagcagcttcaaggtttagagagctcaaagcaggcagagactagccgcctccaagaagagttggcgaaactgtccgagaaactcaaaaaaaagcaagaatccttctgtaggctccagacagagaaggaaactctatttaatgacagtaggaataaaattgaagaactccagcaacgcaaggaagccgaccacaaagctcagttggctcgaactcagaagctgcagcaggagctcgaagccgctaaccagtcactagcagagcttcgggaccagaggcaaggagagagactcgagcacgcggctgccctgagagcactccaggaccaggtatctatccagagcgccgatgctcaggagcaggttgaaggattgctggccgagaataatgcactgagaacctcgctggctgcgctggaacaaattcagactgcaaagacccaagagctaaacatgctgcgcgaacaaacgacgggtttagctgccgaactccaacagcagcaagctgagtacgaggatctcatgggacaaaaagacgatctcaacagccagcttcaggagagcctgcgagctaactccaggctcctggagcaacttcaggaaattggccaggaaaaagaacaactcactcaggagcttcaggaagcccgtaagagcgccgagaagaggaaagctatgctagacgaacttgcaatggagacactacaggaaaaaagtcagcacaaggaggaactcggagctgtccgactgcgccatgaaaaggaagtgctgggcgtcagggccagatacgagcgcgagctgcgtgaactccatgaagataagaagcgccaggaggaggagctccggggacagataagggaggagaaagcccgtacccgagagttagaaaccctgcagcagactgtggaagagctccaggctcaggtccatagcatggatggtgccaaaggctggtttgaaaggagattgaaggaggcagaggggaaggaggaagagctgcaagatgtgcgagatcagctcgaacaggcccaggaggagagggattgccacttaaagactatttctagtctaaagcaggaggttaaagatactgtagatggacagcgaatactcgagaaaaaggggtcggctgccctgaaagacctgaaacggcagttgcacttggaaagaaaacgagcagataaactgcaggaaaggctgcaagacatccttaccaacagcaaaagccggagcggtttggaggagcttgtgcttagcgaaatgaactcaccaagtaggacgcagacaggtgattcctcttccatctcttcttttagctaccgagagattttgcgcgagaaggaatcttcagcagttccagccagggtgcggggtaaagaagaacccactgctccagcatcactgaaccctaaaatatag

SEQ ID NO: 225258 - DNA, 2433 bp, synthetic construct
  misc_feature 1..2433: note = Description of Artificial Sequence: Synthetic coding sequence
  source 1..2433: mol_type = other DNA
atggcccaagcactctccgaagaggagttccagaggatgcaggcgcagctgttagagctgaggaccaacaattaccagctgagcgacgaactgcgtaaaaacggcgttgagctcacatctctccgccaaaaagtcgcttaccttgacaaggaatttagtaaggcacagaaggctcttagcaaatcgaaaaaagctcaggaggttgaggtccttctgtccgagaacgagatgctacaagcaaaactgcactctcaggaggaggactttcgccttcagaatagcacactgatggcagagtttagcaaactctgctcacagatggagcaacttgaacaggagaaccagcagcttaaggaaggcgctgcaggagcgggagtggctcaggcagggcctcttgttgatggagagcttctgcggcttcaggccgaaaacactgctctgcagaaaaacgtagccgctctgcaggagaggtacggcaaagaggccggaaaattctccgctgtatctgaaggtcagggcgatcctcccggaggaccggcaccaaccgtcctggcacccatgcctttagcggaagtggagttgaagtgggaaatggagaaagaggagaagcgtctcctttgggaacagttacagggtctcgaaagttctaagcaggccgaaacctcccgcttgcaggaagagctcgccaagctttccgagaagcttaagaagaaacaggagtctttctgcaggcttcagaccgaaaaggaaaccttgtttaatgactcacggaataagatcgaggagctccagcagcgtaaagaggcagaccataaggcccagttagccagaacccaaaagctgcagcaggagctggaggctgctaaccagtccctggctgagctcagagaccagcggcagggggagcgtttagagcatgccgctgccctccgagctttgcaggaccagattcagacggccaaaacacaggagctgaatatgttacgggagcagaccactggtttggcagcagaactccaacagcagcaggcagaatatgaggatttgatggggcagaaggacgatttaaacagccagttgcaggaaagtttgagagccaactcaagactgctggaacaacttcaggaaataggtcaagagaaggaacagctgacccaggaacttcaggaggcaaggaagagtgcggagaagcggaaagcgatgttagatgaactcgcaatggagacgttacaggaaaagagccagcacaaagaggaattaggggctgttcggctaagacatgagaaagaggtactgggcgtccgtgccagatatgaacgcgagctgagagagttgcacgaagacaagaaaaggcaggaggaggaattgaggggacagattagagaggagaaagccagaacgcgagagctggagacactgcagcagaccgttgaggagctccaggctcaagtgcatagtatggacggtgcgaaaggttggtttgaacgcaggttaaaagaggctgaggaatcccttcagcagcagcagcaggagcaggaagaggcccttaagcagtgtcgggagcagcacgccgcagaactcaagggcaaagaggaggaactacaagatgtcagggatcagctcgagcaggcacaagaggaacgggactgtcatcttaagaccatcagctctctcaagcaggaagtcaaagacacagtagatggccagaggatactcgaaaagaaaggatcagcagcgctgaaagatcttaagagacagttacatctggagagaaaaagggctgataagcttcaggaacggctccaggacatcctgaccaacagcaaaagtcggagcggactggaggagctcgtgctgtctgaaatgaatagccccagtaggacccaaactggggactcatcctctatcagttcattctcctaccgcgaaatcctgcgcgaaaaggaatcttcagcagtaccagctagatctctttccagctcaccacaggcccagcccccacgcccagccgagctgagtgacgaggaagtagccgaactgttccagaggttggccgaaacccagcaggagaagtggatgctggaagagaaagtgaagcacctggaagtgtccagcgctagcatggctgaagatctgtgccgcaaatctgctatcatcgaaacctatgtgatggacagtcgcattgatgtatctgtggcagcaggccataccgacaggtctgggctcggctctgtccttagagacctggtcaaacccggagacgaaaaccttagggaaatgaacaaaaagttgcagaacatgcttgaggagcagctgacaaagaacatgcatctacacaaagacatggaagtgctttcacaggaaattgtgcggttgtcaaaagaatgcgtgggacccccagatcctgatctcgagccaggtgaaacatcctag

SEQ ID NO: 225259 - DNA, 2526 bp, synthetic construct
  misc_feature 1..2526: note = Description of Artificial Sequence: Synthetic coding sequence
  source 1..2526: mol_type = other DNA
atggcccaggccttgagcgaggaggagtttcagcgtatgcaagcccagctgctggaactcaggaccaacaattatcagcttagcgacgaattgcggaaaaacggcgttgagctaacttctcttcggcagaaagtggcatacctggataaggagttttctaaggcccagaaggccctgtccaagtctaaaaaagcccaggaagtcgaggtgcttctgtcagaaaatgagatgctgcaggctaagcttcattctcaggaggaggatttccgcctgcagaacagcaccctgatggccgaattcagcaagctttgctcacagatggagcaactcgagcaggagaatcagcaactgaaggagggagcggcaggtgctggcgtcgcacaggctgggcctctggtggatggcgagttactccgcctacaagctgagaataccgctttgcaaaagaatgtggcagcacttcaggaaaggtacgggaaagaggccggaaaattttctgctgtgagcgaaggccaaggcgacccacccggtggccctgccccaaccgttttggcccctatgccactcgcagaggtcgagctgaagtgggaaatggaaaaggaggagaagaggctcttgtgggaacagttgcagggactggagtcctccaagcaggccgaaacctccagattacaggaagagctcgccaagttgtccgagaagctcaaaaagaaacaagagtccttctgtcggttacagaccgagaaggagacattgttcaacgactcacgcaacaagatagaagaactgcagcagcgaaaggaggctgatcataaagcgcagcttgctcgcactcaaaaactccagcaagaattggaggctgctaaccagtcactcgctgagctcagagatcagaggcagggggaacgcctggaacacgctgctgcgctcagagccctgcaggaccaggtttccattcagagcgcggacgcacaagaacaggttgagggattgctagcagaaaataacgctttgcgtacttctctggcggctctggaacagatccagaccgccaagactcaagagctgaatatgctgagggagcaaacaaccggactagccgcagagctacagcagcagcaggcagagtacgaggatctgatgggacagaaggatgatctcaactctcagctccaggagagtctccgcgcaaactctcgactcctggaacagcttcaagagatcggccaggagaaggaacagctaacccaagagctgcaagaggcacgcaagtctgctgagaaaaggaaggccatgcttgatgaactagctatggagactcttcaggaaaagtcccaacacaaagaagagttgggggcagtaagactacggcacgaaaaggaagttctgggggtgagagccaggtacgaacgcgagctcagggagctccatgaagacaagaagaggcaggaggaggaactacggggacagattagggaggagaaggcacggacacgggagcttgagacgctacagcagacagtcgaagaactgcaagcccaagtgcactcaatggacggcgcaaaagggtggtttgagaggcggctgaaggaagccgaagagtctctgcagcagcaacagcaagaacaagaagaggccttgaaacagtgtagggagcagcatgccgctgaactgaagggaaaagaagaggaattgcaagatgtgagagatcagctggaacaggcacaggaggaaagagactgccatctgaagacgatctcttctctgaaacaggaagtaaaggatacggtcgacgggcagagaattctggagaaaaagggcagtgctgccctgaaagatctgaagagacagctacatcttgaacggaagcgtgccgataagcttcaggagcggctccaggacatcttaaccaactcgaagagccgaagtggcctcgaggagttagttctaagcgaaatgaatagccctagcaggacacagactggtgattcttcatcaatctcctcattttcgtatcgggaaatcctgcgggagaaggaaagcagcgccgttcctgctaggtcccttagctcctcacctcaggctcaacctccaaggccagccgaattgagcgacgaggaggttgccgagttgtttcagcgcttagcagagacacagcaggagaagtggatgcttgaggaaaaggtcaagcatctggaagtttcaagcgcgagtatggctgaagatctgtgtcgcaagagcgctattatcgagacctatgttatggactcacggatcgacgtgagcgtggccgcaggtcataccgaccgctcaggactagggtctgtgcttagagatttggtgaaacctggagacgaaaatttgagagagatgaacaaaaagctccagaacatgttggaagagcagttaaccaaaaatatgcatctccataaggacatggaggttctctctcaggagatcgtgcgactttccaaagaatgtgtaggtccccctgatcccgatctggagcctggggaaacctcttag

SEQ ID NO: 225260 - DNA, 2391 bp, synthetic construct
  misc_feature 1..2391: note = Description of Artificial Sequence: Synthetic coding sequence
  source 1..2391: mol_type = other DNA
atggcccaggccttgtctgaagaagaatttcaaaggatgcaggcacagctcttggagttgcggactaacaactatcaattatccgacgagctccgtaaaaatggtgtagagttgactagtctaagacaaaaagtggcgtaccttgacaaggaattttcgaaagcacagaagctgtgctcacaaatggaacagctggaacaggagaatcagcagctgaaggaaggggctgccggagccggagtcgcccaggccggaccactagtggacggcgagttgctgaggttacaagccgaaaatactgccttgcaaaagaatgtggccgcactacaggagcgctatggtaaagaggccggtaagttctctgccgtgtcagaggggcagggtgatccgcctgggggaccggctccaactgtgctggccccaatgccactcgcagaggtagagttgaagtgggagatggaaaaggaggagaagagactcctatgggagcagctgcaagggctggagagttcaaaacaggccgagacaagccgtctacaggaagagctggcaaaattgtctgagaaactgaagaaaaagcaagagtccttctgtagattgcagactgagaaagagaccctctttaacgatagtcgcaataagatcgaagagcttcagcagaggaaagaggcagaccacaaggcgcagctcgcccgaactcaaaagttgcaacaagaattggaggcagctaatcagtccctcgcagagcttagggatcagcgacagggtgagagactggagcatgccgctgcgctgcgcgcactccaggatcaagtctcaattcagagcgccgacgcccaggaacaagtcgagggcctgctggccgaaaacaacgcgctcaggacttcactggccgcactggaacagatccagactgctaaaacgcaggagctgaacatgttacgcgagcagaccactggcctggctgccgaactgcagcagcaacaggctgaatatgaggacctgatgggccagaaagatgatctaaattcacagttgcaggagagcctccgcgcaaacagtcggctcctggagcaacttcaagagattggtcaagagaaggagcaattaacccaggagctccaggaggcccgaaagtctgctgagaagcgcaaggcgatgctggacgagttagcaatggagacactccaggagaaatcgcagcacaaagaagaactgggagcagtccgcctgcgacatgagaaggaggttctcggggttcgggcaaggtatgagagggaactcagagagctacacgaggacaagaaaaggcaagaagaggagttacggggacagattcgcgaagagaaggctcgcactagggagctggaaacgctccaacagacggtggaggagcttcaggctcaggtccattccatggacggagctaaaggctggttcgagcgccgtttaaaagaggcagaagagtcactccaacagcagcaacaggaacaagaggaagcactgaagcagtgtcgggagcagcacgcggctgagttaaaaggcaaggaggaggagctccaggacgttagggaccagctcgaacaggcccaggaggaaagggactgtcacctgaagaccatttccagcttgaaacaggaagtcaaggataccgttgacgggcagagaattctggagaagaagggctccgcagctttgaaggatctgaaacggcagctacatttagaaaggaaaagagcagataaactgcaggaacgtctgcaggatattttgactaactccaagtccagatccggcctagaagagcttgtgctcagcgagatgaactccccaagccggacacagactggggacagtagctcaatctcttcattctcttatcgcgagatcctgcgcgagaaggagtcctccgccgtacctgcaaggtccctctccagttctcctcaggcccagcctcctagacctgctgaattgtctgacgaagaagttgccgaactgttccagcggttagcagagactcagcaagagaaatggatgctcgaggagaaggtcaagcacttggaggtgtcaagcgcctcgatggccgaggatctgtgtaggaagagcgcgatcattgagacctacgtgatggacagcaggatcgacgtgtctgttgcagcagggcacaccgacaggtcgggcttggggtctgttttgcgggaccttgttaagccgggagacgagaacttgagagaaatgaataagaagttgcagaacatgctggaggaacaacttacgaagaatatgcacttacacaaggacatggaagtgctaagtcaggagattgtgcggcttagcaaagaatgcgttggaccaccagaccccgaccttgaacccggagaaacaagctag

SEQ ID NO: 225261 - DNA, 2433 bp, synthetic construct
  misc_feature 1..2433: note = Description of Artificial Sequence: Synthetic coding sequence
  source 1..2433: mol_type = other DNA
atggcccaggcactgtctgaggaagagtttcagcggatgcaggcccagctcctcgaattgcgcaccaataattatcagttaagcgacgagctgcggaagaacggcgtcgaattgactagtctgcgccaaaaagtcgcctatttggacaaggagttttcaaaggctcaaaagtctcccggtccttgcttgccgttgcaagaggttgaggtgcttctctccgaaaatgagatgcttcaggccaaactgcactcacaagaagaggactttagactgcaaaatagcactttgatggctgaatttagcaaactctgtagccagatggagcagttggaacaggaaaaccagcaattgaaggaaggtgccgcaggcgcaggtgtcgcacaggcgggaccgttggtagacggggagcttttgcgcctgcaggccgagaatactgccctccagaagaacgtagccgctctccaggagcgctatggcaaggaagctggcaaattctccgccgtcagcgagggacagggggatcctcctggcggtcctgcccctacagtgctcgctccgatgcctctggcggaggtggagctgaaatgggagatggaaaaggaggagaaaagacttctttgggagcaattgcagggcctggagagttcaaagcaggctgagacctctagattgcaggaggagctcgcgaaactgtctgagaagctgaaaaagaagcaggagtctttctgtagacttcagaccgagaaagaaaccctgttcaatgactcaaggaacaaaattgaggagctccagcaacggaaagaagcagatcacaaagcacaactggctcggacacaaaaactccagcaggagttggaggctgctaaccaatccctggccgagcttagggaccagcggcagggtgagagactggaacatgcagccgctctcagggcccttcaagaccagatccagacagctaagactcaggaactcaacatgctcagagagcagacaacagggcttgctgccgagcttcagcagcagcaagccgagtacgaagatctaatgggacagaaggatgacttgaacagccagttacaagaatccctgcgggctaacagccgccttcttgaacagctgcaggaaattggccaggagaaagagcaactgacccaagaactccaggaagcgcgaaagagcgccgagaagcggaaagctatgctggatgagctggcgatggaaacacttcaggagaagtcacagcacaaagaggagctgggcgctgtccgattacgacacgaaaaagaagttctgggagtcagggcccgatacgaaagagagctaagagagctgcacgaggataagaaacggcaagaagaagagttgcgtgggcagattcgagaggagaaagctaggacccgggaactcgagaccttacaacagaccgtggaagaactccaagcccaggtccacagcatggacggagcgaagggctggttcgagagacggctgaaggaggccgaggaatccctccagcaacagcaacaggagcaggaggaagcactgaaacagtgtcgggagcagcacgccgctgaactgaaaggaaaagaagaggagctgcaggatgttagggaccagttggaacaagcccaggaagaaagggactgtcacttgaaaacgatttcctctcttaagcaagaggtgaaggacacagtggacggacaaaggatattggaaaaaaagggctcagccgctcttaaagacctcaagcgccagctacaccttgaacgcaaacgggcagacaaactgcaggagaggcttcaggacatacttacaaactctaagtctagatcaggcctggaggagctcgttctctccgagatgaatagcccatctaggacacaaaccggtgactcatcctccatttccagtttcagttacagggaaattctacgggagaaggaaagttcagcagttcctgcccgatctttaagttctagtcctcaagctcagccccctcgcccagcagagctgagtgatgaggaggtggcggaattgttccagcggttggccgagacccagcaggaaaaatggatgctcgaagagaaagtcaagcatctggaggtgagtagtgcctctatggccgaggacctgtgccgtaaatctgctatcatcgagacgtacgtgatggacagccggatcgatgtttcagtcgcggcaggccatactgataggagtggtttaggctcggtgttgagggatttagtgaagccgggtgacgagaacctccgcgagatgaacaagaagttacagaacatgctagaggaacaactgacaaagaacatgcacctgcacaaggatatggaggttctgtcacaggaaatagtgaggcttagcaaggaatgtgtgggtccacctgatcctgacctggagccaggggaaacctcttag

SEQ ID NO: 225262 - DNA, 1425 bp, synthetic construct
  misc_feature 1..1425: note = Description of Artificial Sequence: Synthetic coding sequence
  source 1..1425: mol_type = other DNA
atgaaacgagtactggtgctacttctggccgtggcttttggccatgcgctagagaggggaagggactatgagaagaataaagtatgtaaagaattttcccatttaggcaaagaagacttcacctccctgagcctcgtcttatactctagaaaatttccatcaggcacttttgaacaggtgtcccaactggtgaaggaggttgtcagcttgaccgaggcctgttgcgctgagggagccgatcccgattgctatgacacccgcacaagtgccctgtccgcaaaatcttgcgagtccaattcaccattccccgtacacccaggcacagcagaatgctgtactaaagaggggctcgaaaggaagctttgcatggcagctctgaaacaccagccccaggaattcccaacttacgtcgagcctacaaatgacgagatatgcgaagccttccgaaaagaccccaaagaatatgctaaccagttcatgtgggagtactcaacaaattacggacaggccccactcagcttactggtgtcatatacaaaatcttacctgtctatggtgggaagctgctgcacctctgcttccccaaccgtttgcttcctaaaggagagactgcagcttaagcacttatctcttcttaccactctaagcaatagggtgtgctcacagtacgctgcctatggggaaaaaaaatcccggctgtctaacctaataaagctggcccagaaagtgcccaccgccgatctcgaggacgtcctgcctttggctgaagatattacgaacattctgtcaaaatgctgcgagtcagcctctgaggattgtatggccaaagagttgccagaacatactgtaaaattgtgtgataatctgtctactaaaaactcgaagttcgaggattgctgtcaggagaagaccgcaatggatgtgtttgtctgtacatacttcatgccagcagcccagttacccgagcttcctgatgttgagctcccaactaataaggacgtctgcgatcctggcaacaccaaagtcatggacaagtacacattcgagctgtcccgcaggacgcacctaccggaggtctttctctccaaggtccttgaaccaaccctgaagtccctgggagaatgctgcgatgtagaggatagcaccacctgtttcaacgcaaaaggcccactcttaaaaaaggagctgtctagcttcatagacaaagggcaggagttgtgtgcagactactccgagaacacatttaccgaatataagaaaaagctagccgagcggttaaaagcgaagctcccagatgccacacccactgaactggcaaaacttgtgaataagcacagcgacttcgcctcgaattgctgctctataaacagcccgcctttatactgcgactccgagattgatgctgagcttaaaaacatcctgtag

SEQ ID NO: 225263 - DNA, 438 bp, synthetic construct
  misc_feature 1..438: note = Description of Artificial Sequence: Synthetic coding sequence
  source 1..438: mol_type = other DNA
atgaaaagagtgctggtgttgctgcttgctgtcgcctttgggcatgctctggaacggggtcgcgattacgaaaagaataaagtctgtaaggaattcagtcatttgggcaaagaagatttcactagtctgtcactggtcctttacagtcgcaagtttcccagtggcacgttcgaacaggtgagtcagctggtgaaggaggttgtttccttgactgaggcctgctgtgccgagggtgctgaccctgactgctatgacacccggacttcggcactgtctgctaagagctgcgagtcaaattctcccttcccagtccatccgggtactgccgagtgttgcaccaaggaaggattagaaagaaagctgtgtatggcagctttgaaacatcagccccaggagttcccaacctacgttgagcctaccaatgatgagatctgctag

SEQ ID NO: 225264 - DNA, 1482 bp, synthetic construct
  misc_feature 1..1482: note = Description of Artificial Sequence: Synthetic coding sequence
  source 1..1482: mol_type = other DNA
atgctatggtcctggagtgaggagagaggaggtgccgctcggttgtcaggacggaaaatgaaaagagtattggtcctgctcttggcagttgcgttcgggcatgcactggagagaggtcgcgactatgagaaaaacaaagtctgcaaagagttctcacacctaggcaaggaagatttcacgtccctcagcctggtcctttattctcgaaagttcccttccggcacgtttgagcaggtgtcacagctggtgaaggaggttgtttcgctcactgaagcttgctgcgccgaaggggctgacccagactgctatgacacacgaacctccgccctatccgctaagagttgcgaatccaattccccttttccagtgcatcctggaacggctgagtgttgtactaaggagggacttgagagaaagctctgtatggccgcactcaaacatcagccacaggaattccccacctacgtcgagccaacaaatgatgagatctgtgaggcctttcggaaggatcccaaggagtacgctaaccagttcatgtgggagtatagtacaaattacgggcaggcccctctatcactcctggtgagttatactaagtcctatcttagcatggttggatcctgttgcacctcggccagccccacagtgtgtttcctgaaggagcgcctccagctcaagcacctaagcttacttactaccctatcgaacagggtgtgctctcaatatgccgcatacggggagaagaagagccgcctgtccaatttgataaagctagcccagaaagttcccaccgccgatctggaagatgtccttcccctggctgaggatatcaccaatattctgtcaaagtgctgtgagtctgcgagcgaagactgtatggcaaaagagcttccggaacacactgtgaaactgtgcgacaaccttagcacaaaaaactcaaaattcgaggactgttgccaggagaagacggcaatggacgtttttgtgtgtacttactttatgcccgctgcacagttgcctgaactgcccgatgtggagctgccgacaaacaaagacgtctgcgacccgggaaatacaaaggtgatggacaaatatacctttgagctctcaaggcgcacacaccttcctgaggtgttcttgtccaaggtcctcgagcccaccttgaagagtctgggagaatgctgtgacgtggaggacagtaccacatgcttcaatgcgaaaggccctttactgaagaaagaactgtcttcctttattgacaagggacaggaactgtgtgcagactattctgagaacacattcacagagtataaaaaaaaattagcggaaaggttgaaggccaaacttcctgacgcaactcccaccgagcttgctaagctcgtgaataagcactccgatttcgcctctaactgttgctcaataaacagccctcccctttattgcgacagcgagatagatgctgagctgaagaatatcctatag

SEQ ID NO: 225265 - DNA, 669 bp, synthetic construct
  misc_feature 1..669: note = Description of Artificial Sequence: Synthetic coding sequence
  source 1..669: mol_type = other DNA
atggccgcaagtgtgaggcaggctcggagcttactcggtgttgccgctacactggcaccaggttctcgtgggtatagggccagaccccctcctagacgtaggccaggcccacgttggccagacccggaagacctgcttactccacgatggcagctggggccaagatatgccgctaaacaatttgcgaggtatggggctgcaagtggcgtggtcccaggcagtctctggccaagcccggaacaacttcgcgaattggaagccgaggagcgtgaatggtacccttcactggccacaatgcaagagtcccttagggttaaacagttggcagaggagcaaaagcggagggaacgcgaacagcatatcgcagagtgtatggccaagatgccccagatgatcgttaactggcagcaacagcagcgcgaaaattgggaaaaggcccaagctgacaaggagcgcagagcacggcttcaggccgaggctcaggagttactgggctaccaggtggacccccgatccgccagattccaggaactgcttcaggacctcgaaaaaaaggaaaggaagaggctgaaggaagaaaagcagaaacggaagaaagaggccagagccgctgccttagctgctgccgtagcccaggacccagccgcttccggtgcccctagcagttag

SEQ ID NO: 225266 - DNA, 1038 bp, synthetic construct
  misc_feature 1..1038: note = Description of Artificial Sequence: Synthetic coding sequence
  source 1..1038: mol_type = other DNA
atggtggctgcgttattaggtgggggaggcgaggctcgcggaggaacagtccccggtgcctggctttgtctcatggccctgcttcagctcctgggctcagctcccaggggatcgggcctcgctcatggccgaagactcatctgttggcaggcattactgcagtgccagggcgagcctgaatgttcctatgcttataaccagtatgcagaggcttgtgcacctgttctagcccagcatgggggaggagacgccccaggggcagctgccgcagctttccctgcctctgcggcttccttttccagtcggtggcgttgccctagccattgcatatctgctctaattcaattgaaccacaccaggagaggcccagctctggaagattgtgactgtgcccaggacgaaaattgcaagtcaactaaaagagccatagagccttgcttacccaggacttcaggtggcggtgcaggaggccctggtgccggaggtgttatgggctgcacagaagcccgtagaaggtgtgaccgggattccaggtgcaacttggccctgtccaggtacctcacatattgcggaaaagttttcaatgggcttcgctgtaccgatgagtgccggaccgtaatcgaagacatgctcgcaatgcccaaggccgcactgctaaacgattgcgtgtgtgatgggctggaacgcccaatctgtgaatccgtgaaagagaacatggcaaggctgtgttttggcgcagagttgggcaatggcccaggcagcagcggatcagacggtggactagacgattactacgacgaggactacgatgatgaacagcgcaccggcggagctggtggcgaacagccacttgacgatgatgatggggttccccatccgccaagaccaggatctggcgctgcagcatcgggcggacgcggagatcttccatacgggccaggtcgtagatctagcggcggtggaggtcggctggccccacgaggagcatggacccctttagcctcaattctgctcctcctgttgggacctttgttctag

SEQ ID NO: 225267 - DNA, 942 bp, synthetic construct
  misc_feature 1..942: note = Description of Artificial Sequence: Synthetic coding sequence
  source 1..942: mol_type = other DNA
atgtgcacagctttatccccaaaagtgcgatccggacccggtctgtctgacatgcatcagtattctcagtggctggcttctagacacgaggccaacctgttgccgatgaaggaagatctggccctgtggctgaccaacctgttggggaaggaaatcacagctgaaacctttatggaaaaactcgataatggtgcccttctctgtcagctggccgaaaccatgcaagaaaagttcaaagaatccatggacgccaacaagcccacaaagaacctgcccctcaagaagatcccttgtaaaacttctgccccatccggatcatttttcgccagagacaacaccgccaattttctgtcgtggtgtcgggatctgggcgtggatgagacctgtctgttcgagtctgaaggcttggttctgcataaacagcctagagaggtctgcctctgcctgctggaactcggcagaatcgcggctaggtacggcgttgagcctcctgggctcatcaagctggaaaaggagatcgaacaggaggaaacactctcagctccttctccctcaccaagcccaagctctaaatcttccggcaaaaagagcacaggaaatctgcttgatgacgcagttaaacggatctcagaagaccctccttgcaagtgtcccaataaattctgtgtggaacggctttctcaaggtcggtaccgagtgggcgagaaaatcctcttcatcaggatgctacacaacaaacatgtgatggtgagagtcggagggggatgggagacattcgccggttacttgctcaagcacgacccttgccggatgctacaaattagtcgcgtggatgggaagacctccccaatccagtctaagtccccaaccctgaaggacatgaatcctgataactatttagtggtcagtgccagttacaaagccaaaaaggaaatcaagtag

SEQ ID NO: 225268 - DNA, 942 bp, synthetic construct
  misc_feature 1..942: note = Description of Artificial Sequence: Synthetic coding sequence
  source 1..942: mol_type = other DNA
atgtgcacagctttgtctcctaaagtgcgcagtggccctggactttcagatatgcatcagtactctcagtggctcgcgtctcgtcatgaagcaaatttactgcctatgaaggaggatttagccctatggctgaccaatctgctcggcaaggagatcaccgccgagacattcatggaaaaactggacaatggggcactgctgtgccagctggctgagactatgcaggagaaattcaaagagtctatggatgcaaacaagcctaccaaaaaccttccattgaagaagatcccatgcaagacatccgcaccatccgggtcattcttcgccagagataacacagcaaatttcctctcttggtgtcgtgatctgggggtggacgagacttgcctatttgagagcgagggtctggtgcttcacaagcagcctagagaagtctgcctatgcttgctggaattggggaggatcgccgctcgctacggggtggagccccctggcctaatcaagcttgaaaaagaaattgagcaggaggagacactgtcagcgccatctcccagcccgtctccttcttcaaagagcagtggtaaaaagtctactggcaatctgctggacgacgctgttaaacgcatcagcgaggaccctccgtgcaagtgtccaaacaagttttgtgtagaacgcctgtcccagggcagatatagggttggggagaagatcctcttcattcggatgctgcacaataagcatgtgatggttcgcgtcggagggggttgggagactttcgctggctacttgctcaaacatgatccctgtagaatgctgcaaattagccgggtcgacgggaagaccagtcccatccaatcaaagtccccaacccttaaggatatgaatcctgataactacctcgtcgtgtcagcctcgtataaggctaagaaagaaattaagtag

SEQ ID NO: 225269 - DNA, 942 bp, synthetic construct
  misc_feature 1..942: note = Description of Artificial Sequence: Synthetic coding sequence
  source 1..942: mol_type = other DNA
atgtgtaccgcactctcgcccaaggtgcggtccggccctgggctgagcgacatgcaccagtatagtcagtggctggccagtcggcacgaggctaatctgcttccaatgaaggaggatctggccttgtggctgacaaacttgctcggtaaagaaataacagccgagacatttatggagaaattagataacggggctttgctctgtcagctggccgaaacgatgcaggagaaattcaaagaaagtatggatgcgaacaaaccaacaaaaaatctaccattgaagaagatcccctgtaagaccagcgccccatccggtagcttttttgcacgggacaataccgctaatttcctcagctggtgtcgggatctgggtgttgacgaaacttgcctttttgaatcggagggactggtattgcacaagcagcccagggaggtctgcctgtgccttcttgagctcggtcgcatcgcagcccgttacggcgtggagccgcctggactcattaagctagaaaaagagatcgagcaggaggaaactctcagtgctccatcaccgtcgccgagtccatcaagtaaatcgtcaggtaagaagagtaccggcaatctgttggatgacgcagtcaagcggatttctgaagacccaccgtgtaagtgtccaaacaagttctgcgtcgaaagactttctcagggtagataccgcgtgggtgagaaaattctgttcattcggatgctgcacaacaagcatgtcatggtgcgggtgggaggaggatgggagacattcgcaggttatctgcttaagcacgatccttgcagaatgcttcagatctcacgggtggacgggaagacaagcccgattcagtctaagtcgcctaccttaaaagacatgaacccagataactatctcgtggtctctgcctcatacaaagctaagaaagagatcaagtag

SEQ ID NO: 225270 - DNA, 546 bp, synthetic construct
  misc_feature 1..546: note = Description of Artificial Sequence: Synthetic coding sequence
  source 1..546: mol_type = other DNA
atgtgcaccgccctctccccgaaagtgcgctctggtccgggtcttagcgacatgcaccagtattctcaatggctggctagcagacatgaggccaatctcctgcctatgaaggaggaccttgcgctgtggttgacgaatcttctgggaaaagagatcaccgctgagacatttatggaaaaacttgataatggagcattgctctgtcaactggcagaaacaatgcaggaaaagttcaaggagagcatggatgcaaataagcctactaaaaaccttcccctgaagaagattccgtgcaaaacgagtgctccctctggctctttttttgcacgcgacaatacagcgaactttctcagctggtgcagagatctcggggtagatgaaacctgcttgttcgaaagtgaaggcctcgttcttcacaaacagcctcgcgaagtatgcctgtgtctgttggagctcggacgaattgcagcgaggtacggagtcgaaccgccagggttgataaagctggagaaggagatcgagcaggaggagactctcagcgcttag

SEQ ID NO: 225271 - DNA, 618 bp, synthetic construct
  misc_feature 1..618: note = Description of Artificial Sequence: Synthetic coding sequence
  source 1..618: mol_type = other DNA
atgtgcactgcgctcagccctaaagtcagatccggccctggcctctcggatatgcaccagtattctcagtggctcgccagtcgccatgaggctaacctgctccccatgaaagaggacctggccttgtggctcacgaatttactcggaaaggagatcactgctgagactttcatggagaaattggataacggggcactgctgtgccagttggctgaaacgatgcaggagaagtttaaagaatcaatggatgccaataaaccgaccaagaacctccctctcaagaaaatcccttgcaagacctctgcaccctccggatccttcttcgcaagggataacaccgccaatttcttgtcttggtgcagagaccttggtgtcgacgagacatgcctgttcgagtctgaggggctggtgctgcacaagcagccgagagaggtgtgcctgtgtctgctcgaactaggcagaattgcagcaaggtacggcgtggagccgccaggactgattaaactggagaaggaaatcgagcaagaggaaactctgtctgcgccatccccttctcccagccctagcagtaagtcgtccggcaaaaagagtactggtaatttgcttgacgacgcctag

SEQ ID NO: 225272 - DNA, 411 bp, synthetic construct
  misc_feature 1..411: note = Description of Artificial Sequence: Synthetic coding sequence
  source 1..411: mol_type = other DNA
atgtgcaccgccctgtccccaaaggtgaggagcgggcctggcctgtcggacatgcaccagtactcgcaatggctggcctctcgccacgaagccaacctgctgcctatgaaagaggatctggccctttggctgaccaatctcctaggtaaagagatcactgccgagacatttatggagaaacttgacaatggggctctgctttgtcagctggccgagaccatgcaggagaagtttaaggaatcgatggatgctaataagcctacgaaaaatctccctcttaaaaaaattccttgtaagacctccgcgccttccggttcatttttcgccagggataatacagccaacttcctgtcgtggtgccgagaccttggcgttgatgagacatgtctctttgagtctgagggtctttag

SEQ ID NO: 225273 - DNA, 468 bp, synthetic construct
  misc_feature 1..468: note = Description of Artificial Sequence: Synthetic coding sequence
  source 1..468: mol_type = other DNA
atgtgcaccgcgctgtctccaaaagtgcgcagtggccctggcctaagcgacatgcaccagtattctcagtggttagctagccgccatgaggccaacctactaccaatgaaggaggatctggccttgtggctcaccaatcttctcgggaaggaaatcaccgcggagaccttcatggagaagctggacaacggggcattgttgtgccagcttgccgaaacgatgcaagagaagttcaaggagtcaatggatgccaataaacccactaaaaaccttcccctgaaaaaaatcccctgcaaaacaagtgcgccatcaggctcattttttgctcgcgacaatacagctaactttctgagctggtgtcgggatcttggggtggacgaaacctgtttattcgaaagtgaagggctcgtccttcacaagcagcctcgagaagtatgtctgtgcctgctggaactgggtcgaatttag

SEQ ID NO: 225274 - DNA, 2043 bp, synthetic construct
  misc_feature 1..2043: note = Description of Artificial Sequence: Synthetic coding sequence
  source 1..2043: mol_type = other DNA
atggctgatcccgtggctggtattgcaggtagtgctgcaaaaagcgtcagacctttcagatcctctgaggcctacgtcgaggccatgaaggaggacctggccgaatggctcaatgctctttatggcctcgggctgcctggcggtggtgacggcttcctgactggtcttgccacaggtaccactctctgccagcatgctaacgcggtcacagaggctgctcgagccctcgctgctgccagacctgcccgaggcgttgctttccaagcccattctgtggtgcctggcagtttcatggcccgagacaacgttgccacattcatcgggtggtgccgagtagaactaggtgtgccagaagttctcatgttcgagacagaagaccttgtgctccgaaagaatgaaaaatccgtggtactgtgcttgctggaggtggcaagaagaggcgctcggttaggtctcctagcaccccgactggtccagttcgaacaggagatcgaacgggagcttcgcgcagccccacccgctcctaatgcgcctgcagctggagaggacactaccgagacggcacccgctccaggaaccccggctcgcggtccacgcatgacaccttctgatttgcgtaacctggatgaactggttcgggagattctggggcgttgcacctgtcccgaccagtttccaatgatcaaggtgagcgagggaaaatatagggttggcgactcttcactccttattttcgtcagggtcttacgaagccatgtcatggtgcgggtggggggagggtgggatacccttgaacattatctggacaaacacgacccttgtcgatgtagctcaaccgcacatcgccctccacagcctcgagtctgcacgttcagcccccagcgcgttagtccgaccactagtccaagacccgcaagtcctgtcccagggtcagagaggcggggatctaggcccgaaatgacccccgtgagcctgcgttctacaaaagaaggcccagaaacaccacctagaccacgggaccagttaccaccgcaccccaggtctaggagatattctggagactctgattcctcagccagctctgctcagagtggaccccttggaaccaggtctgacgacactggaactgggccacggagagaacgaccatcaaggcgccttaccaccggcactccagcttccccccgacgaccccctctccgtagccagtcacgtgatcgtctcgaccgaggacgaccgagaggagcccctgggggtaggggggctcagttgagcgttccctctccagccagacgggcacgctcacaatcaagggaagaacaagccgtgctactggtacgtcgcgatagggacggacagcattcctgggtaccaaggggtagaggcagtgggggttcagggcgatcaaccccccagactccaagagccaggtcccctgcagccccaagactgtcccgggtttcctcaccttcccccgagcttggtacaacacccgcatcaatctttcgcacacctctccagctggatcctcagcaggagcagcagctattcagacggttggaggaagaattcctggctaacgcccgagccctggaggcggtggcttctgtgacaccaacaggacccgcacctgatccagctagggccccagaccctcccgcacccgatagtgcttattgcagttcgtctagttccagcagttctttgtctgtgctgggcggtaaatgcggtcagcccggagatagcggccgtacagccaatgggctccccggaccacgctcccaggctctgtctagctccagcgacgagggatctccttgtccaggtatgggcggacccctggacgcgccaggatctccactggcttgcaccgaaccttcaaggacgtgggctagaggtagaatggatacccagcccgaccgaaagccttctagaatcccaaccccacgcggtcccagaagaccatctggcccagctgagctgggaacgtggcatgcacttcattctgtaaccccacgagccgaacctgacagctggatgtag

SEQ ID NO: 225275 - DNA, 1014 bp, synthetic construct
  misc_feature 1..1014: note = Description of Artificial Sequence: Synthetic coding sequence
  source 1..1014: mol_type = other DNA
atggctgaccctgtcgcaggcatagcagggagcgccgcaaaaagtgtgaggccctttcggtcatccgaggcctatgttgaagcgatgaaagaggacctcgccgaatggttaaatgcattgtatggcctgggtctgccaggcggaggtgacggcttcctgacagggctggctactggaacgaccctgtgtcagcatgcaaacgccgtaaccgaggctgcaagagccttggccgcagcgagacctgcccgtggggtggcgttccaggcacattctgttgtgcctggttccttcatggcacgggacaatgttgcaacttttatcggctggtgtcgtgttgaattgggagtgccggaagtcctcatgttcgagaccgaggatctggtactaagaaagaatgagaaatctgtggtgttgtgcctcctcgaagtcgcccgacggggagcgcgacttggactgctggcccctcggttggtgcagtttgagcaggagattgagagggaattacgagccgcaccacccgcaccgaacgcacccgctgccggagaagatacaactgagaccgctcctgcccctggcactcccgctcgtgggcctcgaatgacaccgtctgacttgcggaatctggacgagcttgttcgggaaatcctagggagatgtacttgtcccgaccagtttccgatgattaaggttagcgaagggaagtatagagtaggtgactccagtctcctgatcttcgtcagagtcctgagatcccatgtaatggttcgtgtgggaggaggctgggacacacttgagcactacttagataagcatgacccttgtcgctgcagctctacggctcatcgccctccacagcccagggtgtgcacattctccccccagagggtgtcaccaaccacttctccaagaccagcttcccccgtacctggttccgagaggagaggctcccgcccagagatgacccccgtctcactccggtccactaaagagggcccagaaacgccccctagatag

SEQ ID NO: 225276 - DNA, 990 bp, synthetic construct
  misc_feature 1..990: note = Description of Artificial Sequence: Synthetic coding sequence
  source 1..990: mol_type = other DNA
atggctgatcctgtggctggcatcgcagggtcagctgccaagtctgtgaggccattccggagttctgaggcgtatgtggaggctatgaaagaagacctggccgaatggttaaatgcgttgtacggcctcgggcttcccggaggcggagacggtttcctgacgggccttgctaccgggacaacactctgccagcatgcaaatgctgtcaccgaggcagctcgcgcactggcagctgcgagacctgcccgaggggtggcgttccaagctcactcagttgttcctggatctttcatggcccgtgataacgtggcaacgtttattggttggtgtcgggtggaacttggcgtccctgaagtgctgatgtttgagaccgaagatctggtactccggaagaacgagaaaagcgttgttctatgccttttagaagtggcacggagaggagcacggctaggtctacttgccccacgactggtgcaattcgagcaggagattgaacgcgaactcagagcagccccacctgcgcctaatgccccagccgctggtgaggatactaccgagactgctcccgctcctggaacacccgcaaggggccctcgcatgactcctagcgatctcagaaatctcgatgagttagtcagagagattctggggaggtgcacctgccccgaccaattcccaatgattaaagtcagtgagggaaaatatagagtgggggattcttcattactcatctttgtccgcgttttgcggtcccatgtgatggtacgggtgggtggaggctgggatacactggaacattacttggacaagcatgatccctgtaggtgctcttctaccggccctggaatatcatgcccacccatccccgcacccgctgccacaccagggactgtgaccccccagccgcctccacccagggctgccccactagtgccggctgttatgacccaggcgctggctccgggaggctcagatccggctggaggctag

SEQ ID NO: 225277 - DNA, 1614 bp, synthetic construct
  misc_feature 1..1614: note = Description of Artificial Sequence: Synthetic coding sequence
  source 1..1614: mol_type = other DNA
atggcagacccagttgcagggatcgctggatcagcagccaaatccgtcagaccattcagatcgtccgaagcctacgtagaagccatgaaggaggatctggccgaatggctaaacgctttgtacggattaggccttcctgggggaggtgacgggttcctgaccggactggccactggcactacactatgccagcatgctaacgccgttactgaggccgcacgtgctctggcggcagcgagacctgcccgtggcgttgccttccaggcacattcagttgtccctggctcttttatggcaagggataacgtcgcgacattcattggctggtgtcgggtcgagctgggggtgcccgaggtgctaatgttcgagacagaagacctcgttctcagaaagaatgagaagagcgttgttctctgcttacttgaagtggccagaagaggagcccgactcgggcttctggccccacggcttgtgcagttcgaacaagagatcgagagggaattgcgagctgcaccgccagcgcctaacgcccctgctgccggtgaggatacaacagaaacagctcctgctcctggaactcccgcacgaggtcccagaatgactccttctgatctgcggaatttggacgaactggttagggagatcctggggagatgcacttgtcctgatcagtttcccatgattaaagtgtcggaaggtaagtacagggtgggggattccagcttgctcatatttgtccgtgtgctacggagtcatgtgatggtgcgggtcggaggcggttgggacacgctcgaacactaccttgataagcatgatccctgccgctgttctagcaccgctcataggccacctcagccaagggtctgtactttttctcctcaacgggtgtcccccaccactagtccacgccctgctagccctgtacctggaagcgagaggaggggaagccgaccagagatgaccccagtctccctgaggtctaccaaggagggcccagaaacaccccctagaccaagggaccagctgcctccacatcccagaagccggaggtactctggtgacagcgactcgtccgcctcctctgcccagtctggcccactgggcaccagaagtgacgacaccggaaccggccctcgcagggaacgcccatcccggaggttaacgaccggtacccctgccagcccaaggcggccacctgcgtgcgctgcctccccagagaccggttggatcgctgccggtcccggtgggcctcaggaggccggagaaccaagctgtcggtccccagctctgccaggtggaccaggtgctcgcgctgccaggtcacggttatgctgtctgtgtgctggaattgagacagggtccacccacggatgccagggagccggtgcagtgggggctcgggcaggagcacctcctcggttgcccgtgccagccgcactccagcacccaggattcccaggttccccagcacctgtccagagctgggcaccccaccggccagcgtccagtgcccatccctgctccagcacccgctccagatctagctcttgcagtggcgcatggaaaaggagctcctggcctatgcctgggcctctgagattattgctggcatag

SEQ ID NO: 225278 - DNA, 1614 bp, synthetic construct
  misc_feature 1..1614: note = Description of Artificial Sequence: Synthetic coding sequence
  source 1..1614: mol_type = other DNA
atggccgaccctgtggccggtattgcgggaagcgcagctaagtccgtgagaccgttcagatcatcagaggcgtatgtcgaagccatgaaagaggacctggccgaatggctgaacgccttatacggactcggcctgcccggaggaggcgatggctttcttaccgggcttgcaactggtacgactctgtgtcagcacgcgaacgctgtaactgaggcagcacgtgccctggcagccgctagacctgccagaggcgttgcgttccaggctcattccgtggtgccgggaagctttatggctagagataatgtggccaccttcattggttggtgtcgagtcgagttaggggtacccgaagtgcttatgttcgagacagaggacctggtgttgcggaagaacgaaaagtcagtggtgctctgcctgctggaagttgctcgcaggggtgcaaggttggggcttctggccccacgtcttgttcaatttgagcaagagattgaacgtgaattgcgcgcagctccaccagccccaaatgcacctgccgcaggagaagataccacagagaccgcccctgccccaggcactccagccagagggccaaggatgaccccttcggacctaaggaatctggatgagttggtcagagagattctcggacgctgcacgtgtccagaccaatttccaatgatcaaggtttccgaagggaagtatcgcgtgggtgattcatcgctcttgattttcgtccgggtgctacgatcacatgtcatggtgagggtcggcggaggatgggacaccctagagcactatctagataagcacgatccttgtagatgctctagcactgctcatagaccaccacagcccagggtctgtacctttagtccccagagggtgtcacctacaacctctcccagaccagcctctcccgtgcctggttctgaaaggagaggatcccggccagagatgacgccagtgtctctccggagtacaaaagaagggcctgaaacccccccacggcctcgggatcaattgcccccacacccccgatcacgccgatactccggcgattctgattcgagcgcctccagcgcacagtccggacccctcggaacgcgcagcgatgacacaggcacaggccctaggagagagcgacccagccgcagactgaccactggaacccccgcaagccctcgacgtccccctgcttgtgcagcttctcctgagactggatggatcgctgctggtccaggcggaccacaggaagcaggggaaccctcctgcaggtcaccagcccttcctggcggacccggtgcaagggccgctcgttcgcgactgtgctgtctctgcgccggtatcgagacgggttccacccatggatgccagggcgcaggagctgtgggagccagggccggtgcacctccacggctgcctgtgccggcagcgctccagcatcctggctttcccggatcgccggcacccgtccagagctgggccccacataggcctgcatcctccgcacatccttgctcgtccacaagaagtagaagcagcagctgcagtggtgcctggaagcgttcttcatggccgatgcctgggccattgcgccttctcctcgcatag

SEQ ID NO: 225279 - DNA, 1614 bp, synthetic construct
  misc_feature 1..1614: note = Description of Artificial Sequence: Synthetic coding sequence
  source 1..1614: mol_type = other DNA
atggctgatcctgtcgccggaatagcaggatccgccgctaagtccgttaggccgttcaggagctctgaggcttacgtagaagccatgaaggaggacctcgccgaatggcttaacgccctgtacggactcggattgcccggaggaggggatgggttcctgaccggtctcgccaccgggaccaccctatgtcagcacgctaacgccgttacggaggctgccagggctctcgccgctgcacggcctgctcgaggagtagcctttcaggcccattctgtagtccctggttccttcatggctcgggataatgtggcaacctttattggctggtgcagagtggagttgggtgttcccgaggtgctgatgttcgagaccgaggatttggtactgcggaaaaacgagaagagtgtggtcttatgtctgcttgaagttgccagacgaggcgctagattgggcctgctcgcaccacgccttgtacaatttgagcaggagatcgaaagagaactcagggcagctcctccagctcctaatgccccagctgctggagaagacaccactgaaactgctccagcgccagggactcccgctcggggacctcggatgactcccagcgatctacgtaatctggatgaactggtgagggaaatcctggggaggtgtacatgccccgatcagtttccaatgataaaggtgtccgaggggaagtatagagtgggcgacagctcactactgattttcgtccgagtgctgcgtagtcacgtcatggtgcgcgttggaggcggttgggataccctcgagcactacctggataagcacgacccttgtcggtgctctagcaccgcccaccgtccccctcaaccacgtgtgtgtactttttcaccccagagggtgagtcctacaacaagcccccgaccagcgtcgccggtgccagggtcggaaaggcgcggatcaaggcccgagatgacccctgtatctctgaggtcaacgaaagagggacccgaaacacctccaagacctagagaccagctgccccctcatcctagaagccgaagatacagtggggactctgattcctccgcgtcaagcgcccagtctggccctctcgggacacgctctgatgatactggcaccggcccacgcagggagaggccaagcaggaggctgacaacgggcacccccgcttcacccagaaggccccctgcttgtgccgctagccctgagactggctggattgccgcaggcccaggcggaccgcaggaagccggtgagcccagttgtcgatcacctgccctgcctggcggtccgggagcccgagctgctagatcccggttgtgttgcctgtgtgcaggcattgaaaccgggtccacacacggttgccagggggctggcgcagtgggggctcgcgctggggctccacccagactcccagtgcctgctgctctacagcaccccggatttccgggtagtccagctcctgtgcagagttgggccccacacagacccgcaagctccgcacacccctgctctagtactcgctcaaggtcaagctcatgctccggggcttggaagcgctccagctggcccatgcccggacccctgcggctcctgctggcatag

SEQ ID NO: 225280 - DNA, 417 bp, synthetic construct
  misc_feature 1..417: note = Description of Artificial Sequence: Synthetic coding sequence
  source 1..417: mol_type = other DNA
atggcagatcctgtggcgggtattgcgggttctgccgctaagagcgtgcgaccctttcggtccagtgaagcttatgttgaagccatgaaggaagacctggccgaatggctaaatgcgctctacggactgggcctaccagggggaggagacggctttctcacaggcttggctactggaacaaccttatgtcagcacgctaatgccgtgaccgaggcagccagagcactcgccgctgctaggccagctcggggagttgcctttcaggcacactctgtagtgcccggttccttcatggcacgggataacgtggctaccttcattggttggtgtagagtcgagctgggcgtcccagaagttttgatgtttgaaactgaggatctggtcctgcggaagaacgagaaatcagtcgttctgtag

SEQ ID NO: 225281 - DNA, 432 bp, synthetic construct
  misc_feature 1..432: note = Description of Artificial Sequence: Synthetic coding sequence
  source 1..432: mol_type = other DNA
atggcagacccagtggccggtattgcaggttcagctgccaagtccgtacgaccctttaggtcctcggaggcctacgttgaggccatgaaggaggacctggccgagtggttaaacgctctctacggcctgggacttccaggcggaggcgacggattcttgacaggcttggcgaccgggactacactgtgtcagcacgccaacgctgtcaccgaggcagcaagagccctcgcagccgcacgcccagctaggggagtcgcatttcaggcgcactctgtagtgcctggatccttcatggcccgagacaacgttgccacatttattggctggtgtcgtgtcgagcttggcgtgcctgaagtattgatgtttgagactgaggatctggtgttaaggaaaaacgagaagagcgttgtgttatgcctgcttgaggtctag

SEQ ID NO: 225282 - DNA, 1614 bp, synthetic construct
  misc_feature 1..1614: note = Description of Artificial Sequence: Synthetic coding sequence
  source 1..1614: mol_type = other DNA
atggcagaccctgtggctggaatcgctggcagcgccgctaaatcggttcgacctttccgaagtagcgaagcctacgttgaagctatgaaggaggatttggctgaatggttgaacgccctctatggcttgggactcccaggtggaggggatggctttttgaccggactggcgactggcaccacactgtgtcagcacgctaatgcagtcaccgaggcagctagggcactggccgcagctcgcccagccagaggcgtggcattccaggcgcatagtgtagtcccagggagttttatggccagagacaatgtggcaaccttcatcggctggtgcagggtagagctgggtgtgcctgaggtgctaatgtttgagaccgaagacctcgtactccgaaaaaacgagaagtccgttgtattatgcctacttgaggtcgctagaagaggtgcaaggctcggcctgctggcacctcgtctagtgcagtttgaacaggagatcgaaagggagcttagagccgcaccgccagccccaaacgcccctgctgctggcgaggacactacagagaccgcgccagctccgggaactccggctcgtggtccaaggatgacaccctccgacctacgcaacctggacgagctggttcgtgagatcttgggcagatgcacatgtccggatcaatttccaatgatcaaggtgtcagagggcaagtatcgcgtgggcgattctagcttacttatatttgtacgtgtactgcggtcacacgtgatggtgagagtgggaggtggctgggataccctagaacattatctggataaacacgatccctgtcggtgctcatccacagcccatcggccaccccaaccaagggtttgcacctttagccctcaacgagtgtcgcctaccaccagtccacgaccagccagccctgtgccgggaagcgagaggcgaggctctaggccagagatgacaccggtctctttgagatcaacaaaagaagggcctgagactcccccaaggcctcgagaccagctccctcctcaccccaggagcagaagatatagcggggacagtgactcctccgctagttccgcccagtctggccctcttggtacgagatccgatgacacaggtacaggccctcgcagggagcggccatcgagaagactgactaccggcacccctgcgtcacctagacgcccacccgcttgcgctgcatcccctgagaccggatggattgccgctggcccaggcggaccccaggaggccggagaaccctcgtgccggagccccgcacttcctggcggtcccggtgctcgcgctgctagaagtcgcctgtgttgtctatgcgccggtatcgagacaggctccacccacgggtgccagggagcaggagctgtcggcgcaagggcgggagccccacctcggctccctgttcctgcagccttgcaacacccaggatttcccggatctcccgcacccgttcaatcctgggctccgcaccgaccagcttccagcgcccatccctgttcttcaactcggagcaggagctcttcctgtagcggtgcctggaagcgctccagttggccaatgccaggcccactccggttgctgcttgcttag

SEQ ID NO: 225283 - DNA, 2037 bp, synthetic construct
  misc_feature 1..2037: note = Description of Artificial Sequence: Synthetic coding sequence
  source 1..2037: mol_type = other DNA
atggctcccagcctcagtccagggcctgcagctctgcgaagagcaccccagctgctgctgctgttactggcagccgaatgcgcgctggcagctctcctgccagctcgtgaagcaacccagttccttaggccccgacagcggcgagctttccaggttttcgaggaggctaaacagggacacctggagagagaatgtgttgaggaactatgtagcagagaggaggccagagaggtttttgaaaatgatcccgagacggattacttttatccacggtatttagattgcatcaataaatacggaagcccatataccaagaatagtggatttgctacatgcgtgcagaacctgccggaccagtgcacgcccaatccctgcgatcggaaggggacgcaggcgtgtcaggatctaatgggtaattttttctgcctttgcaaagctggctgggggggaagactctgtgacaaggatgttaatgaatgtagtcaggaaaacggaggttgtctgcagatctgtcacaataagcccggaagcttccattgttcatgccacagtggttttgagctctcctccgacggtcgcacatgtcaggatatcgacgaatgtgcggacagtgaggcctgcggcgaagcccgttgtaaaaatttgccgggatcttactcttgtctttgtgacgagggctttgcgtatagctcacaggagaaggcctgccgagatgtagacgaatgtttgcaggggaggtgcgaacaggtatgtgttaattctcccggttcatatacatgtcactgcgacggcagagggggactcaagctgagtcaggatatggatacctgcgaggacatacttccgtgcgtgcccttctcagtggcaaaatccgtgaagtccctgtatctaggtcgcatgttctctggcacaccggtgattcgtctgcgatttaaacggctacagccgaccaggttggtcgcagagttcgatttccggaccttcgatccagaaggtattctgctcttcgcgggtggacaccaagacagcacatggatcgtgttagctttacgcgcagggaggctggagctgcagctccgatacaatggggtcggtcgggtcacctcaagtggtcctgtgattaatcacggcatgtggcaaacaatttcggtggaggagttagccagaaacctggtcatcaaggtcaacagagatgccgtcatgaagatcgccgttgcgggagacctctttcagccagaaagggggctataccacctgaacctgaccgtaggcggaatccctttccatgagaaagacttggtgcagccaatcaatccgaggttggatggttgtatgagatcttggaattggttgaacggtgaagataccaccattcaggagacagtgaaggtgaatactagaatgcagtgtttttctgtgaccgagcgtggctctttctaccctgggtccggcttcgcattctactctctcgactatatgcggacccccctggacgtcgggactgagtcaacttgggaagtggaggtagtcgcgcacattcgaccagctgctgacacaggagttttgtttgccctgtgggcacccgacctgagggccgtcccactctccgtggccctcgtcgattatcactccacaaagaaactcaagaagcagctggtagtactggcagtagagcacactgctctggcccttatggaaattaaagtctgcgatggacaggagcacgtggtcactgtatctctgagagacggagaggctacgctcgaagtcgacggcacaagaggtcagtccgaggtgtccgccgctcagctccaggagcggctcgccgtcctggagcgtcaccttagatcacccgttctgaccttcgcaggtggactgcctgatgtgcctgtgacttcggcccctgtgactgcattttatcgcggttgtatgaccctcgaagtcaatcggcgactgctggaccttgacgaagcagcatacaagcattccgacatcaccgctcacagttgtcctcccgtggagcccgctgcggcatag

SEQ ID NO: 225284 - DNA, 1875 bp, synthetic construct
  misc_feature 1..1875: note = Description of Artificial Sequence: Synthetic coding sequence
  source 1..1875: mol_type = other DNA
atgtgtatgtgccaggctagccccccacccgcagcgctggccggttgtcttcttagctcctgtgtgcaaccagcgcgagagcacggcggagcctttagtaaggccgaatggctgtccaattgcattaataagtacgggtccccttatacaaagaatagtggctttgccacatgtgtccaaaacttgccggatcagtgtacccctaatccatgcgacaggaaagggacacaggcctgccaagacttgatgggcaatttcttctgtctgtgcaaggccggttggggaggcaggctgtgcgataaggatgtgaatgaatgttcacaagagaacggcggatgtctccagatctgccataataaacctggctcttttcactgcagttgtcactccggcttcgaactcagctccgacggacggacttgccaagacattgatgaatgtgcggatagcgaggcatgcggcgaagctcggtgtaagaatttacccggatcctattcttgcctatgtgatgagggttttgcctacagctctcaggagaaagcatgtcgagacgtggatgaatgcctccaaggtagatgtgagcaggtgtgtgtgaacagcccgggatcttacacttgccattgtgacggcagaggaggcctaaaactttcccaggatatggatacatgtgaggacatactgccatgcgttccatttagtgtagccaaatctgtgaaatcactttatctcggcaggatgttttctggaactccagtgatcaggctgagatttaaacgtctacagcccacgagacttgtggccgaatttgatttccgaacctttgaccccgaaggaattctgctattcgccggagggcaccaagacagtacttggattgtgcttgcgttacgggctggtaggttggagctgcagctccggtataacggagtcggacgagtaacctcttccgggcctgtcatcaatcatggcatgtggcaaactatttctgtggaggagcttgctagaaacctggtgattaaggtgaatcgggacgctgtaatgaagattgctgtcgccggtgatttattccagcccgagcggggattatatcacttaaacttaaccgttggcggaattcctttccacgaaaaagaccttgttcagcctataaatcccaggcttgacggctgtatgagaagctggaattggttgaatggggaggatacaaccattcaggagactgtcaaggtaaatacccggatgcagtgcttcagtgtcacagagcgagggtctttttatccgggaagcggattcgccttctattcccttgactatatgaggaccccgctagacgttggaactgagagcacgtgggaggtcgaggtggtggcacacatacggccagctgctgatacaggtgtgctctttgccttgtgggctcctgaccttcgggctgtgcctctaagtgtcgcactcgtagactaccatagcacaaaaaaattgaagaagcagctggtggttttagctgttgagcacactgcactggcattgatggaaatcaaagtttgtgacggtcaggaacacgttgtgactgtgagtctgcgggacggagaggctactctggaagtcgatggtactcgtgggcaaagcgaggtgtccgcagcgcagctacaggagagacttgcagtgttggaaaggcatctccgttcaccagtcctcacctttgctggcggactgccggatgtcccagtgacatccgcccctgttaccgctttctatcggggatgcatgactttggaagtaaatcggcgtttgctggatctggacgaagccgcatataaacacagtgacatcaccgcccatagctgcccaccggtggagcccgcagcagcctag

SEQ ID NO: 225285 - DNA, 2166 bp, synthetic construct
  misc_feature 1..2166: note = Description of Artificial Sequence: Synthetic coding sequence
  source 1..2166: mol_type = other DNA
atggccccaagtctctcacctggcccagccgctttgaggagggcaccgcagctcctcttgctactcctcgcagccgagtgtgcgctggcagcattgttgccagctagagaagccacgcaattcctgagaccccgacagaggcgtgcatttcaggtctttgaagaagccaagcaaggccatttggagagagagtgtgtggaggagctgtgtagccgtgaggaggccagagaggtgtttgaaaacgacccggaaacagattacttctaccccagatatcttgactgcatcaataagtacggttccccttacacaaagaactccggatttgcgacttgcgtccagaacctgcccgaccagtgtacaccaaacccatgcgaccggaaggggacacaagcctgccaggaccttatggggaattttttctgtctctgcaaagcaggatggggcggtcgactgtgtgacaaagatgtcaatgaatgttcacaggaaaatgggggatgcctgcagatttgtcacaataagcctggcagctttcattgttcgtgccacagcggattcgagctttcgagtgacggtcggacctgccaggatatagatgagtgtgctgactcagaagcttgtggcgaggcacgctgcaaaaatctgcccggttcctattcctgtctttgcgatgaaggttttgcttactcatcccaagaaaaggcctgccgagacgttgacgagtgcctccagggcagatgcgagcaagtgtgcgtgaacagccctgggtcctacacctgtcactgtgatggcagagggggtttaaagttgagccaggatatggacacttgtgagctggaggcagggtggccactacctcggcacagacgcgactctggcccagccgctcgaccgggacgcggagcacaggggtcgcggtctgagggtcatatcccagaccgacgcggaccaaggccttggcaggatattctcccctgcgtgccgttctccgtcgcgaagtcggtgaaatccctttacttaggacgcatgttcagtgggacgcccgtcattcggctgcggtttaaacgactccaacctactaggctggtcgccgagttcgattttagaacttttgatccagagggtattctgctctttgccggaggccaccaggattccacttggatcgtcctggcgctccgagctggcagacttgagctgcaattgaggtataacggggtggggagagtgaccagcagcggaccagtcatcaaccatggaatgtggcagactatatcagtagaagagctagcacgtaacctggtgattaaagtgaacagagacgctgtgatgaagattgcagtagcaggcgatcttttccagccagagcggggactataccacctgaacctcaccgtgggcggtataccttttcacgaaaaagacctggtgcagcctattaatccccgactggatgggtgtatgcggtcctggaattggctgaacggtgaggacacgacaatccaagagaccgtcaaagtcaatacacggatgcagtgctttagcgtgacagaaagaggctccttttaccccggtagcggttttgcattttattccctcgattatatgagaacgcccctcgatgttggtaccgagtccacatgggaagtggaggtagtggcccacattcgaccagcagctgataccggggtgctttttgctctgtgggcccctgatcttcgagcagtaccattgtcggtggctctggtggactaccattctactaaaaaactaaaaaagcagctggttgtcctggcggtggagcacaccgccttggctctgatggagattaaggtatgtgacgggcaggagcacgtggtgaccgtatctttaagagacggtgaggccactttggaagtcgacggaacgcgcggacagtccgaagtcagcgctgctcagctgcaggagagactggccgtgttggaacgccacctgagatctcccgtgttgaccttcgctgggggattaccggatgtgccagtcaccagcgcaccggttaccgcgttctaccggggttgtatgaccctagaggtaaataggcggctactggatctggacgaggcggcatataagcacagcgatattaccgcccattcatgtcctcctgttgaacccgcagctgcatag

SEQ ID NO: 225286 - DNA, 1140 bp, synthetic construct
  misc_feature 1..1140: note = Description of Artificial Sequence: Synthetic coding sequence
  source 1..1140: mol_type = other DNA
atgttttccggtactcctgtcatccgcctgcgatttaagcgcttgcagcccacccggttggtggcagaatttgattttcgaacttttgaccccgaggggatcctgctcttcgcgggagggcatcaggactcaacttggatagttttagccctgcgggctgggagacttgagctgcagctgaggtataacggcgtcggcagggtgacctccagtggacctgtgattaatcatggcatgtggcaaacgatctctgtagaggagttagcacggaatctggtgataaaggttaaccgtgatgctgttatgaagattgccgtagcgggagacctgtttcagccagagcgagggctgtaccatctgaatctcacagtaggcggaatccccttccatgaaaaagacttagtgcagcccattaacccccgacttgatggttgtatgcgatcttggaattggctgaatggagaggatactacgatccaggagactgttaaggttaacacaagaatgcagtgcttctcagtgaccgaaagaggctcgttctatccagggagcggattcgcattttactccctcgactacatgcggactcctctggacgtggggacagagagcacctgggaagtcgaagttgttgcgcacatccggccagccgcagataccggggtcctattcgctctgtgggcgcctgaccttcgcgcagtacccctctctgtggccctagtggactatcatagcacaaagaagcttaagaagcagctcgttgtgctggctgttgaacacacagccctcgcattgatggagattaaggtctgcgatggacaggagcacgtggtgacagtgagcctcagggacggcgaagctacactcgaggtggacggcactcgcggacagtcagaggtgagcgctgcccagctgcaggagcgcctggccgtgctagagcggcacctgcggtcgcctgtgctcacttttgccggtggcctacctgatgtgcctgtcacatcggcacccgtcaccgcattttaccggggttgtatgactcttgaagtaaaccgccgtctgctggacctggatgaggcggcttacaagcactccgacataactgcccactcctgtccccctgtagagcctgctgccgcttag

SEQ ID NO: 225287 - DNA, 1218 bp, synthetic construct
  misc_feature 1..1218: note = Description of Artificial Sequence: Synthetic coding sequence
  source 1..1218: mol_type = other DNA
atggatacctgcgaggatattctcccatgcgtcccattttcagtagcaaaaagtgtcaagtctctctacctggggcgtatgttttccggtactccggtcattagactgagatttaagcgcctgcagcctactaggttagtcgccgagtttgatttccgcacatttgatccggagggaattctactcttcgccggaggccaccaagactctacttggatcgttctggctctgagagctggacgtctggaactgcagctgagatataacggtgttggacgggtgacttcttcaggacccgtgataaaccacggaatgtggcagacaatcagtgtggaagagctggccagaaacctggtgatcaaagttaatagagatgctgtcatgaaaatcgctgtagccggagacctattccagcctgaaagaggcctgtatcatctgaacctgactgtcggcggaattcccttccacgagaaagatctggtgcagcccatcaacccacgattggatggctgtatgagaagctggaattggctgaatggcgaggacaccacaatacaagagacagtgaaagtgaacaccagaatgcagtgtttcagtgtcaccgagaggggaagtttctatcctgggagcggcttcgccttctattccctggactacatgcgcactcccttagacgtgggcacagaaagcacgtgggaagtggaagtggtggcccacattaggcctgcggctgatacaggggtgctctttgcactctgggcgcctgacctgcgggcagtaccattaagtgttgctctcgttgattaccattcaacaaaaaaactgaagaagcagctagtggtgttggctgtcgagcacacagccctggccctcatggagataaaggtgtgcgacggtcaggaacacgtggtgacagtctctctgagggacggcgaggcaacactggaggttgacggaacgagagggcagagcgaggttagcgccgctcagctccaggaacgtctcgcagtgctcgagcgacacctgcgaagcccagtacttactttcgctggagggttgcctgacgttcctgtaacatccgcccctgttaccgccttctatagaggctgtatgactttagaggtaaatcgaagactactggacctcgacgaggccgcatacaagcactccgacatcacagctcactcttgtcctcctgtggagcccgcagccgcttag

SEQ ID NO: 225288 - DNA, 1431 bp, synthetic construct
  misc_feature 1..1431: note = Description of Artificial Sequence: Synthetic coding sequence
  source 1..1431: mol_type = other DNA
atgtctggagcgaggtgcagaacactgtatcctttttccggagagaggcacggacaaggcctgaggttcgcagccggtgaattaattactctgctgcaagttcctgatgggggttggtgggagggggaaaaggaggacgggttaagaggttggttccccgcttcctatgtgcaactgttggaaaaacctgggatggtgcccccaccacccggagaggagagccagacagtgattcttccacccggttggcagagctacctctccccccagggacggcgttactatgtaaataccacgactaatgagacaacttgggaaagaccctccagttcacctggcatccccgctagccccggaagccatagaagtagtttgccacctacagtaaatggataccacgcaagcgggactcctgcccacccgccagagaccgcgcacatgtccgttaggaaatccacaggcgactcccagaacctgggaagctcatctccaagcaagaagcagagtaaggagaatacaattactatcaattgtgttacattccctcatcccgataccatgcctgagcagcagttgttaaaacccacagagtggtcttactgcgattatttttgggccgataagaaagatcctcaggggaatggcaccgtcgcgggattcgaattactcctacagaagcaactgaaaggtaaacagatgcagaaagaaatgtcagaattcatcagggagcggatcaagattgaggaggactatgccaagaatttggctaagttgagtcagaacagtctcgcctctcaagaggagggtagcctcggtgaagcatgggcccaggtaaaaaagtcgctggcggatgaggccgaagtccacctcaagttttccgccaagctgcacagtgaggtggaaaagcccctcatgaacttccgcgagaatttcaagaaagatatgaagaaatgtgatcaccacatcgccgaccttagaaaacagctggccagcaggtatgcttctgtcgagaaggcccgaaaagcacttactgagcgtcagcgggaccttgagatgaagacacagcaactggagatcaaactgagtaataagaccgaggaagatataaagaaggccaggcggaaatccacccaggcaggcgatgatctgatgagatgtgttgatttgtacaatcaggcccagagtaagtggtttgaggagatggtgactactaccctggaacttgaacggctggaggtcgagcgggtcgaaatgatccgtcagcacctatgtcagtacacccagctgaggcacgaaacggacatgtttaatcaatccactgtggagccagtggaccagttactgcggaaagttgatcccgcaaaagaccgcgagctctgggttagagagcacaaaaccgggaacataagaccagtggatatggaaatatag

SEQ ID NO: 225289 - DNA, 1251 bp, synthetic construct
  misc_feature 1..1251: note = Description of Artificial Sequence: Synthetic coding sequence
  source 1..1251: mol_type = other DNA
atgaagcctggcatggtccccccaccacctggtgaggagtctcagaccgtgatattgcctcccggatggcaatcatatttgtcacctcagggacgtcggtattatgtcaataccacaacaaatgagaccacttgggagagacccagctcaagccctggaatccctgcctcacccggttcgcaccggagctccctgcctccgacagtcaatggttaccacgccagtggcacacccgctcatccacccgagacagcacatatgtctgtccgaaaaagcacaggcgattcgcagaatctgggctctagttcacccagcaagaagcagtctaaggagaatacaatcaccatcaactgtgtcacgttcccacaccccgacactatgcccgagcaacagctgctcaaaccgactgaatggtcctactgtgattacttctgggccgataaaaaggaccctcagggcaatggcacagtggcgggtttcgagctgctgctccaaaaacagctgaaagggaagcagatgcaaaaggagatgagtgaattcatccgggagaggatcaaaattgaggaagattatgctaagaacctggccaaattgtcacaaaactccctggcaagccaggaggagggctccctgggtgaagcctgggcccaagtaaaaaagtctctcgccgacgaagcagaagtacacctgaaatttagtgcgaagttacacagtgaagtcgagaaaccactcatgaacttccgggaaaactttaagaaggatatgaagaaatgcgatcaccatattgccgatctccgcaaacagctcgctagcaggtatgcctccgtggagaaggccaggaaagcccttactgagcgtcaacgggatcttgagatgaagacgcagcaacttgaaattaaactgagcaacaagactgaggaagacattaaaaaagcgcgaagaaagtccacccaagccggagacgatctgatgcgatgtgtggacctctacaaccaggcacaaagcaagtggtttgaggagatggtgactactacactggaactggaacggttagaagtggaacgggtggagatgatccgccagcatctatgccaatacacacagctcaggcatgagacagacatgttcaaccaatccacagtggaaccagtcgatcagctgcttaggaaagtcgaccccgcaaaggaccgcgaattatgggtcagggaacataaaaccggaaacatcaggcctgtagacatggagatctag

SEQ ID NO: 225290 - DNA, 1011 bp, synthetic construct
  misc_feature 1..1011: note = Description of Artificial Sequence: Synthetic coding sequence
  source 1..1011: mol_type = other DNA
atgtctaatatggagaattccttcgacgacgtatcctgcctgtctccccagaacctgggctcctcgtccccgtcaaagaagcagagcaaggagaacaccattacgatcaattgtgtgacatttccacatcctgacacgatgcccgaacagcagctgttaaaaccaaccgagtggtcctattgcgactatttctgggccgacaaaaaggatccacagggtaacggcacagtggcaggcttcgagctgttgctccagaagcagctcaaagggaagcagatgcagaaagagatgtcagaattcattagggaacggatcaagattgaggaggactacgccaagaacctcgctaaactctctcagaattccctagccagccaagaggagggttccttgggcgaggcgtgggcccaggtaaagaaaagccttgcagatgaggccgaggtgcacttgaaattttccgcgaagctccattcagaggtagagaaaccactcatgaattttagggagaactttaaaaaggatatgaaaaagtgcgatcaccatatcgctgaccttcggaaacagttagcgagcaggtacgcctcagttgaaaaggcacgcaaagccctgaccgagaggcagcgagatttggaaatgaagacacaacagctcgaaatcaagctgagcaacaaaactgaggaagacattaagaaggcacgccgtaagagcacacaagccggtgacgacctgatgcgatgcgtcgacctttataaccaggcgcagagtaagtggtttgaggagatggtcactacaaccctcgagttggaacgcctagaggtcgagcgggtcgaaatgattaggcagcatctctgtcagtacacacagctacgccatgaaaccgatatgttcaatcaatctactgtagaacctgtcgatcagctgctgagaaaggtggacccagccaaagaccgcgaactatgggtgcgagaacacaagaccggtaacattagacctgttgatatggagatctag

SEQ ID NO: 225291 - DNA, 1248 bp, synthetic construct
  misc_feature 1..1248: note = Description of Artificial Sequence: Synthetic coding sequence
  source 1..1248: mol_type = other DNA
aagcccggaatggtgcccccaccacctggcgaagagagtcaaactgtgatcctgccaccaggctggcagagctatctatccccacagggaagaagatactatgtgaacaccaccaccaatgaaacgacttgggagagaccatctagcagccccggtatcccagcatctcctggcagccataggagtagcctgccacctactgtgaatgggtaccacgcatccgggacacccgcacatccacccgagacagctcacatgagcgtccgaaaatccaccggggattcgcagaatctgggtagttcttcaccgtccaaaaaacagagcaaggagaataccattacaattaattgtgtcacgttccctcaccccgacactatgcccgagcagcagcttctcaagcctaccgaatggtcctactgcgattacttctgggccgataagaaggatcctcaaggcaacggcaccgtagcagggttcgagctgctgctgcagaagcagctaaaaggcaaacagatgcagaaggaaatgagtgaattcattcgtgaaaggatcaagattgaagaggattatgccaaaaatcttgccaaattaagccaaaactctctggcctcccaagaggaggggagcctcggtgaggcctgggcgcaagtgaaaaaaagcctggccgatgaagctgaggtacacctcaagttctcagctaaacttcacagcgaagtagagaagcctctgatgaatttccgtgagaatttcaaaaaggacatgaaaaaatgcgaccaccacatcgcagaccttcgaaagcagctggcatcccgctacgcaagtgtggaaaaagccagaaaggcgctgaccgagcgccagcgcgatttggaaatgaagactcagcagcttgaaataaagcttagtaataagacagaagaggatatcaagaaagcacggcgaaaaagcacccaagctggggatgatctcatgcgatgcgtcgatctgtacaatcaagctcagagtaagtggtttgaagagatggtaacgaccacattggaactggagcgccttgaagtcgaacgcgtggagatgattcgacaacacctgtgccaatacacccagctgcggcacgagaccgatatgttcaaccagtcaacagttgaaccagtagatcagctgctgagaaaagtcgatcctgccaaagaccgcgaactgtgggttcgcgaacacaagactggtaacataagacccgtggatatggagatatag

SEQ ID NO: 225292 - DNA, 1251 bp, synthetic construct
  misc_feature 1..1251: note = Description of Artificial Sequence: Synthetic coding sequence
  source 1..1251: mol_type = other DNA
atgaaacccggtatggtgcctcctcctcccggtgaagaatctcagaccgtgatactcccacctggatggcagagctacttaagtccccaaggcagaaggtactacgtcaacactacgaccaacgaaaccacatgggaaagacctagtagttcccccggaattccggcaagtcctggcagtcatcgttcttccctaccacccaccgtcaatggctaccacgcaagcgggacacctgctcaccctcccgaaactgctcacatgagtgtcaggaaaagcacaggggactcccaaaacttgggctccagctccccttcaaagaagcagagcaaggagaacacgattaccattaactgcgtaaccttcccacatcccgacactatgcctgagcaacaactcctcaaacctaccgaatggtcttactgtgactatttctgggcagacaagaaagatccgcaaggcaatggcacagttgccggtttcgagctgttgctgcagaaacagttaaaggggaagcagatgcagaaagagatgtctgaatttatccgagaacgcatcaaaatcgaagaagattacgccaaaaacctcgcgaagctgtcccaaaactcattggcatcacaagaagaaggatccctgggcgaggcttgggctcaagtcaagaaaagtcttgccgatgaggctgaagtacatctgaaattctcagctaagctgcactctgaggtggagaagccgctcatgaacttcagggagaactttaagaaggatatgaagaaatgtgaccaccacattgccgatcttaggaaacagctcgcgtccaggtacgcctctgtcgagaaagcaagaaaggccctcacagaacggcaaagagacctcgaaatgaagactcagcagctggagataaaactgtctaataagacagaagaggacataaaaaaagcgcgaaggaaatcaacccaggcaggggacgacctgatgaggtgcgttgacctctataaccaggcacagagcaagtggtttgaagagatggtgaccaccaccctggagctcgagcggctcgaagtcgagcgcgtggagatgattcgccagcacttgtgtcaatacacacaattgagacacgagacagatatgttcaatcaaagcactgtcgaacctgtggatcaacttctgaggaaggtcgaccccgctaaggaccgtgaactttgggttcgcgagcacaagaccggaaacattcgccctgtagacatggaaatttag

SEQ ID NO: 225293 - DNA, 546 bp, synthetic construct
  misc_feature 1..546: note = Description of Artificial Sequence: Synthetic coding sequence
  source 1..546: mol_type = other DNA
atggttcctccaccaccgggagaagagagtcaaacagtcattcttcctcccggttggcaatcctacctgtcccctcagggccgaagatactatgtcaatactacgaccaacgagacaacatgggaacgcccttcttcaagtccaggtattccggcttcccctggttcacatagaagctcactccctcctaccgtaaacggctaccacgcgagtggaacacctgcacaccctccagagacagcccatatgtctgtcagaaaatccacaggcgactctcaaaacctcggctccagttctccctccaaaaagcagtcaaaggagaatacaattacagagttagagagactcgaggtggaacgggtagagatgatacgccagcatctctgtcaatacactcagctgcgacacgagaccgatatgtttaaccaatcaacagtggaaccggtggatcagctactccgcaaggtggaccctgccaaggaccgcgagctgtgggtgcgtgagcacaaaacaggtaacatccggccagtggatatggagatttag

SEQ ID NO: 225294 - DNA, 873 bp, synthetic construct
  misc_feature 1..873: note = Description of Artificial Sequence: Synthetic coding sequence
  source 1..873: mol_type = other DNA
atgcccgagcaacagcttctgaagcctaccgaatggagttattgcgattacttctgggccgataagaaagaccctcagggaaatggcacggtcgcaggattcgaattgctccttcagaagcagctgaaaggaaaacagatgcagaaggaaatgtcggaattcatcagggagaggatcaagattgaggaggattatgccaagaacctggccaagctgtcccaaaattctctcgcttctcaggaagagggaagtctgggggaagcctgggcacaggtgaaaaagtctctggcagacgaggctgaagtgcatctgaagttttccgcaaaacttcactctgaggttgaaaagcccttgatgaatttccgggaaaatttcaagaaagatatgaaaaagtgcgaccaccatatcgccgacttacgcaagcagctggcgtccaggtatgcctccgtggagaaggccagaaaagcccttactgaaaggcagagggatctggagatgaaaacccagcagctcgaaattaagctgagcaacaagacagaggaagatattaaaaaagccaggcgtaaatctacacaagccggagatgacctgatgcgctgcgtggacctgtacaaccaggcacaaagcaaatggttcgaagagatggttaccaccaccctcgagctcgagcggttggaggtcgagcgcgtggaaatgatccgccaacatctgtgccagtacacacagttgagacacgagaccgacatgttcaatcagtccaccgttgagcccgtggatcagctgttgagaaaggtggatcccgcaaaggatcgagagctgtgggtgcgcgagcacaaaacagggaacataagacccgtggatatggaaatttag

SEQ ID NO: 225295 - DNA, 378 bp, synthetic construct
  misc_feature 1..378: note = Description of Artificial Sequence: Synthetic coding sequence
  source 1..378: mol_type = other DNA
atgaagacacagcaactggagattaagctaagcaacaagaccgaagaggacatcaaaaaagcacgtagaaagtcaacacaagcgggtgacgatcttatgcgttgtgtagacctttacaatcaagctcagtccaaatggttcgaagagatggtaaccacaacattggagcttgaaagacttgaggttgaacgggttgaaatgataagacagcatttgtgccagtacactcagctgcgccacgaaacggacatgttcaaccaaagcaccgtagagcccgttgatcaattgcttcgaaaagtcgatccagcgaaggaccgagagttgtgggttagggagcataagacaggaaacattcgcccagtggacatggaaatctag

SEQ ID NO: 225296 - DNA, 1011 bp, synthetic construct
  misc_feature 1..1011: note = Description of Artificial Sequence: Synthetic coding sequence
  source 1..1011: mol_type = other DNA
atgtcgaatatggagaattcttttgatgatgtgagttgtctgtctccccagaatctcggaagcagtagtcctagcaagaaacaaagcaaagagaacacaatcacaatcaactgcgtgacatttccacaccctgacaccatgcctgagcagcaattacttaaaccaaccgaatggtcatactgcgactacttttgggccgataagaaagacccacaggggaatggcaccgtggcgggtttcgaactgctcctgcagaagcagctcaagggcaagcagatgcaaaaagagatgagcgaattcattagagaacgtattaagattgaagaggactacgctaagaaccttgcaaagctgtcccagaacagtctggccagccaggaggagggctccctgggagaggcctgggctcaggttaagaaaagtctcgccgatgaggctgaggtccatctgaagttcagtgcaaaactgcatagtgaagtggagaagccattgatgaacttccgcgagaacttcaagaaggacatgaagaaatgcgaccaccatatcgcggacctgagaaaacaattggcctcccggtacgctagcgtagagaaggcacgaaaagcgttgaccgaaagacagagagatctcgagatgaaaacccaacagctcgaaatcaagttgagcaataaaacagaagaagacattaagaaagccaggcgcaaatcgacccaggctggcgacgacctcatgcgctgcgtcgatttatacaaccaagcccagagcaaatggttcgaggagatggtaacaacaacactagagctagaaagactagaagttgagagagtagagatgatcagacagcacctgtgccagtatactcagttacgacacgagactgacatgtttaaccaatccaccgttgagcctgtggatcagttgcttaggaaggtggatcctgccaaagacagagaattgtgggtgcgcgagcacaagacaggtaacataagaccagtcgatatggaaatttag

SEQ ID NO: 225297 - DNA, 1437 bp, synthetic construct
  misc_feature 1..1437: note = Description of Artificial Sequence: Synthetic coding sequence
  source 1..1437: mol_type = other DNA
atggcgcctaagaaaaaggggaagaagggaaaagccaagggcaccccaattgtggatgggctggccccagaggacatgtccaaagagcaggtcgaggaacacgtctccaggatcagggaagaactggaccgcgaaagagaagagcgcaactacttccagttggaaagggacaagatccatacattttgggagatcactaggcggcaactggaggagaagaaggccgaactaaggaacaaggaccgggagatggaagaagctgaagagcggcaccaagtcgaaattaaggtctataagcagaaggtcaagcacctgctgtatgagcatcagaacaatctgaccgagatgaaggctgaggggaccgtggtgatgaagttagcgcaaaaggaacaccgaatccaagagagcgtccttaggaaggatatgagggcactgaaagtcgagctcaaggaacaggagctggcttctgaggttgtcgttaaaaacctgcgattaaaacacacggaggagatcacacgtatgaggaatgacttcgaaagacaggtgagggaaattgaggctaaatacgacaagaagatgaagatgctgcgggatgagctggatttgcgcaggaagacggagttgcatgaagtcgaagaaagaaaaaatggacaaatacataccctgatgcaaagacatgaagaggcctttactgatattaagaattactataatgatatcacccttaataatctcgccctcatcaactcattgaaggagcaaatggaagacatgcggaaaaaagaagatcacctcgaaagagagatggccgaggtcagcggtcaaaacaaacggcttgctgaccctctgcagaaagcaagggaggagatgtccgagatgcagaagcagcttgccaactacgaacgagacaagcagatattgctgtgtaccaaagcacggctgaaagttcgagagaaagagcttaaggacctacagtgggaacatgaagtcttggaacagagatttaccaaagttcaacaggagcgcgacgaactttacaggaaatttacagcagcaatacaggaggttcaacaaaagaccggcttcaaaaatttggtgctagaaaggaaacttcaagcactgtcggcagccgttgagaagaaagaggtccaattcaacgaggtcctagcagcctcgaacctggatcccgctgccctgacactagtttcacgcaaattggaagatgtgctggagagcaagaactccactatcaaggatctccagtatgaactggcccaggtttgcaaggcccataacgacctcctaaggacttacgaagcgaaactgctggcattcggaatccctctggataacgttgggttcaaaccactggagactgccgtgataggccagacactggggcagggaccagccggtctggtgggaacacccacttag

SEQ ID NO: 225298 - DNA, 1362 bp, synthetic construct
  misc_feature 1..1362: note = Description of Artificial Sequence: Synthetic coding sequence
  source 1..1362: mol_type = other DNA
atgagtaaggagcaggtggaggagcacgtcagccggatccgggaggaactggacagagaacgagaagagaggaattattttcagctggaacgggacaaaatccatacattctgggaaatcacaagaaggcagttagaagagaagaaagcagaactcagaaacaaagaccgcgagatggaggaagcagaagagcgccaccaagtggaaatcaaggtctacaaacagaaggtgaagcatctgttgtatgagcatcaaaataatctgaccgagatgaaagccgagggtaccgtggtgatgaaactggcacagaaagaacatcggatccaagagagtgtcctgaggaaggatatgagggccctgaaagtcgaattgaaggagcaggagctcgcctcagaggtggtggtcaaaaacctgagactcaaacatactgaggagatcactagaatgcgcaatgatttcgaacggcaagtccgggaaatcgaggccaaatacgacaagaaaatgaagatgctgcgcgacgaacttgacctgcgcagaaaaactgagctccatgaggttgaagagaggaagaatggtcaaattcacaccctgatgcaacgccacgaagaagctttcaccgatatcaagaactactataacgacatcaccctcaacaatctggcactgatcaactcactcaaagaacagatggaggatatgcgcaagaaggaggaccacctggagcgggaaatggcagaggtttctgggcagaataagaggctggccgacccactgcagaaagctcgggaggagatgagtgagatgcaaaaacagctggcaaattatgagcgtgataagcagatattactctgcacaaaggccagactcaaggtgcgggaaaaagaactcaaggatttgcaatgggaacacgaagtactcgaacagaggtttaccaaagtgcagcaggaaagagatgaattgtaccgcaagttcactgccgctatacaggaagtgcagcagaagactgggtttaaaaatctcgtgttggagcgcaaactgcaagccctctccgccgctgtggagaagaaagaagtgcagtttaatgaggttctggctgctagcaatttagatccagccgcacttacactcgtgtccagaaagctcgaggacgttttagagagtaaaaattccacgatcaaggacctccaatacgagctggcgcaggtgtgtaaagcccacaatgacctcctcaggacatacgaagctaagctgctggctttcggtatccccctggataacgtcggattcaaaccgttggagactgccgtcatcggccagacactgggacaaggacccgctggactagtgggcacccccacctag

SEQ ID NO: 225299 - DNA, 525 bp, synthetic construct
  misc_feature 1..525: note = Description of Artificial Sequence: Synthetic coding sequence
  source 1..525: mol_type = other DNA
atggcgccaaaaaagaaaggcaaaaagggtaaggcaaagggaactcccatagtcgatggcctggcacctgaagacatgtcaaaagaacaggttgaagagcacgtatcgagaattcgcgaagagttggaccgagaacgcgaggaacgcaattatttccagttggaacgagacaaaatacacactttttgggagatcacgcgccgtcaattggaagagaagaaggctgagcttcgaaacaaggatagagagatggaggaagcggaggaacggcaccaggtcgaaatcaaggtttacaaacagaaagtcaaacaccttctttacgagcaccaaaataatcttacagagatgaaggcagagggtaccgttgtgatgaagctggcacagaaggagcacaggatacaagagtccgtactgcgaaaagatatgagggctctaaaggtggagttgaaggaacaggagctcgctagtgaggtcgttgtcaagaacttgcgtctaaaacttaggccctctatgatcaggcgctag

SEQ ID NO: 225300 - DNA, 1149 bp, synthetic construct
  misc_feature 1..1149: note = Description of Artificial Sequence: Synthetic coding sequence
  source 1..1149: mol_type = other DNA
atggtagaggaacacgtgagccggatccgcgaagaactcgatagggagcgcgaggaacgaaattacttccaactcgagcgggacaaaattcatactttctgggaaatcaccaggcgccaactagaagaaaagaaggccgaactgcgcaacaaggaccgcgagatggaggaagccgaagaacgtcaccaggtcgagatcaaggtgtataagcagaaagtaaagcaccttctgtatgaacaccaaaacaatttaaccgaaatgaaagccgaggggaccgtggtgatgaaacttgcccagaaggaacataggatccaggaatcagttctgcggaaagacatgcgtgcactgaaggttgagctgaaggagcaggaattggccagtgaggtggtggtgaagaatctaagactgaagcatactgaagagattacgcgcatgcggaacgacttcgaacgccaagtccgggaaattgaggccaaatatgacaagaagatgaaaatgttgcgggacgaactggaccttcgtcgaaaaactgagctgcacgaagtggaggaacgaaaaaatggacagatccacacactgatgcagaggcacgaggaagcctttaccgatattaagaactactataatgatatcacccttaataaccttgccttgattaactctctcaaggaacagatggaagacatgagaaagaaggaagaccacctggaacgagaaatggccgaggtgtccggccagaacaagaggttggccgacccactacaaaaggctagggaggagatgagtgaaatgcagaaacaactagcgaactacgagcgagataagcaaatactgctgtgcactaaagcgcgactgaaggtaagagagaaggagctgaaggacctgcagtgggagcatgaagtcttagaacagcgtttcactaaagtgcagcaggagcgggacgagctgtacaggaaatttactgccgctatccaagaagttcagcaaaagaccggatttaagaacttggtattggagagaaaattgcaggctctgtctgcggcagtggaaaaaaaggaagtgcagttcaacgaggtgctagctgcctcaaacctagatcctgccgcacttactctggtttccagaaaacttgaaacgttcttttgttag

SEQ ID NO: 225301 - DNA, 717 bp, synthetic construct
  misc_feature 1..717: note = Description of Artificial Sequence: Synthetic coding sequence
  source 1..717: mol_type = other DNA
atgctgtgttgtatgagaagaacgaagcaggtggaaaaaaatgacgacgaccaaaaaattgaacaggacggaattaaaccggaggataaggcccacaaagccgcaactaaaattcaggcttccttcagggggcatattacgcgaaagaaactgaagggcgagaagaaagatgacgtccaggcagcagaagctgaggcaaacaaaaaagacgaggcccctgtcgccgacggcgtggaaaagaaaggggaaggaacgaccaccgcggaggccgctcctgcaacaggtagcaaacccgatgagccaggcaaggctggcgagactcctagcgaagagaagaaaggcgagggagatgccgcaactgagcaggcagccccacaggccccagcttcctccgaggagaaagccggtagcgctgaaaccgaaagtgcgactaaagcttctactgacaattctccgtcaagcaaggcggaggatgcacccgctaaagaggagcccaaacaggcggatgtgcctgcagccgttacagcggcagctgccactaccccagccgctgaggatgcagcagcaaaggcgacagcccagccacctaccgagacaggcgaatcttcccaggctgaggaaaacatcgaggccgtggacgaaactaagccgaaggaatccgccagacaggacgagggcaaggaggaagagccagaggccgatcaggagcacgcctag

SEQ ID NO: 225302 - DNA, 825 bp, synthetic construct
  misc_feature 1..825: note = Description of Artificial Sequence: Synthetic coding sequence
  source 1..825: mol_type = other DNA
atgactaagtcttgcagcgagctgtgccatcccgctctgcactttttaccctgtcttggtggacttagaaaaaacctgcagagggcagtgcgcccaagcccctatagtctcggattcctgaccttttggatttctcgtgtcgaaaagaacgacgacgatcagaagattgaacaggacggtataaagcctgaagacaaagcccacaaggccgcaacaaagatccaggccagttttaggggccatatcacccggaagaagctcaagggggaaaaaaaagatgacgtgcaggccgcagaggccgaggccaataaaaaggacgaagcccctgtggctgacggggttgagaaaaagggcgagggaacaactacagctgaggccgcacccgcaactggctcaaagcccgatgagcccggaaaagccggagagactccttccgaggagaaaaaaggagagggcgatgcagcaacagagcaggccgctccccaggcccctgcaagttccgaagaaaaggcagggtccgctgagacagagtccgcaactaaagcttccacagacaatagtccttctagcaaagccgaagacgcgccagccaaggaagagccaaagcaggcggatgttccggcagctgttaccgctgccgctgctaccacccctgcagcggaggacgctgctgcaaaggccacagcccagcctcccacagagacaggggaatccagtcaagccgaggagaacatcgaagctgtagatgagactaaaccgaaagagtctgcacgacaagacgagggaaaagaagaggagcccgaagcagaccaggaacatgcatag

SEQ ID NO: 225303 - DNA, 1119 bp, synthetic construct
  misc_feature 1..1119: note = Description of Artificial Sequence: Synthetic coding sequence
  source 1..1119: mol_type = other DNA
atgcctccaccccagcagggcccatgcggccaccacctgctgttactgctggccctacttctgccttcactgcccctcacaagagctccagtgcctcctggtccggctgcagcgctgctgcaggcactcgggctgcgggacgaaccacagggagcacctcggctccgtcctgtgcctccagttatgtggagattgtttcgcagaagagatccccaggagacccgcagtggctcacgacgcacatctcccggagttacccttcaaccctgccacgtggaagagctgggtgtcgccggaaacatcgttcgccatattcctgaccgcggagcgcctaccagggccagtgaacctgcctcagcagccggtcactgcccagagtggaccgtcgtttttgatctgtcggctgtagagcctgcagagagaccatcccgggctcgcctcgaacttcggtttgcagctgctgcggcagccgctcctgaaggcggatgggagttgagtgtggcccaagctggccagggggctggagccgaccccggacctgttctactgcgccaactggtgccggcactcggccctcccgtgcgtgccgagctgctgggggctgcttgggccagaaacgcgtcatggcctcgatcactccggctggctctcgcgctccgcccaagggcaccagctgcctgcgccaggttagccgaagcatccctacttctcgtgacgctcgacccacgcctgtgccacccactagccagaccacgccgagatgccgagcccgtgcttggaggtggccctggaggtgcttgccgggctcgacggctatatgtaagcttccgggaagttggttggcataggtgggttattgctccgaggggtttcctcgccaactactgccagggacagtgtgccttgccagtcgctctgtcaggctcaggcggtcctcctgcacttaatcacgcagtcctccgggctctcatgcatgccgctgcacccggagccgcagaccttccgtgttgcgtgcccgctagactttccccgatttccgtcctgtttttcgacaatagcgataacgtcgttcttcgccagtacgaggatatggttgttgacgagtgcgggtgtagatag

SEQ ID NO: 225304 - DNA, 1224 bp, synthetic construct
  misc_feature 1..1224: note = Description of Artificial Sequence: Synthetic coding sequence
  source 1..1224: mol_type = other DNA
atggtgctcgccgctccgctgttacttggctttctgctcctggctttggagctgcgccctcggggtgaagcagcggaggggcctgctgccgctgcggctgcagccgcagcggctgcagccgcaggcgtgggtggcgagagatcatcgcggccagcgccatcagtggccccagaacctgacggctgtcccgtgtgtgtttggaggcagcactcacgcgaactccgactggaatcgattaagtcacagattctgagcaagctgaggctgaaggaggccccaaacatctcaagagaggtggtcaaacagcttctccctaaggctcctccacttcagcagatcttggacctccacgatttccaaggcgatgcactgcagccagaggacttccttgaagaagacgagtaccatgcaaccacagagactgtcatatcaatggctcaagaaaccgatcctgccgtgcagacagacggatcccccctttgctgccatttccatttctctcctaaagtaatgtttactaaagtcttaaaggcccaactgtgggtgtatctcaggccagtgcccaggccagccaccgtttacctccagattcttcgcttgaagccactcacgggtgaaggtacagctggcggaggtggcggaggtcggaggcacatacggatcaggtcgctgaagattgagctccatagccggtccgggcactggcaatccattgattttaaacaggtgctgcatagctggtttcgccaaccacaatcgaactggggcatcgagatcaacgcattcgaccctagtggtaccgacctcgcagttacatctctgggccctggtgctgaggggttacatccctttatggaacttcgggtgttggaaaacactaaacgctccagaagaaacctgggcctcgactgcgatgagcatagctctgaatcaaggtgttgcaggtatcctctgacagtggattttgaggcttttggctgggattggattattgcacccaagcggtataaagctaactactgtagcggtcagtgcgagtacatgtttatgcagaaatatccacacacacatctcgttcagcaggccaatcctagaggttcggctggtccatgctgcactcccacaaaaatgagccccatcaacatgttatactttaatgacaaacagcagatcatctacggcaaaatcccgggaatggtggtcgacaggtgcgggtgctcctag

SEQ ID NO: 225305 - DNA, 1143 bp, synthetic construct
  misc_feature 1..1143: note = Description of Artificial Sequence: Synthetic coding sequence
  source 1..1143: mol_type = other DNA
taggccgctgctgcagctgcagctgccgcagcagcagctgccggagttggcggtgaaagatcctcccgtcccgcaccatccgtcgccccagaaccagacggatgcccagtctgcgtctggcggcaacactccagagaattacgtctggagagcataaagtctcagatcttgtcaaagctaaggctcaaagaagcgcctaacataagtcgagaagtcgtcaaacagttattgcctaaggcaccccctttacagcaaattctggatttacacgatttccaaggcgatgccttgcagcccgaggacttcctggaagaggacgagtatcatgcgactaccgaaaccgtgatcagcatggcccaggaaaccgaccctgctgtgcaaacggatggatcgcctttatgttgccactttcacttttcccccaaggtgatgtttaccaaagttttgaaagctcagttgtgggtgtaccttcggcctgttccaagaccggctactgtgtatctgcagattttgcggctgaaaccactgacaggggaaggtactgccggtgggggaggaggaggcaggcgccacatccgcattcgatccctgaagatcgagctgcattccaggtcaggacactggcagtccatcgatttcaagcaggtcctgcacagctggtttagacagcctcagagcaattgggggatcgaaataaatgcctttgatccctccggaactgacctcgctgtgacctccctgggccctggtgccgagggcctgcatcctttcatggagcttcgagtgcttgaaaacacgaagagatctaggcgaaatctgggattagactgcgacgaacactcatccgagtccaggtgctgtcggtaccccttgactgtggatttcgaggcctttggatgggactggataatcgccccaaaaagatacaaggctaattactgttctggccagtgcgagtatatgttcatgcagaagtacccccacactcaccttgtgcaacaggccaatcccaggggctctgccggtccctgctgtactccaacaaaaatgtctcctatcaacatgttatacttcaacgataaacagcaaatcatctatggcaagatcccgggaatggtagtcgaccgctgcggctgttcatag

SEQ ID NO: 225306 - DNA, 927 bp, synthetic construct
  misc_feature 1..927: note = Description of Artificial Sequence: Synthetic coding sequence
  source 1..927: mol_type = other DNA
atgcctgggcaggaattgcggaccgttaacggatcccagatgctactagttttattagtcctctcgtggctgccacatggcggagcactgtctttagccgaggccagtagggcttcttttcccggacctagcgaactgcattctgaagatagcaggtttagggagctgcgaaaaaggtatgaggacctcctgacccggctgagagctaatcagagttgggaagattctaatactgatctagtgccagccccagcggtgcgcattctcactcctgaggttcggctcggctccggcggacatctccatctcaggatcagccgcgcagcgctaccagagggtctaccagaagctagcaggcttcaccgcgcattgttcagactctcccctacagcctctcggagctgggacgtgacgcgacccttgcggaggcaattgtcactggccaggccccaagcgcctgctcttcacttgaggttatcccctccaccctctcagtctgatcagcttctagctgagtctagtagcgccagaccccagttagagctgcacctgcgtccccaagccgcaagagggagacggagagccagggcgcgaaatggagaccattgcccactgggtcccggtcgatgctgtcgcctgcacacagtgagagcctcactggaggatcttgggtgggctgattgggtcttgtccccccgtgaggttcaagtgacgatgtgcattggtgcctgcccctcccagttcagggctgcaaacatgcatgcacagatcaaaaccagtctacataggctcaaacccgataccgtcccagcgccatgctgcgttcctgcatcctacaacccgatggtgttaatccagaagactgacacaggggtgagcctgcagacctatgacgatcttttggctaaggactgccactgtatctag

SEQ ID NO: 225307 - DNA, 927 bp, synthetic construct
  misc_feature 1..927: note = Description of Artificial Sequence: Synthetic coding sequence
  source 1..927: mol_type = other DNA
atgccaggccaggagcttagaacagtgaatggctctcagatgctgctggtgctcctggtcctgagctggttgccccatggaggggcactctctcttgccgaggcaagccgggcttctttcccagggccttcagaactacacagcgaggactcacggtttagggagttaagaaagcggtatgaggatcttttgacccggcttcgggctaaccagagctgggaagatagcaataccgacctggtgcctgccccagctgtaaggatccttacccctgaggtaagactgggaagcggcggacacctgcatctgcgcatttcccgagccgcattgcccgagggtcttccagaggcctcgagactgcatagagcactgttccgactaagtcccacggctagccggtcgtgggacgtcacccggccactccgccgacagctaagcttggccagaccccaggctcctgcacttcatctcaggttgagccctcctccctcccagtccgaccagcttctcgctgagagtagctccgcgaggccacagctagagctccacttgaggccgcaagccgctagagggaggcgaagggccagagcccgaaatggagatcattgtcccctgggcccaggcaggtgctgccggctgcacacagtcagggcctctctggaagatctgggctgggccgactgggtactcagtccgagggaagtccaggttaccatgtgcatcggagcttgccctagccaattcagagccgctaacatgcatgctcaaatcaaaacttccctccaccgcctcaagccggatacggtgcccgctccctgctgcgtgccggcttcatataatcccatggtcctgattcagaagacagacactggcgttagcctccaaacatatgatgatctgctggccaaggactgccactgcatttag

SEQ ID NO: 225308 - DNA, 1290 bp, synthetic construct
  misc_feature 1..1290: note = Description of Artificial Sequence: Synthetic coding sequence
  source 1..1290: mol_type = other DNA
atgtgccccggtgctttatgggtcgcactccccttgttgtcccttttggcagggtccctccaaggcaaacccctccagtcatggggcagagggtccgcaggaggaaacgcgcactcgccattaggcgtcccaggcggaggattaccagaacacacattcaacttgaagatgttcctggaaaacgttaaggtcgacttcctgcgctccttgaacctcagcggggtgccatctcaggacaagactcgagtggaacctcctcagtacatgatcgatctgtacaatcgctatacaagtgataaaagcacgactccggcttcaaatatcgtgcgaagtttctccatggaggacgcaatttccataaccgctaccgaggacttcccattccagaaacatatcctcctttttaacatatcgatcccaaggcatgagcagattacaagggctgaacttcgcctatacgtatcctgtcaaaatcatgtggacccgtcacatgatttgaagggtagcgtagttatctacgacgtactggacggaacggacgcctgggattccgcaaccgaaaccaaaactttcctggtttctcaggacatccaggatgagggctgggagaccttggaggtctcgtccgccgttaagcgctgggtgcgttcagacagcacgaagtcgaagaacaagcttgaggttaccgtggaatcccaccgaaagggttgtgacacgttagatatcagcgtgcctcccggaagcagaaatttgcccttcttcgtggttttctctaatgatcacagcagcggcacaaaagaaactaggctggagctacgcgagatgataagccatgaacaggagtccgtattgaaaaagctgtcaaaggacggctccactgaagctggcgaatccagccacgaagaagacacagacggacacgtcgcagctggatccactctcgcaaggcgcaagcggtccgctggagctggtagtcattgtcagaagacctcccttcgcgtcaacttcgaagacatcggatgggactcatggattatagctcctaaagagtacgaagcctatgagtgcaagggcggttgcttcttccccctagcggatgacgtgaccccgacaaagcatgcaattgtgcagaccctggtgcacctgaagttccccactaaggtaggcaaggcttgttgtgtcccaaccaagctgagccctataagcgtgctctacaaggacgacatgggggtccccacactcaagtatcactacgaggggatgtccgtcgccgaatgtggctgccggtag

SEQ ID NO: 225309 - DNA, 1095 bp, synthetic construct
  misc_feature 1..1095: note = Description of Artificial Sequence: Synthetic coding sequence
  source 1..1095: mol_type = other DNA
atgctgcggttcctgccagacctggccttcagcttcctgttgatactggctctgggtcaagcagttcagtttcaggagtatgtctttctgcagttcctcggcctggacaaagcgccatcccctcaaaagtttcagccggtgccctacatcctcaagaaaatttttcaggaccgggaggctgctgctactacaggagtttcacgcgacttatgttatgtgaaagagctaggggtaagaggaaacgtgctgagattcctgccggaccagggctttttcctgtatcccaagaaaatatcacaagcctcatcctgcctgcagaagctgctgtattttaatttgtctgccattaaagaaagggaacagttgacactcgctcagctaggactcgacctcggcccaaactcctactataacctgggaccagagctggaacttgccttattcctggtacaggagcctcatgtctggggtcagacgacacccaaaccgggaaagatgtttgtcctccggagcgtgccttggcctcagggagcggtgcattttaatctgctggatgttgccaaagactggaacgacaacccaagaaaaaatttcggcctgtttctggaaatcttggttaaggaagaccgggactcaggggttaattttcaacctgaggatacatgcgccagactccgctgttctctgcacgctagccttctggttgtgactcttaatcctgaccaatgtcacccatcccggaagagacgtgctgccatccccgtgccgaagctatcatgtaagaacttatgccaccgccatcagctgtttatcaactttcgggacctgggctggcataaatggattatcgctccaaagggcttcatggcgaactactgtcacggtgaatgtcctttctccctcactatcagtttgaatagttccaactacgccttcatgcaggcgttgatgcatgctgtggaccccgaaatcccccaggcagtgtgtatccctacaaaacttagccccatttccatgctgtaccaggataacaacgataatgtgatcttgcgtcactatgaagacatggtcgtcgatgagtgtggctgtggctag

SEQ ID NO: 225310 - DNA, 1506 bp, synthetic construct
  misc_feature 1..1506: note = Description of Artificial Sequence: Synthetic coding sequence
  source 1..1506: mol_type = other DNA
atgcgcctgcctaagctgttaaccttcctcctctggtatctcgcctggttggacctagagtttatatgcactgtgctgggcgctcccgacctgggccagagacctcaaggcactaggccaggactcgccaaggccgaagccaaagaaagacctcccctagcgcgaaacgtgtttaggccaggagggcactcgtatggcggtggtgccaccaatgctaacgctcgggctaaagggggaaccggtcaaacaggcggacttacacagccaaagaaagatgagcccaagaagctgccccctaggccaggcggacctgagcccaaaccaggacaccctccccagaccagacaagctactgctcgaactgtgaccccgaagggacagctgcccggtggaaaagccccacccaaggctgggtcggtgccatcatccttcctactaaaaaaggccagagagcctggtccacccagagaacccaaggaacccttcaggccacctcctatcactccgcacgagtacatgctgagcttgtaccgaaccttgtccgacgctgatcgtaaaggaggcaactcttcagttaagctcgaggccggactggcgaacacaattaccagtttcattgacaagggccaggacgaccggggtcctgttgtccgcaagcagagatatgttttcgatattagcgctttagagaaagacgggctgctgggcgcagaactgaggatccttagaaagaagccaagcgataccgccaaacccgcagcaccaggcggaggaagggctgcacagctgaagcttagctcttgcccaagtggccgacaaccagcctctctgctggacgtgagaagcgtaccgggacttgacggcagtgggtgggaggtgtttgatatttggaagctgttcaggaatttcaagaattcggcccaactgtgcctggagctagaggcatgggagcggggaagagccgtggatcttcggggactggggttcgacagagctgccaggcaggtccacgagaaggcactgtttttggttttcggaaggacgaagaaacgcgatttattttttaacgagataaaggctagatctgggcaggatgataagactgtatacgagtatttgttttctcaaagaagaaagcggcgtgcgcctctcgcgacacggcaggggaagcgcccaagtaaaaatctgaaggcaagatgctcaagaaaggctctccacgtcaacttcaaggacatgggatgggatgattggatcattgcccctttggaatacgaggccttccattgtgaagggctgtgtgaatttcccctgcggagccatctggagcccaccaaccacgcagtcattcagacccttatgaattctatggaccctgagtctacccctcccacttgctgcgtccccactcggctctcaccgatttctatcctgtttatcgactcagccaacaacgttgtgtacaagcagtacgaagatatggtcgtggagtcatgtgggtgcagatag

SEQ ID NO: 225311 - DNA, 1506 bp, synthetic construct
  misc_feature 1..1506: note = Description of Artificial Sequence: Synthetic coding sequence
  source 1..1506: mol_type = other DNA
atgcggctgccaaaactgcttacatttcttttgtggtaccttgcctggctggatcttgagttcatttgtacagtgctgggcgcaccagacctcgggcagcggccacaaggcacacggcctggcttggcaaaagccgaagccaaagagaggccccctctggcacgaaacgtcttccgccctgggggtcactcttatgggggaggtgctactaatgctaacgccagggcgaagggcggtacaggccaaactggaggattaacccagcccaaaaaagacgagccaaagaagctcccacccaggccgggaggaccagagccaaagccaggtcacccccctcaaacgcgccaagcaaccgccaggaccgttaccccgaaaggacaactgccgggaggaaaggcccctcccaaagctggttcggtccctagcagcttcctgcttaaaaaggccagggaaccaggacccccacgggagccgaaggagccctttagaccacctcctattacgccacatgaatacatgctgagtctgtaccggaccctgtcggacgctgatcgtaaggggggtaattctagcgtgaaactggaggctggcttggccaatacaatcacctctttcatcgacaaaggtcaggacgatcgcggaccagtggtgcgcaaacaacgctacgtttttgacatttccgccctcgaaaaggacggtttgttgggagccgagctgcgaattctcaggaaaaagcccagtgatacagccaaaccggctgcccctggtggtggcagagccgctcagctgaagttaagctcgtgtccatctggtagacagcccgcttcgctgctagacgtgcggtccgtacccggtttggacggatccggatgggaggttttcgatatctggaaactgttccggaatttcaagaattccgcccagctttgtttggagctggaggcctgggagcgcggtagagctgtggatttacgtggactgggatttgatcgagccgcacggcaggtgcacgagaaagcgctgttccttgtcttcggacgcaccaaaaaacgtgatctctttttcaacgaaattaaggcacgctccgggcaagacgacaagacagtgtacgaatacctgttctcccaaagacgcaagcggagagccccattggccaccaggcaagggaagaggcctagcaagaacttgaaggcccgttgttcccgcaaggccttgcatgtgaactttaaggacatggggtgggacgactggatcatcgcacccctcgaatatgaggcctttcattgcgaaggcctgtgcgaattcccactgaggtcacatctcgagcctacaaatcacgcagttatccagactttgatgaattcaatggatcctgagtccacccccccaacctgctgtgtgcctacaagactctcaccgatcagtattctgttcatcgattcagctaataacgtagtgtacaaacagtatgaagatatggtggtggagtcttgcggctgcaggtag

SEQ ID NO: 225312 - DNA, 1368 bp, synthetic construct
  misc_feature 1..1368: note = Description of Artificial Sequence: Synthetic coding sequence
  source 1..1368: mol_type = other DNA
atggacactcccagggtactccttagtgcggtctttttaatctctttcctgtgggatctgcctgggttccagcaggcgtccattagttcaagctcatcgagcgctgaattgggtagcacgaaaggcatgagatcacgaaaagagggaaaaatgcagcgtgcaccaagagactccgatgcagggcgtgagggtcaggaaccacagccacggccacaagacgaaccgagagcacaacagccacgggcacaggagccacctgggcgaggcccaagggtcgtcccgcacgagtacatgctgagcatataccgcacttactctattgccgaaaaattgggcatcaacgcgtcttttttccaaagcagtaagagtgcaaatacaattactagttttgtggataggggattggacgacctttcacacacaccactgagacgacagaagtacctgtttgacgtgagtatgctctctgataaagaggagcttgttggcgcagaactgaggctgtttcgccaagccccaagtgcaccatggggtccgcctgcaggccctctgcatgtccagctgtttccctgtttgtcccctttgctactggatgctcgcactctggatcctcagggagccccaccggctggatgggaagtcttcgatgtctggcaggggctgcgacatcagccgtggaagcagctgtgcttagaattgagagcagcctggggagaactcgacgccggagaggcggaggcccgagccagggggcctcagcagccgccaccgcctgatctaagatcgctggggtttggccgtagggtgaggccgcctcaggaacgtgccttgctagtggtgttcactcgcagccaaaggaagaatctcttcgcggaaatgcgggagcagttgggctccgccgaagctgccggaccaggcgctggcgctgaaggaagctggcctccgccaagcggcgctcctgacgctcgcccttggcttccgtctcctggtcgcaggaggcgaagaactgcatttgcttctagacacggcaagcgccacggcaaaaaatccaggttgaggtgctctaagaagccactccacgtcaatttcaaagagctgggatgggacgattggatcattgcgcctctggaatatgaagcctatcattgcgagggtgtttgcgattttcctctccggagccacctagagccgactaaccatgctatcatccaaactttgatgaattctatggaccccggatctaccccgccttcttgctgcgtgcccacaaaactgacaccaatatccatcctgtatattgacgctggtaataatgtggtgtataagcaatatgaggacatggtggtcgagagctgtgggtgcaggtag

SEQ ID NO: 225313 - DNA, 1062 bp, synthetic construct
  misc_feature 1..1062: note = Description of Artificial Sequence: Synthetic coding sequence
  source 1..1062: mol_type = other DNA
atggatacccccagagtgcttttgagcgccgtgtttctgatctcttttttgtgggacctgccgggattccagcaggcaagcatatcctcatctagcagcagcgcggaactgggttccacaaaaggaatgcgcagccggaaagagggaaagatgcaacgggcaccaagagattctgatgccggtagagaggggcaggagccccagccaagaccgcaggatgagccgagggctcaacagccacgcgctcaagagccccctggcagggggccaagggtcgttcctcatgagtatatgcttagtatctaccgcacatattcaatagccgaaaagctcggtattaacgccagcttcttccagtcctccaaatccgctaacacaattactagtttcgtggaccgcggtctggacgatctgagtcacacacccctgaggagacagaagtacttattcgacgtctccatgcttagcgacaaagaggagctggtaggagctgaattgcgccttttccggcaggctccatccgccccatggggacctcccgcaggccctctgcacgtgcagcttttcccctgtctgtcaccactgttactggacgctagaaccctggacccacagggagctcctccagccggatgggaagtgttcgacgtttggcagggcctgcgccaccagccttggaaacagctgtgccttgagctgagagccgcttggggcgagttggacgctggagaagctgaggcacgggctcggggtcctcagcaaccccctccccctgatctgaggagcctgggtttcgggcgacgggtacgtccaccacaggagagggctctgctggtggtgtttacaagatcccaacggaaaaacctgttcgcccctggagtcagggggctctcactcagggggtgcatgcgtttgcccgcagccctcgcaccaggagcacaccagcctcgacatcaccctgacgctgatgagttgcacggtcctcggctccatcccgctcagctcctccgggctcatcagattgattcccaccagcactccatccacagaagagggcaatag

SEQ ID NO: 225314 - DNA, 816 bp, synthetic construct
  misc_feature 1..816: note = Description of Artificial Sequence: Synthetic coding sequence
  source 1..816: mol_type = other DNA
atggatactccgcgagtccttctgtcagcagtgtttttgatttccttcctgtgggacctgccaggcttccagcaagcctccatctccagctcttccagttctgcagagctggggagtaccaagggaatgaggtcaagaaaagagggcaagatgcagcgagccccacgtgatagcgacgccggacgcgagggccaggagcctcagccgaggcctcaggatgaaccgcgagcccagcagccccgagcacaagagcccccaggtcggggaccgcgagtcgttcctcatgaatacatgcttagcatctaccgcacatattccatagcggagaaactcgggattaatgctagctttttccaaagctctaaatcagccaataccatcaccagttttgttgatagaggcctcgatgatttgtcacacactcctctcaggagacagaagtatctattcgatgtctccatgctgagcgacaaagaggagttagtgggcgctgagctgaggttattcagacaagccccatctgcgccttggggcccaccagcaggacctctgcacgttcagctttttccgtgcctttctcctctcctgctggacgcccgtacactggatcctcaaggggcaccaccagcaggctgggaagtcttcgatgtgtggcaaggcttaaggcatcaaccatggaaacagctgtgcctagaactccgcgcagctccgggtcccgctgagtcagggctgagacctgagggggcagcttcccctggggctggcccagctggaggaatccaccagattcctgcagctgcctgccccccaaactag

SEQ ID NO: 225315 - DNA, 1353 bp, synthetic construct
  misc_feature 1..1353: note = Description of Artificial Sequence: Synthetic coding sequence
  source 1..1353: mol_type = other DNA
atggacttgtcggccgctgcagccctgtgcctgtggcttctgtccgcctgccgaccacgcgatggccttgaagcagctgctgtgctacgcgctgccggagccggtcccgtgcggtctcctggcggtggtggcggtggtgggggagggggacggacactagcgcaagccgctggcgctgccgctgtacccgctgctgcagtgccgagggcacgtgctgcccgacgcgctgccggtagtggtttccgcaatggcagtgtggtgcctcaccatttcatgatgtctctctaccggtcgctcgctggcagagcccctgccggtgccgctgccgtgagcgcaagcggccatggccgtgccgacactatcacggggttcacagatcaggccacccaagacgagtcggccgcagaaactggccagtcttttctctttgacgtgtcatctttgaacgacgccgatgaggttgtcggagccgagctgagggtgttgagacggggaagtccggagtccggacccggatcctggacaagtcctccgctgctgcttctgtcaacctgtcccggtgcggctagagctcccaggttattatactcccgcgcagccgagccactggtcgggcagcggtgggaggcttttgacgtggctgacgccatgcgcagacatagaagagaaccccgacctcccagagcattctgcctgttgctgagggctgtggcaggtcccgtgccatctccactagctcttcggagactcggttttgggtggcctggcggaggcggaagcgccgcagaggagcgcgcagtgttagttgtctctagtagaacgcagaggaaagagtccttattccgagaaataagggcacaggcccgagccctcggtgcagcactggcctccgagcccttaccagatccagggactggcaccgcatcacctagagctgtgatcggtggaagaaggcgtcggcgaacagccctggctggcactaggacagcacaggggtcaggcggaggcgctggcagaggccatggcaggaggggacgcagccgctgctcccgcaagcccctccatgtggattttaaggaattaggttgggatgactggatcatcgcccctctcgattacgaggcctaccactgcgaaggcctgtgcgactttccactccgcagccatcttgagccaacaaatcacgctatcatccagacgctgctgaatagtatggcgccagatgccgcacccgcaagctgttgcgttcctgccagactgtctcccatttccatcttatatattgacgctgctaacaatgttgtctacaaacaatacgaagatatggtcgtggaggcctgcgggtgccggtag

SEQ ID NO: 225316 - DNA, 1269 bp, synthetic construct
  misc_feature 1..1269: note = Description of Artificial Sequence: Synthetic coding sequence
  source 1..1269: mol_type = other DNA
atgcctaggagctttctggtgaagtccaagaaagctcactcctatcaccagcctaggagtccaggaccagattattctctgcgcctggagaatgtgcccgctcctagtcgagcggattcaaccagcaatgccggaggggctaaagcagagcctagggacagattgagccccgaatcgcaactgacagaagcccctgaccgagcctcagcaagccctgattcctgtgaaggtagcgtttgcgaacgctcatctgaattcgaggatttttggcgtccacccagccccagcgccagtcccgctagtgaaaaatcaatgtgtccgtcacttgatgaagctcagccattccctcttccattcaaaccttatagctggtctggcctggccggatcagatctgagacacctggtccaaagttacaggccatgtggtgctctggaacgaggcgctggactgggtctgttttgcgagcccgctcctgaaccagggcatccagccgcactgtatggccctaaaagagccgctggcggtgcaggcgcaggggctccagggtcctgctctgctggggctggagcaaccgcgggacccggtcttggcctgtacggcgatttcggatctgctgccgctggcttgtacgagcggccaaccgccgctgccggtttactatatcccgaaagaggacatggactgcatgccgacaaaggggctggcgttaaggtggaaagtgaattgttatgtactcgactgttgctcggtggtggatcgtacaagtgcattaagtgctccaaggtgttttccactccccatggactagaggtgcatgttcggcgtagccactctgggacgagacctttcgcatgtgaaatgtgcggcaagactttcggccacgcagtgagcctcgaacagcacaaggcagtgcatagccaggagcggagtttcgactgcaagatttgtggaaagtctttcaaacgaagctcaacacttagcacacaccttttgatccattccgacacgaggccatatccgtgccaatactgcgggaagaggtttcatcagaaatctgacatgaaaaagcatacctttatccacaccggggagaaaccccataagtgtcaggtgtgcggaaaagcgttcagtcagtcttctaaccttattacgcatagtaggaagcatactggattcaagcccttcggatgcgatctgtgcggaaagggtttccagcggaaggtcgatcttaggcgccaccgggagacgcaacacggcctcaagtag

SEQ ID NO: 225317 - DNA, 1269 bp, synthetic construct
  misc_feature 1..1269: note = Description of Artificial Sequence: Synthetic coding sequence
  source 1..1269: mol_type = other DNA
atgcccagaagtttcctggtaaaaagcaagaaggcccactcttaccatcagcccagatcccccggtccagattactcattgaggctggagaacgtccccgctccatctagggctgattcaactagtaacgcgggtggcgctaaagccgagcctagagaccggttgagcccagagagccagctcaccgaagctcccgatcgtgcctccgctagccctgactcctgtgaagggtcagtatgtgaacgcagtagcgagttcgaagatttttggcgaccgccatctccctctgcttcgccggctagcgagaaatctatgtgccctagtctggacgaagcacaaccctttcctctcccgttcaagccatactcttggagcgggctggcgggtagcgatttaaggcatctggtgcagtcataccggccttgcggggctttagagagaggcgcagggctcggactgttctgcgagccagcccctgagcctgggcaccctgctgcactgtacggacccaagagggccgcaggaggtgctggggcaggtgcccctggcagctgcagcgccggagccggtgcaacggctgggcctggcttgggcctttatggcgacttcgggtccgctgccgcaggcctctacgaacggccaacagctgccgctggtctgctctaccctgaaagaggccacggtctgcacgcagataagggggctggcgtcaaggtcgagagcgagctgttgtgcactaggctgctcctgggagggggttcatataagtgtattaagtgctccaaggtcttttctaccccccatggcctggaagtccacgtgagaagatctcactctgggacaagaccattcgcctgcgaaatgtgtggaaaaacgttcggccatgccgtgtccctggagcagcataaggctgtacactcccaagagaggtccttcgactgcaaaatctgtggaaagtcgtttaagcgctcatccactctatcaacccacttgcttatacactccgatactcgaccctacccctgccaatactgtggcaagaggtttcatcagaagtcggacatgaagaagcacacatttatccacaccggcgagaagcctcacaaatgccaagtctgtggaaaggctttttcccagtcctccaatctcattacccatagccgcaagcacaccgggttcaagccgttcgggtgtgacctgtgcggcaaaggcttccagcgaaaggtcgacctgaggaggcaccgtgagactcagcatggcttgaagtag

SEQ ID NO: 225318 - DNA, 1269 bp, synthetic construct
  misc_feature 1..1269: note = Description of Artificial Sequence: Synthetic coding sequence
  source 1..1269: mol_type = other DNA
atgcccaggagtttcctcgtcaagtcaaaaaaggctcactcgtaccaccagcctagaagccccggtcctgactactctttgaggcttgagaatgtccctgcccctagtcgcgctgattcaacctctaatgccggaggagccaaggcggagcccagagatcggctgtccccagaatcgcaactcacagaggctcccgatcgagcgtctgcttctccagattcctgtgagggttcagtatgcgaaaggtctagcgagttcgaggacttctggagacctccaagccccagcgcctctcccgcatccgaaaaatcaatgtgcccgtctctggacgaagcgcagcccttccctctccccttcaagccctactcttggtcggggctggccggatccgatttaaggcatctggtgcaatcatacagaccctgtggcgcactggaacgcggtgccggattggggctgttctgtgaacctgctcctgaacccggtcaccccgctgccttatatggtccaaaaagagccgctgggggtgccggagcgggagcacccggatcatgctcggcgggagccggtgcaacagctggcccaggactggggttgtacggggatttcgggagtgctgccgctggtctgtacgagcgtcccacagctgcagcaggattgctgtatcccgaaagaggccacgggctgcacgcggacaagggcgctggagtgaaggtagagtcagaattgctgtgcacaaggttattgctcggcggtggtagctataaatgcatcaagtgttctaaagtgttttctacaccccacggccttgaggtccatgtaagacgctcccactccggaacccgccctttcgcttgcgagatgtgcggcaagacatttggtcatgcagtgtcccttgagcaacacaaagccgtccattcacaggagaggagttttgactgcaagatatgcgggaaatccttcaagagatcaagtactctgtcaacgcacctccttatacatagcgataccaggccctacccctgccaatattgcggtaagagatttcaccagaagtccgacatgaagaaacacacatttatccacacaggagagaaaccacacaagtgtcaggtatgcggcaaagcattcagtcagtctagtaacttaatcactcactcgcgtaagcacactggtttcaagcctttcggatgcgacctgtgcggcaaaggcttccaacgcaaggtagatttacggcgacaccgagagacacagcatggactcaaatag

SEQ ID NO: 225319 - DNA, 993 bp, synthetic construct
  misc_feature 1..993: note = Description of Artificial Sequence: Synthetic coding sequence
  source 1..993: mol_type = other DNA
atgccaagaagcttcctcgtgaaaagcaaaaaggcgcatacatatcatcagccacgggtccaggaggatgagccattatggcctcctgcactcacacctgtcccgagagaccaagcccctagtaatagccctgtgctttcaacactctttcctaatcagtgcctggattggaccaacctcaagcgggagcccgagttggaacaagaccagaatcttgcccgaatggctcctgcccctgagggacccatcgtcctgtcaaggccacaggatggcgattctccccttagtgattcaccacccttttataaaccttcattttcttgggataccctggcaacgacatacggtcactcatatagacaggcaccttccacaatgcagtctgcttttctggagcactcggtgagcctctacggctctccgttggtgccttctacagagccagcactcgacttttcattgcgctactcccctggcatggacgcctatcattgtgtaaagtgtaacaaggtcttttccaccccacatggactcgaggtccacgtgagaaggtcgcattccggtactcgtcccttcgcatgtgatatttgcgggaagacgtttggacacgcggtaagtctcgaacaacacacgcacgtgcattctcaagaacgttctttcgagtgtaggatgtgtggcaaggccttcaagagaagcagtacactctctactcacctcctcattcatagcgacaccaggccatatccatgccagttctgcggcaaacgctttcaccagaagtcagatatgaaaaaacacacatacatacacacgggcgaaaaaccccacaagtgccaagtgtgtggaaaagcatttagccagagtagcaacctgattacacactccaggaagcacactggatttaaaccatttagctgcgagctctgtaccaaaggctttcaaagaaaggtggacctgcgtagacatagagaatcacagcataacctgaagtag

SEQ ID NO: 225320 - DNA, 993 bp, synthetic construct
  misc_feature 1..993: note = Description of Artificial Sequence: Synthetic coding sequence
  source 1..993: mol_type = other DNA
atgccaaggagcttcctggtgaagtcaaagaaagctcacacgtaccatcagccccgagtgcaggaagacgagccgctttggcctcccgcattaacacccgtgccacgagaccaggcccctagtaattctccagtgctgtccactctattcccaaaccagtgcctcgattggacaaatctgaagagggagcccgaactggaacaggatcagaatctggccaggatggccccagcccctgaaggaccaatcgtgctgtctcggccacaggacggtgatagccccctgtcagattcccccccattctacaaaccatcgtttagctgggatacgttagctacaacttatgggcattcctatcgccaggcaccctccactatgcaatccgcatttctagagcatagtgttagtctgtacgggtccccgcttgtgccctcaacagaaccagcactcgattttagtctgagatattcccccggtatggatgcttaccactgtgtgaaatgcaacaaagtgttctccaccccacacgggctggaggtccacgtgcgaaggtcccatagcggaaccagacccttcgcgtgcgacatatgtggcaaaacctttggtcatgccgtctcacttgaacaacacacacatgtgcatagtcaggagagatcattcgaatgccgtatgtgtggcaaagcctttaaaagaagtagtacgttgtcaacacaccttctgatccactccgacacgaggccatacccatgtcagttctgcggcaaacgattccaccagaagtccgatatgaagaaacatacatatatccataccggtgagaagccgcacaaatgccaagtgtgcgggaaggcgttttcccagtcctctaatttgattacacactcccgtaagcacactggttttaagcccttctcctgcgaactgtgtacaaagggatttcagcggaaggttgatctgagacggcaccgcgaatcccagcacaacttgaaatag

SEQ ID NO: 225321 - DNA, 855 bp, synthetic construct
  misc_feature 1..855: note = Description of Artificial Sequence: Synthetic coding sequence
  source 1..855: mol_type = other DNA
atgcccaggtctttcctggtgaaaagcaaaaaggcccatacctaccaccagcccagggtccaagaggacgagccgctgtggccaccggctttgacaccagtgcctagggaccaggctccaagtaattctcccgtgttatccacactgttccctaaccagtgtctggactggaccaacctgaagcgagaacctgagttagaacaggaccaaaacctggcaaggatggccccagctcctgagggtcccattgtcttgagtcggccacaggatggggacagtcctctttccgactccccaccgttctacaagccgagcttctcttgggacactctggctactacctacggtcactcataccgccaagcgccttccacgatgcaatctgcattcctcgagcactccgtctcactttatggcagccccctggtgcccagcaccgaacccgctctcgatttttccctccggtatagtccaggaatggacgcatatcactgtgtcaagtgcaacaaagaaagatcattcgagtgccgaatgtgcggtaaggcttttaaaaggtcttctacactttcaactcatttactaatacactctgacactcgtccctacccttgtcagttttgcgggaaacggttccatcaaaagtctgatatgaaaaagcacacgtatatccacacaggcgaaaagcctcataaatgccaagtctgcggcaaggcgttctcccagtctagcaacctgatcacacattctagaaaacatacaggctttaagccattctcttgtgagctgtgtacaaaaggattccagagaaaggtggacctgcgacgccatcgagagtctcaacacaatctgaagtag

SEQ ID NO: 225322 - DNA, 855 bp, synthetic construct
  misc_feature 1..855: note = Description of Artificial Sequence: Synthetic coding sequence
  source 1..855: mol_type = other DNA
atgcctcgaagctttttagtgaagtcaaagaaggcacatacctaccaccagccacgggtgcaggaggacgaacccctatggccaccggctttgacccctgtgccgagagatcaggcgccatctaatagtcccgtgctctccaccctctttcccaaccaatgtctcgactggaccaatcttaaaagggagcccgaactggagcaggatcagaacctcgcgcgaatggctccagccccagagggaccaattgtactgtctcgtccacaggacggggactcccctctgagcgattcacccccattctacaagccctcttttagttgggacacccttgcgacaacatacggacacagttataggcaggctcctagcaccatgcaaagcgcgttccttgagcattccgtaagcctgtatggctccccgttggtcccgagtacggagccagctttagatttctcattaagatattcgcctgggatggacgcataccactgtgtgaagtgtaacaaggagaggagcttcgagtgtaggatgtgtggtaaggcgttcaaacggagctctaccctttcaacacacctgctcattcacagcgacacccgaccatacccatgtcagttctgcgggaagcgtttccaccagaagtccgatatgaagaagcatacctatatccataccggcgagaaaccccacaaatgccaagtttgcggtaaggccttcagccagtcatcaaacctgattacacacagtagaaagcacacaggcttcaagccgttctcctgcgaattgtgcacaaaggggtttcaaagaaaagttgacctgcggagacatcgtgaatcccagcacaatctcaagtag

SEQ ID NO: 225323 - DNA, 993 bp, synthetic construct
  misc_feature 1..993: note = Description of Artificial Sequence: Synthetic coding sequence
  source 1..993: mol_type = other DNA
atgccacggagttttctcgtcaagtccaaaaaggcccacacttaccaccagcccagggtacaggaggacgaaccactgtggccccctgccttgacaccagtgccacgggatcaagcaccatcgaacagtcccgttttgtctacactttttcccaaccaatgcctggactggaccaacctaaaacgcgagcccgagctggagcaggaccagaaccttgccagaatggcgcctgctcctgagggacccatcgtcctgagcaggccccaggacggtgatagcccactcagcgactctccccctttctacaagccttctttttcttgggacacattggccacgacgtatggccactcctataggcaggcaccgagcaccatgcagtccgcttttctggaacattctgtgtcactgtacggatccccattggtgccgtcaacagaacctgctctcgatttctcgttgcggtactccccaggcatggatgcctaccattgtgtgaagtgcaataaagtgtttagcacaccccacggtctggaagttcacgtgagacgctctcactctggaacaaggccctttgcctgcgatatctgtggcaaaacctttggacatgccgtaagtctcgagcagcacacacacgtgcattcacaggagcggtctttcgagtgcaggatgtgcggtaaagccttcaaaagatcttcaactctcagtacccaccttctcatccacagtgataccaggccttatccctgtcagttctgcgggaagaggtttcatcagaagtcggacatgaagaagcatacttatatccacaccggtgaaaagcctcacaaatgtcaggtttgcggaaaggccttctcacagtcctctaacttgatcacacatagccggaaacataccggattcaaacccttctcctgtgagttgtgtacgaaagggtttcaaaggaaggtggatctgcgcaggcatcgagagagtcagcacaatcttaagtag

SEQ ID NO: 225324 - DNA, 855 bp, synthetic construct
  misc_feature 1..855: note = Description of Artificial Sequence: Synthetic coding sequence
  source 1..855: mol_type = other DNA
atgccaagatcttttttagtaaagtctaagaaggcccacacatatcatcagccgcgagtgcaagaagatgagcccttgtggccccctgcgctgaccccggtgcctcgcgatcaggctccgtccaatagtcctgttctttcaactctctttcctaaccagtgccttgactggactaatctgaagcgcgagcccgagcttgaacaggatcagaatctggctcggatggccccagcacctgaaggtcctatcgtgctctctcgtccacaggacggcgacagtcccttatcagactcacctcccttttacaaacccagcttctcatgggatacccttgctaccacatatggacattcttacagacaggccccaagtactatgcaaagtgcatttttagaacatagtgtgtctctgtacggatcgcctctggtaccgagcacagaaccagccctggatttcagtcttcggtactcaccgggaatggatgcctatcactgtgtgaagtgcaataaagagcgcagttttgagtgtagaatgtgcggaaaagcctttaagaggtcatctactttgtcaacccacctgcttatccacagcgatacccgaccatatccttgccaattctgcggcaaaagattccatcagaagagtgacatgaagaagcatacttatattcatacaggggaaaaaccacataagtgtcaggtctgtggtaaggcgttctcccagtcaagcaacttgatcacacattccaggaagcacaccggtttcaagccattctcttgcgagctttgcactaaaggcttccagaggaaagttgacctgagacgacacagagaatcccagcataatcttaagtag

SEQ ID NO: 225325 - DNA, 1623 bp, synthetic construct
  misc_feature 1..1623: note = Description of Artificial Sequence: Synthetic coding sequence
  source 1..1623: mol_type = other DNA
atgacaacctcccttcaggacggccaaagcgccgcaagtagagcagcggcaagagattcacccttggcagcccaggtttgcggcgcagcccagggcagaggcgacgcccatgatcttgcacccgcaccatggttacatgccagggcccttctcccccttcccgatgggacacgcggatgtgccgcagaccggagaaagaaaaaggatttggacgtgccagagatgccttcaatacccaatccattccctgaactgtgctgttcccccttcaccagtgtgttatccgccgacctgtttccaaaagcgaattcacgaaaaaagcaggtgatcaaggtttattcagaggacgaaacatccagggcactcgacgtccctagcgatatcacagctcgcgatgtgtgtcaactgctgattctcaagaatcattatatcgacgatcattcctggactcttttcgaacatctgcctcacattggcgtagagaggaccatcgaggatcatgaattggtgatcgaagtcctgtccaattggggaatagaggaggagaacaagctgtactttcgcaagaactatgcaaagtacgagttttttaaaaaccctatgtacttctttcctgagcatatggtctcttttgccaccgaaacaaacggcgaaataagtcccacccagattctacagatgtttttgagtagttcaacctatcctgaaattcatgggttcctgcacgcaaaggagcaggggaaaaaatcttggaagaagatttacttcttcttaaggcggtccggcctttacttctctactaaaggtacttccaaggaaccaaggcacttgcagttttttagcgagtttgggaactctgacatttacgtgtcactagctggcaagaagaagcacggcgctccaactaattatggattttgttttaaacctaacaaggccggtggccctcgtgatttgaagatgctctgcgccgaagaggagcaaagccggacttgttgggtgacagcaatcaggcttctgaagtatggaatgcaactttaccagaactacatgcatccttatcagggaagatcgggctgctctagccaatccatcagtcctatgcgcagtattagcgagaatagcctcgtcgctatggatttcagcggccagaaaagtcgggttattgagaaccccacagaagcccttagtgtggcagtggaggagggcctggcttggaggaagaagggatgcctgcgactgggcacacatggctcccccactgcctcctcacagagcagcgccaccaacatggcgattcatcgctcccagccctggttccatcataaaatatcgagagacgaggctcagagattgatcatccagcagggcctggtagatggcgtgttcctggtgagagatagtcagagtaatcccaaaacattcgttctgtctatgtcacacgggcagaagatcaagcatttccagattatcccagtggaagacgatggggagatgttccatactctggacgacgggcatacccgatttaccgatttgattcaactggtggaattttatcaactcaataagggcgtcctcccttgcaagcttaagcattactgcgccagaatagccctatag

SEQ ID NO: 225326 - DNA, 1362 bp, synthetic construct
  misc_feature 1..1362: note = Description of Artificial Sequence: Synthetic coding sequence
  source 1..1362: mol_type = other DNA
atgtccctcagtgccaggcgtgtgacacttccggctattacgccaatcatcttacagaagcgggtgattaaggtttacagtgaagatgagacatcaagggccctggatgttccgtcagatatcacggcccgagacgtgtgtcagttacttattctgaaaaaccactacatcgatgaccactcttggaccctgttcgagcatctccctcatatcggggtcgaacgtacaatagaggaccacgaactggtgatcgaggttctttccaattggggtattgaagaagaaaataagctctacttccgcaaaaactatgccaagtatgagttttttaagaatcctatgtacttcttccctgaacacatggtcagctttgctacagaaacaaatggcgagataagtcccacacaaatcttgcaaatgttcctgtcatcctccacataccctgaaatccatgggtttctgcatgccaaggagcagggtaagaaatcttggaaaaaaatctacttttttctcaggcgaagcgggctgtacttcagtaccaagggaacctccaaggaaccccgtcacctgcagttcttcagcgaatttggaaattccgatatttacgtatctctcgcaggtaagaagaaacatggagctcctacgaattacggcttttgcttcaagcctaacaaggcaggaggtcccagggatcttaaaatgctatgcgctgaagaagagcagtcaaggacatgttgggtcacggccatccgactcttgaaatacgggatgcagttatatcagaactacatgcacccttatcaaggcaggtctggctgtagctctcaatccatcagtccgatgaggtctataagcgagaacagcctggtggcaatggacttcagcggccaaaagtcgagagtgattgaaaatccaactgaggccctgagtgtcgcagtcgaagagggtctcgcgtggaggaaaaaaggctgtctccggctgggaacccatggaagtccgaccgctagctcccaaagctctgccaccaacatggccattcatcggtctcagccttggttccatcacaagatctctcgcgatgaggcccagaggctgatcatacagcagggactcgtagacggcgtgtttctggttagggatagccaatcaaacccgaagacttttgtccttagcatgtctcacgggcaaaagattaagcatttccagatcatacctgttgaggatgatggcgaaatgtttcacactttggacgatggccacactaggttcactgacttgattcagttggttgaattctatcagctgaacaagggtgtgctcccttgcaagttgaaacattattgtgctcgcattgcactgtag

SEQ ID NO: 225327 - DNA, 1599 bp, synthetic construct
  misc_feature 1..1599: note = Description of Artificial Sequence: Synthetic coding sequence
  source 1..1599: mol_type = other DNA
atggagctggacctctctccgccacacctgtcttcttcacccgaggatctgtgccctgctcccggaacaccacccggtacacctcgcccacccgatacccctctaccagaggaagttaaaagatcacagccccttttgatccctactaccggcagaaaactcagagaagaagaacgcagggccacttcgctaccctcgatccctaacccttttccagaattgtgtagccccccatctcaatcccctattctcgggggaccatcttccgcacggggattgctgccaagagatgctagtcgacctcatgtagtgaaggtttattctgaagacggtgcatgccgctcggttgaggtggcagccggagccaccgcaaggcacgtgtgtgagatgttagtgcagagggcccatgccctatccgacgaaacctggggattagtggaatgccatccgcatcttgccctcgagaggggtttagaagaccatgagagcgtggtcgaagttcaagctgcttggcccgttggaggcgattcccgctttgtcttcaggaaaaactttgcgaagtatgaattgttcaagagttcaccccatagcctgttccccgagaagatggtctccagctgtctagatgcccatacagggattagtcatgaggacctgatccaaaactttctgaatgctggcagtttccctgagatccagggcttcctgcagcttagggggagcggacgaaaactgtggaaaaggttcttttgtttcctacgccgaagcggcctctactatagtactaagggcacatctaaggatccgagacacctgcagtatgtagctgatgtgaacgaatcaaatgtctacgtggtaactcagggacgcaaactttacggaatgccaactgacttcggcttttgtgtcaaaccaaataaactacggaatggacataaaggcctccggatcttttgcagcgaggacgagcagagtcgaacgtgttggctagctgccttcagactgttcaagtatggcgtgcaactttacaagaactaccagcaggctcagagcagacatttgcacccaagttgcttggggtcaccacctctgcgtagtgcttcggataatactctagtagctatggacttttcaggacacgcagggcgtgtgattgagaatccaagagaggcgctgagcgttgcactagaagaggcccaggcctggagaaaaaaaacgaatcatagactgagcttgcccatgccagcttccgggacatcgctgagtgcagcaatccatcgcacccaactttggttccacggcagaatttcacgagaggagagccaacgactaatagggcagcaaggcctggtggacggcctcttcctggtgcgtgaatcgcagcgaaatcctcaaggatttgtgctatccctatgccacttgcagaaagttaaacactatcttatcctgccctctgaggaagaaggcagattgtactttagtatggatgacggccaaacaaggttcacagacctgctgcagctggtcgagttccaccagctgaatcgagggatcctgccttgcttgctgaggcactgctgcacaagagtggcactgtag

SEQ ID NO: 225328 - DNA, 1344 bp, synthetic construct
  misc_feature 1..1344: note = Description of Artificial Sequence: Synthetic coding sequence
  source 1..1344: mol_type = other DNA
atggaactggatctcagtccacctcatctctcatcatcaccggaggatctctgcccagcccctgggacgccaccaggcactccacgaccccctgacacgcccctcccagaggaggtgaaacggagccaaccattgctgataccaacgacgggcagaaaattgagagaagaggaacgaagggccaccagcctacctagtatccccaatccatttccagagttgtgttctcccccaagccaaagccccattcttggcggtccatcatcagcacgtgggttgctgccccgagacgcgtcacggccacatgtggtcaaagtgtactctgaggacggcgcatgccgcagtgtggaggtggcagccggtgcaacagccagacatgtgtgtgagatgctggtccagcgagcccatgcgctcagcgatgagacctggggtctcgtcgagtgccacccacatctggccctggagcgcggacttgaggaccacgaatccgttgttgaggtgcaggctgcctggcctgtaggaggcgactccagattcgttttcaggaagaattttgctaagtatgagttgtttaagtcaagcccacattccctgtttcctgagaagatggtgagtagttgcctggatgcacacactggaataagtcacgaagacctcattcagaactttctaaatgcaggcagtttcccggagatacagggtttcttacagctccgcggttctgggcgaaagctttggaagcgattcttttgcttccttcgtagaagtgggctctattacagtaccaagggtacaagcaaggatccgagacatctgcaatacgtcgccgacgttaacgagtctaatgtgtatgtggtgacccaagggcgaaagctgtatggtatgccaaccgattttgggttttgcgtgaaacccaataaactcagaaatggccacaaggggcttcgaatattttgttctgaagatgaacagtctcgcacttgttggttggcagccttccggctgtttaaatatggagttcagctttataagaactatcaacaggctcagagcagacatctacatccaagttgcttaggaagtccacccctgcgatccgccagtgacaatacgctcgttgcaatggatttttcagggcacgcgggaagagtaattgagaatcctcgagaggcgctcagcgtcgccctggaggaggcacaggcttggaggaagaagaccaaccatcgcctatccttgccaatgcccgcaagcggcacctcactatccgctgcatgttcctggagcggaagagtctctggaaccccccgtgctttgagttcgctttgtgctacctgccgaaagtag

SEQ ID NO: 225329 - DNA, 1344 bp, synthetic construct
  misc_feature 1..1344: note = Description of Artificial Sequence: Synthetic coding sequence
  source 1..1344: mol_type = other DNA
atggaactggatctgtcacccccacatctgtccagcagtcctgaggacctgtgtcctgcccctggaaccccgccaggtactcctcggcctccggacaccccactgcccgaagaagtcaagaggagccaaccgctcttgatcccaactactggtcggaagctgagagaggaagagcggagagcaacatctctgccgtccataccaaaccccttccccgagctgtgttccccacccagtcagagccccatactggggggtcccagtagcgcacgagggctcttaccccgagacgccagccgccctcatgtagtgaaggtgtattctgaggatggggcttgccgcagtgtggaggtcgctgcaggtgcaactgccagacatgtgtgcgagatgcttgtacagcgggcacatgctctatcagacgaaacctggggccttgttgagtgccatcctcatttggcattagagcgcggattagaagatcatgagagtgtggtcgaagtgcaggccgcatggcccgttgggggagacagtaggttcgtgttcagaaaaaacttcgctaagtatgagctgtttaaatctagcccccattcactgttccccgagaagatggttagctcctgtctcgacgcacacaccggcatctcacacgaggacctaattcagaactttcttaacgcaggctccttccccgagatccaaggattcctgcagttgagaggtagcggcaggaaactatggaagcgcttcttctgtttcctgagaaggagcggcctgtattatagtactaaagggacctctaaggacccccgtcacctgcaatacgtggccgacgtcaacgagtctaacgtctacgtggtcacacagggccgtaaattatatggtatgccaaccgacttcgggttttgtgtaaagccgaacaagttacggaatggccacaaggggttacgcatcttctgcagtgaggatgaacaaagcagaacctgctggctggccgcttttaggctctttaaatatggcgtgcagttatataagaactaccagcaggcacagtctcgccatctgcacccgtcctgcctgggctctccaccactacgatctgcctcagacaatactctggtggctatggacttttccggacacgccggacgagtcatagaaaaccctcgtgaagccctaagcgttgccctcgaagaagcccaggcatggcgtaaaaagactaatcatcggcttagcctgccaatgcccgcaagtggcacttctctctcagctgcatgtagctggagcgggagggtctccggcactccaagagccctgtcatccctgtgcgccacatgccgcaagtag

SEQ ID NO: 225330 - DNA, 1599 bp, synthetic construct
  misc_feature 1..1599: note = Description of Artificial Sequence: Synthetic coding sequence
  source 1..1599: mol_type = other DNA
atggaactggacttgagccccccacatttgagcagcagcccagaagacctttgccctgctcctgggacccccccaggaacaccacggcctcctgatacacctctgcctgaggaagttaaacgatctcagcctctgctgataccgactacaggtagaaaactacgcgaagaggagcgccgtgccaccagcttgcctagcatccccaacccgtttcctgaactgtgctcccctccgagccagtctccaatcctggggggaccctcaagcgcaaggggcctgttgccaagagacgcaagtcgtcctcacgtggtgaaggtctattcggaagacggcgcttgtcgcagtgtggaggttgctgctggcgcaacggcgcgtcatgtttgcgaaatgttggtgcagcgagctcacgccctctcggatgagacctggggcttagtggaatgtcatcctcacctggccctggagagggggctggaggatcacgagtctgtggttgaggtgcaggccgcttggccagttggcggagacagccgtttcgttttcagaaaaaacttcgctaagtacgaattgtttaaaagcagtcctcactctctgttccccgaaaagatggtaagttcgtgcctggatgcacataccggcatcagccacgaggatctgatccagaacttcctaaatgcaggcagcttccctgagattcagggctttctgcagttgagaggttcggggcgtaagttgtggaaacgctttttctgtttcctgaggaggtccggcctatactattctaccaagggtaccagcaaagatcctagacatctgcaatatgttgctgatgtgaacgaaagcaatgtctatgttgtgacacaaggaaggaagctatatgggatgcctactgacttcggcttctgcgttaaaccaaataagctccgcaatgggcataaaggattaagaatcttctgttctgaggatgagcagtcccgtacctgctggctggctgcgtttcggctgtttaaatacggtgtccagctctacaaaaactatcaacaggcccaatctcgccatctccaccccagttgtctgggttccccaccacttcgctcagcgtctgataacaccctggttgccatggacttctccggtcatgcagggcgtgtcatagagaacccgagagaagcactgtcggtggccttggaggaggcacaggcctggcggaagaagactaaccataggctgtcactgcccatgcctgccagcggcacatctctttcagccgcaatccacaggacacagctttggtttcacgggcgaatatctcgcgaggagtcccaacggctgattgggcaacagggcctggtggacggcttatttctcgtgagagagtcacagcgcaacccccaaggttttgtgctgtcactctgccacctacaaaaagtgaagcattatttgatcctgccatctgaggaagaggggagattatatttcagtatggatgatggccagactagattcaccgacctcctgcagctggtggaatttcaccagttgaaccggggaatcctcccttgcctgttgcgccactgctgcactagagtggccctgtag

SEQ ID NO: 225331 - DNA, 1599 bp, synthetic construct
  misc_feature 1..1599: note = Description of Artificial Sequence: Synthetic coding sequence
  source 1..1599: mol_type = other DNA
atggagttggatctgagtccgccacacctgtcttcatcaccagaagatttgtgcccagccccagggactcctccaggcacgcctcgtcctcccgacacaccattgccggaagaggtcaaacgcagtcaacctctgcttattccaacaactggtcgaaagctcagagaggaagaaaggcgcgcaacaagcttacccagcatcccaaacccatttcctgaactatgctcccccccttctcagtcacctatcttggggggtccaagctctgctaggggactattgcccagagacgcaagcagaccccacgttgtgaaggtgtactccgaggacggggcttgccggtctgttgaggttgccgctggcgctacagcgaggcacgtatgcgagatgctcgtccagagagcacatgcccttagtgacgaaacctggggtctggtcgaatgccacccacatctggccctcgagagggggctggaagaccacgagtcggtggtggaagtgcaggcagcatggccagttggaggcgacagccgatttgtgtttagaaagaacttcgccaagtacgaacttttcaagagttccccccatagcctttttcctgaaaaaatggtctcctcttgcctcgatgcccatacaggcatctcccatgaagacctcatacagaacttcctgaatgccggaagctttccagagattcagggatttctgcaattgagaggaagcggacgcaaactgtggaaaagatttttttgctttctgaggcgtagtgggctctattacagtaccaaaggcaccagtaaggatccaagacacttacagtatgttgcagacgtgaacgaaagcaatgtctacgtggtcactcagggcaggaagctctacgggatgcctaccgacttcggattttgcgttaaaccaaacaaactgagaaacgggcacaaagggctgagaattttttgctccgaagatgagcaaagccgcacctgttggctggcggctttccgactttttaaatatggcgtgcagttgtataaaaactaccaacaagcacaatccagacacctgcatccatcatgccttggcagcccgccacttaggtctgccagtgacaacaccctagtggcgatggacttcagcggtcacgcaggacgcgtaattgaaaaccccagagaggccctgtccgtggccctggaggaggctcaagcctggcgcaagaagacaaatcataggcttagtctgccgatgcctgcctcagggaccagcctgtctgctgccatacatagaactcaactgtggttccacggccgaattagtcgtgaagagtcacaacgtctgatagggcaacaggggctagtggacggcttgtttctggtgcgggagagccagaggaacccgcagggcttcgtactctccttatgccacctccagaaggtgaagcattatctcatactgccctcagaagaagagggacgcttatatttttcaatggacgatggccagaccaggttcacagatctgctgcaactcgtcgagtttcaccagcttaacagagggatcttaccttgcctcctgcgtcactgctgcacaagggtagccctctag

SEQ ID NO: 225332 - DNA, 1668 bp, synthetic construct
  misc_feature 1..1668: note = Description of Artificial Sequence: Synthetic coding sequence
  source 1..1668: mol_type = other DNA
atgggcaaatggaggccaggacagggtcatacaacagggtctgtgaagccactgtcctgttcagatgcaatggagctggatttgtccccaccacacttgtccagctccccggaggacctgtgtccagcacccggtacacctcctggcacccctcgccctcctgacacacccttgccagaagaggtgaagagatcccagcccctgctgattcctacaactgggaggaagctgagagaggaggaacggagggcaacttctttgccttcaattccaaatccctttcccgagctttgtagccctcctagccaaagccctatcctaggcggacctagttccgctagaggcttactgccaagagatgctagtcggccacacgttgtgaaggtgtactccgaggacggcgcttgccggtctgtagaagtcgccgctggcgcaacagctcggcatgtgtgtgaaatgctcgttcaacgagcccatgctctgtctgacgaaacgtggggcctcgtcgagtgccatccccatctggcactggagcgtgggctcgaggaccacgaaagcgtggttgaggtgcaggcagcctggcccgtgggcggtgattcgcgatttgtgttcagaaaaaatttcgctaagtacgaacttttcaagtccagtcctcactccctctttcccgaaaagatggtatcgagctgcctggatgcccacactggcatctcacacgaggatttaattcaaaactttctcaacgccggatcgttccctgagatccaaggcttcctacagttgcgcggttcggggagaaagctgtggaagcggtttttttgctttctaaggaggtctggactctattatagtacaaagggaacttctaaagatccaagacacctgcagtacgtggcggacgttaatgagtctaatgtgtacgtagtaacccaaggccgaaagctgtatggaatgcctactgacttcgggttctgcgtcaagccaaacaagctgcggaacgggcataagggattacgcatcttctgctctgaagacgaacaatcccgaacatgttggctagcagcctttaggctgttcaaatacggtgtgcagctttataaaaactaccagcaagcccagtctcgacacctgcatccctcctgcctagggtccccgccactcagaagcgccagtgataatactcttgtcgccatggatttttcagggcacgcgggacgcgtaatcgagaacccaagagaggcactctccgttgcgctggaagaggcacaggcctggaggaagaagacgaatcaccgattgagtttacctatgccagcctctgggacaagcctgtccgccgctattcatcgcacgcagctttggtttcacggtcgaatcagccgggaggagagccagaggcttatcggtcagcagggcctagtcgacggtctgttcttagtccgcgaatcccaacgaaacccccagggctttgtgctgagcttatgccacttacagaaagtgaagcattatttgatcctgccctcagaagaggaggggcgtctttatttctctatggacgacggacagacaaggttcacagacctgctacagctcgtggagttccatcaacttaacagggggattctgccgtgccttcttcggcactgctgcactcgcgtggctctctag

SEQ ID NO: 225333 - DNA, 618 bp, synthetic construct
  misc_feature 1..618: note = Description of Artificial Sequence: Synthetic coding sequence
  source 1..618: mol_type = other DNA
atggcagcacccggagagaggggacggttccacggaggcaatctttttttcctcccaggaggcgcacggtccgagatgatggacgatctagccaccgacgcgagagggaggggtgctggtaggagagacgccgcagcgtccgccagcacccccgctcaggcgccaaccagtgattcgccggtcgcagaagatgcctccaggcgcaggccttgccgcgcttgcgtggattttaagacgtggatgcgtacacagcagaagcgggatactaagttcagggaagattgccctcccgatcgtgaggagctggggaggcattcctgggccgtcctgcataccctcgctgcctactaccccgacttgcctacccccgaacagcagcaggatatggcccagttcatccatcttttctcaaagttctatccatgcgaggaatgcgccgaggacttgagaaaacggctttgtcgcaaccaccccgacacgcggaccagggcttgcttcacccagtggctctgccatcttcacaatgaggtcaatagaaaactggggaagccggacttcgattgttccaaggtagacgagaggtggcgcgacggatggaaggacggtagctgcgattag

SEQ ID NO: 225334 - DNA, 285 bp, synthetic construct
  misc_feature 1..285: note = Description of Artificial Sequence: Synthetic coding sequence
  source 1..285: mol_type = other DNA
atgaggactcaacaaaagcgggatacaaagttccgcgaggattgccccccagatcgggaggaacttggcagacactcttgggcggtccttcacactctggccgcttactatccagatctccccacccctgagcaacagcaggatatggcccaatttatccacctgttctccaagttctatccgtgcgaggaatgcgccgaggacctgcgaaaacgactgtgcagaaatcacccagatacccgaactagagcatgctttacagtcgctgttcctcccgcacaatag

SEQ ID NO: 225335 - DNA, 1629 bp, synthetic construct
  misc_feature 1..1629: note = Description of Artificial Sequence: Synthetic coding sequence
  source 1..1629: mol_type = other DNA
atgtcaccatgtcccgaggaggctgccatgcgcagagaggtcgtgaagcgcatagagactgtcgtcaaagatctgtggcccaccgcagatgtgcagatttttggatcattctctactgggctttatctaccgacttcggatatcgacctggtagtgttcggaaaatgggagagacctcctttgcagctgttggaacaggcgcttcgcaagcacaatgtggccgaaccatgtagcatcaaagtccttgacaaggccactgtccccattattaagttaacagaccaagaaacggaagttaaagtggatataagtttcaatatggagacaggcgtcagagctgctgaatttatcaagaactacatgaaaaagtacagcctccttccatatcttatactggtattgaagcagtttctcttacaacgggatcttaatgaggtttttaccggagggatttcttcttactccctcatactaatggccatcagcttccttcagctgcacccgcgtatcgatgctcgcagagccgacgaaaatctgggcatgctactggtggagtttttcgagctgtacggcagaaacttcaactatctgaaaaccgggatccggatcaaggaagggggagcgtatatcgccaaggaggaaatcatgaaagcgatgacatctggctatcggccaagtatgctgtgtattgaggaccctcttctgccagggaatgatgtggggcgtagcagttacggcgctatgcaggtcaagcaggtgttcgactacgcctacattgttctgagccatgccgtgtccccgcttgctcgatcgtaccccaacagggatgctgagtcgacgttgggacgcattatcaaggtcacacaggaggtcatagactatagaaggtggatcaaggagaagtgggggtctaaagcccacccaagtcctggtatggattctaggataaaaattaaagagcggattgccacgtgtaacggcgaacagacccagaatcgtgaaccggagtctccttacggtcagcgcctgaccctttccctatctagtccccagctgttgagcagcggctcatctgcttccagtgttagttccttgtcagggtccgacgtggactctgacacccctccctgcaccacgccaagcgtgtatcagtttagtttacaggccccagctccgctaatggctggcctcccgactgccctccccatgccctccggtaagccacagccaaccacatctcgaacccttatcatgaccaccaacaaccagacacgttttaccatcccacctcctacattaggagttgctcccgttccatgcagacaagccggagtggaaggtaccgctagcctgaaggctgtgcatcatatgagttctcctgctatcccttccgcttcacccaatcctctcagtagtccccacctgtatcacaagcaacacaacggcatgaaattgtctatgaagggcagtcacggtcacactcagggcggtggttacagcagtgttggcagtggaggggtgcggccacccgtgggcaatcgaggccaccatcagtacaaccggacagggtggagaaggaagaagcacacacacacacgcgactccctccccgtcagtctttcaaggtag

SEQ ID NO: 225336 - DNA, 885 bp, synthetic construct
  misc_feature 1..885: note = Description of Artificial Sequence: Synthetic coding sequence
  source 1..885: mol_type = other DNA
atggatctgtggcaacttctcttgacacttgcactggcgggttcctctgacgctttctctggcagcgaagctacagcggcaatcctgtctcgcgctccgtggagtctgcagagcgttaacccaggtctaaaaaccaacagtagcaaggaaccgaagtttacaaagtgcagatcaccggagagggagacgttcagttgtcactggactgacgaagtccatcacggcaccaagaatctcggacccatccagctgttctacactcgcagaaacactcaggagtggactcaggagtggaaagagtgccccgactacgtatcagcgggagagaactcttgttacttcaatagttcttttaccagcatctggattccttactgtatcaagctcacttctaacggcggaaccgtggatgaaaagtgcttctcagtggacgaaatcgtacagcccgatccccctatcgcccttaattggactctgttaaatgtttcgttaaccggcatacatgcggatattcaggtcagatgggaagcccctcgtaacgccgacatccagaaggggtggatggtcctagagtatgaactccaatacaaagaagtaaacgaaacaaaatggaaaatgatggatcccatactgacaacgagtgttcccgtatactcgctgaaggttgataaggagtacgaagttcgtgtgaggtcaaagcaacgaaattccgggaattacggcgagttctctgaagtcctctatgtgacattacctcagatgtcccaatttacttgcgaagaagatttctactttccatggctccttataatcatttttggtatatttgggttgacagtgatgctctttgtgtttctgttcagcaagcagcagagccagaattag

SEQ ID NO: 225337 - DNA, 1851 bp, synthetic construct
  misc_feature 1..1851: note = Description of Artificial Sequence: Synthetic coding sequence
  source 1..1851: mol_type = other DNA
atggacctgtggcagctattgctgaccctggccttagccggtagcagtgatgccttctcaggcagtgaagattccagtaaggagccaaaattcacgaagtgtcgttcgccggagagagagacttttagctgtcactggaccgatgaagtgcaccatggcactaaaaacctcggccctatccagctgttctatacacgcaggaatactcaggagtggacccaggaatggaaagaatgccctgactacgtgtctgcaggagaaaactcatgttacttcaactccagcttcacttctatatggatcccttactgtataaaactcacctcaaatggcggtaccgtggatgagaagtgcttttctgtggatgaaatcgtgcagcctgacccccctatagctctcaactggactcttctgaacgtctccttgactgggatccatgctgacattcaggttagatgggaggctcctcgtaacgccgatatccagaagggatggatggttctcgagtacgagctgcagtacaaggaggttaatgagacgaaatggaagatgatggatcctattctgaccaccagtgttccagtgtactctttaaaggtcgacaaagagtacgaggtcagagtgcggagtaagcaacggaattcggggaactacggcgaattcagcgaggtgctatacgtgactctcccacagatgagccagtttacatgtgaagaggacttctattttccttggctgctcattattatctttgggattttcggactcactgtgatgctctttgttttcttattctctaagcagcagaggatcaagatgctgatattacctccagtacccgttccaaagatcaagggaatcgatcccgacctgctgaaggagggaaagctggaggaggttaacaccatcctcgctattcacgattcttataaaccagagttccactcagatgacagttgggtggaatttattgaacttgatatagacgaacccgatgaaaagactgaggagagtgatactgatcgccttctttcatcagaccacgagaaatcccattcaaatttaggggtgaaagacggcgactccgggaggactagctgctgtgagcccgacatcctcgagacagacttcaacgccaacgacattcacgaaggtacatcagaagtagcccagcctcagcgtctaaagggagaggcagatctgctttgcctggaccagaaaaaccagaataactccccctatcacgatgcttgtcccgcaacgcaacagccctccgtgatccaagcggaaaaaaacaagccacagcctctcccaaccgagggcgctgagtcaacacatcaggctgctcatatccagttgagtaatccatcatctttatctaatattgatttttacgcacaggtgtctgacattaccccagccggttcagtcgtgttgtcccccggtcagaagaacaaagccggaatgagtcagtgcgacatgcatcccgaaatggtcagtctttgccaggagaatttcctgatggacaacgcttacttctgcgaggctgacgctaagaagtgcattcctgtggcccctcatattaaagtggaaagtcacatccaaccctctctgaaccaggaggacatttatattaccacggaaagcctgacaactgccgcaggcaggcctggtactggcgaacacgtcccaggctccgaaatgcccgtgcctgattatacttcgatccacatcgttcagagcccacaggggctgatcttgaacgcaacagcgcttcccctgcccgacaaggagtttcttagctcctgtggatatgtgtccaccgatcagcttaacaagataatgccctag

SEQ ID NO: 225338 - DNA, 1356 bp, synthetic construct
  misc_feature 1..1356: note = Description of Artificial Sequence: Synthetic coding sequence
  source 1..1356: mol_type = other DNA
atggtccttgagtacgagctgcagtacaaagaggtgaatgagacgaaatggaaaatgatggaccccattctgacgacaagcgtgcctgtctactcactgaaggttgacaaagaatatgaagttcgggtgcgctccaaacagagaaacagtggaaattacggggagtttagtgaggtcctctacgtgactctgcctcaaatgtcacagttcacttgtgaagaggacttttatttcccttggctgttgattattatattcggaatatttggcctcacagttatgctgtttgtgttcctgttttcgaaacagcaaaggatcaagatgcttattcttccaccggtgcctgtacctaagattaaagggatcgaccccgacctgctgaaggagggaaagctggaggaagtgaataccatcctagcaattcacgactcatataagccagagttccactctgacgactcatgggttgagtttatcgaactggacattgacgaaccagatgaaaagacagaagagtccgacaccgatcggctgcttagctctgatcatgagaaatcacattccaacctgggcgtaaaagacggagattctgggaggaccagttgttgtgaacccgacatcctggagaccgactttaatgccaatgacatccacgaagggacttcagaggtggcgcagccacagagattgaagggcgaggcagacttattgtgtctggatcagaaaaatcaaaacaactctccctaccacgacgcctgtccagccacgcagcagcccagtgtcatccaggctgaaaaaaacaaacctcagcctctgcccaccgaaggagctgagtcaacacaccaggccgcacacattcagttatctaatcctagtagcctgagtaatatcgatttttatgctcaggtttccgacattacaccggctggctcagtggtgctatccccagggcagaaaaacaaagcaggaatgagccagtgcgacatgcatccagagatggtcagtctgtgccaggagaactttctcatggataacgcctatttttgtgaggccgacgcaaagaagtgtatacctgttgccccacacataaaggtcgaaagccatatccagccttcattaaaccaagaggacatctacatcactacggaatctctcacgactgccgcaggacgacccggtactggggagcacgtccccggatctgaaatgcctgtgcctgattatactagtatacacatagtccagtctccccaggggctgattctgaatgcaactgccctaccactcccggacaaagagtttctatcttcctgtggatatgtctccactgaccagcttaataaaattatgccttag

SEQ ID NO: 225339 - DNA, 327 bp, synthetic construct
  misc_feature 1..327: note = Description of Artificial Sequence: Synthetic coding sequence
  source 1..327: mol_type = other DNA
atgccactttgggtcttcttctttgttatcctcacattatcaaatagttcacactgctccccaccgccaccccttacgcttaggatgaggaggtatgcagacgccatctttaccaacagttaccgcaaggtcctggggcagctgagtgccaggaaacttctgcaagatattatgtcacgccagcaaggtgaaagtaaccaggaacggggagcacgggcacgtctcggcaggcaggtggacagtatgtgggcagagcagaagcaaatggagctggaaagtatcctagtggcgctactccagaagcacagcagaaattcccagggctag

SEQ ID NO: 225340 - DNA, 324 bp, synthetic construct
  misc_feature 1..324: note = Description of Artificial Sequence: Synthetic coding sequence
  source 1..324: mol_type = other DNA
atgccattatgggtgtttttcttcgttatactgaccctctctaacagttcccactgcagcccccctccacctttgactctgcgaatgcgcagatatgcagacgcgatattcacaaacagttaccgaaaagtgcttggccagctgagcgcccgtaaactgctacaggacattatgagtagacaacaaggtgaatctaaccaggagaggggcgcaagggcaagattaggcagacaagtggattctatgtgggctgaacaaaaacagatggaactagaatctattctcgtggctctcttacaaaagcaccgcaattctcaaggctag

SEQ ID NO: 225341 - DNA, 327 bp, synthetic construct
  misc_feature 1..327: note = Description of Artificial Sequence: Synthetic coding sequence
  source 1..327: mol_type = other DNA
atgccactgtgggtcttcttttttgtcattctgacactgtcaaatagttcccactgtagtcctccgccaccattaacactgcggatgcgacggtacgcggatgcaatattcacaaactcttatcggaaggtgctgggacagctgtccgccaggaagctccttcaggatataatgtccagacaacaaggtgaaagtaaccaggaaaggggagccagggcccgattaggcagacaagtagattcaatgtgggccgagcagaagcaaatggagctcgaatctatcctggtcgccctgctccagaagcatagcaggaactcacagggatag

SEQ ID NO: 225342 - DNA, 1272 bp, synthetic construct
  misc_feature 1..1272: note = Description of Artificial Sequence: Synthetic coding sequence
  source 1..1272: mol_type = other DNA
atggaccgaagaatgtggggggcacatgtattctgcgtgctaagtccactgcccaccgtgttgggacatatgcacccagagtgcgacttcataactcagctccgagaagatgaaagcgcctgcctacaggctgctgaggaaatgccgaataccaccttgggatgcccagcaacttgggatgggctgctgtgctggcccaccgccggatccggcgaatgggtgacattaccttgtcccgatttctttagccacttctcctcggagtcaggtgcagtgaagcgggattgtacaattactggctggtccgaacctttcccaccataccccgtcgcctgccctgtacctttggagctcttggctgaggaggaaagctatttctccacggttaagatcatttatactgttggccatagcatttctatcgtcgccttgttcgtggctatcaccatcctggtcgctctacggcgtttgcactgtcctcgaaactatgtgcacacccagctgtttacaacgttcatcctgaaggccggtgcagtgttccttaaagatgctgcattgtttcacagtgatgataccgatcactgttcattctcaaccgtgctgtgtaaagtatcagttgctgcctctcacttcgctaccatgactaatttcagctggctcctggctgaggctgtgtatctgaactgcctgctcgccagtacgtctcccagttcccgcagggctttctggtggttggtgctcgctgggtggggactcccagttctatttaccggaacttgggtgtcctgtaagttggctttcgaggatatcgcgtgctgggacttggatgacaccagtccatactggtggatcatcaagggcccaatcgtgcttagtgtgggggtgaatttcggacttttcctgaacattatccgcattctggttcgaaagttggaaccagctcaggggagcctacacacccagtcacagtactggagactctcgaagagtaccctctttctcattccgctcttcggaatccattacataatctttaattttctcccagataatgccggactgggaatccggctgcctctggaacttggtcttggctcctttcaaggtttcatcgtggcaatcctgtactgttttcttaatcaagaggttagaaccgagatctctcgaaagtggcatggccacgatcccgaactgctccccgcttggcgaacaagggccaagtggaccactccctcccgaagcgccgcaaaggttctgacaagcatgtgctag

SEQ ID NO: 225343 - DNA, 207 bp, synthetic construct
  misc_feature 1..207: note = Description of Artificial Sequence: Synthetic coding sequence
  source 1..207: mol_type = other DNA
atggtcccaggcaccccaagtccattgctcggccgtggcaaagaattatggctcgagtccctggcatgcctacccggagctgtgaaaagagattgtaccatcacaggctggtcagagccattccccccatacccagtggcatgtcctgtgccactggagctcctcgcagaagaggggtgcccatgttcatctctggcaagaggctag

SEQ ID NO: 225344 - DNA, 438 bp, synthetic construct
  misc_feature 1..438: note = Description of Artificial Sequence: Synthetic coding sequence
  source 1..438: mol_type = other DNA
atggtcccaggcaccccatctcccctgcttggtagaggtaaagagctctggctggagtccctagcctgcctgcctggtgccgttaaacgcgattgcacaattactggctggtctgagcccttccccccatatccggttgcatgtcccgtgccgctcgagctcctagctgaagaagagagttactttagcacagttaaaatcatctacacggtgggacactccatttctattgtggcccttttcgtcgctatcacaattctggtagccctacgcaggctgcattgtccacgaaattacgtgcacacccagttatttacaaccttcattctgaaggccggtgccgtttttctcaaagatgctgccctttttcacagtgacgacacagaccactgcagcttctccacagggtgtccctgttcaagcttggcacggggatag

SEQ ID NO: 225345 - DNA, 456 bp, synthetic construct
  misc_feature 1..456: note = Description of Artificial Sequence: Synthetic coding sequence
  source 1..456: mol_type = other DNA
atgctgcccttcagcaccgctaccaccttaactacagcggcttcccctctggccgcacgagctctgcactggcatgtcggtgagctacagaccggcctgcgaggtcatagggtattagggccaggtcgtcacctcccattacttgtcgatcaccagagagctcactgtcctctaggacgcggtgagctctgggctttctcgcagtattacccacaccctggagaagagacaggtgcttcttctggccagccgccataccccgtcagcgtactggccagtttacaggtcgacaccttccctgatcctaccctgtggaactcactgcaccacttgcaactcccagcccgtcagtgctggcctggtcacccccctcctccaggtgctggaacaggcttcctgccgggtcttcactgctgccaccctctactgctgccccagccgcgtggcgaggattag

SEQ ID NO: 225346 - DNA, 1080 bp, synthetic construct
  misc_feature 1..1080: note = Description of Artificial Sequence: Synthetic coding sequence
  source 1..1080: mol_type = other DNA
atggtgcccggtaccccgtctcctctcctcggtaggggtaaagaactttggctggaaagcctggcgtgcttgcccggagccgtgaaacgggattgtacaatcaccggctggagtgaaccttttccgccatatcccgtggcttgtccagttccattagagcttctggccgaagaggagtcgtacttctccacagttaagatcatctacaccgtaggccatagcatttccattgtcgcgctctttgtcgcgattaccatcttggtcgcactgagaagactgcactgccccagaaactatgtacacacacagctgttcaccacctttattctcaaggctggtgctgtgttcctgaaggacgcagccctgttccatagcgacgacaccgatcactgttcattctctaccgtcctatgtaaggtgagtgtggcagcatcccacttcgccacaatgacaaatttcagctggctgttggccgaagctgtgtacctcaattgcctcctcgcgagcacgagtccgtccagtagacgcgctttctggtggcttgtcctggctggttggggactgcccgtgctttttactggtacctgggtgagttgcaagctcgctttcgaggatattgcatgctgggacctcgacgatacatcaccttattggtggataataaaggggccaattgtgctgtccgttggagtcaattttggtctttttttgaacatcattagaatattagttagaaagctggagccagcccaggggtcactgcatacccagtcgcaatattggagattaagcaaatccaccctgtttttgattcctctctttggtatacattatataatctttaactttctgcctgataatgccggattggggatcagactgcctctggagttagggctcggcagttttcaggggtttatagtggcaattctatactgcttcctgaatcaagaagtgagaactgagatcagtcgcaagtggcacgggcacgatccagaactgctacctgcgtggcgcacaagggcaaaatggacgacaccttcaaggtctgccgcaaaggtcctgacaagtatgtgctag

SEQ ID NO: 225347 - DNA, 1101 bp, synthetic construct
  misc_feature 1..1101: note = Description of Artificial Sequence: Synthetic coding sequence
  source 1..1101: mol_type = other DNA
atgtggaacgccacgccgtctgaagaaccaggctttaatctgactctagctgacctcgattgggatgcctcacccggaaacgactcactgggtgacgaactgttacagttgttccccgctcctctacttgccggtgtcactgctacctgcgtggccctcttcgtggttggtatcgcaggaaacctcttaactatgttggtcgtgagccgatttcgagagctaaggacaaccacaaatctatacctgtcgagcatggctttctccgacctgctcattttcttgtgtatgcctttggatctggtcagactgtggcaatatcgcccttggaacttcggtgatcttctctgtaagcttttccagtttgtctcggagtcctgcacttacgccaccgtgcttacgatcaccgcgctttcagtagagcggtacttcgccatatgttttcccctgcgcgcaaaggtggttgtcactaaaggcagagtcaagctcgttatcttcgtgatctgggccgtcgccttttgctctgccggtccaattttcgtgttggtgggcgtggagcatgagaacggcactgacccgtgggatacaaatgagtgcaggcctactgaattcgctgtgcggtcagggctattgacagtcatggtctgggtttcctccatttttttttttcttccggtcttctgcctgacagtactgtattctctgattggcagaaaactgtggcggagacgaaggggcgacgccgtggtgggggctagcttgcgtgatcagaaccacaaacagacggtgaagatgttagccgtggttgttttcgcattcatattatgttggctaccttttcatgtcgggaggtacctctttagtaagagttttgaaccaggctctctggagatcgcgcagatatcacagtactgcaacctcgtgagttttgtgctgttctacctgagtgcagccatcaatccgatcctgtacaacattatgtccaaaaaataccgcgtggccgtatttcgcctgttaggatttgaaccattcagccagcgtaaactgtccaccctgaaggacgagagtagtagggcctggacagagagttctatcaatacctag

SEQ ID NO: 225348 - DNA, 870 bp, synthetic construct
  misc_feature 1..870: note = Description of Artificial Sequence: Synthetic coding sequence
  source 1..870: mol_type = other DNA
atgtggaatgcaactccctcggaagaaccgggtttcaacctgaccctggccgacctcgactgggatgcgagtccaggcaacgattcgttgggagacgagctcctgcaactgttccctgcacccttgcttgccggtgtcactgccacctgtgtcgcactcttcgtggttggaatcgccggtaacctgttgaccatgctggtggtgtcccggtttcgtgaactcaggactacgacgaacttgtacctgtcctcgatggcgtttagtgatttactgatttttctgtgcatgcccctcgacttggttcgcctttggcagtaccgcccttggaactttggggacctgctgtgcaaattgttccaatttgtgagcgaaagctgtacttacgccacagtgctcaccatcaccgctctgtcagtcgagaggtacttcgccatttgcttccctctgcgcgctaaggttgttgtcaccaaaggccgagtgaagttggtgatattcgtgatctgggctgtggccttttgctcggccggacctatttttgtcctggtgggggtggagcatgagaacggtacagacccctgggatacaaacgagtgccgcccaacagagtttgctgtacgaagcgggctgttgaccgttatggtatgggtttcctccatattcttttttcttcctgtattttgcttaactgtactctactcacttattgggaggaagctgtggcggagacgaaggggcgacgcggtggtgggagcctcactcagagatcagaaccacaaacagactgtgaagatgctgggaggctcacagcgggctctgcgcctgtccctcgccggtccgatacttagtctgtgtctgttaccttccctgtag

SEQ ID NO: 225349 - DNA, 666 bp, synthetic construct
  misc_feature 1..666: note = Description of Artificial Sequence: Synthetic coding sequence
  source 1..666: mol_type = other DNA
atggcattcgtgaagtcaggctggctgcttcggcaaagcacaattctgaagcgctggaaaaagaactggtttgacctgtggtctgatggccatttgatctattacgacgatcagacaaggcaaaacattgaagataaggtgcatatgcccatggattgtattaacatccggacaggccaggaatgccgcgacactcagcctcccgacgggaagagtaaagactgcatgctgcagatcgtgtgccgggatggcaaaaccatttcactctgtgccgaaagtactgatgattgtctggcatggaaatttaccctgcaggactcgcggaccaataccgcatatgtggggagcgctgtgatgaccgatgagacgagcgtggtttcaagtccacccccatataccgcttacgccgcacctgccccagaggcctatggttacgggccttatggcggagcgtacccacccggaacccaggtggtgtacgctgccaacggccaggcctatgcagtcccatatcagtacccctatgcaggactatacggccagcagcctgccaatcaggtgattattcgcgagcgctacagggacaatgactccgatcttgccttgggaatgctggccggagctgcaacaggtatggcgctgggctcactgttctgggtgttttag

SEQ ID NO: 225350 - DNA, 1230 bp, synthetic construct
  misc_feature 1..1230: note = Description of Artificial Sequence: Synthetic coding sequence
  source 1..1230: mol_type = other DNA
atgggcaacagctatgccggtcagctcaagaccacccgtttcgaagaggtgctgcataatagtatcgaagctagcctcaggtccaacaacctcgttcctcgccctatcttttcccagctgtatctggaagccgaacagcagcttgcggcactggagggaggatcccgcgtagacaacgaagaggaggaggaagagggtgagggtggtctggagacaaacggccctccaaatccatttcagctgcaccccctacctgaaggttgctgtacaacagatggtttttgccaggcaggcaaggacttacgcttagtttcgatcagtaatgaacccatggacgtgccagccggatttctccttgtgggcgttaagtctcccagcctgccagatcacctgctggtgtgcgcagttgacaagcggttccttcccgacgacaatggccataacgccctcctgggattcagtgggaactgcgtcggatgcggaaaaaaggggttttgctacttcactgagtttagtaaccatattaatctgaaactgaccacccagcccaagaaacagaagcatttgaagtactatctggtgcggaacgcacagggcactctcaccaagggacctctaatttgctggaaggggagtgagtttaggtccagacaaatccctgcctctacatgctcttcttccctctttcccgctctggagagcactgcagcctttccaagtgagccagttccagggaccaatccgtccattctcatgggtgcacagcaagccggacctgccagcgatcatccatcactaaatgcagcgatgggacccgctgtgttcaacggtaaagacagccctaagtgtcagcagttggccaaaaataacctgctcgccttgccccgaccttcggctcttgggatcttgagcaacagtggcccacctaaaaaaagacataaaggctggtctcctgagagtccgtcagccccagacggtggctgcccccaggggggtgggaacagagcaaagtacgagtcagcaggcatgagctgcgttccccaggttggcttggtcggcccagcatccgttacattccccgtggtagcatcaggcgagcctgtgtctgttcctgataacctgctgaagatatgcaaggctaaacccgtcatcttcaaagttttcgtgaatggagccacccagatggtcgccctgggccctgccgagccggcatccccacggtccttgtag

SEQ ID NO: 225351 - DNA, 1374 bp, synthetic construct
  misc_feature 1..1374: note = Description of Artificial Sequence: Synthetic coding sequence
  source 1..1374: mol_type = other DNA
atgggtaattcttacgctggccagctgaagacgactcgattcgaagaagtcctccacaatagtattgaagcatctcttcggtccaacaacctcgtcccgagaccaatctttagtcaactgtatttggaggctgagcagcagctcgctgctctcgaagggggatctcgggtggacaatgaggaggaagaagaagagggtgagggaggtctggagaccaacggccctccaaacccatttcagcttcatcccttgcccgagggatgttgtacgactgatgggttctgccaggccggtaaggacctcagactcgtaagtatatctaacgagcccatggacgtccctgccggtttcctccttgttggtgtcaagagtccctccctccccgaccaccttctggtgtgcgccgtcgacaaacgtttccttccagacgataatggacacaacgctctgttgggtttcagcggaaattgtgtcggttgtggcaagaaggggttttgttacttcacagagtttagcaatcacataaatcttaaactcaccacccaacccaaaaaacagaagcatctgaagtactacctggtgcgcaacgcacaggggactctgaccaaaggccctctgatctgttggaagggatctgagtttcgaagtcggcagattccagctagcacttgctcttcttctcttttcccagcgttggagtcaaccgctgcctttcccagtgagcctgttcctggcacgaatcctagtatcttgatgggggctcagcaggctgggcctgcttccgaccatccttccttgaatgcagctatgggccctgcagtgtttaatggcaaggattccccaaaatgccagcagcttgcaaagaataacttgctagctttgccacgtcccagcgcgctggggatcctgagtaattccggacctcctaagaaaagacataaaggctggtcgcctgagagccctagtgctcctgacggaggatgtcctcagggcggaggaaacagagccaagtacgagtctgctggaatgtcctgtgtgcctcaggtcggtctcgtgggtccagccagtgtgacgtttcccgtggtggcaagcggcgagcccgtatcagtcccagataatctgttgaaaatctgcaaggcgaagcccgtgatctttaaaggccacggcaacttcccttatttgtgtggcaacctaaacgacgtggttgtgtccccgttactgtacacatgttaccagaattctcaaagtgtgtccagagcctacgagcagtatggagctagcgcaatacagcccatttccgaagaaatgcagttactgctcactgtgtactacctggtccagctggcacaccagatcaggaatccagatgtctag

SEQ ID NO: 225352 - DNA, 5849 bp, synthetic construct
  misc_feature 1..5849: note = Description of Artificial Sequence: Synthetic coding sequence
  source 1..5849: mol_type = other DNA
atgggtaattcatacgcaggtcagctgaagacgacgagattcgaagaggtgttgcataactcaattgaggcctcactcagatctaacaatttggtgcctagaccaattttctcacagctgtacctggaggccgagcagcagctagctgcactggagggcggttctcgagtggataacgaggaagaggaagaggagggagaaggtggattggaaactaacggtccacctaatcctttccagctccatccattacccgaggggtgttgtacgacggatgggttctgccaagccggtaaagatcttcgactggtgtccatatctaatgagccgatggatgtacctgcaggcttcctccttgtcggcgtaaagagcccctcactcccagatcaccttctggtgtgcgcagtcgacaaacgattcctccccgatgataacggccacaatgctttgctcggtttttctggcaactgcgtgggctgtggtaaaaaaggattttgctactttaccgaattctccaaccacatcaacctgaaactgactacacagcctaaaaaacagaagcacctgaaatactaccttgtgaggaatgcacaagggactctgacaaaaggaccactgatttgctggaaggggtcagagttccgaagtcgccagatccccgcttcgacttgctcatcttccttgttccctgcactggaatccacagccgctttcccaagcgagccagtgcctggaacaaatccttcaatcctgatgggggctcagcaggccggaccggcatcagatcacccttcactgaatgccgctatggggccagccgtgtttaatggcaaagattcaccaaagtgccagcaattggcaaagaataacctccttgcactgccgcgaccctctgccctaggcatcctgtctaacagtggtccacccaagaagcgtcataagggatggtcgcccgagagcccatctgcaccagacggaggctgtccccagggtggaggcaacagggcaaaatacgaatccgccggaatgtcgtgtgtgccacaagtgggccttgtgggaccagctagtgtcacatttccggtggtcgcctcaggagaaccagtcagcgttcccgacaatctgctcaaaatctgcaaggcaaaaccagttatctttaaagggcacggcaacttcccatacttatgcgggaatcttaatgatgtggtcgtctcccccctgttatatacctgctaccagaactcacaatccgtgtctcgcgcttacgagcaatatggagccagtgcgattcaacccataagcgaggaaatgcagctcctcctgaccgtatattatcttgtgcagttggctgctgatcaggtaccactgatggaagatcttgagcaaattttcttgcggtcatggcgtgaatcccatctgaccgagatccggcagtatcagcaggctccaccccaaccctttcctcccgctcctagcgcagccgcaccagtgacatccgcccaacttccctggctggctagtctggccgcttctagctgtaacgactcggtccacgtaatagaatgtgcctactctcttgccgaaggcctcagtgagatgttccgacttctggtggaaggcaaactcgcgaaaactaactatgtcgtgatcatctgtgcatgccggagcgcggcaattgatagctgtatagcagttaccggcaaatatcaggccagaattctatctgagtccctcttaactcctgcagagtaccagaaggaagtgaattatgaactcgtgactggcaaggtggattcactgggtgctttcttttctacgctctgtccagagggggacattgatattctcctggacaaatttcatcaggagaaccagggccacatctcctcgtcccttgcagcatctagcgtgacaaaggctgctagcctggacgtgagcgggacccccgtctgtactagttataatttggaaccacatagcatccggccatttcagctggccgtcgctcagaaactcttgtcccatgtgtgtagcatagcagattcatctacacagaacctcgatttgggctcttttgaaaaagtggacttcttgatctgcatcccaccttcagaggtgacataccaacagactctcttgcacgtgtggcacagtggggtgttactggaattagggctcaagaaggagcacatgaccaagcagagagtggaacagtatgtgttgaagctagataccgaggcccaaactaaattcaaagctttcctgcaaaacagctttcagaatccacatacacttttcgtgctgatccacgaccacgcccattgggatctggtgagttccaccgtccataatctgtattcccagtctgatccttctgttgggttggtcgatcggcttctgaattgcagggaggtgaaggaagctccaaacattgtgaccctccacgttacaagctttccctatgctttacagactcagcacaccctgatctctccgtataatgagatccattggccagcctcttgctctaacggagtcgatctataccatgagaacaagaaatattttggcctgtctgagttcattgagtcaacgttgtccggtcacagcctcccgcttttacgatatgatagctctttcgaagctatggtgaccgccctcgggaaaaggttccctagacttcattccgccgtcatacggacattcgtgctcgtacaacactatgcggctgccctgatggctgtatcaggactgccccaaatgaaaaattacaccagcgtggagacactggaaatcacacaaaatctgctgaattcccctaagcaatgcccatgtggacacggactgatggtgctgctcagggtgccatgtagccctctggctgtagtggcgtacgagcggctcgcccacgtgagagccaggttagcactggaagagcactttgagattatcctaggctcaccttcctccggggtgacagtgggaaagcactttgtgaagcagctccggatgtggcagaagatcgaagacgtggaatggcgaccacaaacctatctggaactggagggcttgccgtgcattctcatcttctccgggatggacccacatggcgaatcattgcccaggagcctgaggtactgtgacttgcggctgatcaactccagctgcctggtgagaacagccttagagcaggaactgggtctcgctgcatacttcgtaagcaatgaggtgcctttagagaagggagctcgcaatgaggccctggagtcggatgccgagaaactatcatctaccgataatgaagacgaggagctcggtactgagggatctacttctgagaagcgctctcctatgaagagggaacgatcaagatcccatgactccgcctcttcgagcttgtcaagcaaagccagcggctctgctctcggaggcgagtcgagtgcgcagccgacagcactgcctcaaggagagcacgcaaggagcccacagcctagagggccagcggaggagggccgagctcccggagaaaagcagaggcctagagcttctcagggacctccctctgcaattagccggcatagtcccggaccgaccccccaacccgactgtagtctgagaacagggcagagaagtgtgcaggtgtctgtgactagctcttgtagtcagttgagttctagtagcggctctagcagctcctcagttgctccagcagctgggacttgggtgctgcaagcaagccagtgttcactgacaaaagcgtgtcgccagccccctatcgtgttccttccgaagcttgtgtacgacatggtcgtcagcacagatagcagtggccttccgaaagccgcaagtcttttgccttctccatcggtgatgtgggcctccagttttcggcctctactatctaagaccatgacctccactgagcaatccctttattatagacaatggactgtcccacgcccatctcatatggactatggtaatcgggcagagggccgagttgacggatttcacccaagacggctcctgctctcaggaccccctcagataggcaagaccggcgcttacttgcaatttttaagcgtactgtccaggatgcttgtgcgattgacagaggtggatgtttacgatgaggaagaaatcaacataaacttaagggaagaaagcgattggcactatttgcagctctcagatccgtggcctgacctggagcttttcaaaaagctacccttcgattacattattcacgatcccaaatatgaggacgcttctttgatttgttctcattatcaggggatcaagtctgaggatcggggtatgtcccgaaagcctgaagatctgtatgttaggcggcagacggctaggatgaggttgtcaaagtatgccgcatacaatacataccaccactgcgaacagtgtcaccaatacatgggtttccatccacgttatcagctgtatgagagtacattgcacgcctttgccttctcgtacagcatgcttggcgaagaaattcagctgcacttcatcatccccaaatccaaggaacaccactttgtattctcacagcccggtggacagctggagagcatgagattgcctctggtgactgataagtcacatgagtacataaagtcacccacgttcacaccaactactggcaggcacgagcacggactgtttaacctatatcacgccatggacggggcatctcacttacacgtattagtagttaaagaatacgagatggcaatctacaagaagtactggcccaatcacatcatgctggtgctaccttccatttttaacagcgccggtgtgggggcagcccatttccttattaaagaactctcctaccacaatctggaactcgaacgaaacagacaggaggagctcggcattaaacctcaggacatttggcccttcatcgtaattagtgacgatagttgcgtgatgtggaacgtggtcgatgtgaattcagccggagaaaggagtcgggagttctcctggagtgaacgtaacgtgtcactcaagcatatcatgcagcatatagaagcggctcccgatatcatgcattacgcccttctgggactgcgaaaatggtcatcaaagacaagggcgagtgaggtacaggagccttttagccggtgtcatgttcacaacttcattatactcaacgtggacctgacgcaaaacgtgcaatataaccagaacaggtttctgtgtgatgacgttgactttaatcttcgcgttcactcggccggtctgctgttgtgtcggttcaacaggtttagcgtgatgaagaagcaaattgttgtaggagggcacagatcctttcatattacctccaaggtgagcgacaatagcgccgctgtagtccctgcacagtacatttgcgcccctgactcaaaacatacatttcttgctgcacccgctcagttgctgcttgagaagtttctgcagcaccatagtcatctgttctttccgttgagcctgaaaaaccatgatcatcctgttttgtcggtcgactgttaccttaacttaggctctcaaatctcagtatgctatgtgtcctcccgccctcacagtctgaatatatcatgttccgatcttctgttcagcggtctcttgctctatctctgcgactccttcgtgggcgcttccttcctgaagaagttccacttcctaaagggcgcaaccttgtgtgtgatttgtcaggaccgttcctccctccggcaaactgtggtgaggctcgaactggaggatgaatggcaatttcgtcttcgtgatgagtttcagacagctaacgcacgagaagataggcccctttttttcctgaccggcaggcacatcta

SEQ ID NO: 225353 - DNA, 1188 bp, synthetic construct
  misc_feature 1..1188: note = Description of Artificial Sequence: Synthetic coding sequence
  source 1..1188: mol_type = other DNA
atgactcttcgccgtctacgtaaactgcaacagaaagaggaggccgcagcgacgcccgatcccgctgcacggacgccagattctgaagttgcgccagccgctccagtgccgacccctggccctcctgctgccgctgcgacacctggacctccagccgacgagctctacgcagctttggaagattatcaccccgctgagctctaccgggctttagccgtgtcgggtggcaccctacccagacgcaaaggatctggattcagatggaagaacctatcccagagcccagagcagcaaaggaaagttctgacacttgagaaggaagacaatcagacattcggctttgaaattcagacctacgggctgcaccatcgggaagagcagcgagtggaaatggtaacatttgtctgtagagtccacgaatcttcccccgctcagttagcaggccttacaccaggtgacactatagcatcggtcaatggacttaacgtcgaaggcatacgtcatcgcgagatcgtcgacataattaaggcttcaggcaacgtgttgaggctagagaccctgtacggaacgagtattcgcaaggccgagcttgaggcgaggctccagtacctgaagcagaccttatatgaaaagtggggggagtacaggagcttgatggtgcaggagcagcgcttagtgcatggactcgtggtaaaggatccttcgatctacgacacactggagagtgttcgctcgtgtctatacggcgctggattattgccgggttcactgcctttcggtccactgctcgcagtcccaggcagacctagaggaggcgctcggagagctcggggagatgcagatgatgcagtataccatacgtgcttcttcggcgatagcgagccacccgctctgccccctccccctcccccagcgcgtgcattcggcccaggtccagccgagaccccagccgttgggcctgggcctggtccccgtgccgctctgtcacgctcggcctcggttcggtgtgccggacccggtggcggtgggggaggaggtgctcctggggcactgtggaccgaggcacgagaacaagctctctgcggccctggcctgaggaaaactaaataccgaagcttcaggcggagactgctgaaattcatccccggactgaatagatctcttgaggaagaggagtcgcagttatag

SEQ ID NO: 225354 - DNA, 759 bp, synthetic construct
  misc_feature 1..759: note = Description of Artificial Sequence: Synthetic coding sequence
  source 1..759: mol_type = other DNA
atgaccttgctgcctagcaaaggcggagatacaatcgcctctgttaacggcctgaatgtcgagggaatccggcaccgggagatcgttgatatcattaaagcgtcagggaatgtcctgaggctggaaaccctgtacggcacttcaatcagaaaggccgaacttgaagccagacttcagtatctcaaacagaccttgtatgaaaagtggggagaatatcggtccctcatggtgcaggagcagagactggtgcatggcctagttgtgaaagatccaagcatctatgacactctagaatctgtgagatcatgcttatacggggctggcttgctccctggaagtctgcctttcgggccactgctggcggtccccggacggccacgcggaggagctcggagggcccgaggagatgcagacgacgcagtgtatcatacatgcttttttggggacagcgaacctcccgctctcccccctccccctcctccagccagggccttcggccctgggcctgctgagaccccggcagtagggccaggtccagggcctagagcggctttgagcagatccgctagcgtgaggtgtgccggtccaggcggagggggaggaggaggggcacctggggcattatggacagaggcacgagaacaagctctgtgtggcccaggcttgaggaagacgaagtaccgttctttcaggagaagattgctgaagttcatacctggactcaaccggagtttggaagaagaggagtcccagctgtag

SEQ ID NO: 225355 - DNA, 759 bp, synthetic construct
  misc_feature 1..759: note = Description of Artificial Sequence: Synthetic coding sequence
  source 1..759: mol_type = other DNA
atgacactgttgccatcgaagggaggggatactatcgccagcgtcaatggtctgaacgtggagggaatcagacatagggagatcgtcgatataatcaaggcaagcggcaacgtactgagactggaaaccctgtatgggacttcgatccgaaaagctgagctcgaagccaggttgcagtaccttaaacagacgctctacgagaagtggggggagtaccgtagtcttatggtacaggagcaacggctggtccacggactggtggtgaaggatcccagcatatatgacacactcgaaagcgtccggagctgcctctacggcgctggactcctgcccggatctctaccttttggtcccctgctcgctgtccctggcaggccccgtggaggcgcacggagggcacgaggggacgccgatgacgccgtctaccatacctgtttctttggcgacagtgaaccacccgcactcccgcctccgccaccacccgctcgcgcttttggacccggtccagctgaaactcctgccgttgggccaggtcccggaccaagggcggctctcagccgctccgcttcagttcgttgcgccggacctggaggcggaggcggtggcggagcacccggtgctctttggacagaggctcgcgaacaagcgctctgtggacccggtcttcgcaagaccaagtatcggtctttccgacgcagacttctgaagttcatccctggtcttaacaggagcctggaggaggaggagagtcagctgtag

SEQ ID NO: 225356 - DNA, 654 bp, synthetic construct
  misc_feature 1..654: note = Description of Artificial Sequence: Synthetic coding sequence
  source 1..654: mol_type = other DNA
atggcagcccagtgcgtgagattggcaagacggagtcttcctgccctggcattatccctacggccatcaccacgccttctgtgtacagctaccaaacagaagaacagtgggcaaaacctggaagaggacatgggacagagcgagcagaaggccgacccgcctgccaccgagaaaacgctgttggaggaaaaagtgaaattggaggaacagctaaaagaaacagtggagaaatacaaacgggctttggcagacacagagaacctaaggcaaaggagccagaaactggttgaggaagcaaagctttacggcattcaggccttttgcaaggatcttcttgaagtggccgacgttctggagaaggcaacccagtgcgtgcctaaggaagagatcaaagatgataatcctcacctcaaaaatctatatgagggtttggtgatgacagaagtacagatccaaaaagtattcaccaagcacggtctgctgaagcttaatcctgtgggtgccaagtttgacccatatgagcatgaagctctatttcatactcctgtggaggggaaagagcccggtactgtggccttagtgtctaaggtcgggtataaactgcatggaagaaccctgcgcccagctctggtgggggtagtgaaagaggcctag

SEQ ID NO: 225357 - DNA, 591 bp, synthetic construct
  misc_feature 1..591: note = Description of Artificial Sequence: Synthetic coding sequence
  source 1..591: mol_type = other DNA
atggctgcccaatgtgtgagattggccaggagatcgctgccagctctcgctctatctctccggccttcacctcggctgctgtgtacggcaactaagcagaagaactccgggcaaaatctagaggaggacatgggacagtccgagcaactgaaagagactgtggaaaaatacaagagagctctggcagataccgagaacctacggcaacggtcacagaaactggtggaagaggccaagctatacggcatccaggctttttgcaaagacctgctggaagtggcggacgttctcgagaaagccactcaatgtgtacctaaggaagagattaaagatgacaatcctcacctgaaaaacttgtacgaaggcctggttatgactgaggttcagattcaaaaggttttcactaagcatggattgctgaagctaaacccagttggagccaagtttgacccctatgaacacgaagctctcttccacacacctgtagagggtaaagagcccggtactgtcgccctcgtgagtaaagttgggtacaagctccatggaagaacactgcgtccggctctggtcggggtagtcaaagaagcctag

SEQ ID NO: 225358 - DNA, 2880 bp, synthetic construct
  misc_feature 1..2880: note = Description of Artificial Sequence: Synthetic coding sequence
  source 1..2880: mol_type = other DNA
atggcgcttctcgggaagcggtgcgacgtccccactaacggctgcggacccgacagatggaattctgcattcaccagaaaggacgagattatcacaagcctagtgtccgcactggacagtatgtgcagcgctttgtcgaagttgaatgctgaggtcgcatgcgtggccgtgcacgatgagtcggccttcgtcgtcggaacagagaaaggacggatgtttctgaatgcaaggaaagagcttcagtcggactttctgagattttgtcgcggtcctccctggaaggatcccgaggccgaacaccccaaaaaagtgcagcggggtgaggggggaggtcggtccctcccacggagttccctagagcatggatcggacgtttacctgctcagaaagatggtagaagaggtgttcgacgtgctgtattcggaagcgttggggagggcctcagtggttccattgccatatgaaagactgcttcgcgaacctggtctgttggccgttcagggcttacctgaaggcctcgcatttaggcgacccgctgaatacgaccccaaagcactgatggccattttggaacacagtcaccggatccgtttcaagctgaagaggccacttgaggacggaggcagagattcgaaagctttggtggaactcaacggcgtcagcctgatcccaaagggtagtagggactgcggtctgcatgggcaggcacccaaggtaccacctcaggacctgcctccaaccgcgacctcatcaagcatggccagtttcctgtattctaccgccctgcccaatcacgctattcgggagctgaagcaggaagccccatcatgccctctggccccttctgaccttggattgtcccgacccatgcctgagcctaaggccaccggggcacaggacttcagcgattgctgcggtcaaaaacccacaggcccaggtggaccgctgatccagaatgtgcacgcatccaaacgaatcctattttctatcgtgcacgataagtccgaaaagtgggatgcattcattaaggagacagaagatatcaatactctgcgagagtgcgtgcaaatcctgtttaactcccgatacgcagaggcactagggctggatcacatggtccccgttccctacaggaagatcgcatgcgatcccgaagcagtggagatcgtgggaattcctgataagattcccttcaaacgaccatgtacctacggcgtgcccaaactgaaacgaatcctcgaagagcgccactctatccatttcatcatcaaacgcatgttcgacgagcggatcttcacgggtaacaaatttacgaaggataccacaaagctggaaccagcctcacctcccgaagatacttcagcggaggtcagccgagccaccgtgctagacctagccggtaacgctaggtccgataaaggtagcatgagtgaggactgcgggccaggcacaagcggagagttggggggactgcgacccatcaagattgagcctgaagatctggatattatacaggttacagtccccgaccccagccccactagcgaagagatgactgatagtatgcccggacacctgccttcggaagactccggatatggtatggagatgctcactgacaaagggctgtctgaggatgcccgtcctgaagagcggcctgttgaagattctcacggcgatgttatcaggccactgcgtaagcaagtggagttgctgtttaatacaagatatgcaaaggcaattggaatctcagaacctgttaaggtgccatacagcaagtttctgatgcaccccgaagaactgttcgtggtcggcctgccagaaggcatatctctcaggcgcccaaactgtttcggtattgccaagttacgaaagatcctggaggccagcaactcaattcagtttgtaattaagcggccagagctcctgacagaaggggtaaaagagcccatcatggactctcagggcacagcatctagcctaggcttctccccgcctgccctgcctcctgaaagggactcaggagacccacttgtggatgaaagcctgaaacggcaaggcttccaagagaactacgacgcccgtctgtcacgcatcgacatcgccaatacattgcgggaacaggttcaagatctcttcaataaaaaatacggtgaggctctcggaatcaagtatcctgtccaggtgccctacaaacgaatcaagtccaatcctggtagtgtcatcatcgagggactcccccctggtattccatttcgtaagccctgtacgtttggctcacaaaatctcgaacgcatactggcagttgccgataaaatcaaattcacagtgactagaccgttccagggcctgattccgaagccagacgaggacgatgcgaacagattaggcgaaaaggtgatcctacgtgagcaggtgaaagagctgtttaacgaaaagtacggagaggctctgggcctgaataggcccgttttagtcccctacaagttgatcagggactcccccgatgccgtagaagtcacgggccttcccgacgatattccctttcgcaatcccaatacatatgatattcacagactggagaaaattcttaaggcgcgagagcatgtgcggatggtcattatcaaccagcttcagccctttgccgagatctgtaatgacgctaaggtgcccgcaaaagattcgtcaatccccaagcgcaagagaaagagggttagtgaaggaaacagtgtgtccagttcctcttccagcagttccagctccagctccaaccccgatagtgtggccagcgcgaatcaaatctcgctcgtgcagtggccaatgtacatggttgactatgcagggttaaatgtccagctgcctgggccattaaattactag

SEQ ID NO: 225359 - DNA, 2835 bp, synthetic construct
  misc_feature 1..2835: note = Description of Artificial Sequence: Synthetic coding sequence
  source 1..2835: mol_type = other DNA
atggcccttctcgggaaacggtgtgatgtacccacaaatggctgtgggcctgaccgatggaattcagcgttcacaaggaaagatgaaattatcactagcctggtgtccgcactggactccatgtgttctgctctgagcaaacttaatgcagaagttgcttgcgttgccgtccacgatgagagtgctttcgtggtggggaccgagaaagggagaatgtttcttaacgcccgaaaggaactgcagagtgacttcctgcgcttttgtagagggccaccatggaaagatccagaggccgagcacccaaagaaagtacagcggggtgagggcggtggcaggtcccttccacgatcatcactggaacatggatccgatgtgtatcttctgagaaagatggtagaggaggtctttgacgtgctgtactccgaggcgctaggacgtgcctctgttgtccctctgccgtacgaacggctacttcgcgagcctggtctactcgccgtccaggggctccccgaaggcctggcattccgtcgacccgcagagtacgacccaaaggcactgatggccatcctggaacattctcaccgaatccggtttaaattgaaacgcccactcgaggacgggggaagggactctaaggctctcgtggagttaaacggcgtctccttgatccctaagggcagcagagactgcggacttcacggccaggccccaaaagtgcccccacaggacttgccccctactgccacctccagcagcatggcttctttcctatactcaacagcattacccaaccatgcaatcagagagctgaagcaagaagccccatcctgccccttggccccatctgatttgggactgtccaggccaatgcctgagccaaaggcaacgggtgcacaggatttcagcgactgttgtggtcaaaagccgacagggcctggtggccctctgattcagaatgtgcatgcctctaagcgcatattgttctcaattgtgcatgacaaatccgaaaagtgggacgcctttattaaggagacggaggacatcaacaccctgcgggagtgtgtacagatcttattcaactcaaggtatgctgaagccctcggcctcgatcatatggtccccgtgccatacaggaaaatcgcatgcgaccccgaagcagtcgagatcgtcggcattcccgataaaatcccattcaagagaccatgtacctatggagtccccaaactgaaacggattttggaagaaagacattcaatacactttataattaaaagaatgtttgatgagcggatattcaccggaaacaagttcaccaaagacactacaaaactggagccagcttcgcccccagaagatacctcagctgaggtgtcacgagctacagtactcgacctggctggaaacgccaggtctgataagggttccatgtcagaagactgcggccctggtacttctggcgaactgggcggactgcgccctataaagatcgagccagaggatctggacatcatccaggtgactgtgcccgacccatcaccgacttccgaagagatgactgatagcatgccagggcaccttccctctgaggattctgggtatggtatggagatgctcacagataaaggtttatccgaggatgcccgacccgaagagcgcccagtcgaggacagtcatggcgacgtaatcagacccctccggaagcaggtcgagttattgttcaacacaaggtatgcaaaagcaattgggatcagtgagccagtaaaggtgccttattctaagttcctgatgcacccagaggaactttttgtagttggactcccggagggtatcagcttgcgtcgtcccaactgttttggcatcgcaaagctgagaaaaatcctggaagcctccaactccatacagttcgttataaagaggcccgaattgttgacagaaggcgtgaaggaacctatcatggattcccaagagagagacagtggtgatccattggtcgatgagagtctgaaacgacaggggttccaggagaattatgacgcaagactcagtagaatcgacatcgctaataccctgagggagcaggtacaagacctgttcaataagaaatatggggaggcactcggcattaagtatcctgtccaggtcccttacaaaaggataaagtccaatccgggtagcgtgataatcgagggtcttccccctggtattcccttccgaaaaccctgcaccttcggcagtcagaacctagagaggatcctggcagttgccgataagatcaaatttacagttacccgtcccttccaggggctgatccccaagccagatgaagacgatgccaatcgactaggcgagaaagtcatcctgagagagcaggtgaaggagttatttaatgagaagtatggcgaagcactagggttgaaccgcccagtcctcgtgccttacaaactcatccgggatagcccagacgccgttgaggttactggactgccggatgatattccgttcaggaaccccaatacatacgacattcatcggctagagaagattctgaaggctagggaacacgtccgaatggtgatcattaatcaactccagccatttgcggagatttgcaacgatgccaaagtgccagccaaagacagctcgattcctaagaggaaaaggaagcgggtttcagaaggaaacagtgtttctagctcttcctccagctcctcttcctccagctctaacccggatagcgtagcctcagctaaccagatcagcctggtccagtggccgatgtacatggtcgactatgccggtctgaatgtccaacttcccggtcccctgaactattag

SEQ ID NO: 225360 - DNA, 2931 bp, synthetic construct
  misc_feature 1..2931: note = Description of Artificial Sequence: Synthetic coding sequence
  source 1..2931: mol_type = other DNA
atggcgctgctgggtaaacgctgcgatgtgcctacaaatggatgtggccctgatagatggaactctgctttcacacgcaaggatgagattataacaagcctggtaagtgcgctggattccatgtgttccgcgctatctaaactgaatgctgaagtggcctgcgtggccgtgcacgacgaaagcgcgttcgtggtcggaacagaaaagggtagaatgttcctcaacgcaagaaaggagttacagtcagatttcctgcgattttgtctgtcagctgcacaacaccgggctgcaacgtctcaactggagggcagggtcgtgcgtcgcgtcctgacggtggcttccagagccctgtgtcctaccggcggacctccatggaaagaccctgaggcagaacacccaaagaaggtccaacggggagaggggggaggtcgctcactgccacgatcctccctcgaacacggttcagatgtgtacctgctaagaaaaatggttgaagaggttttcgacgtgctgtactcggaagccctgggcagagcaagcgtggttcccctgccctatgagagactgctccgcgagcccggactgctcgcggtacaggggctgccagagggcctagcgtttaggcgacccgctgaatatgacccaaaggcgctgatggcaatattggagcatagccacaggatcaggttcaaattgaagagacctctggaagacgggggaagagacagcaaggccctcgtggaactcaacggggtcagcctgattcccaagggcagcagagattgcggtctgcacggccaggcacctaaggtgccccctcaggacctccccccaacagccacttcctcctcaatggcctcctttctttactccaccgcgctaccgaaccacgccatacgagaactgaaacaagaagcacccagctgtccattagctcctagtgatctgggactcagccgccctatgcctgaacccaaggctacaggggcacaggatttttccgactgctgtggtcagaaacccaccgggccaggcggaccactgatccagaatgttcacgcgagtaaaaggatcctgttctcaattgtgcatgataaaagtgaaaaatgggacgcattcattaaagaaacagaggatataaataccttgcgggagtgtgtgcagatactgttcaattctaggtacgccgaggcattaggcctggatcatatggtgcccgtgccctaccgcaaaatcgcctgtgaccccgaggccgtggaaattgtgggcattcccgacaaaatcccgtttaagcgcccttgcacttacggggtccccaagctcaaacgaatattagaggagcgacactccatacatttcattatcaagcgcatgtttgacgagcgcatctttacaggcaacaagtttactaaagacacaaccaagctggaaccagcttcaccgccagaggataccagtgccgaagtttcaagggccacggtgctggacctggctgggaacgcgagatcagacaaaggcagtatgagcgaagactgcgggcctgggacctctggggagttgggaggtctccggccaataaagattgaaccagaggacctggacatcattcaagtcacggtgcccgaccccagtcctacctctgaggaaatgactgacagcatgccgggtcatctgccatcagaagacagcggttacggaatggagatgctcacggacaaggggctcagtgaggatgcccgaccagaagaaaggccggtcgaggatagccatggtgacgtgattcgcccactacgcaaacaggtggaactgctgttcaatacacggtatgcaaaggcaattggaatttctgaaccagtcaaggtcccctactctaagtttctcatgcatcctgaagaattattcgtggtgggattgccagagggcatctcgctgcgcaggcctaattgttttgggatcgcgaagcttcggaaaattcttgaagcgagcaattctatacagttcgttattaagagacctgagctgttgactgagggcgtcaaggaacccattatggattctcaggagagagactccggcgaccccttagtggatgagagcctgaagcggcagggcttccaggaaaattatgatgcgcgattgagccggattgatattgctaatactctccgagagcaggtccaggatctgttcaataaaaaatatggggaggctctgggtatcaaataccccgtccaagttccctacaagagaataaagagcaatcccggatccgttatcatagagggattgccccctggtattccattccgcaagccatgcacctttggctcccagaatctcgaacgtatactggcagtcgccgacaagattaaattcaccgtgacacggccttttcaaggccttatccccaagccggacgaagatgatgctaatcggctcggcgaaaaagtgatcttgagggaacaggtaaaagaactttttaatgagaagtatggcgaggccttgggattaaatagacccgttttagtcccatataagctgatcagggattctcccgacgcggtggaggtgacaggtcttcccgacgacatcccttttcgaaacccaaacacttacgatattcatcgcctggagaaaatcctcaaggccagggagcacgtgagaatggtgattatcaatcagctgcagccttttgctgagatctgcaatgacgctaaagtccctgcgaaagactcatcaatccctaagcgaaaacggaaacgcgtgtctgaaggtaactcagtgagctcctcatcctccagcagctccagcagcagctcaaaccctgattctgtcgcttccgccaatcaaatctctctggtgcagtggcctatgtacatggttgattatgctggactaaacgtgcaactgcccggacctctcaactactag

SEQ ID NO: 225361 - DNA, 609 bp, synthetic construct
  misc_feature 1..609: note = Description of Artificial Sequence: Synthetic coding sequence
  source 1..609: mol_type = other DNA
atgagttgcgttccatggaaaggagacaaggcaaaatctgaatcactcgagttgcctcaggcagcccctccacagatataccatgagaaacagaggagggagttgtgtgctctccacgcacttaacaacgtattccaggattctaacgcgtttactcgcgacaccctccaggagattttccaaagactgagtccaaacacaatggtgacccctcataagaagtcaatgctgggcaatggcaactacgatgtcaacgtgatcatggcagccttgcaaacaaaaggctatgaagccgtttggtgggataagcggagggacgtgggtgttattgcgctgacaaatgttatgggattcatcatgaatttgcctagtagcctctgctgggggccactgaagctgcccctgaagcggcagcattggatatgtgtccgggaggtggggggagcgtactacaatctcgactctaaattaaagatgcctgaatggattgggggagagtccgagcttcgaaagtttttaaaacaccacctgcgaggaaagaactgtgaactgttattggtggtcccggaagaggtggaagctcatcagagctggagaacggacgtgtag

SEQ ID NO: 225362 - DNA, 1545 bp, synthetic construct
  misc_feature 1..1545: note = Description of Artificial Sequence: Synthetic coding sequence
  source 1..1545: mol_type = other DNA
atgaaatggagactgcaagagggaaggggcgaagctgtctaccagatcggcgtcgaagacaatggtctcctggtggggctagcggaggaagagatgagggccagtttgaagaccctccaccgaatggctgaaaaggttggagcggatatcaccgtgctgcgtgaacgcgaagtggactatgatagcgacatgcctcgcaagattactgaggtactggtcagaaaagtgccggacaatcagcagttcctggatctcagggtggccgttctgggtaacgtggacagcggaaagagtactctgctgggcgtactgactcagggagagcttgataacggaaggggtcgagctcgcctcaacctgtttaggcacttgcatgagatccagagtgggagaacctcaagcattagctttgaaattctgggcttcaattccaaaggtgaggtggtgaattattcggactcgcggactgcagaggagatctgcgagagttcaagcaaaatgatcacgttcatagatcttgctgggcatcataagtacttgcacacaacgatttttgggctgacctcatattgccctgactgcgccctcctcctggtgtctgcaaataccggcattgctgggaccactagagagcacctgggtctagctctcgccctgaaagtgccgttcttcattgtcgtcagtaaaatagacttgtgcgctaagacaaccgtggagcgtaccgtgcgccagctggagagagttctgaagcagccgggatgccacaaagttcccatgctggttacaagcgaggacgatgccgtgaccgctgcccagcaatttgctcaatcgccaaatgtaacaccaatattcacattgagcagcgtctctggggagtcactcgatctgctgaaggtgtttttgaatatcctgccgccactgacaaattccaaagaacaggaggagctgatgcagcagctgacagagttccaggttgacgagatttatactgtcccagaggtcggaacggttgttggtggaacactgtcctccgggatatgtcgggagggcgaccagctcgttgtggggcctacagatgacggctgtttcctcgaattgcgggtatgcagcatacagagaaaccgctccgcctgtagggtcctgcgtgctggccaggccgctacccttgcattaggtgatttcgaccgggcactgttgcgaaagggtatggtgatggtctcccccgagatgaatccaactatctgttctgtcttcgaggccgagattgtgcttttgttccacgccacaacttttagacgtgggtttcaggtgactgtgcacgtgggtaacgtgcgccaaaccgcagtggtagaaaagatccatgctaaagataagctgcgaacaggcgaaaaggccgtcgtgcggttcaggtttctaaagcacccagaatacctgaaagtgggcgctaaactgctctttcgagaaggggttactaaaggcataggccacgtgaccgacgtgcaggccataaccgccggagaagcgcaggccaacatgggcttttag

SEQ ID NO: 225363 - DNA, 1809 bp, synthetic construct
  misc_feature 1..1809: note = Description of Artificial Sequence: Synthetic coding sequence
  source 1..1809: mol_type = other DNA
atggatagtcgcgtgtccgagctgtttggcggttgctgtcggccaggtggcggacctgccgttggcggaaccttgaaagcaagaggcgctggtagtagcagcggatgcggtgggccaaaaggcaagaaaaagaacgggaggaacagaggtggtaaagccaataatcctccatatctccctcctgaggctgaagacggaaacattgagtacaaactgaaacttgtgaaccctagtcaatatcgcttcgaacatttggttacccaaatgaagtggagactccaagaaggacgaggcgaagctgtgtatcagatcggagtcgaagacaacggactgctcgtgggcctagcagaggaggagatgcgcgcttctctcaagactctgcaccgaatggctgagaaagtgggggcagatatcaccgtcctacgggagagggaggtggattacgattctgacatgcctcgcaagattaccgaagtgctcgtgagaaaggtgcctgacaatcagcaatttctcgatttgcgtgtagctgtcctgggaaatgtggattctggtaagtctaccctattgggagtgctgactcagggagagttagataatgggcgagggagggccagactcaatttgttccggcatctgcacgaaattcagagcggaaggacttcaagcatctcgtttgaaatacttggttttaattctaagggggaggtggtgaattactctgacagccgcacagcagaggaaatttgtgaatccagtagcaagatgattacatttatcgacctggccggacaccataagtacctgcacacaacaatattcgggctgacaagctattgccctgattgtgccctcctgttggtgtcggcaaacaccggcatcgcgggaaccacacgtgaacatctgggcttggccctcgccttgaaggtacctttctttatcgtggtgtccaaaatagacctgtgcgcgaagactactgtggaacgcacagtgagacagctggagagggtattgaagcagccaggttgccataaagtaccaatgttagtgactagcgaggatgatgctgtgacagccgcacagcagttcgcccaaagcccaaatgtgacccctatctttacattaagcagtgtgtccggcgagagcttagacttattgaaagtgtttctcaatatcttgccacctcttaccaacagcaaggagcaggaggaattgatgcagcagctcactgagttccaggtggatgaaatttacactgtgccggaagtaggaacagtggtgggagggaccctctccagcggtatctgccgggagggcgatcagctggtggtgggtcctactgacgatggctgcttcctggagctgcgcgtttgctctatccagcggaaccggtctgcatgtagagtattgcgggcaggccaggccgcaaccctggccctgggcgatttcgaccgagcactgttacgaaagggtatggtaatggtaagtcccgaaatgaacccaactatctgctctgtgtttgaagctgagattgttttgcttttccatgctacaaccttccgcagaggctttcaagtgactgtccatgtcggcaacgtgcgacagactgctgtggtagaaaaaatccacgccaaggacaagctcaggaccggagagaaagccgttgtgagattcaggtttctgaagcatccagaatatctgaaagtgggagcgaagctcctgtttagagaaggagtcacaaagggtattggccacgtgactgatgtgcaagcgattactgccggtgaggcacaggcaaacatgggattttag

SEQ ID NO: 225364 - DNA, 735 bp, synthetic construct
  misc_feature 1..735: note = Description of Artificial Sequence: Synthetic coding sequence
  source 1..735: mol_type = other DNA
atgaagtggcgactccaggagggacggggtgaggccatctttaccctgtccagcgtgtccggggaaagtctggaccttctcaaggtttttctcaacatcctgccaccgctcaccaattccaaagaacaagaggagctcatgcagcagttgactgaattccaggtagacgagatctacaccgtgcctgaggtggggacagtcgtcggagggaccctgagcagcgggatctgtagagagggtgatcagctggttgtcggtccaacggatgatggctgtttcctcgagttgagggtgtgctcgatccagcggaaccggtccgcttgcagggtgctgcgtgcaggccaagcagccaccctcgccctgggtgacttcgaccgtgccttgctccgtaagggaatggtcatggtcagtcctgagatgaatccaaccatctgttccgtctttgaggcggagatcgtattacttttccatgctactacgttcaggcgtggctttcaggttacagtgcacgtaggcaatgtcagacagacagccgttgtggagaagatccacgcgaaggacaaattacgcacaggcgagaaggctgtggtaaggttccgctttctgaagcatcctgaatacctgaaagtcggtgccaaattattattcagagagggagttacaaaaggcatcggacacgtgacggatgtgcaagctatcacagcaggagaggctcaggctaatatgggattctag

SEQ ID NO: 225365 - DNA, 462 bp, synthetic construct
  misc_feature 1..462: note = Description of Artificial Sequence: Synthetic coding sequence
  source 1..462: mol_type = other DNA
taggggatatgtcgagagggggatcagttggtcgtaggacctactgatgacggatgcttcctggagcttcgcgtgtgtagcatccaaaggaaccgctccgcttgtcgggttctgagagcagggcaggcagcaactttagccctgggggatttcgacagagccttgctccgaaaagggatggtgatggtgtctccagaaatgaatcctacaatctgctctgtcttcgaggctgagattgtgttgctctttcacgcaacaactttccgcagaggctttcaggttacggtccatgttgggaatgttaggcagactgcagtggtggagaagattcatgctaaggacaaattgagaacaggggagaaagcagttgctcgtgagcggggagtcctgtcagccacctgttcactcccaaccttctggcgcggtgcgaaactgggcgtcgctcgcaagggccagtcctag

SEQ ID NO: 225366 - DNA, 465 bp, synthetic construct
  misc_feature 1..465: note = Description of Artificial Sequence: Synthetic coding sequence
  source 1..465: mol_type = other DNA
tagggaatctgtagagagggtgatcaattggttgttggtcccaccgacgatggctgtttcttggagttacgtgtctgctctattcagagaaatagatcagcgtgtcgtgtccttcgggcaggccaggcggcaacgctggccctaggcgatttcgacagagctctcctgagaaagggtatggtaatggtttcccccgagatgaatcctaccatttgtagcgtgtttgaggcagaaattgtgctcctctttcatgccacaaccttcaggaggggtttccaagtaaccgtgcatgtcgggaacgtccggcagactgcagtcgtagagaaaattcacgctaaggtgaggggtacatggccctcaatcagtcccgaagttcgcaaggaagggggtcttcctcaaactggccgagaactgttggatccaaccatgggaattaaacctcacctcggctgggtagccgcatag

SEQ ID NO: 225367 - DNA, 543 bp, synthetic construct
  misc_feature 1..543: note = Description of Artificial Sequence: Synthetic coding sequence
  source 1..543: mol_type = other DNA
atgcagcagctgacagagtttcaagtcgatgagatttacaccgtaccggaagtggggaccgtcgtgggcggaacattgagttcaggcatctgcagggagggcgaccaacttgtggtgggtcctaccgacgatggttgctttctggagttgagggtttgtagtattcagcgcaatcgatctgcttgccgtgtgcttagggctgggcaggcggctactctcgcactcggcgatttcgatcgggctctactgcggaaggggatggtaatggtgagtccggagatgaaccctaccatttgtagcgtctttgaggctgagatcgttttgttattccacgctaccactttcaggagaggtttccaggtcactgttcacgttggaaacgtgagacaaacagctgttgtggagaaaatccacgcgaaggacaagctgagaactggcgagaaagcagtcgcaagggaacgaggagtcttaagcgccacgtgctctctgcccactttttggaggggcgctaagttgggtgtagcacgaaagggacagtcatag

SEQ ID NO: 225368 - DNA, 951 bp, synthetic construct
  misc_feature 1..951: note = Description of Artificial Sequence: Synthetic coding sequence
  source 1..951: mol_type = other DNA
taacaagggggaggcgctcgcgaggaaaatacatcattcagatctagggatcccagggaggaaggccagaggttggactctcaggcagaggatgggaatattgagtataagctcaaactggtcaatccgtcacagtaccggttcgaacacctggtcacacagatgaaatggagactgcaggagggaaggggagaagcagtttatcagatcggggtagaagacaatgggctgctggtggggctggctgaagaagaaatgcgggctagcctgaagaccttgcatcgaatggccgaaaaagtaggcgcagatattacggtcctcagagagagagaagtagattacgatagcgacatgccgcgaaagattacagaggtactggtgcggaaagtgccggacaaccagcagtttttggacctgagagtagccgtactggggaatgtagattcaggtaaaagcactttactcggcgttctgactcagggggagctggacaacggcagaggcagggcgagactgaatttattccgccacttgcacgagattcagagcggccgtacatcaagcatcagcttcgaaattctgggctttaatagtaaaggggaagttgttaactatagtgattcccggacggctgaggagatctgtgaaagttcgtctaagatgatcaccttcatagatttagctggtcatcacaaatatctgcacacaacgatctttgggcttacatcatactgtccggattgcgcccttcttctggtctccgctaacactggcatagctggaaccaccagggaacacttggggctggctctggccttgaaggtccccttttttattgtcgtgtccaagattgacttatgtgctaaaactacggtggagcgaactgtccggcaattggaaagagttctaaagcagccagggtgccacaaggttccgatgttggtgacgtag

SEQ ID NO: 225369 - DNA, 684 bp, synthetic construct
  misc_feature 1..684: note = Description of Artificial Sequence: Synthetic coding sequence
  source 1..684: mol_type = other DNA
atggactctcgagtcagcgaactcttcggaggttgctgtagacccggaggcggacccgctgtcggcggaaccctgaaggctcgtggagctggatcctcctcgggatgtggaggtcctaagggtaaaaaaaaaaacggacgaaatcggggaggcaaggccaataatccaccctatctgcccccagaggccgaggacggaaacatagaatacaaatacagattcgagcatctggtgacccagatgaagtggcggcttcaggagggacggggagaggcagtgtaccaaattggcgtggaggacaatgggttgctggtaggcctcgccgaagaggaaatgagggcttcactgaaaaccctgcaccggatggccgaaaaagtcggagccgacattaccgttcttcgcgagcgtgaggtggactacgactctgatatgccacggaaaataactgaagtgctggttaggaaagtgccagacaatcaacagtttctcgaccttagagtggccgtgctagggaacgtggactctggtaaatcaacactcctgggggtccttacgcagggggaactcgataacgggcgaggcagggcgagactaaatctttttcgccacttgcacgagatccagtcaggcagaacgtcaagtatctccttcgaaattctgggatttaattccaagggtgaatag

SEQ ID NO: 225370 - DNA, 1221 bp, synthetic construct
  misc_feature 1..1221: note = Description of Artificial Sequence: Synthetic coding sequence
  source 1..1221: mol_type = other DNA
atggcccctgccagatgttttagcgcacgcctgaggacagtatttcagggtgttgggcactgggccctgagcacatgggccggactgaaaccttccaggctcctgcctcagcgagcctcgccgaggttactctcggttggcagagccgacttggccaagcatcaggagctgccagggaaaaagcttctgagcgagaagaagttaaagcggtatttcgtggactataggcgagtactcgtatgtggagggaacggtggcgcaggcgcatcctgctttcatagcgagccgagaaaggaatttgggggaccagatgggggtgacgggggtaacggcggtcatgtcatcctgagagtcgatcaacaagtaaagagtcttagcagcgttcttagtcgttaccagggatttagcggggaagacgggggtagcaagaattgtttcggcaggtcaggagctgtgttgtatattagggtcccagttggaaccctggtgaaggagggaggtagagtagtggctgacttgtcctgcgtcggggatgagtatattgccgctcttggaggggcaggagggaagggtaacagattcttcctggcaaacaacaacagggcgcctgttacttgtaccccagggcaacccggacagcaacgagtgctgcacctcgagctgaaaactgtggcccatgccggaatggtcggcttccccaacgccggaaagagctcacttcttagagccatatcgaatgcgagacccgcagtggcctcttacccattcaccacactgaagccacatgtcggcatagtccactatgagggtcatctgcagattgccgtcgccgacatccccggaataatccgcggagcacatcagaatcgcggactcgggagcgcttttctcagacacatcgaacgatgcagattcttgctgttcgtcgttgatttgtcccaaccagagccctggacccaggtcgatgatttgaagtacgaactcgagatgtatgaaaagggactgagcgcgcgaccccatgctattgtcgcgaacaaaattgacctgcctgaagcccaggccaatctttcccagctgcgagaccaccttggccaggaggtgatagtcctcagcgccctaaccggggagaacctggagcagctgttgcttcacttaaaggtcttgtacgacgcctacgcggaagccgagctgggacagggacggcaacctctgcgttggtag

SEQ ID NO: 225371 - DNA, 747 bp, synthetic construct
  misc_feature 1..747: note = Description of Artificial Sequence: Synthetic coding sequence
  source 1..747: mol_type = other DNA
atggcacccgctcggtgctttagcgctcggctgaggaccgtctttcaaggcgtgggacattgggccctctctacatgggccggattgaaacctagtcggctgctgccccagagagcaagcccaagactgctgagcgtaggcagggccgaccttgctaaacaccaagagctccccggtaaaaagcttttatcagagaagaaactcaaacgatatttcgtggactaccggagggtgctcgtatgcgggggaaatggaggagccggtgccagctgtttccacagtgaaccacggaaggagttcgggggtcccgacggcggagatggcggtaatggaggtcatgtcattttgagagttgccgacataccaggaattattaggggcgctcatcagaaccgtggcctggggagtgcattcctgcgtcacattgaaagatgccgctttctgctattcgtagtggacttgtcacagcccgagccctggacccaagtcgatgacctaaagtatgagcttgaaatgtatgagaaaggtttatcagcacgccctcatgccatagtggcgaacaaaattgatttgcctgaggctcaggctaacctgagtcagcttcgtgatcacttgggccaggaggtaattgtcctaagtgcgctgactggcgaaaatctggaacagttattactgcacctgaaggtgctgtatgatgcttacgccgaggccgagttaggtcagggtcgtcagccactacgctggtag

SEQ ID NO: 225372 - DNA, 702 bp, synthetic construct
  misc_feature 1..702: note = Description of Artificial Sequence: Synthetic coding sequence
  source 1..702: mol_type = other DNA
atggcaccagccaggtgtttctctgctcggctgcgaactgtgtttcaaggagttggacactgggcgctgtcgacctgggcgggacttaaaccatcccgactattaccacagcgggcatccccaaggttgctgtcagtcggacgcgcagaccttgctaaacaccaggagctcccaggcaagaagctgctctccgagaagaaactgaagcgctattttgtagactacagacgcgtcttagtctgcgggggtaatggaggggctggggcttcttgctttcactctgagcctcgaaaggagttcgggggtcctgatggcggagatggagggaatgggggacatgttatactgcgagtggatcaacaagtcaagtctctctccagcgtcctaagccgctatcaggggttctcaggggaggatggcggtagcaaaaactgcttcggccgatcgggggcagtgttatatataagggtccctgtgggaaccctggtcaaagaggggggacgcgtggtagccgaccttagttgcgtgggcgatgaatacattgcagctcttggcggtgccggagggaaggggaatcggttctttctggctaataacaaccgagcaccagttacatgcaccccaggccagcccggacagcaaagagtccttcatctcgaattgaagaccgtggcccatgctggcatggtcggctttccttag

SEQ ID NO: 225373 - DNA, 537 bp, synthetic construct
  misc_feature 1..537: note = Description of Artificial Sequence: Synthetic coding sequence
  source 1..537: mol_type = other DNA
atggtcggattccctaatgctggtaagagttcacttctcagggccataagtaacgcgagacctgccgtcgcaagttacccttttactaccctgaaaccccatgtcggtattgtccattacgagggccatttgcagattgcggtagccgatatccccggaatcatcaggggagcacaccagaatcggggactggggagcgcttttctgagacacatagaacggtgccgattcctcttgtttgtcgtcgacctctctcaacccgagccttggacacaggtcgacgacttgaaatatgaactggaaatgtacgagaagggactttctgcgagaccgcatgctatcgtggctaataaaattgatctgcccgaagctcaggccaatctcagccagctgcgggaccatctaggacaggaggtcatcgttttgtccgctctaaccggcgaaaatctggaacaactcctgctgcatcttaaggtgctgtacgacgcttatgcagaggctgagctggggcaaggacgccaacctctgaggtggtag

SEQ ID NO: 225374 - DNA, 864 bp, synthetic construct
  misc_feature 1..864: note = Description of Artificial Sequence: Synthetic coding sequence
  source 1..864: mol_type = other DNA
cggagtaacctgaagcgggacgtggcccatctttaccgtggggtgggcagccgctacattatggggtccggtgagtcttttatgcagctccaacaaaggttgctccgcgaaaaggaggccaagatcaggaaagcactcgacaggctgagaaagaagagacacctgcttcgtcggcagaggacccgtcgggaattccccgtgatctcggtggtcgggtatactaattgtggaaaaacaacgctgatcaaggcgttgacaggggatgcggcaatccagccccgtgaccagctgtttgcaaccctggacgtgaccgcgcacgccggaacattgccgtcgcgcatgaccgtgttatacgtggacactatagggtttttatcccagctgccccacggactgattgagagcttctcagctacattagaagacgttgcccacagcgatttgatactgcacgtgcgggatgtctcacacccagaggccgaactacagaaatgttccgtgctgtctacgcttcgtggcttgcagcttccagcgcctctacttgactcgatggtcgaagttcataacaaggtggacttggtcccaggctacagcccgacggagcctaacgtggttccagtctccgcgctcaggggtcacgggttacaggagctcaaggcagaacttgatgcggctgtgctgaaggctacaggtcggcaaattctcacgctacgcgtcagattggcaggggcacagctgtcatggctttacaaagaggccacagtccaggaggtggatgtgattccagaagatggggctgcagatgtgagggtcattatctctaattcagcgtacggcaagtttcgaaagctgtttcccggttag

SEQ ID NO: 225375 - DNA, 864 bp, synthetic construct
  misc_feature 1..864: note = Description of Artificial Sequence: Synthetic coding sequence
  source 1..864: mol_type = other DNA
tgaagtaacctgaaacgagacgtcgcacatctgtaccgaggggtgggaagccggtatatcatggggtcgggagagtctttcatgcagctgcagcagcgtcttcttagggaaaaggaggcgaaaatccgtaaagccctggataggctgcggaaaaaaaggcatctgttaaggcgccagaggacgaggcgagagttccctgtgattagcgttgttggctacacaaactgcgggaagaccacactaattaaagccctgaccggcgatgctgcaattcagcccagggatcaactgtttgctacacttgatgtgacggcccacgcgggaacattacctagtcgcatgacagtgctgtatgtggataccatcgggtttctctcgcagctgccacatggcctgatcgagagtttctcggcgacacttgaagatgtggcacacagtgatcttattcttcatgttcgcgacgtttcccatcccgaggccgagttgcagaagtgctccgttctgtctactctcagaggactgcagcttcccgctccacttttggacagcatggtggaagttcataacaaagtggacctcgtcccaggatactctccaacagaaccgaatgtcgtccctgtatcagctttgagaggccatgggttgcaggagctgaaagcagagcttgatgctgccgtgctgaaggcaaccggacgccaaattttaaccctcagggtgcgcctcgctggtgcccagctgtcctggctctataaggaagccactgtacaggaagttgacgtgatacccgaagacggggctgctgatgtccgcgttataatcagtaattccgcttacggcaagttccggaagctgttccccggatag

SEQ ID NO: 225376 - DNA, 891 bp, synthetic construct
  misc_feature 1..891: note = Description of Artificial Sequence: Synthetic coding sequence
  source 1..891: mol_type = other DNA
atgaccctcaataatgtaacgatgcgccaagggaccgtcggaatgcaaccacagcagcagaggtggtcaattcctgccgatggacgccacctcatggtgcagaaggaaccacatcagtatagccaccggaaccggcattcggccactcccgaagaccattgccggcgttcctggtcatcagatagcacagattccgtgatctcttctgagagtggcaacacctactaccgagttgtactgattggggagcaaggggtcggcaagagtacattggcgaatatttttgctggcgttcatgattcaatggactccgattgtgaagtattgggcgaagatacatacgaacgcactttgatggtcgatggtgaatccgcaaccataattctactagacatgtgggaaaataagggagaaaacgagtggctccacgaccactgcatgcaggtaggcgacgcatacctgatagtgtactcaatcaccgatagagcctcatttgagaaggcgagtgaactacgtatccaactccgcagagcgaggcagaccgaggacatacccatcattctggtgggcaacaaatctgacttggtgagatgtcgcgaggtcagcgtgagcgaagggagggcatgcgctgtcgtctttgattgcaagtttatcgagacctctgccgctgtacagcataatgtgaaagaattgtttgaaggaattgtcagacaagtccgtttgagaagagattcaaaggaaaagaatgaacgcagactcgcataccagaaaaggaaagagtccatgccacggaaagcccgtaggttctgggggaaaattgttgccaaaaataacaagaacatggcttttaagctaaaatcaaagagctgccatgatctgagcgtcctctag

SEQ ID NO: 225377 - DNA, 891 bp, synthetic construct
  misc_feature 1..891: note = Description of Artificial Sequence: Synthetic coding sequence
  source 1..891: mol_type = other DNA
atgacgctgaataacgtcacgatgcggcaaggcactgtgggcatgcagcctcaacagcaacgatggtcgattcccgctgatgggcgacacttgatggtgcaaaaggaaccacaccaatattcacacaggaatagacacagtgccaccccagaggatcattgccggagatcatggagttctgacagcactgattctgtcatatccagtgagtccggaaatacctactaccgggtggtgctgatcggcgaacagggcgtgggcaagtcaacacttgctaacattttcgccggtgtacacgatagcatggattctgactgtgaggtcctgggtgaagatacgtacgagcgcacactaatggtggacggagaaagtgccactattatactgctggacatgtgggagaacaagggggagaacgagtggctccacgatcattgtatgcaggttggagatgcctaccttatcgtgtattccattacagatagggcttcgtttgaaaaggcttcggagctgaggatccagctcaggagagccagacagacggaagatatcccaatcattctggtcggcaataagtcagatctggtacgttgtcgcgaggttagtgtcagcgaggggagagcatgcgccgtggtctttgattgtaagtttatagaaacctccgccgctgtccagcataatgtcaaagaactcttcgaagggatcgtaagacaggttcgattgaggcgtgacagcaaggagaagaacgagagaagactggcataccaaaaacggaaggagtctatgcccaggaaggcacgcagattctgggggaaaatcgtggcaaagaataataagaacatggcttttaaactgaagagcaagtcctgccacgacctttcagtgttgtag

SEQ ID NO: 225378 - DNA, 282 bp, synthetic construct
  misc_feature 1..282: note = Description of Artificial Sequence: Synthetic coding sequence
  source 1..282: mol_type = other DNA
atgacattaaataacgtaaccatgcgtcagggcaccgtgggtatgcagccccagcagcaaaggtggagcatccccgcagacggcagacacctcatggtccagaaggagccccaccagtattctcaccgcaaccgtcactccgcaactcccgaggatcactgtagaagaagctggagcagtgattctaccgactctgtgatctcttctgaatctggcaatacgtactacagggttgtgctgataggcgaacagggggtagggaagagcacactggccaactag

SEQ ID NO: 225379 - DNA, 927 bp, synthetic construct
  misc_feature 1..927: note = Description of Artificial Sequence: Synthetic coding sequence
  source 1..927: mol_type = other DNA
atggttatggaaaagcccagcccacttctggttggccgagagttcgttcggcagtactacacacttctgaatcaggcccctgatatgctgcatcgcttttacgggaagaatagttcctatgtgcatggaggactggatagcaacggaaaacccgctgacgctgtctatggccagaaagaggttgaagaacccgaggagaggcaacagacccctgaggtagtaccagatgactccggaacattctacgaccaggctgtagtgagcaatgacatggaagagcatctcgaggagccagtggctgaaccggagcctgaccctgagcccgagcccgagcaggagccagtatctgaaatccaggaggaaaaaccgccacggccagaatcaaagcctgaaagccagattccgccacaacggcctcagcgcgatcagcgcgtgcgcgaacagcggatcaatattccccctcagcggggaccacggcctattcgagaagcgggagagcagggggatatcgaacctcggaggatggttcgtcatccagattcacatcagctgttcattggtaatctcccgcacgaagtggataagtccgagctgaaagacttcttccagagttacggtaatgtggttgagcttagaatcaactcagggggaaagctgcctaattttgggttcgtggtgttcgacgattcggagcccgtgcagaaggtgctttcgaatcgcccaattatgttccgtggtgaggtgaggttgaacgttgaggagaagaaaacacgtgccgcaagagaaggcgataggcgggataatcgcctccgcggtcctggcggtcctagaggcggtcttggcggtgggatgcgaggccctcccagaggaggcatggtgcagaaaccgggtttcggggtgggacggggactggcgccacggcagtag

SEQ ID NO: 225380 - DNA, 1401 bp, synthetic construct
  misc_feature 1..1401: note = Description of Artificial Sequence: Synthetic coding sequence
  source 1..1401: mol_type = other DNA
atggttatggagaaaccgtctcctttgctggtcggacgagagttcgtccgtcagtactacaccctgttaaaccaggccccagatatgctgcatagattctatgggaagaactctagctatgttcacgggggtttggatagcaacggaaaacctgccgacgcagtctacggacaaaaagaaatacacaggaaggtgatgtcccagaacttcactaactgtcacacaaaaataagacacgtggatgctcacgccaccttaaacgacggcgtggtggtgcaggtgatgggcttgctgagcaacaacaaccaggcactgagaaggttcatgcagacctttgtgctggcccctgaaggttctgtggctaacaagttttatgtgcataacgatatcttcagataccaagacgaagtcttcggcggatttgtgactgagccccaagaggagtccgaggaggaggtggaagaacccgaagaacgccagcagaccccggaggtagtccccgacgacagtggaaccttttacgatcaggcagtggtgagtaacgacatggaagaacacctggaggaacccgttgctgagcctgagcctgacccggagcctgaaccagaacaggagccggtctctgagatacaggaagaaaagcccgaacccgttttggaggaaaccgcaccagaggacgcccaaaaatccagtagtccggcacccgctgatatcgcacagacggttcaggaagatcttcggaccttctcgtgggccagtgtgacgagtaagaacttacctccaagcggtgctgttccagtgacgggcatcccacctcacgttgtgaaagtccctgcctcgcaaccaaggccagagtcaaagccagagtcccagattccccctcagcgcccacaaagagatcagagggtccgggagcaaagaatcaacattccccctcagcgaggcccaaggccaattagagaagcaggggagcagggcgatatcgagccgagacgcatggtgcgccatccagatagccaccaattgttcataggaaatctgcctcatgaggtcgacaagagcgaactgaaagacttcttccagagttacggcaacgtggtggagctacgcatcaacagcgggggaaaactgccaaactttggcttcgtggtctttgacgacagcgagccagtacagaaggtgcttagtaaccgtcccattatgttccggggtgaggtcaggcttaacgtggaggaaaaaaagacaagggcagcacgtgaaggcgatcggcgagataatcggctaagaggacccggtggacccagagggggacttggaggcggaatgcgaggccctcctcgaggcggtatggtgcagaaacctggctttggagtcgggagaggcttggcgcctcgccaatag

SEQ ID NO: 225381 - DNA, 1401 bp, synthetic construct
  misc_feature 1..1401: note = Description of Artificial Sequence: Synthetic coding sequence
  source 1..1401: mol_type = other DNA
atggtgatggaaaagccaagcccattactagtcggcagggagtttgtcaggcagtactacaccctgctcaatcaggcccctgacatgctccacagattttacggtaagaattcctcttatgtgcatggtggtctcgactcaaatggtaaaccagcggatgccgtttacggccagaaggagattcaccgaaaggtgatgagccaaaacttcacgaattgccataccaaaatccggcatgttgatgcacatgcaacactgaatgatggcgtcgttgtgcaggtcatgggcctgctatccaataacaaccaagccctccgccgtttcatgcaaacctttgtactggcacctgaagggtccgttgccaacaaattttatgtgcacaatgacattttcagataccaggatgaggtctttggtgggtttgtgactgaaccacaggaggaatcggaagaagaggtcgaagagcccgaagagcgccagcaaactcctgaggttgtgcccgatgacagtggaacgttttacgaccaagccgtggtctcaaatgatatggaggaacacctcgaagagcccgtcgccgaacctgaaccagacccggagccagagcctgagcaggagcctgtgagcgagatccaagaagagaaaccagagcccgtgttggaagagacggcgccagaagacgcccagaagtcctcctccccagcccctgccgacatcgcccaaaccgtgcaggaagacctacggacttttagctgggcatcggtaacctcaaagaaccttcccccttcaggcgctgttcccgtgaccggaatcccaccacacgtggttaaagtccctgcttcccaacccaggcctgagtctaaaccagaatctcagatccccccacagcgtccccagcgtgatcagcgcgtgcgcgagcagcgaattaatataccaccacagagggggcctcgcccaatcagagaagctggggagcaaggcgacatcgaacctaggcggatggtgaggcaccccgattctcaccagttatttatcggtaacctgccacatgaagtggataaatcggagctcaaggacttctttcagtcatacggtaatgtggtcgagctccggattaacagcggcggaaagcttcctaattttgggtttgtggtttttgatgattctgaacctgtccagaaagtgctatctaatcgccctatcatgttcaggggggaagtacggctgaatgttgaagagaaaaaaacccgcgctgctcgggagggggatcgtcgggacaaccggcttagagggccagggggtccaagggggggtctggggggtgggatgaggggcccaccacgagggggaatggtgcagaagcctgggtttggagtgggaagggggcttgccccacggcaatag

SEQ ID NO: 225382 - DNA, 318 bp, synthetic construct
  misc_feature 1..318: note = Description of Artificial Sequence: Synthetic coding sequence
  source 1..318: mol_type = other DNA
atggttatggagaagccatccccacttctggtgggcagggaattcgtgaggcaatattacacgctgctcaaccaggcccctgatatgctgcatcggttttatggaaagaacagtagttacgtgcatggtgggttagactccaacggcaagccagcagatgctgtctacggccagaaggagattcataggaaggtgatgtcccagaactttaccaattgtcacaccaagatccgacatgttgacgcgcacgccacgctgaatgacggtgtggtggttcaagtgatggggcttctcagcaataacaatcaagcgctctag

SEQ ID NO: 225383 - DNA, 369 bp, synthetic construct
  misc_feature 1..369: note = Description of Artificial Sequence: Synthetic coding sequence
  source 1..369: mol_type = other DNA
atggtcatggaaaaaccctctcccctcctggttggcagagagttcgtcagacagtactatacattgcttaaccaggcacctgatatgctccaccgattttatggcaaaaattcaagctacgtgcacggcggtctggatagcaacgggaaaccagctgatgccgtttacggccagaaagagattcatcgaaaagtgatgtcccagaatttcacaaattgtcatacaaagatccggcacgtggatgctcatgcaaccctgaacgatggcgtggtcgtccaagtaatggggctgcttagtaataataatcaagctttgcggagattcatgcagactttcgttctggccccagaatcattgaaaaagaaatag

SEQ ID NO: 225384 - DNA, 354 bp, synthetic construct
  misc_feature 1..354: note = Description of Artificial Sequence: Synthetic coding sequence
  source 1..354: mol_type = other DNA
atggttatggagaaaccttcacccttactagtcggccgtgagttcgtgagacagtattatacgctacttaaccaagcaccagacatgttacacagattctacggcaagaacagcagctacgttcatggcggactggatagcaatgggaagccagccgatgccgtctacggacaaaaagagatccaccggaaagtaatgagccagaactttactaactgccacactaagattcgacacgtggacgcccacgccaccctaaatgacggggtagtggtgcaggttatgggactgctgtctaacaacaaccaggccctgagacgctttatgcagacgtttgtcctggctccagagtag

SEQ ID NO: 225385 - DNA, 369 bp, synthetic construct
  misc_feature 1..369: note = Description of Artificial Sequence: Synthetic coding sequence
  source 1..369: mol_type = other DNA
atggtaatggagaagcccagtcccctcctggttggcagggaatttgttcgccagtattacacactgcttaaccaggccccagatatgcttcacaggttctacgggaaaaattcgtcctacgttcatggaggcttggatagcaacgggaagcccgctgatgcggtatacggacagaaggagattcatcggaaagtgatgtcacagaacttcacaaactgtcacaccaagatcagacatgtcgatgcccatgctacactgaacgatggtgtagtcgtacaggtgatggggttattgtctaataataaccaagccctgcggcgattcatgcagactttcgtcctggcccctgagtcactgaagaaaaagtag

SEQ ID NO: 225386 - DNA, 321 bp, synthetic construct
  misc_feature 1..321: note = Description of Artificial Sequence: Synthetic coding sequence
  source 1..321: mol_type = other DNA
atggttatggaaaaaccttctcccctgctggtggggagagaattcgtccgtcagtactacacccttttaaatcaggcgccagatatgctgcatcgattctatggcaagaacagcagctatgttcacggtggcttggacagtaacggaaagccggctgatgcggtttatggtcaaaaagagatccacagaaaagtgatgtcacagaatttcacaaattgtcacaccaaaatcaggcatgtggacgcgcatgccactctcaatgatggagtggtggtacaggtgatgggcttattgtcaaacaataatcaggcgctccgttag

SEQ ID NO: 225387 - DNA, 855 bp, synthetic construct
  misc_feature 1..855: note = Description of Artificial Sequence: Synthetic coding sequence
  source 1..855: mol_type = other DNA
atggaggaacacctcgaagagcctgtggcggagcctgaacctgatccagagccggagccagagcaggagccagtgagtgagatccaagaagagaagcctgagcctgtgctggaggaaacagcccctgaggacgcccagaagtcttcttcaccagctccggctgatatcgcccagaccgtgcaggaagatctgcgtacgttctcctgggcgtcagtcacgtccaagaacctccctccatcaggagccgtgccagtcaccggcatacctcctcatgtggtcaaggtcccggcatcccagccaagaccagaaagcaagccagagtctcagatccctccacaacggcctcagagagaccaaagagtacgggaacagcggattaacattcctcctcagcgcggaccacgtccaatcagggaggcgggagaacagggagatattgaaccaaggaggatggtccgccaccctgacagtcaccagctattcattggcaatcttccccacgaggtggacaaatctgagctcaaggacttttttcagtcttatggtaacgtggtggagctgaggattaatagtgggggaaaactgcctaactttggcttcgttgtttttgatgactccgagccagttcagaaagtactgtctaatcggccaattatgtttcgcggtgaggtcagactgaatgtcgaagagaagaaaacccgggctgccagggagggggatcggcgagataaccgacttagaggaccaggtggccctcgcggtggtctaggaggcggaatgagaggacctcccagggggggtatggtacagaagcccggtttcggcgtcgggaggggactggcacccagacaatag

SEQ ID NO: 225388 - DNA, 4359 bp, synthetic construct
  misc_feature 1..4359: note = Description of Artificial Sequence: Synthetic coding sequence
  source 1..4359: mol_type = other DNA
atggtgaaattggacatccatacattggctcaccatctgaaacaagaacgcttgtacgtgaactcagagaagcaacttatccaacggctcaatgccgacgtcctgaagactgctgaaaaactgtacaggactgcctggatcgctaaacaacagaggatcaacctggacaggctgattatcacttccgcggaggcaagcccagccgagtgttgccagcacgccaagatcctagaagacacgcaattcgtggatgggtataagcagctgggctttcaggaaaccgcttacggcgaattcttgtcccgtctcagggagaacccgcgtttgatcgcttccagcctggttgctggggaaaaactgaaccaggaaaacacgcagtctgtcatctacacagtttttacctcgctgtacggcaattgcatcatgcaagaggatgagagctacctcctccaggtactgcggtacctcatcgaatttgaactcaaggagagtgacaatcccagaagactactcaggaggggaacctgcgcattcagtattctcttcaagctgttttccgaggggctgttcagcgccaagctgtttttgactgctacgttgcatgagcctatcatgcagctcctcgtggaggacgaagaccacttggagaccgacccaaacaaacttattgagcggttttcacctagccagcaggagaagctgttcggcgagaagggcagtgaccgctttagacagaaggtccaggagatggtggagagtaacgaagctaaactggtagccttggttaataaatttattggatatcttaaacagaacacctactgctttccgcactccttaaggtggattgtgtcccaaatgtacaagacgctatcttgcgtggacaggctagaggtgggcgaagtgagagctatgtgtactgatcttttgctcgcttgctttatctgcccagcagtggtgaaccccgaacagtatggcattatctccgatgctccaatcaatgaggtcgctcggtttaatcttatgcaggtcggaagactgctgcagcagctcgcaatgacaggcagtgaagagggggaccctagaaccaaatcttcgctgggcaagttcgataagtcttgtgtggccgcattcctggacgtggtcattggtggacgggctgtggaaacaccccctttatcgtccgtgaatttactggagggcctgtcccggacggtcgtgtacattacatacagtcagttaatcaccctggttaattttatgaagtccgttatgtccggtgaccaattgagggaggaccggatggccctggataacttgctagcaaatctacctccagccaagccgggaaaatcttcctctctggagatgacaccatacaacaccccccaattaagtccggctaccactcccgcaaacaaaaaaaaccggcttccgatcgctactaggagtcgcagccgtacaaacatgcttatggacctgcatatggaccacgaggggagctcacaggaaactatacaggaggtccaacctgaggaggtcctggtgatctccctcggcactgggcctcaacttacccctggaatgatgagcgagaacgaggtacttaatatgcagttatcagatggcggacagggagatgtgcccgtcgacgagaacaagcttcacgggaagcctgacaaaacactacgcttttctttatgcagcgacaacctcgagggcatctcagaaggcccttccaaccgcagcaattcagtgagcagtcttgatctggagggggagtccgtatcagagcttggtgctggcccttcgggcagcaacggggtcgaggcactgcagctgctggagcacgaacaggctactacacaggacaatctggacgacaaactgcgcaaattcgaaatacgtgatatgatggggctgacggatgaccgtgacatctctgagactgtttcagagacatggagcacagatgtgcttggcagcgatttcgatcccaacattgatgaggaccggttacaggagattgcaggcgcagcagccgaaaacatgctcggatctctactgtgtctgccagggtctgggagtgtactgctggacccctgcacgggttccacgatctcagagacgacttcggaggcatggtccgtagaggtgctcccaagcgactcagaggctccagatctgaagcaggaggagcgcctgcaagaactggaatcctgctccggccttggatccacatccgatgacactgacgtgagagaggtgagttctagaccaagcaccccaggcctgagtgtggttagtggcatcagcgcaacgtcagaggacattccaaataaaattgaggatctccgatctgagtgctccagtgactttgggggaaaggattcagtgacctctcccgacatggatgagatcacgcacggggctagtgctgttgtaaggcccaaagtccactacgcacgaccgagccacccccctcccgatccacctattctggagggtgctgtggggggtaacgaagccagattgccaaatttcggctctcatgtgttgaccccggctgagatggaagcattcaagcagaggcactcctatcctgaaagacttgtgagaagtcgctcatctgatattgtatcctctgtacgacggcctatgtcggatcccagctggaacaggcggccaggaaatgaggaaagggagctcccccctgccgctgctattggcgcaacatccctggtggctgctcctcactcctcatcatcctcaccttctaaggattcaagccggggtgaaacagaggagcgcaaggacagtgatgacgagaaaagcgaccgcaacagaccatggtggagaaagcgcttcgtgtcagcaatgcccaaggcgccaattccctttaggaagaaggagaaacaggagaaggacaaggacgacctggggcctgatcggttttctaccctaacggatgacccatctccaagattaagcgcgcaggcccaagttgcagaggatatcctggacaaataccgcaatgcaattaagagaaccagtccaagcgatggggctatggctaactacgagagtacgggcgacaaccacgaccgagatttgtcctccaaactgttgtaccatagcgataaggaagtgatgggtgacggtgagtcagcgcacgacagccctagggacgaagcgttacaaaacatctcggccgacgatctgccagacagcgcgtctcaggcagcacatccacaggactctgccttctcatacagagatgctaagaagaagctgcgcctcgctttatgctccgcggatagcgtcgctttccccgtgctcacacactcaacgcgcaacgggctgcctgaccatacagatccagaagataacgagatcgtgtgcttcctgaaggtccagattgctgaagcaatcaatctgcaggacaagaatctgatggctcaattgcaagaaacgatgaggtgtgtgtgcagatttgataacaggacctgccgcaagctgttagcctctattgccgaggattatcgcaagagagccccatacatcgcctacctgactcggtgcagacaagggctccaaactacccaggcgcatctggaaaggctactccagagagtgttacgggacaaagaagtggccaatcgatacttcactacagtgtgtgtgcgcctcctgttggaatctaaggaaaagaagatccgggagttcatccaggacttccagaaactaacagccgctgatgataaaactgcccaggtggaagatttcttacaatttctgtatggagcaatggcccaggatgtaatatggcagaacgcctctgaggagcagctgcaggacgcccagctggctatcgaacgtagcgtcatgaatcgtatcttcaaactggcattctatcccaaccaagacggggacatccttagggatcaggtcttgcatgagcacatccagagattgagcaaagtcgtaacagcgaaccaccgggcactgcagatccccgaagtatacctccgcgaagcaccctggccatccgcccaatcagagatacgaactatcagtgcatacaagaccccccgagacaaggtccaatgtattcttcggatgtgctctaccataatgaatcttctgtctctcgctaacgaagacagtgtgcccggtgcagacgacttcgtgcctgtgcttgtgttcgtcctgattaaggcaaatcccccatgcttgcttagcaccgtgcaatacataagcagcttctatgccagttgcctgtcaggagaggagtcctattggtggatgcagttcacagctgcagtggagtttatcaaaacaatcgacgaccgcaagtag

SEQ ID NO: 225389 - DNA, 1494 bp, synthetic construct
  misc_feature 1..1494: note = Description of Artificial Sequence: Synthetic coding sequence
  source 1..1494: mol_type = other DNA
atggtgaagttagatattcacacactcgctcatcacctaaagcaggagagactctatgtcaactcagagaaacagctgatacagcgccttaacgcagatgttctgaaaactgccgagaaactctaccggactgcctggattgcgaagcagcaacggatcaatttagacagactgataattacttccgccgaagcctctccagccgagtgttgccagcatgccaagatcctggaggacacccaattcgtggatggatacaaacagctgggttttcaggagactgcttacggagagttcctctcaaggctgcgggagaaccccagattgattgctagttcgctagtggctggcgagaagctgaatcaggaaaacacccagtccgttatctataccgtcttcacctctttatacggaaattgtattatgcaggaggacgagtcttatctcctgcaggtcttgcgctatttgatagagttcgaattaaaggaaagcgacaaccctcgaagacttcttcgcagaggcacctgcgcattctctattctcttcaaactgtttagcgaaggcctattttctgccaagctgtttcttaccgcaaccctgcatgaaccgataatgcagctcttagtcgaggatgaggatcatctggagaccgatccaaataaactgatcgagaggttcagccccagccagcaagagaaactttttggtgagaagggaagcgaccgctttcggcagaaggtgcaggagatggtcgagagtaacgaggctaaattagtggccctcgtaaataagtttatcggctatctgaaacagaatacttattgcttccctcattctctccgctggatagtatctcagatgtacaagaccctgagttgtgttgaccggctcgaggtaggtgaagtgcgcgcaatgtgcactgatctgctattagcctgcttcatttgcccagccgttgtgaatccagaacagtacggcatcatcagcgacgcccctatcaacgaggtggctcgctttaatttgatgcaggtggggagattgttgcagcagcttgcgatgactggatctgaggagggagaccctcggactaagagctcattgggaaaatttgacaagtcctgcgttgctgcattcctggacgtagtaatcggtggccgagcagtggaaaccccaccactctcatctgtgaatcttctggaaggcctgtcccggacagtggtctacataacttatagccaactcatcacattagtgaatttcatgaaaagtgtgatgtctggcgatcagttgagggaagaccggatggcccttgacaatcttttagcgaacttacccccagccaagccgggtaaaagttcctcgctagagatgacaccgtataacactcctcaactcagtccagctaccactccagctaacaaaaaaaatcgtctgccgatcggaaaggagaacttctcatactggagcttcctcctcaacctgattttccattag

SEQ ID NO: 225390 - DNA, 4437 bp, synthetic construct
  misc_feature 1..4437: note = Description of Artificial Sequence: Synthetic coding sequence
  source 1..4437: mol_type = other DNA
atggtgaaattggatattcacacactggctcaccatttaaagcaggagcggctgtacgtgaattcagagaagcagcttattcagcgactgaatgctgatgtactgaagacagccgagaagctatatcggacggcctggattgctaagcagcagaggatcaatcttgatcgcctgataattacgagtgctgaagcatcccccgctgaatgctgtcagcatgctaagatcctggaggatacacagtttgtcgacggatacaagcagttgggcttccaagagacagcctacggtgagtttctgtcacgcttacgggagaacccgaggctgatcgcttcaagtctggtggcgggtgagaagctgaatcaagagaatacacaatctgttatatacacagtgttcacctcactgtacggcaactgcatcatgcaggaggacgagagttaccttctgcaggtcctcaggtatctgattgagttcgaactgaaggagtccgataatccccgtaggctgctgagacgcggaacctgtgcctttagcattttgttcaagctgtttagcgagggactgtttagtgcgaaactgttcctaaccgccaccctccacgagcccatcatgcagctactcgtggaagatgaggaccacttagaaactgaccccaacaagctgatagagcgcttttcccccagccagcaggagaagctatttggtgaaaagggatccgaccggtttcggcagaaggtccaggagatggtggagtccaacgaggctaagctggttgccttagtcaacaagttcattgggtatctgaagcagaacacttactgtttcccccattctcttcgctggatcgtcagtcagatgtataagactctgtcctgcgtggaccgacttgaggttggagaggtgagagctatgtgcaccgatcttctccttgcttgcttcatttgtcctgcagtggtgaatcctgaacagtatggcattatctctgacgctccgattaatgaagttgcacggttcaatctcatgcaagttggcaggctcctccagcagctagccatgacagggtctgaagagggggacccccgtaccaagtcctcccttggtaaattcgacaagtcatgtgtggcggctttcctggatgtggtcattggaggcagggccgtcgagacccccccacttagttcagtgaacctgctggaggggctgagccgtactgttgtatatatcacttacagccagttgatcaccctggtgaacttcatgaagagcgtcatgagcggggatcagctgcgggaggacaggatggctctcgataatctgctcgctaacctcccccctgcaaaacctgggaagagctcctcactcgagatgactccatataacactccacagttgagccctgcaaccacccctgcaaataagaaaaatagacttcccatcgctacccgtagccggtcacgtactaatatgttgatggacctgcacatggatcatgagggcagctcacaggaaaccatacaggaggttcaaccagaagaggtcttggtgatttcactgggtactggccctcagcttactccagggatgatgagcgaaaatgaggtcctcaacatgcagctgagtgatggcggtcagggcgatgtcccggtcgacgagaataagctgcacggaaaacctgacaaaacccttcggttctcattgtgcagtgacaatcttgagggtatttccgaaggtccaagtaatcgttcaaactcggtcagctccttggacctggagggcgagtctgtcagcgagctgggggcaggtcccagcggcagcaacggggtcgaggccttgcagctgttggaacatgaacaagccaccacacaggacaatttagacgataagctgcgaaagtttgaaatccgtgacatgatggggctgacagacgatagggacatttcggagaccgtctctgaaacttggagcacagatgtattgggtagcgactttgacccaaatattgacgaagaccgcttgcaggaaatcgccggtgccgcagccgagaatatgctggggagcttactgtgcttgccaggatcagggtccgtgcttctggatccgtgcacagggtcaaccattagtgaaactaccagcgaggcttggtcagtggaggtcctaccatctgattcggaggcgccagacttgaaacaggaggagcgcctgcaggaactggagagctgttctggcctgggaagtacctccgatgatacagacgtcagggaagtttctagtagacccagcacgcccggattaagcgtggtgagcggcatcagtgcaactagcgaggatatccctaataagatcgaggacctgcggagcgaatgtagcagcgactttggtggtaaggacagtgtgacatcccccgacatggacgaaattactcacggcgcacatcagcttacttctcctccctctcagtcggaaagcttactggcaatgttcgaccccctgtcatctcacgaaggcgcttcagcagtcgtcaggcctaaggtccactacgccaggccctcacacccaccccctgatccacccatcctagagggcgctgtgggaggaaacgaagccaggcttccaaactttggtagtcatgtgctcaccccagcagagatggaagccttcaaacagcggcactcatatcctgagaggctggtgcggagccgatcatcagacatcgtctcgtctgtgagacgccctatgtccgatccttcatggaacaggagacctggcaacgaggaacgagaactccctcctgccgcagctatcggcgctaccagtttggtggcagccccacattcatcatcctctagcccttccaaagattcctctcgcggagaaactgaagaacgcaaggatagcgatgacgaaaagtccgacagaaacaggccctggtggagaaaacgctttgtctccgccatgccaaaggcgccaataccatttcgtaagaaggaaaaacaagaaaaggataaggacgatttgggacccgatcgattcagcaccctgacagacgatccttccccaaggctcagcgctcaggcacaggtggctgaagacatcctggacaaataccgaaacgccataaaacgtacatctccttctgatggcgctatggcaaactatgagtctactggcgataaccatgatagggatctttcctccaagctgttataccactctgacaaggaggtcatgggcgacggagagtcggctcacgacagccccagggacgaagccctccagaacatctccgcagatgaccttccagactctgctagccaggccgcacaccctcaggattcagctttctcttatcgcgacgccaaaaagaagctgcgcttagcactctgctcagccgacagtgtggctttcccagtgctgacccactcaactcgcaacgggctgccagatcatacagaccctgaagacaacgagatcgtgtgttttctgaaggtgcagatcgccgaggctatcaacctgcaggataagaatttgatggcacaactccaagaaaccatgagatgcgtatgtagattcgacaacaggacatgcaggaaacttcttgctagtatcgcagaagattataggaagcgcgctccatacattgcctatctcacccggtgcagacaggggttacaaacaacccaggcccaccttgagcggctcctgcaaagggtgctgcgtgataaggaagttgccaacagatattttaccacggtgtgcgtcaggctactgcttgaatcaaaagagaagaaaatacgggaattcatacaggattttcagaagctcacagcagctgatgacaagacagcgcaggtcgaggattttctacagtttctgtatggtgccatggcacaggacgtcatatggcagaacgctagtgaggaacagctgcaggatgcccagctcgccatagagagatcagtgatgaatcgtatctttaagctggcattctatcccaatcaggacggagacattttacgcgaccaagttctacatgaacatattcagcggctgagcaaagtagttacagcgaaccaccgcgcattgcagatcccagaggtttacctgagagaggctccctggccaagtgcccaatctgagattcgtaccatctccgcctacaagacacctagagacaaagttcaatgcatcttaaggatgtgctcaactatcatgaatctgctctccctagcaaatgaggattcagttccgggtgcagacgacttcgttcctgtgttggtgttcgtgctcatcaaagccaaccccccttgccttctttcaacagttcaatacatatcttcattttatgcctcctgcctcagcggggaggagagctactggtggatgcagttcaccgccgctgttgaatttatcaagacaattgatgacagaaagtag

SEQ ID NO: 225391 - DNA, 4464 bp, synthetic construct
  misc_feature 1..4464: note = Description of Artificial Sequence: Synthetic coding sequence
  source 1..4464: mol_type = other DNA
atggtgaagttagacatacacaccctggcccatcatttgaaacaggaacgcctgtacgttaacagcgagaaacagctgattcagcgtctgaacgcagacgtgctgaagacggctgaaaaactgtaccggacagcctggatcgcaaaacagcagcgcataaatctcgataggctcatcattacgtcagcagaggctagtcctgctgaatgctgccaacatgccaagatcctggaggatacgcagtttgttgatgggtacaaacagctgggattccaggagaccgcatacggagagtttctctccagactccgtgaaaaccccagactgatcgccagctccctggtggctggagagaagctcaaccaggagaatactcagtcagtgatctataccgtcttcacaagtctctatggcaactgcatcatgcaggaagacgaaagttacttactccaggtccttagatacctgattgagtttgaactaaaagaaagtgacaacccaaggcgccttcttcgaagggggacatgcgcctttagtattctgttcaagctcttctccgagggcctgttttcagccaagctgttcttaactgccaccctgcatgaacccataatgcaactgttggtggaggacgaggatcatttggagacagaccctaataagctgattgagaggttctccccaagccagcaggagaagctgtttggagagaaaggtagcgacagatttcggcaaaaggtccaggaaatggtggaatcaaatgaggccaaattagtggctctggtcaataagttcatcggatacttgaaacagaatacttattgcttcccacatagtcttagatggatcgtatctcaaatgtataagactctgtcttgtgtggacagattggaagtcggcgaagtgagggcgatgtgtacagacttgttgctggcttgttttatttgccccgctgtcgtgaatcctgagcaatacggaattatttcagacgcgccaattaacgaagttgccaggttcaatttgatgcaagtgggcaggttactgcagcaattagcaatgacagggtccgaagagggagatcctcgaacaaagtcttcacttgggaagtttgataagagctgtgtagcagctttcctggatgtcgtgatcggaggcagagccgttgaaactcctcccctgtcctcagttaaccttctcgaaggtctttcacggacagttgtttatattacatatagtcagttgattactttagtgaattttatgaaatctgtgatgtcaggcgatcaactgagggaggatcggatggctctggataacctgctggctaatctaccccctgccaagccaggtaagtcatccagcctcgagatgacaccttacaatacacctcagctttcacctgctaccacaccagctaacaagaagaatcgattgcctattgcaaccagaagccgctctaggaccaatatgctcatggacttgcacatggaccacgaaggcagctcacaagaaacgattcaggaggtgcaaccagaggaagtgctcgttatttcactagggactggcccacaacttacaccaggaatgatgtcagagaacgaggtcctgaatatgcagctgagcgacggaggccagggtgatgtgcctgttgatgaaaacaagctccacggaaagcccgacaaaacacttaggtttagcctgtgcagtgataacctagaaggtataagtgagggcccttccaacaggtccaactcagtcagctctttggatctcgaaggggagagcgtctctgagctaggcgcagggccatctgggagcaacggagtagaggcccttcagctccttgagcatgagcaggcaactacgcaggacaacctcgacgataagcttagaaagttcgagataagggatatgatgggactgactgatgacagagatataagcgaaacggtgtccgaaacttggagcaccgacgtgctggggtctgacttcgatcccaatatagatgaagacaggctgcaggagatcgcgggagccgcagccgaaaacatgctgggcagcctcctctgtctgccaggaagtggttcggtgttactggacccttgtaccggcagtaccatatcagaaactacaagcgaggcatggtccgtggaagtgttgccatccgattccgaggccccagacctgaaacaggaggagcggctccaggaactggaaagctgctcaggactcggtagtacatctgatgacaccgatgtacgcgaggtgagttcgcggccatccactcctggactgtcagtcgtgagcgggattagcgctacttctgaagacattcccaataagattgaggatttacgcagcgagtgtagctcagatttcggtggaaaggattctgtaacctctccggacatggacgagataacacatgacttcctctatatcctccagccaaagcagcacttccagcacatcgaagccgaagctgatatgaggattcagctgagcagttcagctcaccagctgacaagccctccaagccagagcgagtctcttttggctatgttcgaccccctaagcagtcatgagggagcttctgccgtggttagacctaaagtacattatgcgaggccgtctcaccccccaccagatcctcctatcctcgaaggcgcagttggagggaacgaagcgagactgcccaatttcggctctcatgtgctcacaccagcggagatggaggccttcaagcagcggcattcatatccggagcgcttggtgcgatctcgatcttctgacattgtttcatcagttagaaggcccatgtccgacccatcctggaaccggcgacccggaaatgaggaaagggaactccctccagccgcagctattggcgctacaagcttagtcgcagcaccacattccagctcctcttcacctagcaaggacagcagccgcggagaaaccgaggagcgaaaagattcggacgacgagaagtctgataggaacaggccttggtggcgaaaaaggttcgtgtcagccatgccaaaggcgccaattccctttcgaaaaaaggaaaaacaagagaaagacaaggatgatcttggacctgatcgtttcagtactctcactgacgaccctagccccagattatctgcccaagcacaggtcgctgaggatattctagacaagtaccgcaacgcgatcaaacggacaagccccagcgacggtgcaatggctaattacgaatctaccgaagttatgggtgatggagagagcgcccatgatagtccacgggacgaagcgctccaaaacattagcgcagatgatctgcccgattctgcatcccaagcggctcacccgcaggattctgcctttagttaccgcgacgccaaaaaaaaactgaggctggccttgtgcagcgcagactccgtcgctttccctgtgctaacccactcaacaagaaatggactccccgatcatacagatccggaggacaatgaaatcgtgtgttttttgaaggttcagattgctgaagccattaacctgcaggataagaatcttatggcccaattacaggaaacaatgcgctgtgtttgtcggtttgataataggacgtgccgaaagctgcttgcgagcattgccgaggattatcgcaagcgcgctccctatattgcctacctgacccgatgccggcagggcttgcaaaccactcaggcccacctagagcggctcttgcagcgcgtgttgcgtgacaaggaggtggccaaccgttatttcacaaccgtgtgtgttcgactgctgttagagtccaaagagaaaaagatcagggaatttattcaggacttccagaagctgaccgccgctgatgataagaccgctcaggtcgaggacttcctacaatttttatatggcgcaatggcccaggatgtgatctggcagaatgccagcgaagaacaattgcaagatgcgcagctggccatcgagcggtctgttatgaaccgcatctttaagttagccttttaccccaatcaggacggagacattctgcgggaccaggtgctgcacgagcacatccaaaggctcagcaaggtcgtaactgccaaccaccgtgcactgcaaatacccgaagtgtacctgcgggaagccccttggccttcggcgcagtctgagatccggacaatttccgcatataaaactcctcgcgacaaagtgcagtgtatacttcgaatgtgttcaaccatcatgaacctgcttagtctggcaaatgaggacagtgtccctggcgctgatgacttcgtcccagttctggtgtttgtgttgattaaggcaaatccaccatgcctgttgtccacagtgcagtatatttccagcttctatgcatcctgtctctcaggtgaggaaagttactggtggatgcagttcaccgctgcagttgagttcatcaagacaatcgacgatagaaaatag

SEQ ID NO: 225392 - DNA, 2514 bp, synthetic construct
  misc_feature 1..2514: note = Description of Artificial Sequence: Synthetic coding sequence
  source 1..2514: mol_type = other DNA
tgaaactgtattatgcaggaagatgagtcttacttgctgcaggtacttaggtatctgatcgagttcgagctgaaagaatcagataatcccagaaggcttctacgacgcggaacttgtgcattttcgattctgttcaaattgttctctgaaggtctgttctctgccaaacttttcctgaccgctaccttgcatgaacccatcatgcagcttctggttgaggacgaggaccaccttgaaaccgaccccaataagttgatcgaaaggttttcaccatctcagcaagaaaagctttttggagaaaaaggatctgatcgttttcggcagaaagtacaggagatggttgaatcgaacgaggcaaagttggtcgcactagtcaataaatttatcgggtacttaaagcaaaacacctactgttttcctcatagcttacgctggatagtctcacaaatgtacaagaccctgtcctgcgtggataggctcgaggtaggtgaagtccgtgccatgtgtactgacctgctgctcgcctgctttatttgccctgctgtggtgaatccagagcagtacggcatcatctcggatgcacccattaacgaggtcgccaggttcaatctcatgcaggtgggcagactgctgcagcagttggctatgacaggctccgaggaaggcgatccacgcactaagtcctctttggggaaattcgataaatcctgcgtggccgctttcctggacgtagtaattggtggtagagcggtcgaaactccacccttgagctctgtcaatctcctggaaggtctgtccaggaccgtggtgtacattacctattcccaactaattacactggtgaatttcatgaagtcagtaatgtccggggaccaacttagggaagataggatggccctggacaatcttctggctaacctgccacctgctaagcctgggaaaagctcgtccctggagatgactccctataatacaccccagctgagcccagccaccacgcccgctaataaaaagaaccgactgccaattgctactaggagtaggtcacgcacaaatatgcttatggacctacacatggaccacgaagggtcttcccaggagacgattcaggaggtgcagcctgaggaggttctggtgatttccttgggcacaggaccccaactcacccccggaatgatgtctgaaaacgaggttcttaatatgcagctgagtgatggaggccagggcgacgtgcccgtcgacgagaataagctgcacggcaagcccgacaaaaccctccgattttctctgtgcagtgacaacctggagggaatttccgagggaccatctaaccgctcaaattctgtgtccagtctggatttggaaggggagtcagtatctgagctgggcgcagggccttccgggagtaacggagtggaagctctccagctactggagcacgagcaggcaacaacccaggacaacctggatgacaaactccgtaagttcgaaattcgggatatgatggggctgacggacgaccgcgatataagcgagactgtgagtgaaacctggagcaccgatgtgctgggcagcgacttcgatcccaacatagacgaggataggctgcaggagatcgcaggtgcagcggcagaaaacatgctgggatccctcttatgtctcccagggagtggtagcgtcctgctggacccttgcacagggtccactatcagcgagaccacaagcgaagcttggtccgtggaagttctaccatccgactcagaggctcccgacttgaaacaggaggagaggctccaggagcttgaatcgtgctctggcctcggatctaccagcgatgatactgacgtgcgagaagtgtccagcaggccatcaacccctggactgtcagttgtgagcgggatctcagcaacttctgaagatattcctaataagattgaggaccttcgctctgaatgctcttcggatttcggcggtaaagatagtgtaacaagcccggatatggacgaaatcacgcatggtgcctcagctgtggttcggcctaaagtgcattatgctagaccttcccaccctcctcctgaccctcctatcttagagggggcagttggaggcaatgaagcacgtctgccaaacttcggcagccatgtgcttacgcccgcagagatggaagccttcaagcaaaggcacagttatcctgaaagacttgtccgaagccggtccagcgatatagttagttcagttagaagacccatgagtgatcctagttggaatcggagaccaggcaatgaggagcgcgaacttcctccagctgctgccattggggcaacgtcactggtagctgcaccgcacagtagttcaagctccccctcaaaagactcatctcggggagaaaccgaggaacgaaaagactctgacgacgagaagtctgaccgcaacagaccatggtggcgtaaacgttttgtttccgccatgcccaaagcgcctataccttttcggaagaaagagaagcaggaatag

SEQ ID NO: 225393 - DNA, 2493 bp, synthetic construct
  misc_feature 1..2493: note = Description of Artificial Sequence: Synthetic coding sequence
  source 1..2493: mol_type = other DNA
tgattgcggaggggaacttgtgcatttagtattctctttaaactgttttccgagggactttttagcgcaaagttgtttttgaccgcgactctgcacgagccgattatgcagctcttagtcgaggacgaagaccatctggaaactgatcctaacaaactgattgagcgcttcagtcccagccaacaggagaaactctttggggagaaagggtccgatcgatttcggcaaaaggtgcaagaaatggtcgagtccaacgaggcaaagcttgtcgcgttggtcaacaaatttataggctatttgaagcagaacacatactgtttcccgcacagcctgcgctggattgtttctcaaatgtacaagaccctgtcatgcgtggatcgcctagaggtgggcgaggtgcgtgccatgtgtactgacctgctcctcgcttgtttcatctgccctgccgtggtaaatccagaacagtacgggatcatatcagatgctcctatcaacgaagtcgccagatttaatctcatgcaggtgggtcgacttttgcagcagctcgctatgacaggatctgaagaaggcgatcctcgcacgaagtcgtctctgggcaaattcgacaagagttgtgtggctgcttttcttgatgttgtgatcggcggaagggccgttgagaccccccctctctcaagcgttaaccttctcgagggactttctcgcaccgtcgtgtatatcacttatagtcagctcatcaccctggtcaacttcatgaagtcagtgatgagcggcgaccaactgagggaggacaggatggccctggacaacttgctggccaacttgcctccggctaagccagggaagtcctcgtctctcgagatgacgccatataacaccccccagctgtcccctgcaaccaccccagctaataagaaaaacagactgcctatcggccagcaacttgctgctatcactgcttgggacagttcagcaaccaatatcacttcccacattacagtggtaaccccctttgcgacccggagtcggtcccggacaaacatgctcatggatctccacatggaccacgaaggaagcagccaggagactatccaggaagtccaaccagaagaggtcctggtgattagtttgggtaccggcccacagctgaccccgggtatgatgtcagaaaacgaggtcctcaatatgcagctctcagatggtgggcaaggcgatgtgccagttgatgagaacaaacttcacggtccaagcaaccggtccaatagcgttagctcactggacctggagggcgagagtgtgtctgagcttggggctgggccatccgggtctaacggcgttgaagccctgcagctgttagagcatgaacaggcaacgacccaggataaccttgacgacaagctacgcaaattcgaaatacgggatatgatggggctcacagatgacagggacattagtgagacagtgtctgaaacatggtcaaccgatgtacttggctcagatttcgaccccaacattgatgaagatcgactgcaggagatcgcaggagccgcagccgagaatatgttggggtccctgctgtgcctacccggaagcggcagtgtgctcctggacccatgcacagggagcacgatctccgagaccacttcggaggcgtggtcagtcgaagtgctgccgtctgactcagaagcccctgatttgaaacaagaagagcgactgcaagagctcgaatcttgttcagggctcggttcaacatcggatgacaccgatgtgcgggaggtatccagtcgtccctctacccctggcctgagtgtcgtgagcggtatttccgccacctccgaggatatccctaataaaatagaagaccttcgcagcgaatgctcttctgatttcggtggaaaggacagcgtgacatctcccgacatggatgagataacccacggagcccatcaacttactagtcctcccagccaatcggagagcttactggctatgttcgacccgctttcatcacatgaaggggctagcgccgtcgtgcggcctaaggtccattatgccaggcctagccaccctcctccagatcctccaattctggaaggggcagtagggggaaatgaggctcgcctccccaattttggatcacacgtgttgacaccagccgaaatggaggcttttaaacagcgtcacagctaccccgagcggttggttagatcccggtcttcggacatcgtttctagtgtccgcaggcctatgtcagatccctcttggaacaggaggcctggcaacgaggaacgagagctccctcccgctgctgccatcggcgctacttcgctggtggccgcaccgcatagttcctcctcttcgcccagcaaggattcttcccgcggagaaactgaagaaagaaaagatagcgatgacgagaaatccgaccggaatcgcccatggtggcgtaaaagattcgtgtccgcaatgcctaaggcccctatcccattctag

SEQ ID NO: 225394 - DNA, 516 bp, synthetic construct
  misc_feature 1..516: note = Description of Artificial Sequence: Synthetic coding sequence
  source 1..516: mol_type = other DNA
atggtccaatggcctcgcatgagttacggaaagacaagggtcatgaaccgcatcttcaagctcgcattctacccgaaccaagatggcgacatcctgcgcgaccaagtcctacatgagcacattcagcgcttatcgaaagttgttacagccaaccaccgggcacttcagatacctgaggtatatctccgagaggctccttggccttccgcacagtctgagattcggaccatttctgcctataaaacccctagagacaaagttcagtgcatcttacgtatgtgcagtactatcatgaatctgttaagcttggctaacgaggactcggttccaggagcagatgacttcgttcccgtgctggtgttcgtacttatcaaagctaaccccccttgcctcctgtccacagtgcagtatatcagtagcttttatgccagctgcttgtcaggcgaggaaagttactggtggatgcagtttaccgccgcagtcgagttcatcaaaacaatagatgaccgcaaatag

SEQ ID NO: 225395 - DNA, 354 bp, synthetic construct
  misc_feature 1..354: note = Description of Artificial Sequence: Synthetic coding sequence
  source 1..354: mol_type = other DNA
atggtcaagctggacatccacaccctggcacatcacctaaagcaggaacgcttatatgtgaacagcgagaagcagctgatccagcggctgaacgccgatgtgctgaaaacagcggaaaagctctaccggactgcatggatcgcgaaacagcaacgcattaacttggaccgcctgataattacctcagccgaagcctcaccagccgagtgttgtcagcacgctaagatattggaagatacacagtttgtggacggatataagcagttaggttttcaggaaaccgcgtacggtgaattcctttcacggttgagagagaatccccgtctaatcgcatcctcactggtagcaggctag

SEQ ID NO: 225396 - DNA, 2967 bp, synthetic construct
  misc_feature 1..2967: note = Description of Artificial Sequence: Synthetic coding sequence
  source 1..2967: mol_type = other DNA
atggttaagttagacatacataccctcgcacaccacttgaagcaggaaagactttatgtgaattccgagaagcagttaattcagcgcctcaatgcggacgtcctgaagactgccgagaaactgtaccgaaccgcttggatcgcgaaacagcagaggattaacctggatcgccttatcatcacatctgctgaggcctcacccgctgaatgctgccagcacgccaaaatccttgaggatacccagtttgtggacggctacaaacaactaggcttccaagaaacggcctacggcgagttcttaagccggctgagggaaaacccgagactgattgcgagttctttggtagcaggcgagaagcttaatcaggaaaacacacagtcagtcatttacactgtctttacttctttatacgggaactgcatcatgcaggaggacgagtcttatctgcttcaggtcctccgctacctcatagaattcgaattaaaagagagcgacaatcctagacggctcctgcggagaggtacatgcgctttctccattctgtttaaactcttctctgagggactgtttagcgctaaactgttcttgacagcaaccttgcacgaacctattatgcagcttttggtcgaagatgaagaccacctggaaacagatcccaataagctcattgagagattcagtcctagccagcaagagaaactttttggcgaaaaggggagtgatcggttcagacaaaaagtgcaggagatggttgaaagcaatgaggccaagctagtggcactagtaaacaagttcataggatacttgaaacagaacacctactgttttccccacagtctcaggtggatcgtttcacagatgtataaaacactatcttgtgtagaccgcctggaggtaggagaggtgcgcgctatgtgcacagacttactcttggcgtgctttatttgtcccgctgtggttaatcccgaacagtatggaataatttctgacgccccaatcaacgaggttgctagattcaacctcatgcaggtcggcaggttgttgcagcagcttgccatgaccggctctgaggagggcgacccaagaacaaaatccagtctcgggaagttcgacaagtcttgtgtggctgcctttttggacgtggttattggcggaagggcagtcgaaacccccccactgtcttccgtaaacctgctggagggactcagtcgtaccgtcgtgtacatcacctacagtcaattaatcactctggtcaattttatgaaatctgtgatgagcggcgaccagctgagagaagaccgcatggctctggataatttactggcaaatctgcctcccgcaaagcctggtaaaagctcgagcttagaaatgacgccatacaatacaccccagttatctccagctacaacccctgcaaacaagaaaaaccgtcttcccattgctacaaggagccgatctcgcaccaatatgttaatggatctgcacatggaccacgaagggtccagtcaggaaaccatccaagaggtccagcctgaagaggtgttagtgatttctctcggcactggcccacagctgacaccgggaatgatgtctgagaatgaagtcttgaatatgcagctgagcgacggtggtcaaggcgatgtgcccgtggacgaaaataaacttcatggaaagccggacaaaacactcaggttctcactatgtagcgacaatctggaaggcatttctgagggccctagcaatagatctaatagcgtgtcttctctggacctggagggagagtccgtatcggagctaggagcagggccaagtgggtccaatggagtcgaggctttgcagctcttagagcacgagcaggctacgacccaagataatttagacgacaagctgaggaaatttgagataagagacatgatggggctgacagatgacagagacatttccgagacagtttccgagacctggagcactgatgtattgggctctgactttgaccccaatattgacgaggaccgcctgcaggaaattgcgggtgctgcagctgagaacatgctgggatcactgctgtgtctgcccggatcaggttctgtgctgttggacccatgtactggcagtaccatctctgaaacaacaagcgaggcttggtccgtagaggtactgcccagcgactctgaggcacccgatctgaaacaggaggaaagattacaggaactcgagtcatgcagcgggctggggtcaactagcgacgataccgacgtcagagaggtgtcaagtcggccatcaacacccggactcagtgtggttagtggcatcagcgcaacctcagaagacattccgaataagatcgaggatctaagatctgagtgctcttcagatttcggcggtaaagactcagtcaccagccccgacatggacgagataactcatggcgctcaccagctcaccagccctccctcccagagcgagagtttactcgcgatgtttgaccctctttctagtcatgagggtgcatccgcagtggttaggcccaaagtgcactatgccagaccctctcacccacctcctgacccccctatccttgaaggggcagtaggaggcaacgaggccaggctccccaacttcggttcacacgtgctcacgcctgcagaaatggaagcctttaaacagcgccactcctaccctgagcggctggtcagaagccgatccagcgacattgtctcctcagtgcgccgacctatgtctgacccttcatggaataggcgaccgggaaatgaggagagggagcttcccccagccgcagccatcggggctacgtccctggtggccgctccacactctagcagttccagcccctccaaagacagcagtagaggggagaccgaggaaaggaaagatagcgacgatgagaagtccgaccggaataggccctggtggcgtaaaaggtttgtctctgcaatgccaaagtag

SEQ ID NO: 225397 - DNA, 4437 bp, synthetic construct
  misc_feature 1..4437: note = Description of Artificial Sequence: Synthetic coding sequence
  source 1..4437: mol_type = other DNA
atggtgaagctcgacatccatacgttagcccatcaccttaagcaagaacgcctatacgtgaacagtgaaaaacagctgattcagcgcctgaatgcagacgtgctcaaaactgcggaaaagctttacagaacagcatggattgccaagcagcagcgcataaatctggataggctcataatcacttctgctgaagccagccccgctgagtgttgccagcacgccaagattctggaggacactcagtttgttgatggctacaaacagttgggatttcaggaaaccgcctacggggagttcttatcgcgattaagggagaaccctaggctgatcgcttcaagtctggtggctggggagaaactcaaccaggagaatactcagtccgttatatataccgtcttcacaagcctgtacgggaattgtatcatgcaagaggacgaaagctacctgctgcaagtactaagatatctcatcgagtttgagctgaaagaaagcgataacccacggagacttctgcgaagaggtacctgtgccttctctatcttgttcaaactgttctctgaaggacttttttcggcgaagctttttctgacagctaccctgcatgagccaattatgcaactgctggttgaggatgaggatcaccttgagacggatccgaacaagttaatagaacggttttctcccagtcagcaggagaagcttttcggcgagaaggggagtgatcgcttccgccagaaagtgcaagaaatggtagaatcgaacgaagccaagctggtcgcactggtgaacaagtttatcggatacctgaagcagaacacctactgctttccccacagccttcgatggattgtcagtcaaatgtacaaaacactttcctgtgttgatcggctcgaagttggggaagtgagggctatgtgcactgatctcttgctggcctgttttatttgcccagctgtggtcaatccagagcagtatggcatcatcagcgatgctcccatcaatgaagttgcaaggttcaacctcatgcaggttggcaggttgttacaacaactcgcaatgacgggatccgaggaaggggatccaagaacgaagagcagcctcggaaagttcgacaaatcatgtgtcgctgcattcctggacgtggtcatagggggaagagccgtggaaacccccccactgtcttccgtaaacctgctagagggactgagtagaaccgtggtgtacatcacctattcgcaactaatcacattggttaatttcatgaaatccgttatgagcggcgaccaacttagggaggatcgaatggcactggacaatctcctagcaaacttaccccctgcaaagccaggcaagtcaagctccctcgagatgacaccttacaataccccacaactttcccccgcaacaactcctgccaacaagaaaaacagactccctatcgcgacaagatcaagaagtagaactaatatgttaatggatttacacatggaccatgaaggcagttcacaggaaacgatacaggaagtgcagccagaggaagtgctggttatatcacttggaaccggccctcaactcactccagggatgatgtcggaaaatgaggtgctcaatatgcagctgtctgacggcggacagggcgacgtccctgttgatgagaacaagttgcatggcaaacctgacaaaaccctccgcttttcactttgcagtgataacctggagggaatttcagaaggcccatccaatcggagcaattcagtctcctcactggatttggagggtgaatctgtatctgagctcggtgccggaccttctggcagtaatggagttgaagcactacagttgctcgagcatgaacaggcaacaacccaggacaacctggacgacaagctgaggaaatttgaaatacgtgatatgatgggcttaactgacgaccgcgacatcagcgaaacggtatcggagacctggtctaccgacgttctcggaagcgatttcgatccaaatatagacgaagaccggctgcaggaaattgccggagccgctgcagaaaatatgctgggaagcctgctttgtttaccaggcagcggaagtgtcctgctcgacccttgcacggggagcactatttctgagacaacctccgaggcctggtcagtggaggtactgccaagcgactccgaagctcctgacctaaaacaggaagaaaggctccaggaacttgagagctgcagtggcttaggctcaaccagcgacgacacagacgtgcgcgaggtaagcagcaggccatcaactccaggcctctctgtggtatcaggaatttctgccacaagcgaggacatccccaacaagatagaagatctccgaagcgagtgcagcagcgactttggcggtaaggattccgtgacgtctccagacatggatgagataacccatggtgcgcatcagctgacctcacctccctcccagagcgagagcctcctagcgatgttcgaccctttaagctctcacgaaggcgcaagcgccgttgtccggcctaaggttcactatgccagacctagtcatccgcctcctgatccacccattctggaaggagccgttggcggtaacgaagccagattaccaaacttcggcagtcacgtgttgacccccgcagaaatggaggcttttaaacaacgtcattcctatcctgagcggctggtgcggagccgctcatcagacattgtctccagtgtgcgcaggccaatgtccgacccatcctggaacagaagaccgggaaacgaggagcgcgagctgccgccagcagctgccatcggggctaccagtcttgtcgccgcaccccacagcagttccagctccccctctaaggactcttcaaggggcgaaacagaagagaggaaagactccgacgatgagaaaagtgacaggaaccggccttggtggaggaagaggtttgtgtccgccatgcccaaagcccctatcccgttccgaaaaaaggaaaagcaggagaaggataaggacgacctggggcctgacaggttctccaccctcacagacgatccatcgccccgtctgagtgcacaggcccaggtggctgaggatatcctcgacaaataccgaaacgccatcaagaggacaagcccatctgatggcgcaatggctaactacgagtctacgggcgataatcacgatcgtgacctttccagcaagttgctatatcacagcgataaggaggttatgggcgacggcgagtcggctcatgactctccacgcgacgaggcactacaaaacataagcgctgatgacctcccggacagcgccagccaggccgctcacccccaagactcagctttttcgtatcgcgatgccaagaagaaattacggctcgcactatgttccgcggactctgttgcatttcctgttctgacccactctaccaggaacggcctaccggaccataccgaccctgaggacaacgagatcgtttgcttcctaaaagtccaaatagccgaagccatcaatctgcaagataagaacttaatggcgcaactacaggagacaatgaggtgcgtctgcagattcgataaccgaacttgtcggaaattgctcgcttctatcgccgaggattaccggaagcgggctccatatatcgcatacctaactaggtgtcgtcaaggcctccagacaacacaggctcatctggaacggctgctccagcgcgtgctcagggataaagaagtggccaatagatacttcactacagtgtgcgtgaggctattgcttgagtccaaagaaaaaaagattcgggagttcattcaggactttcagaaacttacagccgctgatgataagacagcacaagtcgaagatttccttcagttcctgtatggggctatggcacaggacgtcatctggcaaaacgcaagcgaggaacagttgcaggacgcacagctcgcaattgagcgcagcgtgatgaatcgtatttttaagctggctttttatcctaaccaggatggggatatattgagagaccaggtcctccacgagcatattcaaagactctctaaggtggtcacagccaatcaccgagctctccagatccctgaagtttatctgagggaggctccgtggccatctgcccagtcagaaatcagaaccattagcgcttataaaactccaagggacaaagtgcagtgtattctgcgcatgtgctccacaatcatgaacctcctttctctggccaatgaggactccgtgcctggggctgacgacttcgtaccggtcttagtcttcgtgctgattaaagcaaaccctccatgcttgctctcaactgttcagtacatcagctcattttatgccagctgtctcagtggggaagagtcctattggtggatgcaatttaccgccgctgtcgaattcatcaaaaccatcgatgacaggaagtag

SEQ ID NO: 225398 - DNA, 2271 bp, synthetic construct
  misc_feature 1..2271: note = Description of Artificial Sequence: Synthetic coding sequence
  source 1..2271: mol_type = other DNA
atggtgaagctcgatatccacactttagcgcaccatctgaaacaagaacggctgtacgtgaacagcgagaaacagcttattcagagattaaacgcggatgtgctgaaaacagcagaaaaactgtaccgcaccgcatggatcgccaaacagcagcggataaacctcgaccggctaattatcacctcagccgaagcttctcccgctgagtgttgtcagcacgccaagatactggaggacacacagttcgttgatggatataaacagctgggcttccaagagaccgcttacggcgaattcctctcacggctgcgggaaaaccctcggttgattgcatccagtctagtggcgggagagaaactaaaccaggaaaatactcagtccgtaatttataccgtgttcacatccctttatggcaattgcatcatgcaagaagatgagagctacttactccaggtccttcgatacctgattgaatttgagcttaaagagtccgataaccctagaagactgctgcgcagaggaacatgcgcctttagcatattattcaagctattttctgaagggttattcagcgccaagctgtttttgacagcgaccctgcacgaacccattatgcaactgctcgtggaagatgaagatcacctagagacagaccctaacaaactaatcgagcgattcagtccttcccagcaggaaaagctgttcggggaaaagggctcagacaggtttcgccagaaagttcaggagatggtggagagcaacgaggcgaagctggtagcactggtgaataagtttattgggtatctcaagcaaaatacttattgtttccctcacagcctgcggtggattgtgagccagatgtataaaaccctgtcttgcgtcgacaggctggaggtcggcgaggtgcgggctatgtgcaccgacctgctactcgcctgtttcatctgccccgctgtagtcaacccagagcagtatgggatcatcagcgatgctcccatcaatgaggtagcaagatttaacctgatgcaggtcggtcgacttttacagcaactagccatgaccggttcagaagagggcgatcctaggacaaagagtagcctcggtaagtttgataagtcttgtgtggccgcttttcttgacgttgttattggaggcagggcggtggagacgccgccattgtccagcgtgaatttgctggaaggactgtccaggacagtggtgtacattacttactcccagctgataacactggtcaactttatgaagagtgtcatgtccggcgatcagctgcgtgaggaccgaatggcgctggacaacctgctggctaatcttccacccgcaaaacccggaaaaagttcctccctggaaatgaccccctacaatacaccgcagttgagcccagccaccaccccagccaataagaaaaatcggttacccatcgctacccgatcaagaagccggactaatatgttaatggatctgcatatggatcatgaggggagctcacaggaaacgattcaggaggtgcagcccgaagaagtgctagtgatctcccttgggaccggccctcagctgacccccggaatgatgagcgagaatgaagtgctgaatatgcagctgagcgacggaggtcagggagacgtgcctgtggatgaaaacaaactgcatgggaagcccgacaagaccctaaggttttctctgtgcagcgataacctggaaggcatctctgagggaccgagtaatcgctcaaactccgtatccagtctggatttagaaggagagagcgtctctgagttaggggctggtccaagtgggtctaatggggtcgaagcccttcaactgctcgagcatgaacaagcgacgacccaggacaatctggacgacaagttgcgaaaattcgagataagggatatgatggggttgaccgacgatagagatatcagcgaaaccgtctctgagacctggagcaccgacgtactcgggagcgacttcgacccaaacattgacgaggataggctgcaagagatcgcgggagctgccgcagagaacatgctcgggtcccttttgtgcctcccaggatctggctctgtcttactggatccgtgcaccggctctaccatcagtgaaaccacctccgaggcctggtccgtggaggtactgccttctgattccgaggctccagatctgaagcaagaagaacggttacaggagctggagagctgcagcgggctgggcagtacttctgacgataccgacgtgagagaggcatag

SEQ ID NO: 225399 - DNA, 921 bp, synthetic construct
  misc_feature 1..921: note = Description of Artificial Sequence: Synthetic coding sequence
  source 1..921: mol_type = other DNA
atgggcggtcgtaaaatggctaccgacgaggagaatgtttatgggttagaagagaacgctcagtccagacaggagagcacgaggaggctgattctggtcggcaggactggtgccggaaagtcagctaccggaaacagtatcctggggcagcgcaggttcttcagtcgtctcggagccacctctgtgacaagagcatgcacaacggggtcgcgacgatgggacaaatgccacgtcgaagtagtagatacaccagatatcttttcttctcaagtgtccaagactgatcccggttgcgaggaacggggtcactgctacctgctttccgcacctggaccacacgcattactgttggtaacacagctggggaggttcaccgcacaggaccagcaagcagtccggcaggttcgcgatatgttcggggaggacgtactcaaatggatggtcattgtctttacccgcaaggaggatttggccggtggaagcttacatgattatgtaagcaacacagagaatcgggctcttagggagctcgtggccgagtgtggaggaagagtgtgtgcatttgataaccgcgcaacgggccgtgaacaagaagcccaggtagaacagctgcttgggatggtggaaggcctggtgctggagcataaaggcgcacattattcaaatgaggtttacgaattagcacaggtcctgcgatgggcgggtcccgaggagcgattacgacgcgttgccgagagggtcgctgcaagagtccagaggcggccttggggggcatggctaagcgcacggctgtggaaatggctgaagagtcctcggtcttggagacttgggctcgctttattgctgggcggagctctgttgttctgggttcttctccatcggcgatggagcgaagccgtggctgaagtggggcctgactag

SEQ ID NO: 225400 - DNA, 681 bp, synthetic construct
  misc_feature 1..681: note = Description of Artificial Sequence: Synthetic coding sequence
  source 1..681: mol_type = other DNA
atgtcctgggttcaggccgcttcgcttattcagggcccaggcgataagggcgacgtgttcgacgaagaggcagacgaatcactgctggctcaaagggaatggcagtcaaacatgcagcggagggtgaaggagggatatagggacggaatagacgccggaaaggccgtcacactccagcagggcttcaatcagggatacaaaaaaggggctgaagtgattctgaactacggcaggctgcgcggaacattaagtgcattgctttcttggtgtcacctgcacaataacaattccacgctgatcaacaagattaacaatcttctcgatgcagtcggtcagtgtgaggaatacgtcctgaagcatctaaagagtatcacccctccgagtcacgttgtggacctcctggactccatcgaagacatggatttgtgccacgtggttcccgctgagaagaaaatcgacgaggccaaggatgagcgactgtgcgaaaacaatgctgagtttaataaaaattgttctaagtctcacagcggaatcgattgcagttatgttgaatgctgtagaactcaggagcatgctcactccgagaacccgtcccctacttggattctggagcagaccgctagccttgtgaaacagctgggactcagtgtcgatgttctgcagcaccttaaacagctgtag

SEQ ID NO: 225401 - DNA, 990 bp, synthetic construct
  misc_feature 1..990: note = Description of Artificial Sequence: Synthetic coding sequence
  source 1..990: mol_type = other DNA
atggccgcacaatatggcagtatgtccttcaatccgagtacccctggcgcaagttacggcccagggaggcaggagcctaggaattcgcagttgaggatcgtcttggtagggaaaacaggcgcaggcaaaagcgcgacaggaaatagcattttgggccgtaaggtgttccactctgggactgccgcaaaatctatcaccaagaaatgcgagaagcggtcctcaagctggaaggaaacagagctcgtagtcgtagacactccaggaatttttgatactgaggtgcctaacgccgaaacaagtaaagagataattagatgtatattactaacgtccccaggaccacacgctctgctcttagtcgtgcccctgggcaggtataccgaggaggagcacaaagccacagagaagatactaaagatgtttggcgagagagcgcgatcgttcatgattctaatttttacaagaaaggatgatctgggggacactaatcttcacgattacctcagagaagccccagaggacatacaggatcttatggacatatttggcgatcggtattgcgcactgaataataaagccacaggagctgagcaggaggcccaacgcgcacagcttttgggcttgattcagcgggtggtgcgggaaaacaaggaaggctgctacaccaaccggatgtaccaaagggcagaggaggagatccagaaacagacacaggcaatgcaggagttgcatcgcgtagagcttgagcgggagaaagcacggatcagggaggagtacgaggagaaaatccggaaactggaggataaggtggaacaagaaaaaagaaagaaacagatggagaaaaaactggctgagcaggaggcccattacgcagtccgccaacaaagagctaggactgaagtggagtcaaaagatgggatactggaacttataatgacagcgctccagatcgccagctttatcctccttcggctcttcgctgaggattag

SEQ ID NO: 225402 - DNA, 786 bp, synthetic construct
  misc_feature 1..786: note = Description of Artificial Sequence: Synthetic coding sequence
  source 1..786: mol_type = other DNA
atggcagcccaatatgggtctatgtccttcaacccttcaacccccggagcatcgtacggccctggacgtcaggagcccaggaacagtcaactccggatagtactagtgggcaaaacaggggctggtaagtccgcaacagggaacagtatcctgggacggaaagttttccatagtggaaccgcagctaagtctatcaccaagaagatcctgaagatgttcggcgagcgcgctaggtccttcatgattctcatctttactcgcaaggatgatttgggcgacacaaatcttcacgactacttaagggaggctccggaggacattcaggatctgatggacatttttggcgacagatactgtgccctgaataataaggccacaggggctgaacaagaggcacaaagggctcaactgctcggcctcatccagcgcgttgtgcgagagaacaaggagggttgctataccaacagaatgtaccagagggccgaagaggaaattcagaaacaaacgcaagcaatgcaggaactccaccgcgtggaactggagagggagaaggctcgaattagggaagagtacgaagagaaaattcggaagctggaggacaaggtcgagcaggaaaagcgcaagaagcaaatggagaaaaaattagccgaacaggaagctcattacgccgttaggcaacagcgggcacggacagaggtagagagcaaagatggcatccttgagttgattatgaccgctctgcagatcgccagtttcattctgttgcggctgttcgccgaggactag

SEQ ID NO: 225403 - DNA, 456 bp, synthetic construct
  misc_feature 1..456: note = Description of Artificial Sequence: Synthetic coding sequence
  source 1..456: mol_type = other DNA
atggctgctcagtacgggtccatgtcatttaaccccagtacccccggtgcaagttatggtgagcgcgctttttctgccccacagacacgtttgcaggggggaccaggccgacaggaacccaggaattcacaacttagaattgtgctggtcggcaaaacaggtgcagggaagtcggcgacaggaaactccatcttaggaagaaaggtgttccacagcggaaccgccgctaagagcatcactaaaaaatgtgagaaacgttcatcctcctggaaagagactgagcttgtcgttgtcgatacacctggaattttcgacaccgaggtcccaaatgctgagaccagtaaggagattatcagatgcatcctgcttacctctccgggaccacacgccttgttactcgtggtccccctgggcagatacaccgaagaagagcacaaagccacagaaaaaatctag

SEQ ID NO: 225404 - DNA, 924 bp, synthetic construct
  misc_feature 1..924: note = Description of Artificial Sequence: Synthetic coding sequence
  source 1..924: mol_type = other DNA
atgggaggcttccagcggggaaaatacggtactatggctgaggggaggtctgaggataacctcagcgcaacgccacctgcattgaggatcatcctggtaggcaagaccggctgtggaaaaagcgcaacgggtaacagcatcctaggacagcccgtgttcgaatctaaattgcgagcacagagcgtgacccggacgtgtcaggtcaaaaccggcacttggaacggccgtaaggtgttggtcgtggatacaccttctatttttgaatcacaggccgacacacaggaactgtacaaaaacattggagattgttacctgctgtccgcccctggaccacacgtcttgttactggtcatccagttgggaaggttcactgcgcaagatacagtcgcgattcgaaaggtgaaagaggtgtttggcacgggcgcaatgagacatgtggtaattctttttacacacaaggaggacctgggtgggcaggctctggatgactatgtggcgaacactgataactgtagcctgaaggatttggtaagggagtgcgagcgacggtactgcgcctttaataactggggaagcgtcgaagagcagaggcagcagcaggccgagctactcgcggtaatagagagactcggtagggagcgggagggctccttccacagcaatgatctttttctggatgcacagttattacaaaggactggcgcaggcgcttgccaggaagattatcggcaatatcaggcaaaagtggagtggcaggttgaaaaacataagcaggaactccgtgagaacgaatccaattgggcctacaaggccctgctgcgcgtgaagcacttaatgttattgcattatgaaatatttgtattcctccttctgtgtagcattttatttttcataatattcctcttcattttccactatatatag

SEQ ID NO: 225405 - DNA, 1032 bp, synthetic construct
  misc_feature 1..1032: note = Description of Artificial Sequence: Synthetic coding sequence
  source 1..1032: mol_type = other DNA
atggagctgagtgcacccgctcatggaagctctctgacagcctccgcgcagccaccctctgttaccgctaccttggaagatcgggctcagcaacccttcctcgagagaatggggggtttccagcgcggaaagtatgggaccatggcagaaggacggtccgaggacaatcttagcgcaacccctcccgctctaagaataatcttggttggtaagacaggctgtggcaagtccgccactggcaattccattttaggtcagcccgtgttcgagagcaagctgcgtgctcagtccgtcactcggacctgccaggttaagactggcacttggaatggtcggaaagtgctggtagtcgacaccccttctatcttcgagtctcaggcagatacccaggagctctataaaaatataggcgattgttaccttctctccgctcccggtccacacgtgctccttttggtgatccagttagggagatttacagcccaggatacagtggctatcaggaaagtcaaggaagtttttggcaccggcgctatgcgccacgtggtaattttgtttacccacaaagaggacctcggcggtcaggcactcgacgattacgtggcaaacaccgacaactgttctctcaaggacctggtgcgcgagtgtgagcgccgttactgtgcttttaacaactgggggtctgtcgaggagcagcgccagcagcaggctgaattgctcgccgtgatcgagcgactgggtagagaaagagaaggttcatttcatagtaatgatctctttctggatgcacaattactccagcgcacaggagccggagcctgtcaggaggattacagacagtatcaagccaaggtggaatggcaggtcgagaaacacaaacaggagctgagggagaatgagtctaactgggcatataaggccctcctaagggtaaagcaccttatgctgcttcattatgagatttttgtgtttctacttttgtgctcgattctgttctttataattttcctctttatcttccactatatttag

SEQ ID NO: 225406 - DNA, 879 bp, synthetic construct
  misc_feature 1..879: note = Description of Artificial Sequence: Synthetic coding sequence
  source 1..879: mol_type = other DNA
atggaggaggaggaatatgagcagatacctcaggaaaatcccccagaggaactctcgcaagaccccgtgcttgaactgtccggcggtttgagggaaaaagaacagaagacaccgaggcgcctcaggttgatcctgatgggcaaaacagggtcgggcaagtcagcgacaggaaactccatacttggcagggatgtctttgagtcaaaactgtccaccaggccagttacaaagacgtcacagcgcagaagtcgagagtgggcaggaaaggagcttgaagtcattgatactcccaatatcttgagccctcaggtgagccctgaggtggctgacgcgatatgtcaggccatagtgttgtccgctccaggcccacatgctgtgctcctggtcacgcagctggggaggttcaccgatgaggatcaacaggtggtgcgccgtttgcaggaagtgttcggcgtgggcgtcttaggtcacactatcctggtattcacacggaaggaagatctggcagggggttctcttgaggattacgtcagggagactaataatcaagccctggcctggctcgacgtgaccctggcaaggcggcattgtggttttaataaccgtgctcagggtgaagaacaggaagcccagcttagagaactaatggaaaaagtggaagcgatcatgtgggagaatgaaggcgactattactctaacaaggcctatcaatatacacagcagaatttccgtctgaaggaattgcaggagcggcaggtctcccagggccagggctccgaagatgtaccaggtgaggagagctggctcgagggcctgagccagattcagaaggagagcgaagaggctcatcgctgtcttctgggcaaagctgatctgtag

SEQ ID NO: 225407 - DNA, 1062 bp, synthetic construct
  misc_feature 1..1062: note = Description of Artificial Sequence: Synthetic coding sequence
  source 1..1062: mol_type = other DNA
aaaccatggtactgggtgtcgtggtgctcaattgggcaggtttccctcttcttccttggatccgccctggcattaggcgagaacgtgcaaccgcatttacaaggttgcggcccacggatggtggctcagcgctggtttcaggggagatgttggtcctttaccatatgcccctgtagcctgggggtgcatccagaagcacctggcgatgataagatgggctacatgggtccctacccctctagtctttgtttcttgtggattttcctgggcctgcgtgaaaaggaacagaaaactcccaggcgactccgactgatcttgatgggtaagacagggtctggcaagagtgccacagggaatagtattctggggcgtgacgtgtttgaaagcaagctgagcacccgacccgtgacaaaaacttcccaaaggcggagcagagagtgggctggtaaggagctggaggtcatagacacaccaaatatactcagtcctcaggtgtcaccggaggtggctgatgccatctgtcaggcaatagtcctgtcagccccagggcctcacgctgttctgcttgtgacacagctgggaagatttacagatgaggaccagcaagttgtgcggcgtctccaggaggtatttggggtgggcgtgctgggccacacaatcttggtatttacccgtaaggaggatctggcaggagggagtctggaagactacgtgcgagagactaacaaccaggctctggcatggctcgatgtcacactggcacggaggcactgcggttttaacaaccgtgctcagggcgaggaacaggaagcacagctccgagagcttatggaaaaggtggaagccataatgtgggaaaatgaaggagattactactcaaacaaagcctaccagtatacccagcagaattttcgcctgaaagaattgcaggaacggcaggtgtctcagggccagggtagtgaggacgttcccggagaggagagctggctggaggggctatctcagatccaaaaagagtccgaggaggcgcatcgctgcctgctgggtaaggcagacctctag

SEQ ID NO: 225408 - DNA, 189 bp, synthetic construct
  misc_feature 1..189: note = Description of Artificial Sequence: Synthetic coding sequence
  source 1..189: mol_type = other DNA
atggaagaggaggaatacgagcagatacctcaggaaaaccccccagaagaattgagtcaggatcccgttctggagttatccgggggattagccaggggcggaaggcgctatctgccttcgcatcgccttatccgcccacgcgctccacgaagggcacccggtgacactactgggcctgtacatggctag

SEQ ID NO: 225409 - DNA, 1266 bp, synthetic construct
  misc_feature 1..1266: note = Description of Artificial Sequence: Synthetic coding sequence
  source 1..1266: mol_type = other DNA
atgcgatggattctgttcatcggggcactgatagggtcaagcatttgcggccaggagaagttcttcggcgaccaagtgctcagaattaatgtgaggaacggtgacgaaatcagtaaactgtcccagctggtgaacagcaacaacttgaaattgaacttctggaaatcccctagtagctttaacaggcccgtggatgttctcgttccctcagtgtctctccaagcatttaagagctttttacgctcacaaggcctggagtacgccgtcacgatcgaggatctgcaggccctattagataacgaggatgacgagatgcagcataatgaaggccaggagcgcagtagcaataatttcaactatggagcctatcatagcctggaggctatttaccacgaaatggataacatcgctgccgattttcctgacctcgcgaggcgcgtgaaaattggacacagttttgaaaaccgccctatgtacgttctcaaatttagtactgggaaaggggtgcggagacccgctgtgtggttgaatgccggtattcactctagggaatggatctcccaagccacagcaatttggactgctcgtaaaatcgtgtccgactatcagcgagatccagcgatcacttctattctggagaaaatggacatcttcctcttgccggtagccaatccggatggctacgtgtacacccagacccagaaccggctctggcggaaaacacggagcaggaatcctgggtcaagttgcattggtgccgaccccaaccggaattggaacgcctcgtttgccggaaagggagccagcgataacccgtgtagcgaggtgtaccacgggccacatgctaactccgaggtggaggtgaaaagcgtggtagactttatccagaaacacggaaacttcaaaggcttcattgacctccactcctattcccagctgttaatgtacccttatggttactctgttaagaaggcccctgatgccgaagagctggacaaggtggcccgactggccgctaaagccctggcttctgtgtctggaactgagtatcaggttggaccgacctgtaccactgtctaccccgctagcggctcttcaatcgactgggcatacgataacggcatcaagttcgcctttacttttgagttacgtgataccggcacgtatggctttcttctgccagcaaatcagatcatccccacagccgaggaaacctggctgggactgaaaacaataatggaacacgtgcgggataacttgtattag

SEQ ID NO: 225410 - DNA, 927 bp, synthetic construct
  misc_feature 1..927: note = Description of Artificial Sequence: Synthetic coding sequence
  source 1..927: mol_type = other DNA
atggtgcactgttcgtgtgtgcttttccgcaaatacggaaacttcattgacaaactgcgcctgttcacccggggaggcagcggcggtatggggtacccccgtttggggggagaggggggaaaaggaggcgatgtttgggtggttgctcagaatcggatgacccttaaacagctcaaggatcgctatcctcgcaaacgcttcgtggcaggtgtaggagcaaatagcaagttccccaacgcaggaaaatcctcactgctctcttgtgtcagtcatgctaaaccggcaattgccgattacgcttttaccactttgaagcctgagctcggcaagattatgtacagtgattttaaacagatctcagtcgcagacctgcctggcctcatcgagggagcgcacatgaataaggggatgggccacaagtttttaaagcacatcgaacgcactcggcagctcctttttgttgtggatatcagtggatttcaactgtcgtcgcacacccagtacaggaccgcatttgagacaattattctgctgaccaaggaattggaactatacaaagaagaactgcagactaagcctgcactactggctgtaaataaaatggatctaccagacgcccaagataagttccatgagctgatgtctcagctgcagaaccccaaagatttcctccacttgtttgagaaaaatatgatccctgaacggacagtggagttccaacacattattccgatttccgctgtcaccggcgagggcatcgaagaactcaagaactgtatccgcaaatccctcgatgagcaggctaatcaagaaaacgacgcgctccacaagaaacagctgctcaacctgtggatctcagatacgatgagtagtacagaacccccttccaaacacgccgtgacaaccagcaaaatggatattatctag

SEQ ID NO: 225411 - DNA, 711 bp, synthetic construct
  misc_feature 1..711: note = Description of Artificial Sequence: Synthetic coding sequence
  source 1..711: mol_type = other DNA
atgtctgcaccctctgccaccccaatattcgctccaggggagaattgcagccccgcttggggggcagctccagcagcctatgacgccgctgatacccacctgagaattcttggtaaacccgtcatggaacggtgggagacaccttacatgcatgctctcgccgctgctgcgagttccaaggggggaagggtgctcgaagttgggttcggcatggcaatcgccgcatctaaggttcaggaagcacccatcgatgaacattggattatcgaatgcaatgacggcgtgtttcagcgcctcagagattgggctccccgacagacacataaggtcattcccttaaagggtctgtgggaagatgtggcgcctaccctgcccgatggccatttcgatgggatcctgtacgatacttaccccctgtcagaagagacctggcacacccaccagtttaactttattaagaaccacgcctttagactccttaagcctggcggagtcctgacatattgcaacctcacatcctggggggagctcatgaagtcgaagtatagcgatatcaccattatgttcgaggagactcaggtgcctgcgcttctggaagccggttttcgtcgagaaaacattagaacggaggttatggccctggttccacctgccgattgccgttattacgccttccctcaaatgataactccactggtgacaaaaggctag

SEQ ID NO: 225412 - DNA, 810 bp, synthetic construct
  misc_feature 1..810: note = Description of Artificial Sequence: Synthetic coding sequence
  source 1..810: mol_type = other DNA
atgagcgctcctagcgccacccccatttttgctcctggcgaaaattgctcccccgcatggggcgcagctcctgcagcttacgacgcagcagatacacatctcagaatcttaggcaaacctgtcatggagcgatgggaaacgccctatatgcatgcacttgcagccgctgctagcagtaagggcggaagagttcttgaggttggatttgggatggcaatcgcagcctccaaagtgcaggaggcaccgatcgatgagcattggatcattgagtgtaacgacggcgtctttcagcgcctcagagattgggctccacgccagacccataaggtcatccccctaaagggcctgtgggaggatgtggctcccaccctccccgatggacacttcgacggtatcttgtacgacacataccccctgagtgaggagacgtggcatacccaccagtttaactttattaagaatcatgcttttagactcctgaagcccggtggtgtgctaacgtattgtaatttgacttcatggggagagctaatgaaatctaaatactcggatataacaatcatgttcgaagtacgaccccctgaagtgcctcatgggagtcccggttccgacctaggttggggatgggagggggcagccggtgccactctgctgcctggcgagggacccttcctcacaccgtgggtgggatggaccgttctcgtccatcttgaaattaaggtgctgtgtctggcacagtggctgcccggagcagtcgcacaggtgtataatccatccactgttgagggacgcggaggccagatcgcctag

SEQ ID NO: 225413 - DNA, 1416 bp, synthetic construct
  misc_feature 1..1416: note = Description of Artificial Sequence: Synthetic coding sequence
  source 1..1416: mol_type = other DNA
atgtgtgctgctcagatgccccctctggcccacatttttcgtggcactttcgtccattctacttggacatgccctatggaggtgctgcgggatcacctcttgggcgtaagtgactctgggaaaatcgtctttctggaagaagccagccagcaggaaaaactggctaaagagtggtgtttcaaaccctgtgagattagagaactgtctcaccatgagttcttcatgcccggactggtagatacacacatacacgctagccagtactcctttgccggaagttccattgatctaccacttctggaatggctgacaaaatatactttcccagctgagcatagattccagaacattgacttcgcagaggaggtctataccagggttgtgaggagaacgctaaaaaatgggactacaacagcctgctacttcgcaactattcacacggatagcagcttgctgctcgctgacataaccgacaagttcgggcaacgggcatttgtcggcaaggtgtgtatggaccttaacgacacatttccggaatataaggaaaccaccgaggagtcaatcaaggaaactgagcggtttgtgtcggagatgcttcagaaaaactatagtcgggttaaacccatcgtgacccccaggtttagtctatcctgtagcgaaaccttgatgggcgagctgggtaatattgccaagacccgcgatctccacattcagtctcacatctccgagaatagagatgaggtcgaggctgtcaaaaacctgtatccctcctataaaaactacacatccgtctacgacaaaaataaccttctgacaaacaaaactgtgatggcacatggctgttatttaagcgctgaagagttgaacgtcttccatgaaagaggggctagcatcgctcactgtccaaactcaaacttaagtctttcgtcaggctttttgaatgtgttagaagtgttgaaacacgaggtgaaaattggcttggggactgacgtcgctggcggttatagttacagtatgcttgacgcaatccgccgagccgttatggtttcaaacatccttctaatcaataaagttaacgagaagtctctgacactgaaagaggtctttaggctggcaaccctgggtggaagtcaggccctgggccttgatggcgaaatcgggaactttgaagtcggcaaagagttcgacgccattcttattaaccctaaggcaagcgactcccctatcgacttgttctatggcgacttctttggcgacataagtgaggctgtgattcaaaaattcctgtatctgggcgatgaccgaaatattgaggaagtgtacgtgggcggaaaacaggtggtgccattttcaagttccgtgaaggagactatccatctaccggcttcctccccccatccccctccctttccatag

SEQ ID NO: 225414 - DNA, 1365 bp, synthetic construct
  misc_feature 1..1365: note = Description of Artificial Sequence: Synthetic coding sequence
  source 1..1365: mol_type = other DNA
atgtgcgccgctcagatgccgccactggctcacattttccgtggcacgtttgtgcattctacctggacgtgcccaatggaggtactgcgggatcatctgctgggcgtctctgactcgggaaaaatagtttttttggaagaggccagtcagcaggagaaactggcaaaggaatggtgttttaaaccttgtgaaattagggagctgagtcatcatgagttttttatgcctgggctagtggacacccatattcacgcctcgcaatactccttcgcaggaagctccatcgacctgccacttcttgaatggcttacaaaatacacttttccggcagaacaccgattccaaaacatcgacttcgcagaagaagtgtatacacgggtcgtgcggagaacactcaagaatggaaccaccacggcatgctatttcgccaccatccacaccgattccagtttgctcttagcggatatcacagataagttcggtcaaagggctttcgtgggcaaggtttgcatggatttgaacgacaccttccccgaatacaaagagactactgaagagtccattaaggagacggagcgctttgtgagtgagatgttgcaaaagaattattcacgcgtgaaacccattgtgaccccgcgtttctccctctcttgcagcgagacattaatgggagaacttggcaacatcgctaaaacacgggatctacatattcagtcacacattagcgagaaccgagacgaagttgaggccgtcaagaatctgtatcctagctacaagaattatacgagcgtgtacgataagaacaatctgttaacaaataagaccgtaatggcccatggctgttacctgtccgccgaggagctcaacgttttccacgaaagaggtgcctccatagcccattgcccaaattctaatctgtccctgtcctctggatttcttaatgtactggaagtactcaagcatgaagtaaagattggcttagggactgacgttgcagggggatactcgtactccatgcttgatgcgatccgccgtgctgtgatggtgagcaatatattacttattaataaggtcaatgaaaagagcctcacactgaaagaagtgttccggctggccacactgggcggtagtcaagcccttggcctggatggggaaatcggcaacttcgaggtaggcaaggaatttgacgctatactaatcaaccccaaggcttcagattccccaatcgacctcttttatggagacttcttcggagacataagcgaggccgtaattcagaagtttctttacctgggggatgatcgtaacatcgaggaagtgtacgtgggagggaaacaggtggttccatttagttccagcgtttag

SEQ ID NO: 225415 - DNA, 1182 bp, synthetic construct
  misc_feature 1..1182: note = Description of Artificial Sequence: Synthetic coding sequence
  source 1..1182: mol_type = other DNA
atgtttttagaggaggcaagtcaacaggagaagttggctaaagaatggtgtttcaagccctgcgaaatacgggagctgtcgcatcatgaatttttcatgcctggcctggtggacacacacatccatgcttcccagtatagcttcgcgggttcgtccatcgatctccccctattggaatggctgacgaagtacaccttcccagctgagcaccggttccagaacatagactttgccgaggaggtgtacactcgggttgtcaggcgcactctgaagaatggcactacaaccgcctgttatttcgccacaattcacacagacagtagcctccttctggctgatattacagacaaatttggccagcgcgcatttgtggggaaagtctgcatggacctgaatgacacttttcccgagtacaaagagactacagaggagagtattaaagagactgagaggtttgtatccgaaatgttgcagaagaactcgcatattagcgagaatagggacgaggtggaggccgtgaaaaatttgtatccaagctacaagaactacacttctgtatacgataagaataacctgcttactaacaaaacagtgatggcccacggatgttacctcagtgcggaggaactgaacgttttccacgaaagaggggcttccatagcccattgcccgaacagcaatctgagcctgtcaagtggctttctgaatgtgttagaagtcctgaagcacgaggtaaaaattggactgggaaccgacgtggcagggggatattcttactctatgcttgatgccattcggcgagctgtgatggtgtccaacattctgctcattaacaaggtcaacgaaaagagtctgactctcaaagaggtattccggctggccactctagggggttcgcaggccctcgggcttgacggggaaatcggcaattttgaggtcggtaaagaatttgatgctatactgataaatcccaaggcctcagatagccccatcgacctgttctatggcgacttttttggggacatctctgaagcagtgatacaaaaatttctctatctgggggacgaccggaatatcgaagaggtgtatgtcggtggtaagcaggtggtgcccttcagctcctccgtgaaagagactatccacctgcccgcttcatctccacatcctccccctttcccgtag

SEQ ID NO: 225416 - DNA, 1233 bp, synthetic construct
  misc_feature 1..1233: note = Description of Artificial Sequence: Synthetic coding sequence
  source 1..1233: mol_type = other DNA
atggaagtactgcgagaccacctgctaggagtatctgactcgggaaagatagtttttctggaggaagcgtcccagcaagaaaaactagcaaaagaatggtgttttaaaccctgcgagattagagagttaagccaccatgaatttttcatgcccggtctggtagacacgcacatccacgcaagccagtactcatttgctggctctagcattgatctgcccctattggaatggctgactaaatatacattccctgcagagcaccggtttcagaacattgactttgccgaagaggtctatacccgtgtagtgagaagaacccttaaaaacggaaccaccaccgcatgttatttcgccaccatccacacagactcgagtttactgctggccgacattacagataaatttggacaaagagcgttcgtgggtaaagtgtgtatggatctgaacgacaccttcccggagtacaaagaaaccactgaggagagcatcaaagagaccgaacgatttgtatccgagatgctgcagaaaaatagtcacatttcagaaaaccgggacgaagtcgaagctgttaaaaatctgtatccctcttataaaaattacacaagcgtttacgataagaacaatcttctgaccaataaaactgttatggcccatggctgctacctgtcagccgaggagctcaacgtatttcatgagaggggcgctagtatcgctcattgcccaaatagcaatttgtctcttagttcgggattcctaaatgtcctcgaggttttgaaacacgaggtgaaaatcggtcttggaactgatgtagcaggagggtattcatacagtatgttggatgccatacgacgagccgtgatggtcagtaacatattactgattaacaaggttaatgagaaatctctgacgctgaaagaagtgtttcggcttgcaacacttggaggctcccaggcattaggactagatggcgagatcgggaatttcgaggtcgggaaagaatttgacgctattctgattaatccgaaagcaagtgactcaccaattgacctcttctacggggactttttcggagatatatcggaggctgtcatccagaagtttctatatctgggagacgataggaatatcgaggaagtctacgtgggcggaaagcaggtggttccgttctcatccagcgtcaaagagactatccacctaccagctagttcccctcatcctcctcccttcccttag

SEQ ID NO: 225417 - DNA, 588 bp, synthetic construct
  misc_feature 1..588: note = Description of Artificial Sequence: Synthetic coding sequence
  source 1..588: mol_type = other DNA
atgaccttgttccagaacactcggcgacccctgagaaatagatccaggaagctgagggactgtcacagtgtgactcaggccggagttcagtggcgagatctgtccagcctgaagccaccccctccggtatttaagcgattctcctgcctgagtctgccgagctcttgggactatcgatttgttagcgaaatgttgcaaaagaactactccagagtgaagcccattgtgaccccacgctttagtttgtcctgctccgagactctgatgggagagttagggaatatcgcgaaaacccgagacctccacatccagtcacacatatccgagaaccgcgatgaggtggaagccgtgaaaaatctctatccctcatataaaaattatacatcggtctacgataagaacaacctgctgacgaataagactgtgatggcccatggttgctatctgagtgcggaggagctgaatgtgtttcacgagcggggagccagcattgcgcattgtcctaactccaacctgagcctcagctccggctttctgaacgtccttgaagtactgaagcacgaggttaagatcggactgggaacctag

SEQ ID NO: 225418 - DNA, 540 bp, synthetic construct
  misc_feature 1..540: note = Description of Artificial Sequence: Synthetic coding sequence
  source 1..540: mol_type = other DNA
gagcgcggtgcttctattgcacactgtcctaattctaacttgtctttgagctccggcttcctgaatgtgctcgaggtgcttaagcacgaagttaaaatcggattgggcaccgatgtggccggtggctattcttattcaatgctggacgcaataaggcgggctgtaatggtgtctaacattctgctcataaataaagttaatgaaaaaagtctgacccttaaggaagtgttcagactggccactttgggtgggtctcaggctctcggtctggatggagaaattggtaactttgaggtaggtaaagaatttgatgcgatcctgatcaacccaaaggccagtgactccccaattgatcttttttacggggacttttttggtgacatctcagaggctgtgatacagaagtttctgtatctgggcgatgatagaaacatcgaagaagtctacgtcggcggaaaacaggtggtgcccttttccagctcggtgaaagagactattcaccttccagcgtcgagccctcatccaccaccttttccctag

SEQ ID NO: 225419 - DNA, 1365 bp, synthetic construct
  misc_feature 1..1365: note = Description of Artificial Sequence: Synthetic coding sequence
  source 1..1365: mol_type = other DNA
atgtgcgccgcacagatgccaccactggcacacatctttcgcggaacattcgtccatagcacctggacgtgtcccatggaggtcttgcgagatcatctgctgggagtttcagacagcgggaagatcgtcttcttggaagaagctagccagcaggagaaactcgcaaaagaatggtgtttcaagccgtgcgagattagagaattgagccaccatgagttctttatgcctggcctcgtggatacgcatatccacgcatctcaatattccttcgctggcagcagcatcgacctgccgttactggaatggcttactaaatacaccttccctgccgagcacagattccagaatatcgacttcgctgaggaagtatatactagagtggtcaggcggacactgaagaacggcactacaacagcctgttactttgcgacgatacatactgattcctcgctgcttcttgccgatatcactgataaattcgggcagagggcttttgtggggaaggtatgtatggatctgaatgatacttttcctgagtacaaagaaaccacggaggagtcgataaaggaaactgaacgcttcgtgagtgagatgttgcagaaaaactactcgagagtcaagcccattgttacaccgcgattcagcctgtcatgcagtgaaactctgatgggggagttggggaacatcgcaaagactcgcgatttacatatccagtcccacatctccgagaaccgggacgaagtcgaggcggtgaaaaatctgtacccgagctataagaattatacaagcgtgtatgacaagaacaatctccttactaataagacagtaatggcccatggctgctacctgtccgctgaggagttgaatgtgttccacgaaaggggagcatccatagcccactgccctaactcaaacctttcgctgtcttctggctttctaaatgtactcgaggtcctcaagcatgaggtcaagatagggctcggaactgacgtcgccggtggatactcatactctatgctcgacgctatccggagggccgttatggtttcaaacatcctccttattaacaaggttaacgagaaatccctaactctgaaggaggtttttcgcctggccacgctgggtgggtctcaggctttgggcctggatggggaaatcgggaactttgaggttggcaaagaattcgacgccatactgattaaccctaaggcatctgatagccctatagacctcttctacggggacttttttggcgatatatctgaggcagtgattcagaaatttctgtatttaggcgatgaccgcaatattgaggaagtgtatgtgggcggaaagcaagtcgttcccttttccagctctgtgtag

SEQ ID NO: 225420 - DNA, 1143 bp, synthetic construct
  misc_feature 1..1143: note = Description of Artificial Sequence: Synthetic coding sequence
  source 1..1143: mol_type = other DNA
atgcctggactggtggatactcatatccacgcctcgcagtatagtttcgcgggatcttcgattgatctgcctctcctggaatggctgaccaagtatacctttcccgctgagcataggtttcagaatattgacttcgctgaggaggtctacactagagtggtgcgaaggaccctcaagaacggtacaaccaccgcctgctactttgctactattcacaccgactcaagcttactgctggccgatatcaccgataagttcgggcaacgagcattcgtcgggaaagtgtgcatggatctaaacgacacatttcctgagtataaggagactacagaggagagtattaaagagaccgaacgctttgtgagcgaaatgttacagaaaaactactctcgcgtaaaacctatcgtcaccccccgtttctccctgtcttgttccgaaactttgatgggtgaactcgggaatattgcgaagacacgggatctacacatccagtctcacatctctgagaatcgggatgaagtcgaagcggtgaaaaatctgtatccatcttacaagaactacacctccgtgtacgataaaaacaacctgctaacaaacaaaacggtgatggcacatggctgttatctcagcgctgaagagctcaatgtgtttcacgagagaggggctagcatagcccattgcccaaacagtaacctgagcttgagcagcgggtttctgaacgttctggaagtactgaagcacgaggtgaaaatagggcttggcaccgatgtcgcagggggatatagttactcaatgctggatgccatcaggcgagctgtaatggtctccaatattctgctgattaacaaggtgaacgagaaaagtttgacgctgaaagaagtctttaggctggccacactgggtggcagccaggctcttggactagacggagaaataggcaatttcgaagtcgggaaagagtttgatgctatcttaattaacccgaaagcctctgattctcccattgacctgttttacggagacttttttggggacatcagcgaagctgtgatccagaagtttttgtatctgggagacgatcgcaatatcgaggaggtttatgtcggcggaaaacaagtcgtgccattttcaagctctgtctag

SEQ ID NO: 225421 - DNA, 2082 bp, synthetic construct
  misc_feature 1..2082: note = Description of Artificial Sequence: Synthetic coding sequence
  source 1..2082: mol_type = other DNA
atggcattgtgtaacggtgactccaagctcgaaaatgcaggcggagatctgaaggacggacatcaccactacgaaggggcagtggtgatcttggacgctggtgcacagtacggcaaagtcattgacaggagagtccgcgagctgttcgtccagagcgaaatctttcctctggagactcccgcatttgcaatcaaggaacaggggttccgagctattatcatttccggcggacccaactcggtctacgctgaagatgccccttggttcgaccctgccatcttcaccattggtaaacccgtcctgggtatctgttatggtatgcagatgatgaacaaagtgtttgggggtacagtccacaagaaaagcgtgagggaagacggcgtgtttaatattagcgttgataatacatgttctctctttcgcggactccagaaggaggaggtggtgctgttaactcatggcgactctgtcgacaaagtggctgacggattcaaggtggtggcgagatccggcaatattgtggctggaatcgcaaacgaatctaaaaaactttacggagcccagtttcaccccgaagtaggactgaccgagaacggcaaggtgatcctgaagaattttctttatgacatagcaggttgttccggcacattcacggtgcagaacagggaattagagtgcatccgcgaaatcaaggaaagggttgggacctccaaggtgttagtgttattgtcagggggagtcgattccaccgtttgcacagcccttctgaaccgggctttgaatcaagagcaggtcatcgcagtgcacatcgacaacggcttcatgagaaaaagagaatcccaatcagttgaagaggcgttgaagaaactcggcatccaggtgaaggtgatcaacgccgctcactctttctacaacggcactacaacactccctatttcagacgaggatcgtacaccaagaaaacggatttcaaagaccctgaacatgactactagccccgaggagaaaagaaaaataatcggcgataccttcgtgaagatcgccaatgaagtgattggagagatgaacctaaaaccagaggaagtattcctcgctcagggcaccctgcgcccagaccttattgaaagtgcatctctggtggccagcggcaaggctgaactgatcaagacccaccacaatgatacagagctgatccgtaaactgcgggaggagggaaaagtgatcgaaccactgaaggattttcacaaagacgaggttcgcatactaggaagggagctcggactccctgaagaactggtctctaggcacccgtttcccggaccaggtctggcaatccgagtaatctgcgcggaggagccttatatatgcaaagatttccctgaaactaataacatattgaaaatagttgcggactttagtgcatccgtcaaaaaaccacatacactgctgcagcgggtgaaggcatgcacaacagaagaagatcaggagaagctgatgcagattacatcgctacatagcctaaacgcctttctcctgccaatcaagactgtgggtgtccagggggactgtcgaagctacagttacgtgtgcgggatcagctccaaggatgaacctgactgggagtcattgatttttctggccagactgataccgcgaatgtgtcacaatgtgaacagagtagtatacatcttcggacctccagtgaaagagccacccaccgatgtgaccccgacattcctaacgacaggagtgctgtccacactcaggcaagccgattttgaggcccacaacattctacgggaatccggctatgcagggaagattagccagatgcctgtgattctgaccccactccatttcgatcgagatcccctgcaaaaacagccgtcctgccagcgttctgtagtgatccgcacattcatcacaagcgactttatgactgggatacctgcaacgcctggtaacgagatacctgtggaagtggtgctgaaaatggtaaccgaaataaaaaagattcccggaatcagccggattatgtatgaccttaccagcaagcctcctggcactaccgagtgggaatag

SEQ ID NO: 225422 - DNA, 1929 bp, synthetic construct
  misc_feature 1..1929: note = Description of Artificial Sequence: Synthetic coding sequence
  source 1..1929: mol_type = other DNA
atgcttgaagaaactctgagaatggccactactaccattaaagagcaagggttcagagctattataatttccgggggacctaactctgtctatgccgaggatgccccttggtttgacccagccatatttaccatcggaaaaccagtgctgggcatctgttacggcatgcaaatgatgaacaaagtgttcggcggtaccgtgcataagaagtccgtacgtgaagatggcgttttcaacatcagtgtcgataatacatgtagcctgtttagaggtctacaaaaggaggaggtggtgcttttaacacacggtgacagtgtcgacaaggtcgcagatggtttcaaggtggtggctcgaagtggaaatattgtcgccggtatagccaacgagagcaaaaagctgtacggagctcagtttcatcctgaagtcggccttaccgagaatgggaaagtgatactaaagaatttcctgtacgatattgcaggctgctccggaactttcacagtgcaaaacagagaactggaatgcataagggagatcaaggagagggtgggtacaagcaaagtgctggttctactgtcagggggtgtcgatagcaccgtgtgtacagccctacttaacagggcgctgaatcaagaacaggtgatcgcagttcacatagacaacggattcatgcggaagcgcgaatcgcagagtgtggaagaagcattgaaaaagctgggcatccaagtgaaggttatcaacgcagcacacagcttctataatgggacaactacactgccaatctccgacgaggacagaacccctcgcaaacgcatcagcaagacccttaatatgaccacttcaccagaagaaaagaggaaaattatcggagacaccttcgtgaagatcgctaatgaggtgatcggcgagatgaacctgaaaccggaagaggtgtttctggctcaaggaactctcaggcccgacctgattgagtctgccagtctggttgcttcagggaaagccgaactcattaaaacccaccataatgataccgagctcatacgcaaactacgggaggaaggtaaggtgattgagcctctgaaggattttcataaggatgaggttaggatcttaggcagggaactcggtttaccggaggagctggtgtcccgccatcccttcccgggtccgggtctagctatccgggtcatctgcgccgaagaaccgtatatctgcaaggatttccccgaaactaacaacatactgaaaatcgtagcagacttctcagctagtgtgaagaagccacacacgcttctccagcgcgtgaaagcctgcacaacagaggaggaccaagaaaagctaatgcagattaccagtcttcactcactgaacgcatttttactccctatcaagacggtgggggttcaaggagattgtaggagctattcatatgtctgcgggatctcatccaaggacgagcctgactgggagtctttaatcttcctggccaggcttattcctcgtatgtgccataacgtaaatagagttgtatatatattcgggcctcccgtgaaagaaccacccacggatgtgacccccacctttctcactacaggcgtcctgagcaccttgcgccaagccgatttcgaggctcacaacattctgcgagagagcggctacgctggtaagatctcccagatgcctgtgatccttacccccctccatttcgaccgcgaccccctccagaagcaaccaagttgtcagagatctgttgtgattcgcactttcatcacaagtgactttatgacgggaattccggctacaccaggaaacgagatccccgtggaagtagttctgaaaatggttacggagatcaagaagattcccggaattagccggatcatgtacgacttaactagcaaaccgcctggaacaacggagtgggaatag

SEQ ID NO: 225423 - DNA, 2082 bp, synthetic construct
  misc_feature 1..2082: note = Description of Artificial Sequence: Synthetic coding sequence
  source 1..2082: mol_type = other DNA
atggcgctctgtaatggtgatagcaagctggagaacgcaggaggagacttgaaagacggacaccatcactacgagggagctgtcgtgatccttgacgccggagcccagtatggcaaagttattgatagaagggtgcgggagctattcgtgcaaagtgagatcttcccactggagactcccgcttttgcaatcaaagagcagggctttcgagctattatcatttcaggaggccctaattccgtctacgccgaggatgccccttggtttgatccagcaatctttactatcggcaagcccgtcctgggtatctgttacggaatgcaaatgatgaataaggtcttcggagggactgtccacaagaagtcagtgagagaagatggagtcttcaacatctcagttgataatacatgcagcctgttccgcggacttcagaaagaggaggtcgtattgttgacccatggggattctgtcgataaagtggccgatgggtttaaagtggtcgccaggagtggcaatatagttgcaggtattgccaacgagagcaaaaagctgtacggcgctcaattccatccagaggttggtctgactgagaacggcaaggtcattctgaaaaactttttgtatgacatcgctgggtgctccggcacctttacagtacaaaatagagaactcgaatgcatccgcgagatcaaggaacgggtggggacaagcaaagtcctggttctcttatcaggtggggtagacagcacagtctgtactgcactactgaaccgcgctctcaaccaggagcaggtaatcgccgtgcatatcgataacggtttcatgcgaaagagggagtcccagtctgtggaagaggcattgaagaaattaggtatccaggttaaggtcataaatgctgctcacagcttttataacggcaccactacgttgccgataagcgatgaagatcggacaccccgaaagcgaatttccaagacattgaatatgacaacatcacccgaggaaaaaagaaaaatcataggggacactttcgtcaagatcgccaatgaagtcattggagaaatgaacctcaagccagaggaagtcttccttgcccagggtaccctccgcccagacctcatcgaaagcgcgagcctggtggcatcaggcaaggcagagctgattaaaacccaccacaatgacaccgaactgattcggaagctcagagaggagggtaaagttatagagcctctgaaggacttccataaggacgaggtccggattctgggcagagaactcggacttccagaggagctggtgagccgacaccccttccctgggcctggtcttgccatacgcgtcatctgtgcagaagaaccctatatctgtaaggacttccctgagaccaataatattctcaagattgtggccgatttcagtgctagcgtaaagaagccacacactctcttacagcgcgtcaaggcatgcactaccgaagaggatcaagaaaagctgatgcagataacatctttacacagcctcaacgcctttcttctccctataaagaccgtaggcgtccagggcgactgcaggtcttattcttatgtctgcggcattagtagtaaggacgagccggattgggagtcactgatcttcctcgcgaggctaatccccaggatgtgccacaacgtaaacagagtggtgtacatcttcggacctcccgtgaaggagccccctactgacgtgacgcctactttccttactacaggagtcctgtctacccttagacaggcagattttgaggctcataacatcctgcgggagtctgggtacgccggaaagattagccagatgcccgtgattctgacacccttacacttcgatcgtgatccactccagaagcagccgtcatgccaaaggtcagtcgtgatcagaacttttattacaagcgacttcatgacagggatcccagccacacctggcaacgagataccagtagaggtagtgctgaagatggtcacagagatcaagaaaatcccagggatcagcagaattatgtacgatctcacctcgaaaccccctggtacaactgagtgggagtag

SEQ ID NO: 225424 - DNA, 1146 bp, synthetic construct
  misc_feature 1..1146: note = Description of Artificial Sequence: Synthetic coding sequence
  source 1..1146: mol_type = other DNA
atgagcggcgtcgttagaactcttagcagatgcctattaccagcagaggcgggaggggcaagggagcgcagagctggaagcggagccagagacgccgagcgagaggccaggcggaggagcagagacatagatgccctgctggctcgagaaagacgggctgtgaggcggctcgtgaaaattttactgctaggagcgggtgagtccggcaaaagcacgttcctgaagcaaatgcggatcatccacgggagggaattcgaccagaaggccctgctagagttcagggatacaatctttgataatatcctcaaaggttcccgcgtgctggtagatgccagggataagctgggtattccatggcagtatagcgagaacgagaagcatggcatgttcttgatggccttcgaaaataaggcagggctgcccgttgaacctgctacgtttcagctgtatgtgcccgctctgtccgctctctggagagattcgggtatccgggaagccttcagccgaagatctgagtttcagctgggcgaatctgtcaaatattttctggacaacttggacagaatcggccaactgaattactttccatctaagcaggatatccttcttgctaggaaggccaccaaaggaatagtagaacacgactttgtaatcaagaagatccccttcaaaatggtggatgtgggcggacagagaagccaaaggcaaaaatggttccagtgtttcgatggcataacgtccattctgtttatggttagcagttcggagtacgaccaggtccttatggaagatcggagaaccaaccgtctggttgagagcatgaatatctttgaaacgatagtcaataacaagctgttctttaacgtttcaattatccttttcttgaacaagatggatctgttggtggagaaggtgaaaacggtgtccattaaaaagcatttccccgatttcagaggcgatccccatcgcctggaagatgtccagaggtatttggttcaatgttttgacagaaagcggaggaaccgtagtaaacctctatttcatcacttcacgactgcaatcgataccgagaacgttcgctttgtgttccacgcggttaaggataccatcctccaagagaacttgaaggatatcatgctgcagtag

SEQ ID NO: 225425 - DNA, 702 bp, synthetic construct
  misc_feature 1..702: note = Description of Artificial Sequence: Synthetic coding sequence
  source 1..702: mol_type = other DNA
atgatttatcctctgattgtactgccactttgcgccagctggcattggggcttgatccgcaaaggcatcgtgctcttttggggagagtcggtgaaatattttctggacaatctggaccgcatcggtcagcttaattactttccctccaagcaggatattctactggctagaaaggcaacaaagggtattgtcgagcacgatttcgttattaagaaaatcccctttaagatggtcgacgtgggaggccagaggagccagaggcagaagtggtttcagtgttttgacgggatcacctcaatcctcttcatggtatcatccagtgagtatgaccaggtcttgatggaggaccgtagaactaacaggttggtggagtccatgaacattttcgagaccatcgttaataataaattgtttttcaacgtttccattattttatttctgaacaaaatggacctattagttgagaaagtcaagaccgtctctatcaagaagcactttcctgatttcaggggcgacccccaccgtcttgaagatgtgcaacggtacctggtgcagtgtttcgaccggaaaagaagaaatcggtccaaacctctgttccatcacttcaccactgccatagatacagaaaatgtgcgattcgtcttccatgccgtaaaggacacaatactgcaggagaacctaaaagacattatgctgcaatag

SEQ ID NO: 225426 - DNA, 867 bp, synthetic construct
  misc_feature 1..867: note = Description of Artificial Sequence: Synthetic coding sequence
  source 1..867: mol_type = other DNA
atgagaattattcacggtagggaattcgatcagaaggctttgcttgaatttagagacactatattcgacaatatcctgaaagggtctcgcgtgctcgttgatgccagagataagctcggaatcccctggcagtattctgaaaacgaaaagcacggcatgttcctaatggcttttgaaaataaggcaggactaccagttgagcctgctaccttccagctttacgttccagccctgtctgcgctctggcgggactccgggattagagaggccttcagccgcagatccgaattccagctaaattatttccccagtaaacaagacatcctgttggccaggaaggctactaagggtattgtggagcatgactttgtgatcaaaaagattcctttcaagatggtggatgtgggcggacagcgctcccagcgacagaagtggttccaatgcttcgacggtatcacttctatactgtttatggtgtcgtcaagtgagtacgaccaggtcctgatggaggaccgacggactaaccggcttgttgagtccatgaatatctttgagacgattgtcaacaataagctgttctttaacgttagcatcatcttatttctaaacaagatggacctgctcgtggaaaaagtcaagaccgtgtctatcaaaaaacattttcctgactttaggggcgacccccacagattggaggacgtacaacgatatctggtccagtgcttcgatcgaaaaaggcgtaatcggagcaaaccactgttccaccatttcactactgctatagacactgaaaacgtgaggttcgtatttcacgctgtgaaggatacgatcctacaggagaacctgaaggacataatgttacagtag

SEQ ID NO: 225427 - DNA, 1080 bp, synthetic construct
  misc_feature 1..1080: note = Description of Artificial Sequence: Synthetic coding sequence
  source 1..1080: mol_type = other DNA
atgactcttgaatctatgatggcatgttgtctcagcgatgaggtaaaagagagcaagagaattaatgccgagattgaaaaacagcttcgtcgggataaaagagacgcccgacgagagctcaagctgctcctcctgggaacgggcgagtcggggaagtcaacttttatcaaacaaatgcgcatcatccacggcgcaggttatagcgaggaggacaagagaggttttacaaaacttgtctaccagaacatctttaccgcaatgcaggctatgatccgcgctatggaaacccttaaaattctttacaaatatgaacagaacaaggccaacgcactgcttatcagggaggtggatgtggagaaggtcactacatttgagcaccagtacgtgtccgccataaaaacactttgggaagatccaggaattcaggaatgctacgaccgccgtagagagtaccagctgtctgacagtgcgaaatactatttaaccgacgttgataggatcgccaccctaggctatctcccaacccagcaggacgtgctgagagtgcgcgtgcccaccactgggatcattgaatacccctttgatctggagaacattatatttcgtatggttgatgtgggtggacagcggtctgaacggcgtaagtggattcactgttttgaaaacgtgacatccatcatgttcttggttgcactctccgagtacgatcaggtgttggtggaatccgacaatgaaaatcggatggaagagtcaaaggcactctttcgaacaattatcacatatccctggtttcaaaacagctcagtgattctttttctgaacaaaaaagacctcctggaggacaaaatcctgtactctcatttggtagattacttccctgagttcgacgggcctcagcgcgatgcccaagcagcaagggagttcattttgaagatgtttgtggatttgaacccagattccgacaaaattatttacagccacttcacttgcgcaacagatacagagaacattcgcttcgtgtttgcggctgtcaaagatacaatcctgcaactgaatctcaaggaatacaacctggtctag

SEQ ID NO: 225428 - DNA, 1059 bp, synthetic construct
  misc_feature 1..1059: note = Description of Artificial Sequence: Synthetic coding sequence
  source 1..1059: mol_type = other DNA
atggccgacttcctcccttcaaggtctgttctgagcgtctgcttcccgggatgcttgttgacatctggcgaagcagaacagcaaaggaagtccaaggagatcgacaagtgcttgagccgagaaaagacatatgtaaagcgccttgtcaaaattttattacttggtgctggcgaatctggcaaaagcacttattcaaatgtcatcaagggcatgcgggtgctggtcgacgcacgggagaagctgcacattccctggggagataactcaaatcaacagcacggagacaagatgatgtcttttgacacacgagcacctatggctgctcagggcatggtcgaaacacgagtattcttgcaatatctgcccgctattcgcgcactatgggcagattcagggatccaaaacgcctacgacaggcgtagggagttccagctgggagagtctgtcaagtattttctagacaaccttgacaaattaggtgaacccgattacattcctagccaacaggacattttgttggccaggcgtcctacaaaaggcatccatgaatatgacttcgagataaaaaacgtccctttcaagatggtggatgttggcggacaacgaagtgaaaggaaacgctggttcgagtgttttgattccgtgacgagtatcctgtttctggtttcaagctccgagttcgatcaggtcctcatggaggacagactgacgaatcgccttacagaatccctcaacatttttgagactatagtaaacaaccgggttttttccaacgtgagtatcatcctgtttctgaacaaaactgacctcctggaggagaaagtacagatagtctccatcaaagattatttccttgagtttgagggcgacccccattgtttgagggatgtgcagaaatttctcgtggaatgtttcaggaataaacggagggaccagcagcagaagcctttataccaccatttcacaacagcaattaacacagagaatatcagactggtgttccgagacgtcaaggacaccatactccacgacaacctgaagcaactgatgcttcagtag

SEQ ID NO: 225429 - DNA, 1134 bp, synthetic construct
  misc_feature 1..1134: note = Description of Artificial Sequence: Synthetic coding sequence
  source 1..1134: mol_type = other DNA
atggccgatttcttaccatcgcgctccgtgctgagcgtctgttttcccggttgcctgctgacatcgggcgaagccgaacaacagcggaagagcaaggaaatagataagtgcctgtcccgggaaaagacgtacgtaaaacgccttgtcaagatccttttgcttggggctggtgagagcggaaagtccacatttttgaaacaaatgagaatcattcacggccaggattttgaccagagagctcgggaagagtttcgtcccacaatttactccaatgtaatcaaaggaatgcgggtgctggtagacgcacgagagaagctgcatatcccttggggtgacaattctaatcaacaacacggtgataagatgatgagtttcgacactagggcccctatggccgcacaggggatggtggaaaccagagttttcctgcaatatctgcctgcgattcgggcactgtgggcggatagcggcattcagaatgcttatgatcggagacgagaatttcaactgggggagtctgtgaagtattttctggacaacctggacaaactgggagaacccgactatatcccctctcagcaagatattctcttggcaaggagaccaaccaaaggaatacacgagtacgattttgagataaaaaacgtgcccttcaagatggtagatgtgggtggacaaagatccgagcgaaagagatggttcgagtgctttgacagtgttactagtatactgttcctggtgtcatccagcgaattcgatcaggtgctgatggaagacagactgaccaataggttgactgaaagtctgaatatcttcgagaccatcgtaaacaatcgcgtgttttcaaatgttagcattatcctgtttctgaataaaaccgacctgcttgaggagaaggtgcaaatagtgtcaattaaggattatttcctagaattcgaaggggaccctcattgtttgcgcgacgtgcaaaagtttctggtagaatgctttcgcaacaaacgccgagaccagcaacagaagccactataccatcattttacaacagcaatcaacactgaaaacattaggttggtgtttcgcgacgttaaggatactatccttcacgacaatttgaagcagctcatgctgcagtag

SEQ ID NO: 225430 - DNA, 849 bp, synthetic construct
  misc_feature 1..849: note = Description of Artificial Sequence: Synthetic coding sequence
  source 1..849: mol_type = other DNA
atgagggtgttggtagacgccagagaaaagctgcatattccctggggcgacaatagcaaccagcagcacggcgataaaatgatgagctttgacacccgagcgcctatggcagctcagggaatggtggaaaccagggttttcctccagtatcttcctgctatcagggctctttgggctgactctgggatccagaatgcctatgatcgacggcgtgagtttcagttaggggagagtgtgaagtattttttagacaatctggataagctgggggaaccagactacattccctcacaacaggacatcctgttagcacggcgaccaactaaaggaatccatgaatatgactttgagatcaaaaatgttccatttaaaatggttgacgtcggtggccaacgatcagagcggaaaagatggtttgagtgctttgactctgtcacttctatactctttttggtgagctcgtccgagttcgaccaagtcctgatggaagaccggctaacaaatagactgacggaatctcttaatattttcgagactattgtcaacaaccgtgtgttctccaatgttagcataattctgtttctgaataagaccgatctcctggaggaaaaggttcagatagtgtccatcaaggactattttcttgagtttgagggagatccccattgtctgcgagatgtgcaaaagttcttagtcgaatgtttccgaaataaacgcagggaccaacagcaaaagcctttgtaccatcactttaccactgctattaataccgagaacattcgcctagtgtttcgtgatgtcaaggatactatactgcacgacaatctgaaacagctgatgctacaatag

SEQ ID NO: 225431 - DNA, 1068 bp, synthetic construct
  misc_feature 1..1068: note = Description of Artificial Sequence: Synthetic coding sequence
  source 1..1068: mol_type = other DNA
atggccggatgttgttgcctgagtgcagaggagaaggagagccagcggatcagtgctgagattgagaggcagctaaggcgggacaaaaaagacgcaagacgggaattaaaactgcttctgttaggcaccggcgagagtggcaaaagtactttcatcaagcagatgaggattattcacggtagcggatactccgacgaagataggaaaggcttcaccaagctcgtgtatcagaatattttcaccgctatgcaggccatgattagagccatggacactctaagaatccaatatgtttgcgagcaaaacaaagaaaatgctcagatcattcgcgaggtggaggtcgacaaagtctcaatgttgagccgtgaacaggttgaggcgatcaaacagctctggcaggaccctggcatccaggaatgttacgaccggagacgggagtatcagcttagcgactctgcaaaatattaccttacagatatcgaccggatcgcaaccccttcatttgtgcccacgcagcaagacgttctgagagtccgggtgccaaccaccggcattatcgaatatccatttgacttggagaacatcatatttcggatggtggacgtgggagggcagagatctgagagaaggaagtggattcattgcttcgagtcagtgacctcaattatttttctagtggccctgtcagaatacgatcaggttcttgccgagtgcgataacgagaatcgaatggaagagtccaaggccctgtttaaaactataattacgtacccttggtttctgaattccagtgtaattttgttcctgaacaaaaaagacctgttggaagaaaagatcatgtacagccatttaataagctacttccccgaatatacagggcctaagcaggatgttcgggcagccagggactttattttgaagctttaccaggaccagaatcctgataaggagaaggtgatctactcccattttacttgtgctaccgatactgacaatattcgcttcgtgttcgctgcagtgaaagacaccatactccagctgaatctgcgagagtttaacttagtgtag

SEQ ID NO: 225432 - DNA, 1125 bp, synthetic construct
  misc_feature 1..1125: note = Description of Artificial Sequence: Synthetic coding sequence
  source 1..1125: mol_type = other DNA
atggccaggagtcttacctggcgatgttgtccgtggtgcctgaccgaggacgaaaaggctgccgctagagtggaccaggagattaataggatccttcttgaacagaagaagcaagacaggggagagctcaagctgctgctgctcggcccaggcgaaagcgggaagagtaccttcattaagcaaatgagaataattcatggcgcaggttactcagaggaggagaggaaggggtttagaccgctcgtttatcaaaacattttcgtgtcaatgcgggctatgatcgaggctatggaacgactgcagataccctttagtcgacccgagagcaagcaccacgcgtccttggtgatgagccaagacccgtacaaagtcacaaccttcgaaaagaggtatgccgcagctatgcagtggctttggcgagacgccggtattcgagcctactacgaacgtagaagggagtttcacctgctggatagcgccgtttactatctgagccatctggagcgtatcactgaggagggatatgtgcctacggcccaagatgtactcaggtctaggatgcctaccaccggtattaacgaatactgctttagtgtacagaagaccaacctgaggatcgtggatgtgggaggacagaagtccgagcgtaagaagtggattcattgttttgagaacgtgattgccctaatctacctggcttcactgagtgaatacgatcagtgcctcgaagagaacaatcaggagaacagaatgaaagagtctcttgccttatttgggacaattctggagttgccttggtttaaatccacatctgtgattctgtttctaaataagaccgacatcctagaagagaaaataccaacctctcacctcgccacgtactttccgagcttccaagggcctaagcaggacgctgaggctgcaaaacgctttatccttgatatgtacactcgcatgtacacagggtgtgtggatggtccggagggcagcaaaaaaggagctcgatcccggcgactcttcagccactatacctgcgctaccgacacccagaacattcgcaaggtgtttaaggacgtgagagactctgtgctggctaggtatcttgacgagataaacctgctgtag

SEQ ID NO: 225433 - DNA, 1065 bp, synthetic construct
  misc_feature 1..1065: note = Description of Artificial Sequence: Synthetic coding sequence
  source 1..1065: mol_type = other DNA
atgggctgcacactgagcgcagaggagagggccgctctggagcgttccaaggctatcgagaagaatctgaaagaggacgggatatcagcagccaaagacgttaaattactgctcctgggggcaggcgagtccgggaaatctactattgtcaaacagatgaaaattattcatgaagatggcttctccggagaggacgtcaaacagtataaaccggtggtctacagcaatactattcagagcttagctgctatcgtgagagccatggacaccttgggcatagaatacggagataaagagcggaaagctgatgccaaaatggtttgcgatgttgtatcccggatggaagacactgaacccttttctgctgagcttttatccgccatgatgcgactctggggcgactcaggcatccaggagtgtttcaaccgatcgcgcgagtaccagctgaatgattccgccaaatattacttggactcactcgacaggattggcgctgctgattaccaacctactgagcaggacatcttgcgcacgagggtgaagacaactgggattgtggagacccactttacatttaagaaccttcattttcgcctcttcgacgtgggaggccagcggtccgagcggaagaaatggattcactgctttgaggatgtgactgctattatattttgcgtagcgttgagcggctatgatcaggttctgcacgaagacgagaccactaacaggatgcacgaatctttaatgctctttgatagcatctgcaacaataaattctttattgacaccagcattattttgttcctcaacaaaaaagatttattcggagaaaagattaagaagagcccactgaccatctgcttcccagaatacacaggccctaatacctatgaggatgcagctgcctacattcaggcgcagtttgagtccaaaaacagatcacccaataaagaaatctactgccacatgacatgcgccacagacaccaataatattcaggtggttttcgatgcggtgacagacatcataattgctaacaacctgagaggctgcggcctatattag

SEQ ID NO: 225434 - DNA, 1065 bp, synthetic construct
  misc_feature 1..1065: note = Description of Artificial Sequence: Synthetic coding sequence
  source 1..1065: mol_type = other DNA
atgggttgtaccctcagcgccgaagagcgtgctgctctggagaggtccaaagcaatcgagaagaacttgaaggaagatggcatatccgcggcaaaagatgtcaaactcctgcttttgggagcaggcgaatcaggcaagtctaccattgttaagcaaatgaaaattatccacgaagacgggttctcgggcgaagacgtcaaacagtacaagcctgtcgtgtactcgaataccattcagtccttggccgctatagtcagggcaatggataccctaggtatcgagtatggagacaaggagagaaaggccgacgccaagatggtgtgtgacgtcgtctctcggatggaggataccgaacctttcagcgctgaactgctgtcagctatgatgaggctgtggggcgattctgggattcaggagtgtttcaatcgcagtcgagagtaccagctgaatgacagcgcgaagtactatctagattctcttgatcgcatcggcgcagcagattaccaacccactgagcaagacatccttagaacccgagttaaaacaacaggaatcgtggagacacacttcacctttaaaaatctgcattttcgcctgtttgacgtgggtgggcagagaagcgagcggaaaaagtggattcactgcttcgaagatgtgacagcaattatcttttgtgtcgccctgagtggttacgatcaggtactgcatgaggacgagacaacaaatagaatgcatgagtctctgaagcttttcgacagcatatgcaacaacaagtggttcacagacacatctattatattgttcttaaataaaaaggatatcttcgaggagaaaattaagaagtcacctctgaccatctgcttccctgagtatacgggaccaagcgcctttactgaagcggtcgcttacatccaggcccagtacgaatccaagaacaagtccgctcataaggaaatctacacgcatgttacgtgcgcaaccgacactaacaatattcagtttgtgtttgacgcggtaacggacgtaatcatagccaaaaacctgcgcggttgcggtctctactag

SEQ ID NO: 225435 - DNA, 1146 bp, synthetic construct
  misc_feature 1..1146: note = Description of Artificial Sequence: Synthetic coding sequence
  source 1..1146: mol_type = other DNA
atgggctgccttggcggaaattccaagacaacggaggaccagggcgtggacgagaaggaacggcgagaggccaacaaaaagattgagaagcaactgcaaaaggagcgactggcctataaggcgacgcacaggttgcttctcctgggagccggagagagcggtaaatctacaattgtcaaacaaatgcgaatcctgcatgttaacgggtttaatccggaagagaagaagcaaaaaattctggatattcgtaagaacgttaaggatgctattgtgactatagtctccgctatgagcaccattatcccccctgtgccccttgccaaccccgaaaatcagtttagaagtgattatattaagagcattgcccctatcacagacttcgagtacagccaagaatttttcgaccacgtcaagaaactgtgggacgatgagggagtgaaagcctgctttgaacggagtaatgagtatcaactaatagattgcgcccagtactttttagaacgaattgacagtgtgagtctggtcgattacacccccacagaccaggaccttcttaggtgcagagtactaacgtccggcatcttcgagacaaggttccaggtcgacaaagttaacttccatatgttcgatgtggggggacaacgggacgagcgccgtaagtggatacagtgtttcaacgacgtaactgctatcatatacgtggctgcttgtagctcatacaacatggtaatacgggaggataacaacactaacaggctccgcgagtccctggatttgttcgagtccatctggaataaccgttggctcagaaccatctctattatcttgttcctgaacaagcaggacatgctggcggaaaaagtgttagcaggaaagtctaaaatcgaggactacttcccagaatacgccaattatacggttccggaagacgcgacccctgatgctggggaggaccctaaggttacccgcgctaagttctttatccgcgacctcttcctgagaatctcaaccgccactggcgatggaaaacattattgctatcctcattttacatgcgctgtggatactgaaaatatcaggagagttttcaatgactgtcgcgacatcatccagagaatgcatctgaagcagtatgaacttctatag

SEQ ID NO: 225436 - DNA, 1377 bp, synthetic construct
  misc_feature 1..1377: note = Description of Artificial Sequence: Synthetic coding sequence
  source 1..1377: mol_type = other DNA
atgggtctctgctactctctgaggcctctcctgttcggcggacccggtgacgacccatgtgcggcatcagagcccccagtcgaagatgcgcagccagcacctgcccctgctctggccccagtccgcgctgccgcacgcgataccgcccgaacactcctgccacgaggcggagaggggtcgcccgcttgtgctcgacccaaggctgataagccaaaggagaaaagacagcgaaccgagcagctcagcgccgaggaaagggaggccgcaaaggaaagggaggccgtcaaggaagcacgaaaagtgtcccggggtattgatagaatgctcagggaccaaaagagggatctgcagcaaacacaccgccttttactgttgggggcaggggaatctgggaagagtacaatcgtcaagcagatgagaatcctccacgtaaatggtttcaatccggaggagaaaaagcaaaagattttagacattcggaaaaacgtgaaggatgccatagtcacaatcgtaagtgcgatgagtaccattatccccccagtccccctagctaacccagagaaccagtttcgatcagactatataaagtcaattgcaccaatcaccgattttgaatatagtcaagaattcttcgaccatgtaaagaagttgtgggacgacgagggggttaaggcatgcttcgagcgcagcaatgagtatcaattaatcgattgcgcccaatattttctcgagaggatcgattctgtttcccttgtggattacacccccacagaccaggacctgctccgttgcagggtactgacatctggcattttcgaaacccggtttcaggtggataaggtcaactttcatatgtttgatgtaggcggtcagagagatgaacgcagaaaatggatccaatgcttcaatgacgtgaccgccatcatctacgtcgccgcttgtagtagctataatatggtgattagggaagataacaataccaatagactacgcgagagcctggacttatttgaaagcatatggaacaatcgatggctgcgcaccatatctatcatcttattcctgaacaagcaagacatgctggccgaaaaggttctggctgggaagtccaagatagaggattatttcccagagtatgctaactataccgtccccgaagacgccaccccagacgcgggtgaagaccccaaggtgaccagggccaagtttttcattcgagacctgttcctgcgaatcagcacagcaactggagatgggaagcattattgttacccacactttacctgtgccgtggatacagagaatatccggagagtgtttaatgactgccgcgacattattcaaaggatgcatctaaagcaatacgaactgctgtag

SEQ ID NO: 225437 - DNA, 1146 bp, synthetic construct
  misc_feature 1..1146: note = Description of Artificial Sequence: Synthetic coding sequence
  source 1..1146: mol_type = other DNA
atgggatgccttggcggtaattcaaagaccaccgaggatcaaggcgttgatgaaaaggagaggagggaagcgaacaagaaaattgaaaagcagctgcagaaggagagattggcctacaaggctactcatagactgctccttctgggagcgggtgagtcaggcaagtccacaattgtcaaacagatgcggatcctgcacgtcaacggatttaaccctgaagagaaaaaacaaaagatcttagatatcagaaagaacgttaaagatgcaattgtcacgatagtgtccgccatgagtaccattatccccccagtgcctcttgcaaacccggaaaaccagtttcgtagcgattacattaagagcattgcccctatcaccgacttcgagtactcccaggaattttttgaccatgtcaaaaaattatgggacgatgagggggtgaaggcttgcttcgagcgctctaatgagtaccaactgatagactgcgcacagtactttctggagaggatagactccgtgtcactggtcgattacacaccaaccgatcaggatctactacgctgccgcgtactgacttctgggattttcgagacccgcttccaggtggacaaggttaacttccatatgttcgatgtggggggtcagagggatgagaggcgcaaatggatccaatgcttcaacgacgtgaccgcaattatttatgtggctgcatgttcatcatacaatatggtcattcgcgaagacaacaatactaaccgccttcgcgaaagtctggatctgtttgaatcgatttggaacaatcgttggctgcgaacaataagtatcatcctgttcctgaacaaacaggacatgttagctgagaaggtgctggccggaaagtcaaagatcgaggattacttcccagagtacgccaactatacggtccctgaggatgcaacccctgacgctggagaggaccccaaggtcacacgggcaaagttcttcattcgcgacctctttttgcggatcagtactgctactggagacgggaagcactattgttaccctcactttacatgcgccgtagacaccgagaatatccgccgagtgtttaatgactgcagagatatcattcagcggatgcatttgaagcagtacgagcttctgtag

SEQ ID NO: 225438 - DNA, 1146 bp, synthetic construct
  misc_feature 1..1146: note = Description of Artificial Sequence: Synthetic coding sequence
  source 1..1146: mol_type = other DNA
atgggctgtctgggcggaaattcaaagacaaccgaggaccaaggcgtcgatgagaaagagcgtcgcgaagcaaacaagaagattgagaaacagctgcagaaggaaaggcttgcctacaaagcaacacacaggctacttctgctgggcgctggcgaaagtggcaagagcacaatcgtgaagcagatgagaatcctgcacgtgaacggcttcaatccagaggagaagaaacagaagatcctagatatcagaaagaacgtcaaagatgcaatcgttactattgtgagcgcaatgagcacaatcatcccacctgtgcccctcgcaaacccagagaaccagtttcggtcagactatatcaaatccatcgcccctataacagacttcgagtattctcaggagtttttcgaccacgtgaaaaaactgtgggatgatgagggcgtgaaggcatgctttgaacggtctaacgagtatcagctcattgattgcgcacaatactttctcgagagaatcgactcagtctccttggtggactacactccaactgatcaagatctgctccggtgtagggtcctcacgtctggaattttcgaaactcgatttcaggtcgataaagtgaattttcacatgtttgacgtcgggggtcaacgcgatgaaaggagaaaatggattcaatgcttcaatgacgtgacagccatcatctatgtggccgcttgctcatcctacaacatggtcatcagggaagataataataccaatagactccgggagtcactggacctgtttgagagcatatggaacaaccgctggcttagaacaatatcgatcattttgtttctgaataagcaggatatgctggctgagaaggtgctggctgggaaatctaaaattgaggactatttcccagagtatgctaattacaccgttccagaggacgccactcccgacgccggagaagaccctaaagtgaccagagccaagttctttattcgggatctgttcctgcgcatctcgactgcgactggcgacggtaagcactactgctacccacacttcacgtgcgctgttgacaccgagaacataaggagagtattcaacgactgccgggacataatacagcggatgcatctcaagcaatacgagttactctag

SEQ ID NO: 225439 - DNA, 525 bp, synthetic construct
  misc_feature 1..525: note = Description of Artificial Sequence: Synthetic coding sequence
  source 1..525: mol_type = other DNA
atgttcgacgtgggcggacagcgagacgaaagaagaaagtggatacaatgcttcaacgacgttactgccataatctatgtggctgcatgttcatcctataacatggtgatccgcgaagacaataatactaaccgccttcgggaatctctagacctgtttgagtcaatttggaacaacaggtggcttagaaccatctcaataatactcttcttgaacaagcaagatatgctggcagagaaagtcctggccggaaaatcaaaaatcgaagactatttccccgaatatgccaactatactgtgcccgaggacgccacgcccgacgccggagaggatcctaaagtgactagggcgaaattcttcatccgcgacctgtttctccgaatctctacagctacaggcgacgggaagcactattgttaccctcacttcacctgcgcagtggacacagagaacattaggagggtcttcaatgactgtcgggacataatccagagaatgcatctgaaacagtacgagctgctgtag

SEQ ID NO: 225440 - DNA, 963 bp, synthetic construct
  misc_feature 1..963: note = Description of Artificial Sequence: Synthetic coding sequence
  source 1..963: mol_type = other DNA
atgcggattctgcatgtgaatggctttaatcccgaagagaagaagcagaagatcctagatattaggaagaatgtgaaagatgccatcgtaacgattgtgtccgcgatgagtaccattatacccccagttccgctggctaatccagaaaatcagtttcgtagtgactatataaaatcaattgctccaatcacggattttgaatactcacaagagttttttgatcacgtgaaaaaactatgggacgatgagggcgtaaaggcttgctttgaaagaagtaatgagtatcagttaatcgattgcgcacagtattttctagaaaggatcgactccgtgtctttggtggactataccccaacagaccaggacctgcttagatgccgggtgctgacctctgggatctttgaaacccgcttccaggtggataaagtgaacttccatatgttcgacgtgggcggtcagcgggacgagcggcgaaaatggattcaatgcttcaacgacgtgaccgccatcatctacgttgcagcctgttcgtcatataacatggttatacgagaagacaataacaccaatcggctgcgggaatcactcgacctgtttgagagcatctggaacaataggtggttaagaactatctcaatcattctttttctgaacaagcaggacatgctcgctgagaaggtactggctggcaaatcgaaaatcgaagattattttccagagtatgctaattatactgtgcctgaggatgcaacgcctgatgcaggggaagatcccaaggtaactcgcgcaaaattctttatcagagatctttttttaagaatatccaccgctaccggcgacggaaagcactattgttacccccactttacatgcgcagtggatacagagaatatccggagagttttcaatgactgcagagacataatccagcggatgcatctaaagcaatacgagttgctttag

SEQ ID NO: 225441 - DNA, 1065 bp, synthetic construct
  misc_feature 1..1065: note = Description of Artificial Sequence: Synthetic coding sequence
  source 1..1065: mol_type = other DNA
atgggttgtaccctgtccgcggaggacaaagctgccgtagagcgcagtaagatgatcgataggaatttacgcgaggatggtgaaaaagctgcacgggaggtcaagcttctgttgctcggagccggtgagagtggcaagagtacgattgtaaagcagatgaaaattatacatgaggcaggctatagcgaggaagaatgcaagcagtataaggctgtggtgtattcaaacaccatccaaagcatcatagctattatccgagcaatggggagactaaaaattgactttggcgactcggccagggccgatgacgctcgacagctttttgtgctggcaggggctgcagaagagggcttcatgaccgctgagttggctggagtgatcaaacggctgtggaaagattccggggtccaagcatgtttcaatagaagcagagagtatcagcttaatgattccgctgcctattatcttaacgaccttgacagaatcgcccagccaaactacatccctacccagcaggatgtgctgcggacccgggtaaaaactactgggatagttgaaacccattttacattcaaagaccttcactttaagatgtttgacgtgggcggacagcggagtgagcgaaagaagtggattcattgcttcgaaggcgtaacggccattattttttgtgtggcgttatctgattatgacctggtgctggctgaggacgaagagatgaataggatgcacgagtccatgaaactttttgattctatctgcaacaacaagtggtttactgatacttctattattctgttcctcaataagaaggatctgtttgaagaaaagatcaaaaagagcccactaacaatctgctaccccgagtacgctggaagcaatacctatgaagaagccgcagcgtatatccagtgccagtttgaagatcttaacaaaaggaaagacactaaagaaatctacacccacttcacatgtgcaacggatacaaaaaatgtccagtttgtgttcgacgcagtgactgacgtaattattaagaacaacttgaaggattgtggcctgttctag

SEQ ID NO: 225442 - DNA, 72 bp, synthetic construct
  misc_feature 1..72: note = Description of Artificial Sequence: Synthetic coding sequence
  source 1..72: mol_type = other DNA
atgggctgcaccctgagcgccgaggacaaagcagctgtcgagcgaagcaaaatgatcgaccgcaatctctag

SEQ ID NO: 225443 - DNA, 909 bp, synthetic construct
  misc_feature 1..909: note = Description of Artificial Sequence: Synthetic coding sequence
  source 1..909: mol_type = other DNA
atgaagattatccacgaggccggttattcagaggaggaatgtaaacagtataaggcggtggtttattccaacaccatacagagtatcatagctatcatccgggctatgggccgtttgaagatcgatttcggagactctgctagggcagacgatgctagacagctctttgtgctcgcaggcgctgccgaggaaggcttcatgacagccgagttggccggtgtgattaaacggttatggaaagattccggcgtccaggcctgctttaatcgaagcagagagtatcagctgaacgactctgccgcttactaccttaacgacctggatagaatcgctcagcccaactacatacccacacaacaggatgttctgcgcacaagggttaagacaactggcattgttgagacccattttacattcaaagacctccactttaagatgttcgacgtgggcggtcagcgctcggaaagaaaaaaatggatccattgttttgaaggggtgactgccattattttttgtgtcgccttgagcgattatgacctagtcctcgcggaagatgaggagatgaatcggatgcatgagtctatgaaattatttgacagtatctgcaacaacaagtggtttaccgataccagcatcatcctgttcctaaacaagaaggatctcttcgaggagaaaatcaaaaagtcccccctcaccatatgttaccccgaatatgcaggttccaacacatacgaggaagctgccgcatacatccagtgtcagttcgaagatctcaacaagcgaaaagataccaaagagatctacacacacttcacatgcgccacagataccaagaatgtgcagttcgtttttgacgcggtcactgatgtcattatcaaaaacaatctgaaggactgtgggctattctag

SEQ ID NO: 225444 - DNA, 1020 bp, synthetic construct
  misc_feature 1..1020: note = Description of Artificial Sequence: Synthetic coding sequence
  source 1..1020: mol_type = other DNA
atggaatacgccggacacctacccgcaagctctgcccagggcactattctggcctgtacctcctgtacaggcgcaggcgaatctggcaagagcactattgtgaaacagatgaaaatcatccacgaggacgggtactccgaggaggaatgtcgccaataccgggctgtggtgtactcaaataccatccagtccataatggccatcgtcaaggccatgggcaatctgcagattgattttgccgacccttcaagggccgacgatgcaaggcagctgtttgctctcagttgcaccgcggaggaacagggcgtcttacctgacgacttgtcgggagtgatccgtaggctgtgggccgaccatggggtacaggcttgcttcgggaggagtagggagtatcagctgaatgactccgctgcctattacctgaatgacttggaacgtatcgcccagtctgattacataccaacgcagcaggacgtgctcagaacgcgggtaaagacgacaggaatcgttgaaacgcacttcacgttcaaggacctgcactttaaaatgtttgatgttggtggacagagaagtgagaggaagaaatggatccattgcttcgagggcgtgaccgccatcattttctgcgtggctctctctgcatatgacctggttttggcggaggacgaggagatgaatagaatgcatgagtctatgaagctcttcgactctatatgtaacaacaagtggttcactgacacaagcattatcctttttctgaataagaaggatttgttcgaagaaaagattacccactcccccctaaccatttgttttcctgaatacacgggcgctaacaagtacgatgaggctgcatcttatatccagtctaagttcgaggacctcaataaaaggaaagataccaaagaaatatatacccacttcacatgtgccaccgacaccaagaacgtgcagttcgtattcgatgcggtgaccgacgtcattatcaaaaacaacctaaaggactgcggcctgttctag

SEQ ID NO: 225445 - DNA, 1068 bp, synthetic construct
  misc_feature 1..1068: note = Description of Artificial Sequence: Synthetic coding sequence
  source 1..1068: mol_type = other DNA
atgggttgcaccgtgtccgccgaagataaggctgccgctgaaagaagcaagatgatagacaagaatcttagggaggatggagaaaaggccgctcgcgaagtgaagctgctgctgttaggagctggcgaatccggaaaaagtaccattgtgaagcaaatgaagatcatccacgaggatggatactctgaggaggagtgccggcagtatagggctgtggtgtatagcaacactatccagtctattatggcaatagtcaaggcaatgggcaacctccagattgacttcgctgacccgtccagagccgacgatgcacgccaactgttcgcactttcttgtaccgctgaagaacagggcgttctacctgatgacctgtccggcgtgatccggaggctgtgggctgaccatggagtccaggcatgcttcggacgctcaagagaatatcaactgaacgacagtgctgcctactatctaaatgatctcgagagaattgctcaaagcgactatattcccacccagcaagacgttctgcggactagggtcaagacaaccgggatagtggagactcactttactttcaaggatctgcacttcaaaatgttcgatgtgggaggccagcgcagtgagaggaagaagtggatccactgcttcgagggtgtcacagcaataatattctgcgtggcactgtccgcatacgacctagtcctagccgaggacgaagagatgaatcggatgcacgagagcatgaaattattcgactccatttgcaataataagtggttcacggatacctcaatcatcctgtttcttaacaaaaaggacttgtttgaggaaaagattactcactctccgcttactatctgtttccctgagtacaccggcgcaaataagtacgatgaagccgcatcttatatccagtcaaagtttgaagacttaaataaaaggaaggatacaaaggaaatctatactcactttacctgcgctaccgacaccaagaacgtccagtttgtcttcgacgctgtgactgatgtgatcatcaaaaacaacctgaaggactgtggcctcttctag

SEQ ID NO: 225446 - DNA, 1020 bp, synthetic construct
  misc_feature 1..1020: note = Description of Artificial Sequence: Synthetic coding sequence
  source 1..1020: mol_type = other DNA
atgaccgaaggggtcaaaactttaggatggaccaagcagaaaggcggttgtcactggggaaggtccgagggagcaggggaatccggcaagtcaacaatcgttaagcaaatgaaaatcattcacgaagacgggtactccgaggaggaatgtcggcagtaccgcgcagtcgtctactcaaatacaatacaatctattatggcaatcgtgaaagccatggggaatctgcagattgattttgctgatcctagccgggctgatgatgcccgacagttatttgcgctgtcatgcactgcagaagagcagggcgtcttgccagacgatttaagcggcgtgataaggcgcctctgggccgaccacggggtgcaggcatgcttcggcagatctcgcgagtaccagctgaacgactcagctgcctattatctcaacgacctagagagaattgctcagagtgactatatccccacacagcaggatgtgctgaggactcgcgtgaaaaccaccgggatcgttgaaacacactttaccttcaaggacctacactttaagatgttcgatgttggaggccagcggagcgagcgtaaaaagtggatccattgcttcgagggcgtgacagcaattatattttgcgttgctttatctgcgtatgatctggtactggcagaagacgaggaaatgaaccgcatgcatgagagtatgaaactgtttgatagcatctgcaacaacaagtggttcacggacaccagtatcatactgttcctcaataagaaggatctgttcgaggaaaagattacacactcccctcttaccatctgcttccctgaatacaccggtgcaaacaaatacgatgaagccgcttcatacatacagtccaagtttgaggacctgaacaaaaggaaggacaccaaagaaatttacacccattttacttgcgctactgatactaaaaatgtgcagtttgtgttcgacgccgtaaccgacgtgataataaaaaacaacctcaaagactgcggtctattttag

SEQ ID NO: 225447 - DNA, 912 bp, synthetic construct
  misc_feature 1..912: note = Description of Artificial Sequence: Synthetic coding sequence
  source 1..912: mol_type = other DNA
atgaaaatcatccacgaggacggatattctgaagaggagtgccggcagtacagggctgttgtctactctaatacaatacagtcgattatggcaatcgtgaaagccatgggcaacctccagattgacttcgccgacccgagccgggcagacgacgctcgccagctctttgcactaagctgcactgccgaggagcagggtgtcctgcccgacgacctgagcggagttattcgcagactctgggcagatcatggagtgcaagcttgcttcgggcgaagtagagagtatcagctgaacgattctgctgcatattatttgaacgatctcgagagaatcgcccaaagcgattacataccaactcagcaggatgtcctgcggacgcgcgtaaagactacagggatcgtggagacccatttcacgtttaaggatctgcactttaagatgttcgacgtgggcggacagcggtctgaacgcaagaagtggatccattgttttgaaggggttactgccatcatcttttgcgtagcactgtctgcctatgaccttgtgctcgcagaggacgaagaaatgaaccgcatgcacgagtctatgaagctgtttgactccatttgtaataataagtggtttaccgacacatcaattatactctttctaaataagaaagacctcttcgaagaaaaaattactcatagccccctaacgatctgttttcctgagtatacaggcgcaaacaaatatgatgaggctgccagctacatccaaagcaagttcgaggaccttaataaacggaaagatactaaagaaatttacactcactttacatgcgcaacagatacgaagaatgtgcaatttgtgtttgacgcggtgacggatgtaatcataaaaaataaccttaaggactgtgggctgttctag

SEQ ID NO: 225448 - DNA, 957 bp, synthetic construct
  misc_feature 1..957: note = Description of Artificial Sequence: Synthetic coding sequence
  source 1..957: mol_type = other DNA
atgcgcggtgcaggcgagtcaggcaagtctaccatcgttaaacagatgaagataatacacgaggacgggtacagcgaggaggagtgcagacagtatcgagcagttgtttattccaataccatacagtccataatggcgatcgtgaaagcaatgggaaacttgcaaatcgacttcgccgatccatcacgggcagatgacgccagacagcttttcgcactctcatgcacagccgaagagcaaggggtcttacccgacgacctgtcaggggtgataaggcgtctctgggccgaccacggagtgcaggcttgcttcgggcgttcgcgagagtatcagcttaatgactcggcggcttactacctcaatgatcttgagcggattgcccagtccgattacatcccaacacagcaggatgttttgcgcacacgggtcaagaccaccggcatcgtcgaaacccatttcactttcaaagacctgcatttcaaaatgtttgatgtgggtgggcaacggtcggaaagaaaaaaatggatccactgtttcgagggggtcactgcaatcatcttttgcgttgcactctctgcctacgacctggtccttgccgaggacgaagaaatgaatcgaatgcacgagtccatgaaactctttgactccatctgcaacaacaaatggttcaccgatacaagtatcatcctgtttctcaacaaaaaagatttgttcgaggaaaagataacacacagtccccttaccatctgtttcccggaatacacaggagccaataagtacgacgaagcagcttcttacattcagtccaaattcgaagacctcaacaagcgcaaagataccaaagagatttacacgcacttcacctgtgctaccgatacgaaaaacgtacaatttgtcttcgatgctgttacggatgtgataattaaaaacaatctgaaggactgcggattgttttag

SEQ ID NO: 225449 - DNA, 825 bp, synthetic construct
  misc_feature 1..825: note = Description of Artificial Sequence: Synthetic coding sequence
  source 1..825: mol_type = other DNA
atggccatcgtcaaagctatggggaacctccagatagactttgccgaccctagccgcgcagatgatgcgcgtcagctgttcgctctgtcctgtacagccgaggagcagggagtgctgcccgacgatttatccggagtaatcagacgcttgtgggccgatcatggggtgcaagcgtgttttggtaggtcgcgtgagtaccagcttaacgatagcgccgcttactatctgaacgatcttgaaaggattgcgcagtccgactacattcccactcagcaggatgtgttgcgcacgcgagtgaaaactactggcattgtggagacccacttcacattcaaagatctgcatttcaagatgtttgacgtaggcggacagcgttccgagcgcaagaaatggatccattgttttgaaggagtaacagcgatcattttttgcgtggccctgtcagcatacgatctagtcctagcagaggacgaggaaatgaaccgaatgcatgagtctatgaagttattcgattctatttgcaacaacaagtggttcactgacaccagcatcatcctgtttttgaataagaaggacctgtttgaggaaaaaattacacatagccctctgactatatgctttcccgagtatacgggtgccaacaagtatgatgaggcagccagctacatccagtctaagttcgaagaccttaataagagaaaagatacgaaagagatctatacgcatttcacttgcgctaccgatactaagaacgtgcagtttgtgttcgacgcggttactgacgtcatcatcaaaaataatctgaaggattgcggactcttctag

SEQ ID NO: 225450 - DNA, 1086 bp, synthetic construct
  misc_feature 1..1086: note = Description of Artificial Sequence: Synthetic coding sequence
  source 1..1086: mol_type = other DNA
atggggtgcaccgtgagcgccgaagacaaggccgctgcagaacggtccaagatgatcgacaaaaatttgagagaggatggcgagaaggctgcaagggaggtgaagcttctgctacttggggcaggagagagtggcaagtcaaccattgtgaagcagatgaagattattcacgaagatggttatagtgaggaagaatgtcgtcaataccgcgctgtagtgtactctaacaccatccagtctattatggccattgtgaaagccatgggcaacctccaaatcgatttcgctgacccatcaagggcggatgacgctaggcagctcttcgcactttcttgcacagctgaagagcagggcgtgctgcccgacgacttgtccggcgtcatcagacgtctgtgggctgaccacggtgttcaggcctgctttgggaggtcaagagagtaccagctcaatgattccgctgcttattacctgaatgatctggaaaggatcgcccagtccgactacattccaacccagcaggacgtgctgcgcacccgggtgaaaacaacagggatcgttgaaacgcacttcactttcaaagatctgcacttcaagatgtttgatgttgggggtcaaagaagcgagcgtaagaagtggatccattgctttgagggagtgactgccatcatcttttgtgtggccctgagtgcttacgaccttgtgttggccgaggatgaagaaatgaacagaatgcacgaaagtatgaaattattcgatagcatctgtaacaataagtggtttaccgacacctccattatacttttcctgaataagaaagacctcttcgaagagaaaattactcatagcccattgactatttgcttccctgaatataccggcgctaataaatacgatgaagcagcctcatatatccaatccaaatttgaagacctgaacaagcgcaaggacaccaaggagatttacacccacttcacgtgtgcaacagataccaaaagccggaagctgttccgcgagaattaccttaaactgagcgatcccgaccagcagccacccccagcgccactgccatccgatagcgtgccctag

SEQ ID NO: 225451 - DNA, 1065 bp, synthetic construct
  misc_feature 1..1065: note = Description of Artificial Sequence: Synthetic coding sequence
  source 1..1065: mol_type = other DNA
atggggtgtaccctgagtgctgaagataaggccgcagtggagagatctaagatgatagaccgcaatctgcgggaggatggagagaaggcggcaaaggaggtcaaattactgctgctcggagctggtgagtctggaaaatctacaattgtgaaacagatgaagatcattcacgaggacggatattctgaagatgagtgcaaacagtataaagtagtagtgtattcaaatactatccagtcgattattgctatcatacgagccatgggcaggctgaagatcgatttcggggaagctgctcgcgctgatgacgccagacagctattcgtgctcgcgggatccgccgaggagggcgtcatgactccagaactggctggcgtgataaagaggttatggagggatggtggagtgcaagcttgtttttcccgtagcagggagtatcagttaaatgactctgcatcttattacctgaacgatctagacaggatctcccagtccaattatatacccactcaacaggatgtgttaaggacccgggtgaagacgacaggcatcgtcgagacacacttcacattcaaggatctctactttaaaatgttcgacgtgggaggtcagcggagtgagagaaagaagtggatccattgttttgagggcgtgacagctattattttctgcgttgccctgagcgattacgacctggtactggctgaggacgaggaaatgaaccgaatgcatgaatccatgaagctgttcgattccatttgcaataacaaatggttcaccgagacgtccatcatcctatttttgaataagaaggacctgttcgaagaaaagataaaacgatcaccactgaccatttgctaccctgaatatacaggtagtaacacatacgaggaggccgcagcatacatccagtgccagttcgaggatcttaaccgccgaaaagataccaaagagatctatacacactttacatgcgccacagacaccaagaacgttcagtttgtttttgatgccgtcacagacgtgatcatcaaaaacaatctgaaggaatgcggactctactag

SEQ ID NO: 225452 - DNA, 2652 bp, synthetic construct
  misc_feature 1..2652: note = Description of Artificial Sequence: Synthetic coding sequence
  source 1..2652: mol_type = other DNA
atggccgaaaatagcgtgttgactagcacgacggggagaacctcgctcgctgattcttcaatcttcgacagcaaagtgacggagattagcaaagagaacttgttgatcggaagcacatcctacgttgaggaagaaatgcctcagatagaaactagggtcattctggtacaggaggccggtaaacaggaagagttgattaaagctctgaaagacatcaaggtgggattcgtgaagatggaatcagtagaggaatttgagggtttggacagcccggaattcgaaaacgtgtttgtcgtaacagacttccaggatagtgtctttaatgatctttacaaggccgactgtagggtcattgggcctcccgtcgtcctgaactgtagccagaagggcgaaccgctcccatttagctgcaggcccctttactgcacttcgatgatgaatctcgtgctgtgttttaccgggtttagaaagaaagaggagttggtcagactcgttaccctcgttcatcatatggggggagtgatacgaaaggattttaattctaaagtgacccacctggtcgctaattgcactcagggcgaaaagttccgcgtcgctgtgtctctgggaacccctataatgaagcccgagtggatatacaaggcgtgggagaggcggaatgaacaagacttctatgctgcagtagacgattttcgcaatgaattcaaagtacctccgtttcaggattgtatcctatcttttctgggattcagcgatgaagagaagactaacatggaagaaatgactgaaatgcaaggagggaaatacctgcctttgggcgacgaacggtgtacacatttggtggtcgaggagaacattgtgaaagacctcccgtttgaaccttccaagaaactctacgttgttaaacaagaatggttctggggaagtatccaaatggacgcccgtgccggtgaaaccatgtatctgtacgaaaaggccaatacacccgagctgaagaagtctgtctctatgttgagtttgaataccccaaactccaaccgcaaacgtcgcaggctgaaagagacactggcccagctttcaagagaaacagacgtgtctccgttcccccctaggaagcgaccctccgctgagcattcgttgtccattggaagtctgttggacataagtaatacgcccgaatccagcatcaactatggtgatacccctaaaagctgcaccaaatccagcaagagtagtaccccggtacctagcaaacaaagcgcccgttggcaggtggccaaagagttataccagaccgaatccaactacgtcaatatacttgcaactattattcaactcttccaagttccactggaagaagaaggccagcgtgggggtccaattctggcaccagaggaaatcaaaaccattttcgggtcgatccctgacatctttgacgtgcacaccaagatcaaggatgacttggaagacctgattgtcaactgggacgagagtaaatctatcggcgacatctttctgaagtactctaaggaccttgtgaaaacgtatccaccattcgtaaatttcttcgaaatgagtaaggaaaccattatcaagtgcgaaaagcaaaagccacgatttcatgcatttctcaagatcaatcaggcaaaaccagagtgtgggcgtcagtcgttagtggagttgctaattagaccagtgcagagattacccagtgtggcattactgctcaacgatctaaagaaacacacggcggacgaaaacccggataagtctaccttagagaaggccatcggctcactcaaagaagtcatgacacacatcaatgaagataagcggaaaacggaggcccagaaacagatcttcgatgtggtgtacgaggtcgatggatgtccagccaacctacttagctcccatcggtctctcgttcagcgcgtggaaacaattagtctcggcgaacacccgtgtgaccgcggtgagcaggtgacactgttcctgtttaacgactgtctagagatagcaaggaaacgccacaaggtgattggaaccttcaggtcaccccacggccagactcgtccaccggcttccttgaaacatatacatctcatgcctctctctcagatcaagaaggtgctggatatccgtgaaacggaagactgtcataatgccttcgctctcctggtgagaccccctacagagcaagctaacgtcctgctgagcttccagatgacaagcgatgaactgcctaaagagaattggcttaagatgctttgccggcacgtggccaataccatatgtaaagccgacgcagagaacctaatatacaccgcagacccagagtcgttcgaggtaaataccaaagatatggactctacattgtccagagcatctagagccatcaaaaagacctctaagaaagtgaccagagccttcagtttttccaagacccctaaaagggccctgagacgggcactgatgacatcccacgggtctgttgaaggtaggtcccctagctctaatgataagcacgtcatgtcaaggctgtctagcactagttcactagccggaatccccagtccgtctttggtgtcactcccaagtttttttgagcgacgatcccatacgctgtcccgcagcacaacccacctcatctag

SEQ ID NO: 225453 - DNA, 1053 bp, synthetic construct
  misc_feature 1..1053: note = Description of Artificial Sequence: Synthetic coding sequence
  source 1..1053: mol_type = other DNA
atgggagcaggagctagcgcagaggagaaacacagtcgggagctggagaaaaaattgaaggaagacgccgagaaagatgcacgcacggtgaaattgttactcttgggagcaggtgaatccggcaagtctaccattgtcaagcaaatgaaaatcatacaccaggacgggtattctctagaggagtgtctagaattcatcgcaattatttatgggaacacgctccaatctattctcgccatagtccgggctatgaccactctcaacattcaatatggcgacagtgcacgacaggacgatgctcggaagctgatgcacatggctgacactattgaagaaggtacaatgcccaaggagatgagtgatattatacagcggctttggaaagactcagggatccaggcttgcttcgaacgggctagcgagtaccagctgaatgattccgcaggctactacctcagcgatttagagcgtctagtcacgccgggatatgtgcctacagagcaggacgtgctccgttcccgagtcaagaccaccggcattatcgagacacagtttagctttaaagatcttaattttagaatgttcgacgtcgggggacagagaagtgagcgtaagaaatggatccactgctttgagggcgtgacctgtattatcttcattgcggctttgtccgcttacgatatggtcctggtcgaagatgatgaagtcaacagaatgcatgagtccctacatctcttcaactctatttgcaatcaccggtacttcgctacaacttctattgttctttttctgaacaagaaggacgtattctttgagaagatcaagaaagcccatctgtccatatgctttccggattacgatgggccaaatacgtatgaggacgccggaaactacatcaaagtgcagtttctcgaactgaacatgagaagagacgtgaaggagatatattcccatatgacttgcgctacggacacccaaaacgttaaatttgtgttcgatgccgtcactgatataattattaaagaaaacctgaaggattgtggtttgttctag

SEQ ID NO: 225454 - DNA, 1065 bp, synthetic construct
  misc_feature 1..1065: note = Description of Artificial Sequence: Synthetic coding sequence
  source 1..1065: mol_type = other DNA
atgggaagtggcgcttcagccgaggataaagagctggcaaaacgcagcaaggaattagagaaaaaactgcaggaggatgccgataaagaggctaagactgtgaagctgctgctgctaggggctggcgagagtggtaaaagcactattgtaaagcaaatgaagatcattcatcaggacggatactctcccgaagagtgtttagaatttaaggctattatctacgggaatgtacttcagagcattcttgccattatcagggccatgactacccttggcattgattatgcagaaccttcttgcgctgacgatgggcgtcagctgaataatctcgccgattccatcgaggaggggacaatgccccctgaactggttgaagtgattcgcaggttatggaaagatgggggagtacaggcgtgttttgaacgtgccgctgagtatcagttaaatgactctgccagttactatcttaaccagttggaaagaatcaccgaccctgagtatttgccttccgaacaggacgtgctgcgaagccgggtgaagactacagggataattgagacgaagttctccgttaaagatcttaactttagaatgttcgatgtcggaggccagaggtcagagcgtaagaaatggatccactgcttcgaaggcgtaacatgtatcatcttttgcgcagctctctcagcatatgacatggtcctggtcgaagatgatgaggtcaataggatgcacgagtcactgcacctgttcaattccatttgcaatcacaagttttttgccgctacaagcattgttttattcctgaacaaaaaagatctgttcgaggagaagattaaaaaagtccatttatccatctgcttcccagaatatgatggcaacaattcctacgatgacgccggaaattacatcaagagtcagtttttagacctaaacatgcggaaggacgtgaaagaaatctatagccatatgacttgtgccaccgacactcagaatgtgaaattcgtattcgatgcagtcacggatattatcattaaggaaaaccttaaagattgcgggctgttttag

SEQ ID NO: 225455 - DNA, 1068 bp, synthetic construct
  misc_feature 1..1068: note = Description of Artificial Sequence: Synthetic coding sequence
  source 1..1068: mol_type = other DNA
atgggatgccgtcaatcctctgaggaaaaagaggcggcacgaagaagccgacggatcgacaggcacttgaggagcgagtcgcagcgccagcgacgcgaaataaagctacttctcctcggaacctctaatagtggtaagtccacgatagtgaagcagatgaaaatcatacattctggcggtttcaaccttgaggcctgcaaagagtacaagcccttaattatctataacgccatcgactctctaacacggattattagagcactggctgcgctgaggatagatttccacaaccccgaccgagcctacgatgccgtccagctgtttgcacttactggtccggcagagagtaaaggcgagattactccggaattgctcggagtgatgcgacgactctgggctgaccctggagcacaagcctgcttctccagatccagcgagtaccatctagaagacaatgcagcctattacctgaacgatttggaacgcattgccgcagcagattacatacccaccgtggaggatatcctgcgatcccgcgacatgactacaggcattgtcgaaaacaagtttacctttaaggagctcacattcaagatggtcgacgtgggagggcaaaggagcgaacgcaaaaagtggattcactgctttgagggggttacagcaatcattttctgcgtggagctctccgggtacgatctcaagctctatgaagacaaccaaacatctagaatggccgagtccctgcgtttgttcgactccatctgcaataataactggttcattaatactagcctcattctcttcctgaataagaaagacctgttggcagaaaagatccgacgcattccacttacaatctgtttccccgagtacaaaggtcagaatacctatgaggaagccgcagtgtacattcaacgccagttcgaagacttgaatcgaaataaagagactaaagaaatctacagccattttacctgcgctaccgacaccagtaacattcagttcgtgttcgacgccgttacggatgttattatccagaacaaccttaagtatatcggtctctgttag

SEQ ID NO: 225456 - DNA, 912 bp, synthetic construct
  misc_feature 1..912: note = Description of Artificial Sequence: Synthetic coding sequence
  source 1..912: mol_type = other DNA
atgaaaatcatccactccggcggattcaatctggaagcgtgcaaagagtacaaaccgctgattatctacaacgccattgactctctgacacgcatcattcgagcccttgcggcactaagaatcgattttcataacccggatagagcttatgatgccgtgcaactgttcgctttgaccgggccagcagagagcaagggcgagataacaccagagttgctgggcgtgatgagaaggctctgggctgacccaggggctcaggcttgcttttccagaagctcagaataccatcttgaagataacgcagcctattatctgaatgatttggaacgaatcgctgcggctgattacatccctacagtagaggacatactgagatctcgcgatatgactacaggtatagtggagaacaagttcactttcaaggaactgacctttaagatggtcgacgtgggcggtcaacgatcagagcgcaaaaaatggatacactgttttgagggcgttacagccataatcttctgcgtggaactgtccgggtacgatctcaagttatacgaggacaaccagacatcacgcatggctgagagcctccggttgtttgactccatttgtaataataattggttcattaataccagcttgatactctttctgaataagaaggatctgctagccgagaagatccgcaggatccccctgaccatctgctttcctgagtataaaggccaaaacacatatgaggaagccgctgtctatatccagagacagttcgaggacctgaatcggaataaggaaaccaaagagatatattctcacttcacctgtgcgactgacacctctaacatacaattcgtgtttgacgcggtgactgatgtgataattcagaacaacttaaaatacatcgggttatgctag

SEQ ID NO: 225457 - DNA, 1188 bp, synthetic construct
  misc_feature 1..1188: note = Description of Artificial Sequence: Synthetic coding sequence
  source 1..1188: mol_type = other DNA
atgtgcgaccagactttcttagtgaacgtatttggttcttgcgacaaatgctttaagcagcgggctttacggcctgttttcaagaaatcccagcagctctcatattgtagcacgtgcgctgaaatcatggccaccgaaggactgcacgaaaatgagacgctggcgagcctgaagtcagaggcggagtccctgaagggaaaactggaagaagagcgtgcaaaattacacgacgtcgaactgcaccaggtagcggagcgcgttgaggcccttggacagtttgttatgaagactcgacgcacgcttaagggacacggcaataaggtattgtgcatggattggtgcaaagataagcggaggatcgtgtcttcctcccaggatgggaaagtcatagtttgggactctttcacaacaaacaaagaacatgcggtaaccatgccatgcacttgggtgatggcgtgcgcctatgcaccgagcgggtgtgcgattgcatgcggaggactcgataacaaatgctcggtctaccctctgaccttcgacaaaaacgagaacatggccgcaaaaaagaagtcagtggcaatgcatactaactacctttcagcctgcagctttactaatagcgatatgcagattttgacggcatctggcgacggcacctgcgccctgtgggacgtggagagcggccagctgctgcagtctttccacgggcacggagcagacgtgctttgcctcgatcttgctcccagcgagacgggaaatacgtttgtgtccgggggatgcgataagaaggctatggtgtgggacatgcgcagcggccagtgcgtccaggctttcgagacgcacgaaagtgacatcaactccgtccggtactacccatccggggacgctttcgcatcaggctcggacgatgcaacatgccggctgtatgacctgagggctgatagggaggtggccatctactccaaggagtctatcatcttcggcgcttccagcgttgatttctcactgtccggaaggctcctgttcgccggttacaatgattacaccatcaacgtgtgggatgttctgaagggttcgcgggttagcatactctttggacatgagaacagagtgagtactctgcgggtgtcccccgacggcaccgcattctgcagcgggagttgggaccacacactgcgggtgtgggcctag

SEQ ID NO: 225458 - DNA, 1062 bp, synthetic construct
  misc_feature 1..1062: note = Description of Artificial Sequence: Synthetic coding sequence
  source 1..1062: mol_type = other DNA
atggccacagaggggctgcacgagaatgagactttggcttctttgaaatctgaagctgagtctttgaagggtaagctcgaggaagagcgcgctaaactgcacgatgtcgaattgcaccaggtcgccgagcgcgtcgaagcactagggcagtttgttatgaagactcggcgaactttgaagggacacggcaacaaggtgttgtgcatggattggtgcaaagacaaaaggcgaatcgtctcgagctctcaagatgggaaggttattgtgtgggacagctttacaaccaacaaggagcatgccgtgaccatgccttgcacttgggtgatggcctgtgcctatgcccctagcggatgtgccatcgcatgtggagggcttgataacaagtgctcagtgtatccactgacgttcgataaaaacgaaaatatggcagcaaagaagaagagcgtcgccatgcacaccaactatctgagtgcctgtagtttcaccaatagcgacatgcaaattcttaccgctagcggcgatgggacgtgcgccctgtgggacgtggagtccggccaacttttgcaatctttccatggtcacggtgccgatgttctgtgtcttgacctggccccaagcgaaacagggaacactttcgtgtcaggagggtgcgacaagaaggctatggtgtgggacatgagatcaggccagtgcgtccaggcctttgagacccacgaatctgacatcaactccgttcggtattacccttccggggatgcgttcgcatctggtagtgacgatgctacatgcagactctacgaccttagggccgaccgagaagttgccatttattcaaaagaatccatcatttttggagcttcgagcgtcgacttctccctgagcgggcgtctgctctttgctggctacaacgactacaccatcaatgtgtgggatgtgcttaaggggtctcgcgtctcaatactgtttgggcatgagaatagagtctctacgctcagagttagcccggacggcacagccttttgctctggctcgtgggatcacactctccgagtttgggcatag

SEQ ID NO: 225459 - DNA, 852 bp, synthetic construct
  misc_feature 1..852: note = Description of Artificial Sequence: Synthetic coding sequence
  source 1..852: mol_type = other DNA
atggctacggaggggctgcatgagaacgagacattggcttcattgaagagcgaggcagagagcctcaaagggaaactggaagaggaaagagccaaattgcatgatgtggagctgcatcaggtcgccgagagggtagaagccctcggacaatttgttatgaaaacccgcagaacattaaagggccacgggaacaaggtgctctgtatggactggtgcaaagacaagaggaggatcgtttcttcctcccaggacggaaaagtgattgtgtgggacagctttacaactaacaaaatcttgacagctagcggcgacggcacatgcgccctgtgggacgtggagtctggacagctgcttcagagtttccacggccatggcgctgacgtgctgtgtctggatctagccccatccgagacgggcaataccttcgtcagtgggggttgtgacaaaaaagctatggtttgggacatgagatcggggcagtgcgtacaggcatttgaaactcatgagagcgatattaactcggtcaggtactacccgtcaggagatgccttcgcctcaggttccgatgatgccacctgtagactctacgacctccgggctgatcgggaggtcgcgatctatagtaaggagagcatcatctttggagcctccagcgtggatttctctcttagcggacgactgctcttcgctggatacaacgactatactattaatgtgtgggatgtcttaaagggctcaagggtctccatcttgttcggacacgaaaatcgagtgtccaccttgcgcgttagccctgacggcactgcgttctgtagtggcagttgggatcatactctgagggtttgggcgtag

SEQ ID NO: 225460 - DNA, 582 bp, synthetic construct
  misc_feature 1..582: note = Description of Artificial Sequence: Synthetic coding sequence
  source 1..582: mol_type = other DNA
atgtcgaagctgctcatcctgatcctcacagctagtggtgacggcacctgtgcactctgggatgttgagtctggccaactgcttcagtcattccacggacacggagcggatgttctgtgtttagacctggccccatccgagaccgggaacactttcgtctctggaggttgcgataaaaaagcgatggtctgggacatgcgcagtggccaatgtgtacaggcctttgaaacccacgaatcagatatcaacagcgtgagatattatccctctggtgatgcatttgcctccggatctgatgacgccacctgtcgcctctacgacctgcgcgctgacagggaagtcgcaatttacagcaaagaatccataatttttggagcttccagtgtggacttctctctgtcgggtaggcttctgttcgctggatacaacgactacacgataaatgtgtgggacgtgctaaaggggtcccgcgtgtctatcttatttggccacgaaaatcgggtttccactctgagggtttccccagatggaacagccttctgtagtggctcgtgggatcataccctgcgagtttgggcttag

SEQ ID NO: 225461 - DNA, 1023 bp, synthetic construct
  misc_feature 1..1023: note = Description of Artificial Sequence: Synthetic coding sequence
  source 1..1023: mol_type = other DNA
atgtcagagctggaccagctgagacaagaggctgaacagctgaagaaccagataagggacgccaggaaagcctgcgccgatgccacgctctctcaaattaccaacaatatagatcccgtgggacggatccagatgcgaacaagaagaacccttcggggacacctggcaaaaatctacgctatgcattggggaactgactctagacttctggtgtccgctagtcaggatgggaagttgatcatctgggactcatataccacaaataaggtgcacgctataccactcagaagcagctgggtgatgacatgcgcttatgcaccatccgggaattatgttgcgtgtggtggattagataacatatgctccatctacaacctgaagaccagagagggcaatgtgagagtgtcgagagagttggctggccatacgggttatctgtcatgttgtcgatttctggacgacaatcagatcgtcacttcttctggggacactacatgcgctctgtgggacattgaaacaggacagcagacaacaacatttacaggccacactggagacgttatgtccctctccttagcacctgacacacgcttgtttgtgtctggggcttgtgacgccagtgccaaactttgggatgtccgcgagggaatgtgtcgccaaactttcacaggacatgaaagtgacataaacgccatctgctttttcccaaatggcaatgctttcgccaccggctccgacgatgcaacctgcaggcttttcgatttacgggctgatcaggaactaatgacctactcacacgacaacatcatctgtgggattacttcagtgtcttttagcaaatcaggcagattgttgctggccggatacgacgatttcaattgtaatgtctgggatgctctcaaggccgatagggccggtgtactggcaggacacgataatcgcgtgagctgcctcggggtcactgatgacggaatggcagtagcgacaggatcctgggactccttcctcaaaatctggaattag

SEQ ID NO: 225462 - DNA, 1023 bp, synthetic construct
  misc_feature 1..1023: note = Description of Artificial Sequence: Synthetic coding sequence
  source 1..1023: mol_type = other DNA
atgagcgaactggatcaactgcggcaggaggcagaacagcttaagaatcagatccgcgacgccaggaaagcgtgcgccgacgcaaccctttctcagatcactaataacatcgatcctgtgggcaggattcaaatgcgtacccgaagaaccctgcgaggccatctcgctaagatctacgcgatgcattgggggacagatagtcgactactggtgtctgcatcccaggatggaaaactaattatctgggattcatatacaactaataaagtgcacgccattcctctgagatctagttgggtgatgacctgtgcctacgctccctcaggtaattacgttgcatgtggagggcttgacaatatttgttcgatctacaatctgaagactagggaggggaacgtaagagtgtccagagaactggcaggccatacgggctacctctcctgttgccgctttctggatgataatcagatagtaactagttcaggagacacgacctgtgccctgtgggacatcgagaccggtcagcagaccactacgtttaccggccacacaggtgacgtcatgtctctcagtctggctcctgatacccgcctgtttgtgagcggggcttgcgacgcttctgccaaactttgggacgtacgggagggaatgtgtagacagacgtttaccggccacgagtctgacattaacgccatctgctttttccccaacggcaacgcttttgcaactggttctgacgatgctacatgccgactgttcgatctgcgggcagaccaggaattaatgacgtacagccacgacaatatcatctgcgggatcacgagcgtaagctttagcaagagcgggagattactgcttgccggttacgacgatttcaattgtaacgtatgggatgcccttaaggcagaccgtgccggtgtcttggcaggccacgacaacagggtctcctgcctcggagtgacagatgacggaatggccgtcgcgactggctcttgggacagcttccttaagatttggaactag

SEQ ID NO: 225463 - DNA, 597 bp, synthetic construct
  misc_feature 1..597: note = Description of Artificial Sequence: Synthetic coding sequence
  source 1..597: mol_type = other DNA
taaggctacctgagttgctgtagattcctcgacgataaccaaatcgtcacatcgtccggcgacaccacctgcgccctttgggacatcgaaactggacagcaaacaaccactttcacaggacacactggtgatgtgatgtctctcagcctcgcccctgatacaagacttttcgtgagcggcgcatgcgacgcatctgcgaaactgtgggatgtccgcgagggcatgtgtcgccagacttttacagggcatgaatctgacattaatgcgatttgttttttcccgaacggcaatgcattcgctactgggagcgatgacgctacctgtcgtctttttgatttgagggctgaccaggaactgatgacgtatagtcatgacaatataatctgtgggatcaccagcgtgagcttcagcaaatcaggacggctcttactggcaggctatgacgactttaattgtaatgtatgggacgcattaaaggccgatcgcgcaggcgtcctcgctggccatgacaacagggtcagttgtttgggggtgaccgacgacggaatggcagtcgctactggcagttgggattcattcctgaaaatttggaattag

SEQ ID NO: 225464 - DNA, 444 bp, synthetic construct
  misc_feature 1..444: note = Description of Artificial Sequence: Synthetic coding sequence
  source 1..444: mol_type = other DNA
atgagtgaactggaccagcttagacaggaggccgagcagctgaagaaccagataagagacgctcggaaggcctgtgcggatgccacccttagtcaaatcacaaacaatattgatcctgtggggcgtatccagatgcgcacacgtcgaactctccgcggtcacctggctaaaatctacgccatgcattggggcacagactctcggttgctggtctcagcatctcaggatgggaaattgatcatttgggactcctacactaccaacaaggtacatgccatcccactaagatcctcgtgggtgatgacatgtgcctatgctccctcagggaactatgtcgcctgtggcggtctcgataacatttgctcaatctataatctgaaaacccgggaaggcaacgtgagagtgagtagggagcttgcgggacataccggcacctgtccctag

SEQ ID NO: 225465 - DNA, 327 bp, synthetic construct
  misc_feature 1..327: note = Description of Artificial Sequence: Synthetic coding sequence
  source 1..327: mol_type = other DNA
atgtcagagctggaccagttacggcaagaggccgagcaattgaaaaatcagattcgggatgcccgaaaggcatgtgcagatgccactttgagccaaataacaaacaacatagaccctgtgggcaggatccagatgaggacccgcagaacactccggggacacttggcaaaaatttacgctatgcactggggcaccgacagccgtctcttggtgtctgccagccaggacggaaagctcataatttgggacagttatacgacaaataaggtccacgcgattcccctgcgctccagttgggtgatgacctgcgcgtatgcgccttcttag

SEQ ID NO: 225466 - DNA, 405 bp, synthetic construct
  misc_feature 1..405: note = Description of Artificial Sequence: Synthetic coding sequence
  source 1..405: mol_type = other DNA
atgtctgagctcgatcaattaaggcaggaggccgaacagctcaaaaaccagattcgcattaccaataatattgaccctgtgggacgaatccagatgagaacgcgccgtactctcagaggccacctagccaaaatttatgcaatgcattggggcactgactctcgtctgttagtctctgcatcccaggatggcaagctgatcatttgggattcctacaccacgaacaaggtacatgccatccctttgcggagcagttgggtgatgacatgtgcctacgctccttctggtaactacgtcgcatgtgggggtctagacaatatctgtagcatttacaacttgaagacccgcgagggaaatgtgagggtttctagggagttagccggacacaccgggacatgcccatag

SEQ ID NO: 225467 - DNA, 723 bp, synthetic construct
  misc_feature 1..723: note = Description of Artificial Sequence: Synthetic coding sequence
  source 1..723: mol_type = other DNA
atgacatgtgcctacgctcctagtggaaactacgtcgcctgcgggggacttgacaatatctgttccatctacaatcttaaaactcgggaggggaacgtcagggtgtctcgcgaactcgcaggacacactggatacttatcgtgttgtagattcctggatgacaatcaaatcgtaacctctagcggcgacaccacctgcgcgctctgggatatcgagactggccagcaaaccactacctttaccgggcatacaggagacgttatgtctctgagccttgcccctgacactcgtctcttcgtgagcggcgcttgtgacgcctccgcgaaactgtgggacgtgcgcgaggggatgtgccggcagacattcacaggtcatgaatccgatattaacgccatctgtttcttccctaacggaaacgcattcgccactggcagcgatgatgccacatgtcgtttgtttgacctgagggctgatcaagaattaatgacctattctcacgataacatcatctgcggaatcactagtgtgtcatttagcaaaagtggacggttgctgctggcaggctacgacgatttcaattgcaacgtctgggatgccttgaaggccgatcgggctggcgttctagccggtcatgacaaccgcgtgagttgtctgggtgttacagatgacgggatggcagtggcaacaggttcatgggattctttccttaagatatggaattag

SEQ ID NO: 225468 - DNA, 984 bp, synthetic construct
  misc_feature 1..984: note = Description of Artificial Sequence: Synthetic coding sequence
  source 1..984: mol_type = other DNA
atgacagcaccatgcccaccccctccgcctgaccctcaattcgtgctccgcggaacccagagccctgttcacgctctgcacttctgtgagggcgctcaggcccagggtcgacccctactgttttcaggcagccaaagcgggcttgtacacatttggagcttgcagacacgaagagccgtcacaaccttggacggacacggtgggcagtgcgtaacatggctccaaaccctcccacaggggaggcagcttctctcccagggtagggatctgaagctctgtttgtgggacctggccgagggacgttctgctgttgtcgactctgtgtgtctggaatccgtcggattctgccgctcatccatcctcgcaggagggcagccacgatggacgctggccgtgcctggcaggggctccgacgaggtgcagatactggaaatgccaagcaagacttcagtgtgtgcactgaagccaaaggctgatgccaagctgggcatgccaatgtgcttaagattgtggcaggcagactgttcatctaggcctctgcttctggctggttatgaggacgggtccgtcgtcctgtgggatgtgtccgaacagaaagtttgtagtaggatcgcttgtcacgaagagccggtcatggaccttgactttgactcccaaaaggcaaggggcatctcgggaagcgcgggaaaagccctggccgtgtggtcactggactggcagcaagctttgcaggtccgtgggactcatgagctcactaatcctggcattgcggaggtgacgatccggcctgaccgcaaaattttagctactgccggttgggatcatcggatacgcgtattccactggcggacaatgcagccgttggccgttctcgcttttcactcagctgccgtgcagtgtgtcgcatttactgccgacggcctcctcgccgcagggagtaaagatcaacggatctctctgtggagcttgtaccccagggcctag

SEQ ID NO: 225469 - DNA, 984 bp, synthetic construct
  misc_feature 1..984: note = Description of Artificial Sequence: Synthetic coding sequence
  source 1..984: mol_type = other DNA
atgacagcgccttgtcccccaccccctccggacccgcaattcgtgctcaggggaactcagagccccgtccatgccctgcacttctgcgaaggcgcacaggcccaaggcaggcctctgctgtttagcggctcccagagcgggctggtgcacatttggtcactgcagacacgtagggctgtcaccacattggacggccacggcggacaatgtgtcacatggctgcagaccctgccacagggaagacaattgctgtcccaggggagagatctgaagctgtgtctctgggaccttgcggagggcagaagtgccgtcgtagattccgtctgcctggagtctgtcgggttctgtcgcagctccattctagcaggaggccagccaaggtggacgctggccgtgccaggcagagggtcggacgaagttcagatattagaaatgccctctaagacttcagtgtgtgcactcaagccgaaagctgatgccaagctcggcatgccaatgtgtctgcgactctggcaagctgattgttcctctcgtcctttgctccttgctggatatgaagacgggagcgtggtgctgtgggacgtctctgagcaaaaagtctgttccaggatcgcttgccatgaagaacctgtcatggatctcgacttcgattcccagaaggcaaggggaattagtggttctgctggtaaggcactggcagtatggtccctggattggcaacaggctttgcaggtccgaggaacacatgagctcacgaacccaggaatcgccgaagtaaccattagaccagataggaaaatcttagcgactgcaggctgggaccatcgcattagagttttccactggcggaccatgcaacctctagctgtgctggcgttccattctgcggcagtgcagtgcgttgcattcacagccgacggtctcctggccgctggctccaaagatcagagaatctctctttggagtctgtatcccagagcttag

SEQ ID NO: 225470 - DNA, 639 bp, synthetic construct
  misc_feature 1..639: note = Description of Artificial Sequence: Synthetic coding sequence
  source 1..639: mol_type = other DNA
atgactgcaccctgccccccacccccacccgacccacaattcgtgctcagagggacacaatctcccgtgcacgccctccacttctgcgagggcgcacaggcacagggcaggcctctcctgtttagtggcagccaatctggactagtgcacatatggtcattacagactagaagggctgtgactaccctcgacgggcacgggggacagtgtgtgacatggctgcagaccctcccccagggtaggcagctcctctcccaggggagagacctcaagctgtgtttgtgggatttggccgaaggcagatcagcggtggttgatagcgtctgcctggaatcagtgggattttgtcgttccagcattctcgctggcggacagcctagatggaccttagcagtgcctggtcgcggatctgatgaggtgcagattctggaaatgccaagcaagaccagcgtctgcgccctcaagccaaaggctgacgccaaactgggaatgcctatgtgcttgagactatggcaggcagactgctccagccgcccactactgctggccggttatgaggacggctcagttgtgctctgggatgtctctgagcagaaggtatgtagtcgaatcgcatgccacgaggagcctggtctctag

SEQ ID NO: 225471 - DNA, 1023 bp, synthetic construct
  misc_feature 1..1023: note = Description of Artificial Sequence: Synthetic coding sequence
  source 1..1023: mol_type = other DNA
atgagtgagcttgagcagctgcggcaggaagccgaacagcttaggaatcagatcagagacgcgaggaaggcgtgcggcgattccacattaacgcaaatcactgctggcttggatcctgttggtcgtattcagatgcgcacccgaaggaccctgagaggccatttagctaaaatctatgcaatgcactggggaactgatagccgtctgctcgtttccgcctctcaggacggtaagttaattatttgggacagttacacgacaaacaaggtccacgctattcctctccggagtagctgggttatgacttgcgcctacgctcccagcggtaatttcgtggcctgcggaggtctggacaatatttgttcaatctattcacttaagacccgcgaaggcaatgtaagggtcagcagggagctacccggacatacaggctacttaagctgttgcaggtttctggatgataatcagatcattaccagctccggagatacaacctgcgcgctctgggatattgaaaccggccagcagaccgtgggattcgcaggccattcgggagatgtcatgtctctctccctcgcacccgacggcaggaccttcgtcagcggcgcatgcgacgcttccataaagctgtgggacgtgagagattccatgtgccgacaaacttttatcggccatgagtccgacattaatgctgtggctttctttccaaatgggtacgcctttacaactggatctgacgatgccacatgccgattgttcgatcttagagcggaccaagaactacttatgtattcccacgacaacatcatctgcggcattactagtgtcgccttttcacgatcgggcaggctgttgctggcaggatacgacgatttcaattgtaatatttgggacgccatgaaaggggatcgggctggcgtgctggctggccacgataatcgtgtctcgtgtctgggggtgacagacgacgggatggccgtggcgactggctcctgggactcctttctaaagatttggaactag

SEQ ID NO: 225472 - DNA, 1023 bp, synthetic construct
  misc_feature 1..1023: note = Description of Artificial Sequence: Synthetic coding sequence
  source 1..1023: mol_type = other DNA
atgtccgaactagaacagctgcgacaagaggccgagcagttgcgcaaccaaattcgggatgccagaaaggcatgtggcgactccaccctgacccagataaccgccggtcttgacccggtggggaggattcagatgcgcaccagaagaacgctaagaggacacttagctaagatctatgctatgcactggggtactgactctcgactgttagtctccgcgtcacaggacggaaaattgattatctgggactcctatactaccaataaggtgcacgcgataccgctcaggtcctcttgggtgatgacttgtgcatacgctcctagtggaaactttgtcgcctgcggtggcttggacaacatttgctcaatttattcactcaagacccgggaaggcaacgtgcgggttagtcgagagctcccaggacacacagggtacctctcatgctgcaggtttttggacgacaatcagataattacctcctcgggagataccacctgtgctctgtgggacatcgagactggccagcagactgtggggttcgcaggtcacagcggcgatgtgatgagcctcagcctcgctccagacggcagaacattcgtgtctggggcttgcgacgctagcataaagctgtgggatgtgcgagatagcatgtgtagacagacctttattggccatgagtccgatatcaacgcggtcgctttcttccccaacggatatgcttttacaacgggatcggacgacgccacttgtaggctctttgacctgcgggcagatcaggaactgctgatgtattcccatgacaatattatctgtgggattactagcgtagcattctcacgcagtgggaggctgcttctcgcgggatacgatgattttaactgcaacatctgggacgccatgaaaggagatagagctggtgtactggcgggacacgacaaccgggtgagttgtctcggggttactgacgatgggatggcagtcgccacaggcagttgggatagctttctgaaaatttggaattag

SEQ ID NO: 225473 - DNA, 1023 bp, synthetic construct
  misc_feature 1..1023: note = Description of Artificial Sequence: Synthetic coding sequence
  source 1..1023: mol_type = other DNA
atgtccgagctcgaacagctgaggcaggaggcagagcagctgaggaatcagataagagatgcaagaaaagcatgtggtgacagcaccctcactcaaatcactgcgggactcgatccagtgggacgaattcaaatgaggacaagaagaacgctaagaggccacctcgccaagatttacgcaatgcactggggcactgactccaggcttttagtcagcgcatcccaggatggtaaattaatcatatgggactcctacaccacaaacaaagtgcacgctatccccctgcgctcctcatgggtgatgacgtgcgcttatgctccctctggcaacttcgtggcctgcggaggtctggataacatctgttctatctattcactcaaaacaagagagggtaacgtgcgagtttcgagagagctgcccggacacaccgggtatctgtcatgctgtcgctttctggacgacaatcagatcatcacctcctcaggggatacgacttgtgccctctgggacatcgagactggccagcaaaccgttgggttcgctggccatagcggcgatgtaatgtctctcagcctggccccagacgggcgaaccttcgtgagtggtgcatgcgacgcctccatcaaattgtgggatgtcagggactcaatgtgcaggcagacatttatcggccatgagtctgatattaacgccgtggcctttttccccaatgggtacgcttttacgacgggatcagacgacgccacttgccgtcttttcgaccttcgcgctgaccaagaattactgatgtacagccacgacaatataatctgtggcatcacctctgtggcctttagtagaagcgggagactgttgcttgccggttatgacgattttaactgtaatatatgggatgcaatgaaaggtgacagagctggcgttctggccggtcatgataatcgggtatcatgtttgggtgttactgacgatggaatggctgttgcaacgggttcttgggactcattcctcaagatctggaattag

SEQ ID NO: 225474 - DNA, 459 bp, synthetic construct
  misc_feature 1..459: note = Description of Artificial Sequence: Synthetic coding sequence
  source 1..459: mol_type = other DNA
atgtctgagctggagcagctgcgccaggaggctgagcaacttcgaaaccagattcgggatgccagaaaggcatgcggggactccacgctcactcagataaccgccggactggaccctgtgggccgaatccagatgcgtacacggaggacattacgcggacaccttgccaaaatatacgcaatgcactggggcacggattctagactcctggtttcagcttcacaggacgggaaactgatcatctgggacagttatacaacaaataaagtgcacgctatccctctccgaagctcttgggtgatgacttgcgcctatgccccaagtgggaattttgttgcttgcggcggtctcgataatatttgctccatttactctctgaaaacccgggaaggcaatgtacgcgtcagcagggagctcccaggccacaccggatatctgagctgttgcaggttcctgtag

SEQ ID NO: 225475 - DNA, 723 bp, synthetic construct
  misc_feature 1..723: note = Description of Artificial Sequence: Synthetic coding sequence
  source 1..723: mol_type = other DNA
atgacgtgtgcctatgcaccgagtggtaattttgtcgcttgtggtggactggataatatctgctccatctacagcttgaagactagggaaggcaacgtgagggtaagccgggagctcccgggtcacaccggatatctctcatgttgtcgctttctggatgataaccagatcattacatcaagcggggacacaacctgcgcactgtgggatatcgagactggtcagcagaccgtaggctttgccggtcacagcggcgacgtgatgagccttagtctggccccagacggtcgaacatttgtttccggtgcatgcgatgctagcattaaattgtgggatgtgagagatagtatgtgtagacagactttcattggccacgagtccgatatcaatgccgtggcattcttcccgaacggatatgccttcactactggttctgatgatgcaacctgccggctgttcgatctgcgcgctgatcaggaacttttgatgtattctcacgacaatatcatttgcggcattacgtccgttgctttttcccgtagcgggcgactgctgctggccggatacgacgacttcaactgcaacatctgggacgcaatgaaaggcgatagggctggcgttttggcaggtcacgacaatcgagtctcatgcctcggggtaacagacgacggtatggctgtggccaccgggtcatgggattcttttctgaagatatggaattag

SEQ ID NO: 225476 - DNA, 891 bp, synthetic construct
  misc_feature 1..891: note = Description of Artificial Sequence: Synthetic coding sequence
  source 1..891: mol_type = other DNA
atgcgtacccggcgtacgctgagggggcacttagctaagatttatgcgatgcattgggggaccgactcacggcttctggtttcagccagccaggatggtaaattaatcatttgggattcctacaccaccaacaaggttcatgctattcctcttcgatccagttgggtaatgacatgtgcttatgccccttctggaaatttcgtggcatgtggtggacttgacaatatctgctccatctacagtctgaaaacaagagagggcaatgtccgggtcagccgggaactcccgggacacacaggctacctctcttgttgccggttcctggacgacaaccagatcattacgagctccggagacaccacctgcgccctgtgggacatcgagacgggacaacaaacagtgggttttgccggacattctggcgacgtgatgagtctgtcacttgcaccagacggtaggaccttcgttagcggtgcatgcgatgcctctattaagctgtgggacgtcagggactctatgtgccgtcagacgttcatcggtcacgagtcggacatcaatgccgttgctttctttcccaacgggtatgcgttcactactggcagcgacgacgcaacatgccggctgttcgatcttcgagctgaccaggaactcctgatgtattcccacgacaatattatatgcggtattacatccgtggccttcagccgcagcggtagactgctattggctgggtatgacgattttaactgcaacatttgggacgccatgaaaggggaccgggctggcgtgttagcgggacatgataacagggtttcctgccttggagtcacagacgacggcatggcggtggcaaccggctcatgggattctttcctgaagatttggaactag

SEQ ID NO: 225477 - DNA, 723 bp, synthetic construct
  misc_feature 1..723: note = Description of Artificial Sequence: Synthetic coding sequence
  source 1..723: mol_type = other DNA
atgacctgcgcttatgccccttccggtaactttgtggcctgtgggggactagataatatttgctccatctattcattaaagactagggaggggaacgttcgggtttcgagggaactgccaggacacacaggttacttgagctgctgcaggttcttggatgacaaccagattattactagcagtggcgacactacctgcgcgctgtgggacatagagacaggacaacagaccgtcggattcgccggacatagcggagatgttatgtcactgagtctggcccctgatggcagaacctttgttagtggggcttgtgacgcgagtataaagctctgggacgttcgggactccatgtgccgccagacttttattggccacgagtccgacatcaatgccgtggccttcttccccaacggctacgcatttactacaggcagcgatgatgccacgtgcaggctcttcgaccttcgggctgaccaggagctgttgatgtatagtcacgacaacatcatctgcggcatcacctccgtagcattctcccgtagtggtagactactattagccggatatgacgactttaattgcaacatctgggatgccatgaaaggcgatcgggctggcgtgctggcaggacacgacaaccgagtgtcctgtctgggcgtcactgatgacggcatggctgtggctaccggatcttgggacagctttttgaagatatggaactag

SEQ ID NO: 225478 - DNA, 699 bp, synthetic construct
  misc_feature 1..699: note = Description of Artificial Sequence: Synthetic coding sequence
  source 1..699: mol_type = other DNA
atgagcgagctggagcagctccgccaggaagcagaacagttgaggaaccagattagggatgcacgaaaggcttgtggcgactcaactctgactcagataacagccggactcgatcccgtggggagaatccagatgcggaccagaaggacactgcgcggtcacttagcaaaaatctatgccatgcattggggtacagattcacgactactggtgtctgcctctcaggacggaaagctcatcatctgggattcctacaccacaaataaggtgcatgctataccactacggtcatcttgggttatgacctgcgcctacgccccatccgggaacttcgttgcctgcggcggactggataacatttgcagcatctatagccttaaaacacgcgagggaaatgttcgcgtgtcacgggagctacctggacacactggctacctcagttgctgtaggtttctggacgacaaccaaattatcacctccagcggagatactacctgcgcactttgggatatcgagaccgggcagcaaactgttggatttgcgggtcattccggcgatgtgatgtccctgtcactcgcgccagacgggaggacctttgttagcggcgcatgtgacgcctcaattaaactgtgggatgtgcgtgactctatgtgcagacagaccttcataggacatgagtccgatataaacgcagtctag

SEQ ID NO: 225479 - DNA, 891 bp, synthetic construct
  misc_feature 1..891: note = Description of Artificial Sequence: Synthetic coding sequence
  source 1..891: mol_type = other DNA
atgcgcactagacgcactctcagggggcatctggccaaaatctatgcgatgcactggggcactgactcccgattactggtctcagcctcgcaggatggaaaattgataatctgggacagttacactaccaataaggttcacgcaatacccttgagaagtagttgggtaatgacctgcgcttatgccccatccgggaacttcgtcgcctgcgggggactggataacatctgcagcatatactcactgaagactagagaaggtaacgtgcgtgtgtctagggagctccccggtcacaccgggtatctctcatgctgccgctttttggatgacaaccagattataacctcaagcggggacaccacatgcgcgctttgggatattgagactgggcagcagaccgtaggtttcgccggacacagcggcgatgtcatgtccctgtctcttgctccagatggtcgaaccttcgtgtctggtgcctgcgatgccagtattaagctgtgggacgtgcgggatagcatgtgccggcagactttcattggccacgagagtgacattaacgcagtggcctttttccctaacggctacgcatttacaaccggttcagacgatgcaacctgtagattgttcgacttaagagcagaccaggaacttttaatgtatagccacgacaatattatctgtgggataacttctgtagcattttcgcggtccgggaggctgctgctcgcgggatacgatgactttaactgcaacatctgggacgccatgaaaggggatcgagcgggagtcctcgcaggacacgacaatcgagtgagctgcctgggtgtcacagacgacggaatggctgtcgccacaggctcctgggactcattcctgaagatttggaattag

SEQ ID NO: 225480 - DNA, 756 bp, synthetic construct
  misc_feature 1..756: note = Description of Artificial Sequence: Synthetic coding sequence
  source 1..756: mol_type = other DNA
atgtccgaactcgagcagctgcgacaggaggccgagcagttaagaaatcaaattagggacgcacggaaggcatgcggcgactcaaccctcacgcagattaccgcaggcctcgatccagtgggcagaattcagatgcgcacaagacggaccctccgtgggcatttggccaaaatctatgctatgcactgggggaccgacagtagactacttgtatcggcttcgcaggatgggaagctgataatctgggattcctataccacgaacaaggtgcacgctataccattgagatcatcgtgggtgatgacctgtgcctacgccccttctggcaactttgtagcctgtggtgggctcgataacatctgttcaatctacagtctcaaaacaagggaagggaatgtaagggtgtctagggagctgcccggacatactggttacttgagttgctgccgcttcctggacgataaccagatcattacctctagcggcgatacgacctgtgcattatgggatatcgagacagggcagcaaacagtgggcttcgctggccacagcggcgacgtgatgtccttatccctggcaccggacggacgtacctttgtcagcggtgcttgcgacgcgtcgattaaactctgggacgtaagggattctatgtgcaggcaaacgtttatcggacatgagtctgatattaatgctgttgccttctttcctaatggttacgcattcacaacaggcagcgatgacgccacgtgtcggtag

SEQ ID NO: 225481 - DNA, 828 bp, synthetic construct
  misc_feature 1..828: note = Description of Artificial Sequence: Synthetic coding sequence
  source 1..828: mol_type = other DNA
atgagcgccgaggtcaaagtgactggtcagaatcaggagcaatttttactgctggccaaatccgctaaaggcgctgccctggcgaccctgattcaccaggtgctcgaagctcccggagtctacgtgtttggcgagcttctagacatgcccaatgtcagggaacttgcggaatcagactttgcgtccacttttaggctgctgactgtgttcgcctatggcacctatgcagattatctcgctgaagcgcgtaatctccctccactgaccgaagcccagaagaacaaactgcggcacctctccgtcgtgactctagccgcaaaggtaaagtgcatcccgtacgcagtcctgttagaggcactggccctccgaaacgttcggcagcttgaggatctggtcatagaagctgtttatgccgatgtcctccgaggatcgctcgatcagagaaaccagcgcctcgaggttgactacagcataggtagggacattcagcggcaagacctgtcagccattgcgaggaccctccaagagtggtgtgtgggttgcgaagtagttctttccggtatcgaggaacaagtgtcaagggccaaccagcacaaggaacagcagctgggcctcaaacaacagatagaatcggaagtggccaatctgaaaaagaccatcaaggtcaccaccgccgcagctgcggcagcaacgtcgcaagatccagaacaacaccttactgagctccgcgaaccagccccaggcacgaatcaacgacagccatctaaaaaagcgtcgaagggtaagggcctgaggggtagcgctaagatatggtccaaatctaactag

SEQ ID NO: 225482 - DNA, 387 bp, synthetic construct
  misc_feature 1..387: note = Description of Artificial Sequence: Synthetic coding sequence
  source 1..387: mol_type = other DNA
atgacgagtttattcgcccaggagatacggttgagtaagcgtcacgaagagatcgtgagtcagcgattaatgctgctgcagcagatggaaaacaagttgggcgaccagcacactgagaaagctagtcagctacagacagtggaaaccgcatttaagcgaaacctttctttactaaaagatattgaagctgcagagaaatccctgcaaacgaggatacacccactacctcgccctgaggtggtgtccctcgagacaaggtattgggctagcgttgaggagtatatccctaaatgggaacagtttctgttgggacgagctccctatcctttcgctgtagaaaatcaaaatgaagccgagaataccattcagaacgaagcacaaagatag

SEQ ID NO: 225483 - DNA, 1023 bp, synthetic construct
  misc_feature 1..1023: note = Description of Artificial Sequence: Synthetic coding sequence
  source 1..1023: mol_type = other DNA
atgtccgaactcgagcagttgcgccaggaggcagagcagctgcgcaatcagatccaggatgcgaggaaggcctgtaacgacgcaaccctggtgcagatcacgtcaaatatggattccgtgggtcgcatacagatgcgcactcggcgtacactcagaggccatctggccaaaatctatgccatgcattggggctacgattctcgtctgctcgtcagtgcctcacaggatgggaagctcattatctgggacagttatacaaccaacaaaatgcacgcaattcctttgcggagcagctgggtgatgacctgcgcctacgctccctcagggaattacgtggcatgtggaggattggataacatttgttctatttacaacttaaagacccgggagggcaacgtccgggtgagtcgcgaattgccaggccacaccggctatctgtcttgctgtaggttcctggacgacagccaaatagtcacatccagtggggatactacttgcgcattgtgggatatcgagactgcccagcagactacgactttcaccggccacagtggggatgttatgagcctgtctctctcacccgatatgagaacgttcgtcagcggggcttgtgatgcctctagtaagctttgggatatccgcgacggtatgtgtcggcagtcctttaccggccatgtatccgatattaatgcagtgagcttttttccgaacggttatgcctttgctactggatccgatgacgccacttgtcggctctttgacttgcgtgcagatcaggagctattgctgtattcgcacgataatataatctgtggcataacctcggtggccttctccaaatccgggaggctgctactggccggatatgacgacttcaactgcaatgtctgggatactctgaagggagacagggcaggtgttctcgctggccatgataaccgggtgtcatgtctcggtgtcacagatgatggtatggccgtggctaccgggagctgggacagttttctcaggatttggaattag

SEQ ID NO: 225484 - DNA, 240 bp, synthetic construct
  misc_feature 1..240: note = Description of Artificial Sequence: Synthetic coding sequence
  source 1..240: mol_type = other DNA
atgtctgaattggagcagctgcggcaggaggctgaacagcttagaaatcagatccaggacgccaggaaggcatgcaatgatgcgaccctcgtccaaataactagtaacatggactcggtgggcagaattcagatgcgcacacggaggacgctgaggggacatcttgcgaagatttacgcaatgcattgggggtacgatagcagattattggtcagtgcttcccaggatggcaagctgtag

SEQ ID NO: 225485 - DNA, 204 bp, synthetic construct
  misc_feature 1..204: note = Description of Artificial Sequence: Synthetic coding sequence
  source 1..204: mol_type = other DNA
atggaggaatgggatgtgccacagatgaaaaaagaagtcgaatccttaaagtaccagctagctttccagcgggaaatggccagtaaaacaatccctgaactgctcaaatggattgaagacggcattcccaaggacccttttctgaaccctgatctaatgaaaaacaatccctgggtagagaaggggaagtgcaccatcctatag

SEQ ID NO: 225486 - DNA, 216 bp, synthetic construct
  misc_feature 1..216: note = Description of Artificial Sequence: Synthetic coding sequence
  source 1..216: mol_type = other DNA
atggcatctaataatacagcaagtattgcgcaggctcgcaaactagtggagcagttaaagatggaggccaacattgatcgtataaaggtatctaaggccgcagcagacctgatggcctattgcgaggctcatgcgaaagaagatcctctcctcacgccagttccagcctccgaaaacccatttcgagaaaagaagttcttttgcgcaattttgtag

SEQ ID NO: 225487 - DNA, 309 bp, synthetic construct
  misc_feature 1..309: note = Description of Artificial Sequence: Synthetic coding sequence
  source 1..309: mol_type = other DNA
atgcagggcaagctgcaaccccctatggaacgcgaggcacgggacggtgttcctagcgggaaagtcttcctcaaggacctttcttctactccgatggcctccaacaacacagccagcatcgcgcaggcaaggaagctggtcgagcagctgaaaatggaggctaacatcgacagaatcaaggttagcaaggcggctgccgatctcatggcatactgcgaggctcatgccaaagaggacccactacttacgcccgtgccagccagtgaaaacccattccgtgaaaaaaagtttttttgcgctattctgtag

SEQ ID NO: 225488 - DNA, 216 bp, synthetic construct
  misc_feature 1..216: note = Description of Artificial Sequence: Synthetic coding sequence
  source 1..216: mol_type = other DNA
atggcctctaacaatacagcctcgatcgcccaggcacggaagttggttgagcaactcaagatggaggccaacatcgaccgcattaaagtctcaaaggctgccgcagatcttatggcctactgcgaagcacacgcaaaagaggatccattactgacgcccgtccctgcctctgaaaacccattcagagaaaagaagttcttttgtgccatcctatag

SEQ ID NO: 225489 - DNA, 216 bp, synthetic construct
  misc_feature 1..216: note = Description of Artificial Sequence: Synthetic coding sequence
  source 1..216: mol_type = other DNA
atggccagcaataatacagcctctattgcgcaagccaggaaactcgtagagcagctcaagatggaggccaacatcgatcgcataaaggtgagcaaagccgctgccgacctcatggcgtactgcgaggcccatgccaaggaggatcccctcttgacgcccgtgccggcaagtgagaaccctttcagagaaaaaaagttcttttgcgcgatcctgtag

SEQ ID NO: 225490 - DNA, 216 bp, synthetic construct
  misc_feature 1..216: note = Description of Artificial Sequence: Synthetic coding sequence
  source 1..216: mol_type = other DNA
atggcatccaataatactgcctctatcgcccaagcaagaaagttggttgaacagttaaaaatggaggcaaacatagatcggatcaaagtgtctaaggcggcagccgacctgatggcttactgcgaagcccacgctaaggaggaccctctgctgacacctgtacctgcatccgaaaaccccttccgggaaaaaaagtttttctgcgccatcctatag

SEQ ID NO: 225491 - DNA, 216 bp, synthetic construct
  misc_feature 1..216: note = Description of Artificial Sequence: Synthetic coding sequence
  source 1..216: mol_type = other DNA
atggcctccaacaacacagcaagcatagcccaggcccgaaagctggtagagcagctgaagatggaggcaaatatcgatcgcatcaaagtttctaaagcagctgcagatctgatggcatactgtgaggcccacgcgaaggaggaccctttgcttacgcccgtccctgcgagcgaaaacccttttagggagaagaagttcttttgcgcaatactgtag

SEQ ID NO: 225492 - DNA, 333 bp, synthetic construct
  misc_feature 1..333: note = Description of Artificial Sequence: Synthetic coding sequence
  source 1..333: mol_type = other DNA
atggtttatttgcaggccaagacacgcattccagagcacagaaaggtaacccagttgattaagtgttggtcaccagatctgaacccggtgtttctaaaagacctatcgtccacgccgatggcttcaaacaatacggcttccattgcacaagcgagaaaactggtggagcagctgaagatggaagccaacatagaccgtattaaggttagtaaagcggcagcagatctaatggcctattgtgaggctcatgctaaggaggatcccttgttgacccccgttcccgcatcagaaaatccatttcgcgagaagaagtttttctgtgccattctttag

SEQ ID NO: 225493 - DNA, 207 bp, synthetic construct
  misc_feature 1..207: note = Description of Artificial Sequence: Synthetic coding sequence
  source 1..207: mol_type = other DNA
atgtccggtagctcttccgttgcagctatgaagaaggtggtccagcagcttagactagaggccggtctcaacagagtgaaagtatcacaggcagctgcggacttaaagcagttctgtctacagaacgcgcagcacgatccactacttacaggagtgagctcttcgaccaacccttttcggccacaaaaagtgtgctcttttttgtag

SEQ ID NO: 225494 - DNA, 207 bp, synthetic construct
  misc_feature 1..207: note = Description of Artificial Sequence: Synthetic coding sequence
  source 1..207: mol_type = other DNA
atgagtggatcttcctccgtggccgcaatgaaaaaagtggtccagcagttgcgtctcgaggctggcctgaatcgtgtgaaggtgagtcaggccgctgctgatctgaaacagttctgcctgcagaacgcccaacacgatccattgctcacaggtgtctcatcatccacgaatcctttcaggccacagaaggtttgtagttttctgtag

SEQ ID NO: 225495 - DNA, 225 bp, synthetic construct
  misc_feature 1..225: note = Description of Artificial Sequence: Synthetic coding sequence
  source 1..225: mol_type = other DNA
atgccggtgataaacatagaggatctgacggagaaggacaagctcaagatggaagtggaccagctgaaaaaagaagtcacgctggaacggatgcttgtaagcaaatgctgcgaagaggtgcgagactacgtcgaagagcggagcggggaggatcccctggtcaagggaattcctgaagataaaaatccttttaaggaactcaaaggaggctgtgttatctcctag

SEQ ID NO: 225496 - DNA, 225 bp, synthetic construct
  misc_feature 1..225: note = Description of Artificial Sequence: Synthetic coding sequence
  source 1..225: mol_type = other DNA
atgcccgtcattaacattgaagatctcacagaaaaggacaagcttaaaatggaggtggaccagctcaaaaaagaggtgactcttgaacgcatgctcgtgtccaagtgttgcgaggaagtaagagattacgttgaggagaggagtggtgaagaccctttagtgaagggcataccagaggacaaaaacccttttaaagaactgaaaggaggctgtgtgatctcatag

SEQ ID NO: 225497 - DNA, 210 bp, synthetic construct
  misc_feature 1..210: note = Description of Artificial Sequence: Synthetic coding sequence
  source 1..210: mol_type = other DNA
atggcccaggatctttccgaaaaagacctgttaaagatggaggtggaacagcttaagaaagaggtcaagaacactcgcataccaatctccaaagcagggaaagaaattaaagaatatgtcgaggctcaagcaggcaacgaccctttcctgaaagggatcccagaagacaagaacccgtttaaagagaaaggcggatgcctgatctcttag

SEQ ID NO: 225498 - DNA, 210 bp, synthetic construct
  misc_feature 1..210: note = Description of Artificial Sequence: Synthetic coding sequence
  source 1..210: mol_type = other DNA
atggcgcaagatctgtccgagaaagatcttctgaaaatggaggtcgagcagctgaaaaaagaagtgaaaaacacacgaattccgatttcaaaggctggcaaggaaatcaaagaatacgtggaggcccaggccggtaacgacccttttttgaaaggcatccccgaggacaagaatccgttcaaagagaagggcggttgcttgataagttag

SEQ ID NO: 225499 - DNA, 210 bp, synthetic construct
  misc_feature 1..210: note = Description of Artificial Sequence: Synthetic coding sequence
  source 1..210: mol_type = other DNA
atggcccaagatttatccgagaaagatctcctgaagatggaggttgagcagttgaaaaaggaggtaaaaaacaccaggattccgataagcaaagctggcaaagagatcaaggagtacgtggaggcccaggccggaaacgatccatttcttaaggggattcccgaagacaagaacccgttcaaagaaaagggcggatgtttgattagttag

SEQ ID NO: 225500 - DNA, 210 bp, synthetic construct
  misc_feature 1..210: note = Description of Artificial Sequence: Synthetic coding sequence
  source 1..210: mol_type = other DNA
atggcccaagatctgtccgaaaaggacttgttgaaaatggaggtcgaacaacttaaaaaggaggtgaagaataccaggattcctatcagcaaagcaggtaaggaaattaaggagtacgtggaagcccaggcagggaatgatccttttcttaaaggaattcctgaggataaaaatcccttcaaagaaaagggaggctgccttatttcttag

SEQ ID NO: 225501 - DNA, 210 bp, synthetic construct
  misc_feature 1..210: note = Description of Artificial Sequence: Synthetic coding sequence
  source 1..210: mol_type = other DNA
atggcccaggatctttcagagaaggacttactgaagatggaggttgaacagctcaagaaggaggttaaaaacacaagaattcccatcagcaaagccggaaaagaaatcaaagaatacgtggaagcacaggccggaaacgatccattcctgaaaggaatcccggaggacaaaaacccttttaaggagaaggggggatgcctgatatcttag

SEQ ID NO: 225502 - DNA, 1080 bp, synthetic construct
  misc_feature 1..1080: note = Description of Artificial Sequence: Synthetic coding sequence
  source 1..1080: mol_type = other DNA
atgacgctggagtctatcatggcttgctgtctgtctgaggaggcaaaagaggccaggaggataaatgacgaaatcgaaaggcaactgagacgcgacaaacgcgatgccagacgcgaactaaagttgctgctcctgggcaccggcgagagcggcaagtcaacgtttattaaacagatgcgcatcattcacggcagtgggtattcagatgaagataaaaggggatttacaaagctcgtttatcagaatatctttacagccatgcaggcaatgatccgggcaatggataccttgaaaatcccgtacaagtatgagcacaataaagcacatgctcagctggtgagagaggtggatgtggagaaagtgtcagccttcgagaacccatatgtcgacgcgatcaagagcttatggaacgaccctggcattcaggagtgttatgatcgacgcagggaataccagctgtccgattccaccaagtattacttaaacgacttagaccgcgtggccgatccagcctatctgccgacccagcaagacgtgctcagagttagggtgcctactaccggaatcatcgaataccccttcgacttgcagagtgtgattttcagaatggtggatgtaggcggacaacgttccgagcgtcgcaaatggatccactgcttcgaaaatgtgacatcaatcatgtttcttgtggctctgagcgaatatgatcaagtactggtagaaagcgataatgagaaccggatggaggagtcaaaggccctcttccgtaccatcatcacctacccttggttccaaaacagtagcgttattctctttttaaacaaaaaggatctcctggaggagaaaataatgtattcccatcttgtggattatttcccagaatacgacgggccacagagggatgcgcaggctgcaagggagtttattctcaaaatgtttgtagacctcaatcccgattcggataagatcatatatagccacttcacgtgtgcaaccgacactgaaaatatccgatttgtctttgcggctgtgaaagacaccatcctgcagctcaatttgaaggaatacaacctggtatag

SEQ ID NO: 225503 - DNA, 474 bp, synthetic construct
  misc_feature 1..474: note = Description of Artificial Sequence: Synthetic coding sequence
  source 1..474: mol_type = other DNA
atggttgatgtgggcggtcaacgaagcgaacgaaggaagtggatccactgtttcgagaacgttacatcaatcatgtttttggtagctctatccgagtatgaccaggtcttggtggaaagtgacaacgaaaataggatggaagaaagtaaagctctgtttcggacaatcatcacctacccctggttccagaacagctctgtcatcctgttcctaaacaagaaggacctactcgaagagaagattatgtacagtcacctagtggactacttccctgagtacgacgggcctcaaagggacgctcaggcggctcgggagtttatactgaagatgttcgtcgatctgaacccagacagtgataagattatctatagtcactttacttgtgccaccgacacggaaaatatccgctttgttttcgccgcagtgaaggacaccatactacagctcaatctgaaggagtacaatctggtgtag

SEQ ID NO: 225504 - DNA, 513 bp, synthetic construct
  misc_feature 1..513: note = Description of Artificial Sequence: Synthetic coding sequence
  source 1..513: mol_type = other DNA
atgggggaacgctgggccgattcacagttagatagccggtctacacacggtacgggcgaatcagggaagagcacgttcattaagcagatgagaataattcacgggtctgggtactcggacgaggataaacgcggattcacaaagttagtataccaaaacatatttaccgccatgcaagccatgatcagagccatggatacattaaagatcccttataaatacgagcacaacaaggctcatgcccagctggtcagggaggtggacgtggagaaggtgtcagccttcgagaatccctacgtcgacgccataaaaagcctgtggaatgatcctggtatccaggagtgctatgatcgcaggagagaatatcaactgagcgattccacaaaatactatctcaatgatctcgatagagtggctgatccagcatacctacccacacagcaggacgtgttgcgggtgcgggtgcccactaccgggattatcgaataccccttcgacctacagtccgtgtag

SEQ ID NO: 225505 - DNA, 1824 bp, synthetic construct
  misc_feature 1..1824: note = Description of Artificial Sequence: Synthetic coding sequence
  source 1..1824: mol_type = other DNA
atgccgaggaagaagcccttttcagttaagcagaaaaagaaacaattacaggacaaacgcgaaaggaagaggggccttcaggatggcctccggagctcctctaacagtcggagcgggagccgcgagcgacgggaagagcaaaccgacacttcagatggagaaagcgttacacatcatattcgcaggctgaaccaacagccctcccaggggctgggccctcggggatatgatccaaacaggtatcgcctacatttcgagcgcgactccagagaagaggtggaaagaaggaaacgggcagccagagagcaggtgctgcagccagtttctgccgagctgcttgaactggatattcgagaagtttaccagccgggaagtgttttggactttccgcgacgccctccttggtcctacgagatgtctaaggaacagctcatgagccaggaggaacgcagttttcaggattatctggggaaaatccatggggcttactccagtgagaaattgtcgtattttgagcataacctggaaacgtggaggcaactgtggagagtgctggagatgagtgacatcgtgctcctgattacggatattaggcaccccgttgtcaacttcccacccgctctgtacgagtatgtgactggagaacttggactagccctcgtcttggtgctgaacaaagtcgatctggcacccccagcgctggttgtagcctggaaacactatttccatcaacattacccccagttgcatgtggtgctgtttacctctttcccacgcgacccccgaacacctcaggatcctagttcggtccttaaaaagtctagaagacgaggccgtggctggacccgggctctcggcccagagcagttactcagagcttgtgaggccatcaccgtgggtaaggtggatctttcatcatggcgggaaaagatcgccagagacgtggccggagcgacttggggaaatggttccggtgaggaggaagaggaggaggacgggccagcagtgcttgttgagcagcaaactgattctgccatggagcccacggggcctacacaggagaggtacaaggatggggtagtgactattggctgtgtgggattccctaatgttggcaagagctcactgatcaacggactagtaggaagaaaggtagtgagtgtctcacgaacgcccggacatacccggtacttccagacctacttcctgacgcctagcgtcaagctctgtgattgtccaggccttatcttcccatcactgctgcctcgccagctacaggttctcgccggtatctatccaatcgcccagatccaggagccgtatactgccgtcggatacctggcttcacgcatcccagttcaggctttgctgcatctgcgtcaccccgaagccgaggatccatccgctgaacacccttggtgcgcatgggatatctgcgaagcctgggcggagaagcggggatataagaccgcgaaggctgctcgcaatgatgtgtaccgtgctgctaacagcctcctcagactggctgtcgatgggagactcagcttatgcttccacccaccaggctatagcgagcagaagggcacctgggagagtcatccagagactacagagctcgtggtactgcaggggagggtggggcctgccggagatgaggaagaggaggaggaggaagaactgtccagtagttgtgaggaggagggggaagaagacagggatgcagacgaagagggcgagggcgacgaggaaactcctacctctgctcctggctctagcctcgccggtcggaatccgtacgcactgctgggcgaagatgaatgttag

SEQ ID NO: 225506 - DNA, 1224 bp, synthetic construct
  misc_feature 1..1224: note = Description of Artificial Sequence: Synthetic coding sequence
  source 1..1224: mol_type = other DNA
gtggtgaatttcccccctgctctgtatgagtatgttacaggcgaactcggcctcgctctcgtcctcgtgttgaataaagttgatctcgcccctcccgcactcgtggtcgcgtggaaacactacttccaccagcattacccccagctgcacgttgtgctcttcaccagctttccaagggacccccgtacacctcaggatccgagcagcgtgctgaaaaagtcacgcaggagagggaggggatggacgcgtgcactcggccctgaacaactcctaagggcatgtgaagccattactgtgggtaaggttgacctgtcatcatggcgggagaagattgctcgcgacgtggctggagctacctgggggaatggatctggggaagaagaggaagaagaagacgggccagccgtgttagtggagcagcagactgactcagcaatggagcccactggtcccactcaggagagatataaggacggggtggtgacaattgggtgcgtaggctttcccaacgtaggcaagagctctctgatcaatggactggtggggcgaaaagtagtatccgtctcgagaacaccaggtcacacaagatatttccagacctattttttgacaccgagtgtgaagctctgcgactgccccggattgatcttcccatcgttactgccacgccagttgcaagttttggcaggcatctaccccatcgcacaaatccaggaaccctacaccgccgtcggctacctggcatctcgcatacccgtacaggccctcctgcatcttaggcaccccgaagctgaggatccctctgctgagcacccatggtgcgcctgggacatctgcgaagcctgggccgaaaagcgcggatacaagactgcgaaagcagccaggaatgatgtataccgcgctgccaacagcctcctacgccttgccgtggacggccgtctgagtctgtgttttcaccctccgggttattccgaacagaaaggcacatgggaaagccaccccgagacgaccgagctagttgtcctgcagggtagagtgggcccagctggcgacgaggaagaggaggaagaagaggaattgtctagctcgtgcgaggaagaaggggaggaagatcgcgatgccgacgaagagggagagggggacgaggagactcctaccagtgcccctgggtcaagcctggcgggtaggaatccctacgccctgttaggagaggatgaatgctag

SEQ ID NO: 225507 - DNA, 1824 bp, synthetic construct
  misc_feature 1..1824: note = Description of Artificial Sequence: Synthetic coding sequence
  source 1..1824: mol_type = other DNA
atgccccgaaaaaaacccttcagtgtgaagcagaagaaaaaacaactgcaagacaaaagggagcgcaaaagaggcttgcaagacggtctgcgatcatctagtaactctagatctggatcgcgagagaggcgcgaagagcagacggatactagcgacggtgaatccgtcacgcaccatatcaggagactcaaccagcagccctcacagggattgggaccgaggggatatgatccaaatcgctaccggctccacttcgaacgcgatagtcgcgaggaggtcgagcgtaggaagagggcagctcgggaacaagtgctgcaaccagtgtcagccgagctgctggagctcgacatccgagaagtgtatcaacccggtagcgtgctggattttccaaggagacctccatggtcctatgagatgtccaaggagcaactcatgtcgcaagaggagcgttcattccaggattacttaggaaagatccacggggcatattcctccgaaaaactgagttattttgaacacaatctggagacctggcgccaactttggagggtgttagagatgagcgatatcgttctcttgattacagacattagacatcctgtggtgaactttcccccagccctatatgaatatgttaccggcgagctaggcctcgctttagtactcgttttgaataaagtggacctcgctccacccgctttagtggtggcatggaaacactacttccaccagcactatccccagctccatgtggtactgttcaccagtttcccgagagacccacggacccctcaggaccccagctctgtccttaaaaaatctcggagacgagggagggggtggaccagagccctaggaccggaacagcttctgagggcatgcgaagcaataactgtgggaaaggtagacttgagctcctggcgcgaaaagatcgcacgggacgttgcgggtgccacctgggggaatggaagcggagaggaagaagaagaggaggatggaccagctgttctggtcgaacagcagactgattccgctatggagccaacaggtcccacacaggaacggtataaggacggggtcgtaaccattggatgcgtgggctttcccaacgtcggcaaaagttctctgatcaacgggttagtcggtcggaaagtagtttccgtgtccaggacccccggacatacccgttatttccaaacttacttcctgacaccctccgtaaaattatgtgattgtcctgggctaatttttcccagcctccttcccaggcagctgcaggttctcgccggtatctaccccatcgcccagatccaagaaccttacacagctgtaggatacctggccagccgaatccccgtccaggcacttctgcatctccgtcatcccgaagcagaggatccaagcgctgaacatccttggtgtgcttgggacatatgtgaggcgtgggcagagaaacggggttataaaaccgctaaagcggctagaaatgacgtgtaccgcgcagccaatagcttgctgcgattggcagtcgacggcaggctctccctgtgcttccatcccccaggatactctgagcagaaaggcacttgggaaagccatccggagacgacagaattggtggttctccaaggacgagttggtcctgcaggggatgaagaagaagaagaagaggaagagttatccagttcatgtgaggaggagggtgaggaggaccgggatgctgatgaagaaggtgaaggggacgaggaaacccctacatccgcaccgggatcttccctggccggacgcaacccatatgccctactgggggaagatgagtgctag

SEQ ID NO: 225508 - DNA, 795 bp, synthetic construct
  misc_feature 1..795: note = Description of Artificial Sequence: Synthetic coding sequence
  source 1..795: mol_type = other DNA
atgggggagagagtgctgtggcccctgcgtgccggacagcactggaggcaccgaccattgcccgctggcctgcaggacggcctgcgctcatcaagcaattcacgatctggttcaagggaacggcgagaagaacagactgacaccagtgatggggagtccgtgacacatcatatacggcgtctgaatcaacagcctagccagggcttaggccctaggggatatgaccccaatcgctaccgcctgcatttcgaaagagactcacgtgaagaggtcgagcggaggaaaagggccgcacgtgaacaggtgctgcaaccagtaagtgcagaactgcttgaactggatattcgcgaggtgtaccagccaggctctgtgctagattttccacggagacccccttggagctacgagatgagcaaggagcagctgatgtcacaggaggagagatcctttcaggattacttgggtaagatccacggagcctattcatccgagaaattgtcgtatttcgaacataacttagaaacgtggagacagctctggcgggttctggagatgtctgacattgtattactcattacagatatacggcatcctgtcgtgaactttccccctgccctctacgagtatgtcaccggagagctgggactggcactggtgcttgtcctcaacaaggtagacttagctcctcctgctctcgtggttgcctggaagcactattttcatcagcattacccgcagctccacgtggtattattcaccagcttcccgagggaccccagaacaccccaagattag

SEQ ID NO: 225509 - DNA, 1824 bp, synthetic construct
  misc_feature 1..1824: note = Description of Artificial Sequence: Synthetic coding sequence
  source 1..1824: mol_type = other DNA
atgcccaggaaaaagcccttctcagttaaacagaagaagaagcagttgcaagacaaacgggagaggaagcggggactgcaggacggcttgcgttctagttcaaattcaaggtccggaagccgggagcgacgcgaggagcagacggatacaagcgatggcgagagcgtaacacaccatattcggagactgaaccagcagcctagccagggactcggtccgagagggtacgacccaaatcgatacagattgcatttcgagcgggactctcgtgaagaagtggagagacgcaaacgcgctgcccgtgagcaggttttacagcctgtttctgctgaactcctcgaactggacatcagggaggtctatcagccaggcagcgtgttagatttcccgaggcgacctccatggtcctatgagatgtccaaggaacaactcatgtcacaggaggagaggagtttccaagattatctgggcaagattcacggtgcgtacagtagcgaaaagctctcttactttgaacacaatctcgaaacatggcgacagttgtggcgagtgctggagatgtccgacatcgtgttgctaataaccgatatacgccacccagtggtgaacttcccacctgcactctatgaatatgtaacaggagagctgggactggcccttgtgctagttctaaacaaagtggacctggctccacccgctcttgtagtggcttggaagcactatttccaccaacactatccccaactccatgttgtactttttacgagcttccctagagacccacggaccccccaggacccaagttccgtcctgaagaaatccagacgcagaggaagaggctggacgcgggcattgggcccagagcaactccttcgcgcttgcgaagcaatcacagtgggcaaggtggatttgtccagctggagggaaaagatcgcgagagatgtcgcgggtgccacatggggaaatggatccggagaggaggaagaagaggaagatggaccagcagtccttgtagaacagcaaacagattccgctatggagcccacgggacccacccaggagaggtacaaagacggcgtggtgaccatagggtgtgtggggtttccaaatgtgggaaagtcgtctttgatcaacggcctggtaggccgaaaggttgtcagtgttagtcggacacctggccacacacgttactttcaaacctacttcctaactccatcagttaaactctgcgattgtccaggccttattttcccttccttattaccacggcagctacaagtgctggctggtatctaccctattgctcaaattcaagaaccatacacagcagtggggtacctcgctagtcggatacccgtgcaggcactgctccatctacgacatcctgaggcggaagacccatcagcagagcacccctggtgtgcctgggacatatgcgaagcctgggctgaaaagcggggatacaaaaccgccaaagcagcgaggaacgacgtttaccgcgctgcgaattctcttctcaggttggcagtggacggcaggctctcgctctgcttccacccaccgggatattccgagcagaaaggcacttgggagtcccatcccgaaaccactgaactggttgtgctgcagggacgcgtcggcccagccggagatgaagaggaggaagaagaagaagagctgagttcctcatgcgaggaggaaggggaggaggaccgcgacgcagacgaagagggggaaggggatgaagaaacgcctacatcagcccctggatctagcctggccggtcgaaacccctacgcactgctgggtgaggatgaatgctag

SEQ ID NO: 225510 - DNA, 1290 bp, synthetic construct
  misc_feature 1..1290: note = Description of Artificial Sequence: Synthetic coding sequence
  source 1..1290: mol_type = other DNA
atggaggcagcagtggtgctggaaatgtcggatatcgttttgttaattacagatattagacaccccgttgtgaatttcccccctgccctatacgagtacgtgaccggcgaactggggctggccctggtgctcgtgcttaacaaagtcgacctggcccctcccgctttagtagtggcctggaaacactacttccatcagcactacccacagttgcacgtagtgttattcacttccttcccaagggaccccagaacccctcaagacccctcctccgttctaaaaaagtcccggaggcggggacgaggctggaccagggccttgggccctgagcagcttttacgcgcttgcgaggcgataactgtcgggaaagtcgatctgagctcctggagagagaagatcgcacgggatgtggctggagcaacctggggaaacggctcgggggaggaggaggaggaagaggatggcccagctgttctcgtggaacagcagaccgactcagcaatggaaccaactggacccacccaggaaaggtataaggacggagtcgtgaccattggatgtgtggggttcccaaatgtgggcaaatccagtttgattaacggcctggttgggcgaaaggttgtctcagtgtcccgaacccccggtcacactcgctattttcagacatatttcctgacacccagtgtgaagctctgcgactgccccggtttgattttcccgagcctcttgcccaggcagctccaagtgttagcaggaatttatcccatcgcgcagattcaagagccttacaccgcagtggggtatctggcctctaggatcccggtgcaggccctgctccacctgcgccaccccgaggctgaggatccatctgcagagcacccttggtgcgcctgggacatatgtgaggcctgggctgagaaaagaggctacaaaactgctaaggccgctaggaatgacgtgtacagagctgcaaattccttgctgagactcgcagttgacggacgcctgtctctatgttttcatcctcctggatatagcgagcagaaaggaacctgggaaagtcaccccgaaactactgagctagtggtactgcagggtagagtcggacccgctggcgatgaagaagaggaggaagaagaggaactttcaagctcctgcgaggaggaaggtgaggaggaccgcgatgcagacgaagaaggagaaggtgatgaagagactcccacttcagctccgggtagctcacttgccggacgaaacccctacgcgctgctaggagaggatgagtgctag

SEQ ID NO: 225511 - DNA, 1824 bp, synthetic construct
  misc_feature 1..1824: note = Description of Artificial Sequence: Synthetic coding sequence
  source 1..1824: mol_type = other DNA
atgcccagaaagaaaccattctcagtgaagcagaagaaaaagcagctgcaagacaagcgtgagagaaagcgaggactgcaagacggactacgcagttccagtaattcccgttctgggtcccgcgagcgaagagaggaacagactgacacaagcgatggcgaatccgtcacccaccacattcggcgactgaatcaacagcctagtcagggcctcggccctcgcggatatgacccaaacagatatagactgcacttcgagagggactcacgggaggaggtcgagaggaggaaaagagcagcacgagaacaagttttgcagcccgtgtccgccgagctgcttgagctggacattcgcgaagtttatcagccgggatctgtgctcgatttcccacgcagacctccatggtcttacgaaatgtctaaagaacagctcatgagtcaggaggaacggtctttccaagattatctgggtaaaattcacggggcttactctagtgaaaagctctcatacttcgagcacaatctggagacatggcggcagctgtggcgggtcctggaaatgtcagacatagtgctgttgataacagatatccggcaccctgtggtcaattttcctccagcgctgtacgaatacgtgaccggggagcttggcctggccctggttctcgtgttgaacaaagtcgacctggcacctcctgctcttgttgtcgcctggaagcactacttccatcagcactacccacagctgcacgtcgtgctcttcacatctttccccagagaccctcggacaccgcaagacccatcttcagtgttgaagaagtcacggcgtagaggaagaggatggacccgggcacttggtccagagcagttgttgagagcttgtgaggctattaccgtcggaaaggttgatctatcaagttggcgcgagaagatagcaagggatgtggccggtgctacctgggggaatgggtctggagaggaagaggaggaggaggatggccctgcagttctggtggaacagcagacggattctgccatggagcctacagggcctacacaggaacggtataaagacggggttgtcactatcggctgtgtgggatttcctaacgttggcaagagcagcttgattaatgggttagttggccgtaaagtagtcagtgtgtcaaggacgcccggtcacacccggtattttcagacttattttttaacccccagcgttaaactttgcgactgtccaggactgatattccccagcctcttacctaggcagttacaagtgctggctggtatctatcccatcgcccagatccaggagccttacaccgctgtgggctacttagcctcacgcattcctgttcaagctctactgcacctgcgtcatcctgaggccgaggatcctagcgcagaacacccctggtgcgcgtgggacatctgcgaagcctgggctgaaaagcggggatataaaaccgccaaggccgctagaaatgacgtctatcgcgctgctaactccctattgcgcctggctgtcgatgggcgattgagcctatgtttccacccacctgggtatagcgaacaaaaaggaacttgggaatctcaccccgagactactgaactcgtagtgctgcagggtcgggtgggacccgctggagatgaggaggaagaagaagaggaggagctgagtagcagctgcgaggaggagggcgaggaggatcgcgatgccgatgaggagggtgaaggcgatgaagagaccccaacatccgccccaggaagctcccttgccggaaggaacccctatgccctactcggggaggacgaatgctag

SEQ ID NO: 225512 - DNA, 1215 bp, synthetic construct
  misc_feature 1..1215: note = Description of Artificial Sequence: Synthetic coding sequence
  source 1..1215: mol_type = other DNA
atgagtaaggaacagctaatgtcgcaggaggagcggtccttccaggattacttgggtaaaatccacggagcctattcgtctgagaagttgtcatatttcgaacataatctggaaacatggagacaactgtggcgggtcttggagatgtcagatatcgtgcttctgattaccgacataaggcaccccgtggtcaatttcccgccagccttgtatgagtacgtgaccggggaactgggacttgcactggtgttagtccttaacaaggtggatttggcccctcccgctttggtggtcgcctggaagcactatttccatcagcattatccccagttacatgtggttctgttcacgtcattcccaagggatccgagaacaccgcaggatccctcatctgttttaaaaaaatcccgcaggaggggcagaggttggaccagggcactgggaccagagcagctgctgagagcctgtgaggcaataaccgtaggaaaaggattcccaaatgttgggaagtcaagcttaattaacggcctggtcggcagaaaggtagtttctgtgtccaggacacccggtcacacacgctactttcagacatatttcttaaccccgtccgtgaaactctgtgattgtcctggcctgattttcccatccctcctacccaggcaattgcaagttttagccggtatataccctattgcccaaatccaggaaccctacacagccgtaggttacttggcaagcagaatcccggtgcaagccttgctccacctgcgacatccagaagccgaggacccatccgccgaacatccctggtgcgcttgggatatctgcgaagcatgggcagagaaacgtggatataagacagcgaaagcagccaggaacgatgtgtacagggccgctaactccttattgaggttggccgtcgacggtaggctctcactttgttttcacccccctgggtattctgagcagaaaggcacatgggagagccatccagaaaccactgagctggttgtcctgcaggggagggtgggccctgccggagacgaagaggaagaagaagaggaagaactgtcaagcagctgtgaagaggagggcgaggaagacagagatgcagatgaggagggagagggcgatgaggagaccccaacatcagccccaggctcatccctggcaggtcgcaacccttacgcactcctcggtgaggacgaatgctag

SEQ ID NO: 225513 - DNA, 795 bp, synthetic construct
  misc_feature 1..795: note = Description of Artificial Sequence: Synthetic coding sequence
  source 1..795: mol_type = other DNA
atgggagaaagagtgctgtggccactgcgagccggacaacattggagacataggcccctgccagcaggattacaggacggcctccgcagctcatctaatagccggtctggatcacgcgagagaagagaggagcagacagatacttcagatggcgagtccgtgacacatcacatcagacggttgaaccagcagccttcccaaggcttgggtccacggggttacgaccctaataggtacagactgcattttgaacgggatagtagggaagaagtggagcggagaaagagggccgcaagggaacaagttcttcaacccgtgtccgccgaattactcgagctagatatcagggaggtctaccaacccggaagcgtgctggacttccccagaaggcctccttggagctacgaaatgtcaaaagagcagctgatgagtcaggaagagaggagctttcaggactacctgggcaaaatacacggcgcttatagttcagaaaaattatcttattttgagcacaacttagaaacctggagacaactatggcgagtgctcgagatgtccgatatagttctgctgattaccgacatacgtcacccagttgtgaatttcccacccgctctttatgagtacgttacgggcgagctggggctcgctctggttttggtcttgaacaaagtggacctggccccaccagccctggtggtggcctggaagcactactttcaccagcactatccgcaattgcacgtcgtcttgttcactagctttccacgcgatccaaggacaccccaggattag

SEQ ID NO: 225514 - DNA, 795 bp, synthetic construct
  misc_feature 1..795: note = Description of Artificial Sequence: Synthetic coding sequence
  source 1..795: mol_type = other DNA
atgggcgaaagggtgctctggccactccgtgcagggcagcattggaggcaccgccctctacccgcaggactgcaggatggcctgagatcatcttctaactccagaagcggatctcgggagcggagagaagagcagactgatacctccgatggagagtctgtgacacaccacatacgaagactgaatcagcaaccctctcagggtctgggccctcgaggatacgaccccaacagatatcgtctgcacttcgaacgggactcgagagaagaggtggagagaaggaaacgtgccgctagagaacaagtcttacagcccgtctctgctgaactcctggaactcgacattcgcgaagtctaccagcccggtagcgtcctggattttccgcgacgtcccccttggagttatgaaatgagcaaggagcagctgatgtctcaggaagagcggtccttccaggattatctgggcaagattcacggagcatactcctccgagaagctgagctatttcgaacacaacctagaaacttggcgccaattgtggagggtgctggagatgtctgacatcgtcttattgatcactgacattcgacatcctgtggtgaattttcccccagcgctgtacgaatacgtgacgggggagctcggattagcgctggtgttggttcttaacaaagtcgacctggctcctccggctctagtggtagcttggaaacattacttccaccagcattatccgcagctgcacgtagttctgttcacaagctttccgagggacccacgcacaccccaggactag

SEQ ID NO: 225515 - DNA, 795 bp, synthetic construct
  misc_feature 1..795: note = Description of Artificial Sequence: Synthetic coding sequence
  source 1..795: mol_type = other DNA
atgggagagcgagtcttatggccgctacgcgctggccagcactggagacaccgtcctctcccggcaggccttcaggatgggctgcgttcatcaagtaactcacgcagcggctcacgggaaaggagggaggagcagacagatacatccgatggcgagtccgtgacccatcatattagaaggttgaatcagcaaccctctcagggtctgggaccacgcggttatgaccctaatagatacagactccacttcgagagagattcacgcgaggaagtagaacgcaggaagcgcgctgctcgggaacaggtactccagccggtttccgctgagctcctggagctggacatcagggaagtgtaccagccgggatctgtcctcgatttcccaaggaggcctccctggtcctatgagatgagtaaggaacagctcatgtcgcaggaagagagaagctttcaggactatctgggcaagattcacggagcttattcaagtgaaaagctgagctacttcgagcataacttggagacctggagacagttgtggcgcgtcctggagatgtcggatatagtgttgctgataacagatattcggcatccagtcgtcaatttccctccagcactctatgaatacgtgaccggcgaactggggctggcactcgtactcgtcctgaacaaggtggatctggccccacccgctctggtagttgcctggaaacattatttccatcagcactaccctcagctgcatgttgtgttgtttacatccttcccacgcgatcccaggactccacaggactag

SEQ ID NO: 225516 - DNA, 1824 bp, synthetic construct
  misc_feature 1..1824: note = Description of Artificial Sequence: Synthetic coding sequence
  source 1..1824: mol_type = other DNA
atgcccagaaagaaacctttcagtgtcaagcagaaaaagaagcagctgcaggacaagagggagagaaagcgtgggctgcaggatggcctgagaagctcttctaacagccgctcaggatctcgggaaagacgagaggagcagactgatacatctgatggggaatcagttactcaccacatccgaagactgaaccagcaaccttcacagggcttgggccctcgcggttacgacccaaaccggtatcgactacacttcgaaagggactcgcgtgaggaagtggagaggcgtaaacgggcagccagggaacaagttcttcagccggtctcggctgagctgctcgaactggacatacgcgaggtataccaacccggatctgtgctagacttcccacgcagacctccctggtcatacgaaatgtctaaggaacagctgatgtctcaagaggagcggtcttttcaggattatctcggaaagattcatggggcttacagctcagagaagctgtcatattttgagcacaacctcgagacctggcggcaactgtggagagtgctggaaatgtcagatattgtactactcattacggacattcggcaccccgtagtgaactttcccccagctctctacgagtatgtcacaggcgagttggggctggctcttgttctggtgctaaataaagtagacttggctcctcccgctctggtagtggcctggaagcattacttccaccagcattatccccaactgcatgtcgttctgtttacttcattcccaagagacccgaggacacctcaagatccaagctccgtcttgaagaagtcacggagaagggggaggggctggacccgggctcttgggcctgagcagctcttaagagcttgcgaggcaattaccgtaggcaaggtagaccttagcagttggcgggagaagatcgcccgagacgtggcaggggctacctggggcaatggctctggtgaggaggaagaggaggaggacggacctgccgtcctggtagaacagcagactgattcggccatggagcccactgggccaacccaagagcgatacaaggacggagtggtgacgatcggttgcgtggggttcccaaatgtgggcaagagctccttgattaatgggcttgtcggaaggaaggtggtttcagtgagcagaacccctggacatacccggtacttccagacatacttcctgaccccatctgtgaagctgtgtgactgccctgggctaattttcccatcacttcttccgcgtcagctgcaagttttggcaggaatttatcccattgcccagatccaggaaccttacacagcggtggggtatctggctagtaggataccggtccaagctcttctgcacctccgacaccccgaggccgaagacccatccgccgaacacccctggtgcgcatgggatatctgtgaggcctgggccgagaagagaggatataagacagctaaggccgcaaggaatgatgtgtacagagcagctaactcacttctgcggttggccgtcgatggcagactctcattgtgctttcatccgcctggatacagcgagcagaaggggacatgggagtcgcaccccgaaacgaccgagcttgtcgttctgcagggtcgagtcggccctgcaggcgatgaagaggaggaagaggaagaggaactatcgagctcctgcgaggaggaaggagaagaagacagggatgcagacgaagaaggtgagggggatgaggagacgccaaccagcgcgccagggtcatctctggctggtcggaacccttacgcgctgttgggggaagacgagtgctag

SEQ ID NO: 225517 - DNA, 1824 bp, synthetic construct
  misc_feature 1..1824: note = Description of Artificial Sequence: Synthetic coding sequence
  source 1..1824: mol_type = other DNA
atgcccagaaagaagccatttagcgtgaagcagaaaaagaaacaacttcaggataagcgcgagagaaagcgcggtctacaggacggacttaggtcctcctcaaactctcggtcaggatcccgggagaggcgggaagaacagactgatacctcagatggcgaatccgtcacacaccatatccgaagattaaatcagcagccttctcagggcctgggccctagagggtacgaccctaatcgctacagacttcactttgaaagagactcccgtgaggaggtcgagaggcgaaaacgcgctgctcgggagcaggtcctgcagccggtctctgccgagctcctggagctggacatccgagaggtctatcaaccgggatcggttctggacttcccgagaagacctccctggtcttacgagatgagcaaagaacaactgatgtcgcaggaggaacggagcttccaggactacctgggaaagattcacggagcgtatagttccgagaagctgtcatatttcgaacacaatctggaaacctggcgccagctgtggcgtgttctcgaaatgagcgacatcgtactgctcatcactgatattcgtcaccccgttgtgaacttccctccggcactgtacgaatacgtaacgggggaactcgggcttgctttagttttggtgcttaataaggtggatctggcccctccagcccttgtagtcgcttggaagcactactttcaccaacattatccgcaacttcacgtcgtactcttcacatcgtttcccagggatcctcggacccctcaggacccctcatccgttttaaaaaagagccggaggcgcggtcgcggatggacacgtgccctcggaccagagcaacttttgcgagcttgtgaagccatcactgtagggaaggttgatctctcatcatggcgcgaaaaaattgcccgagatgtggcgggtgctacgtggggtaacggatcaggtgaggaagaggaagaagaggatgggcctgccgtgctggtggagcagcaaacagattcggccatggagccaaccggcccaactcaggagcgctataaagatggggtcgtgacgatcgggtgtgtcggatttccgaacgttggcaaaagctcacttataaatggccttgtcggtaggaaggtcgtgagcgtctcaagaactcctggacatactcgttattttcagacatattttcttacccctagtgttaaattgtgtgactgtcctgggctgatctttccttcattattaccacggcagctccaggtcctggctggcatatacccaatcgctcagatacaggagccttacacagccgtcgggtacctagcgagtaggattcctgtgcaggctctgttgcacctaagacaccctgaagcggaagacccctccgccgaacatccctggtgcgcctgggatatatgtgaagcttgggctgagaaacggggatataaaactgctaaagcggctaggaacgacgtctaccgtgccgctaattctcttttgcgtctcgctgtggacggcagattgtctctatgttttcacccacccggatacagcgagcagaaaggcacctgggaatctcatcccgagactaccgaactggtagtgctccagggccgagtgggtcccgctggggatgaggaggaagaagaggaagaggaactgtcctcctcttgtgaagaagagggtgaagaagaccgagatgcggatgaagagggagagggggatgaagagactcctacctctgccccaggatctagcctagccggaaggaacccctacgcgctgctgggtgaggatgaatgctag

SEQ ID NO: 225518 - DNA, 795 bp, synthetic construct
  misc_feature 1..795: note = Description of Artificial Sequence: Synthetic coding sequence
  source 1..795: mol_type = other DNA
atgggagaacgcgttctatggcccctacgggctggccagcactggcggcatcgccctctgccagcaggcctacaggacggcttgcgctcctcgagcaattcaaggagcggctctcgtgagcgccgtgaggagcaaacggatacttcagacggtgagtccgtgactcaccatatcaggcgcctcaaccagcagccttcccaggggcttggccctagaggctacgatccaaacagataccgtctgcacttcgagagagatagtcgggaggaggtagagagaaggaagagagcagccagggaacaagtgttgcagcctgttagtgcagagttgctggaactggatattcgagaggtgtaccagccaggatctgtcctcgattttcctagacgtccaccctggagctacgagatgtccaaggaacagctcatgagccaggaggagagatctttccaggattacctggggaagatccacggggcttacagttcagagaaattatcctatttcgagcacaacctagagacttggcgccagttgtggagagtgctggagatgagtgatatcgtactactcattaccgacattagacaccccgtcgtcaacttcccacccgcactctacgaatacgtcaccggagaattgggtttggctttagtgctggtgctcaataaagtggacctcgctccgccagccttggtcgtggcttggaaacactacttccaccagcactaccctcagctgcacgtggtgctgtttacaagctttccacgggatcctcggacgcctcaggattag

SEQ ID NO: 225519 - DNA, 795 bp, synthetic construct
  misc_feature 1..795: note = Description of Artificial Sequence: Synthetic coding sequence
  source 1..795: mol_type = other DNA
atgggagaacgagtgctgtggcccttgcgcgctggacagcactggagacatcgtccactcccagctggattacaggacggccttcgatctagttctaattctcgatccggatctcgagagaggagagaggagcagacagacacttcagacggggagagtgtaactcaccatatacgcagactcaaccagcagccaagccaagggctggggcctcgagggtatgatccaaaccgttatcggcttcattttgaaagggactcccgggaggaggtggagcgccgaaaacgagctgcacgtgagcaggtgctccaaccggtttctgccgagttattggagctagacattagggaggtctaccagcccggatcagtcctggactttcccaggaggcctccttggagctatgagatgtcaaaggagcagctgatgagccaggaggaacgctcattccaggattacctgggaaagattcatggggcatactccagcgaaaaactatcttatttcgaacataacctcgagacttggcgccaactctggagggtgctggaaatgtcagacattgttctgctcattacagacattagacacccagttgtgaactttccccctgctctctatgaatatgttaccggagagctcggactagctctggtcttagtcctcaataaggttgacctggcccctcctgccttggttgtggcatggaagcattacttccaccagcattacccccagctacacgtagtgctgttcacaagtttcccaagagacccacggacacctcaggactag

SEQ ID NO: 225520 - DNA, 1824 bp, synthetic construct
  misc_feature 1..1824: note = Description of Artificial Sequence: Synthetic coding sequence
  source 1..1824: mol_type = other DNA
atgcctcgcaagaagccgttttcagtgaagcaaaagaaaaagcaactccaggacaaaagagagagaaagaggggcctccaggacggtctccgatctagttccaatagtagatcaggctctcgcgaaaggcgcgaagaacagactgatacgtctgacggtgaatcagtgactcaccatatccgtcggctcaaccagcagcctagccaggggctcggaccaaggggatatgatccaaatagatatcggcttcactttgaaagggacagccgcgaggaagtagaacgtcgcaagcgagccgcaagagaacaggtccttcagcctgtcagtgctgagctgttggaactggacatcagagaagtttaccagccgggttctgtgctggactttcctaggagacctccgtggagctacgagatgtcaaaagagcagttaatgtcgcaagaggaacggtccttccaagactacctaggaaagatccacggagcatacagtagcgagaagctgtcctatttcgagcacaatctggagacttggagacagctgtggagggtccttgagatgtctgacattgtgctgctgatcacagatatccgacatccagtggtgaacttcccccctgccctgtatgaatacgtgacgggcgagcttggtcttgccctcgtgctggtcttgaacaaggtagacctggcacctccagccctggttgtggcttggaaacattatttccatcagcactaccctcaactccacgtggtgctttttacgagcttccccagggatcctagaactccacaggatccctcttcggttctaaagaaatccagaagacggggacggggttggactagagcgttaggaccagaacagctcctgcgggcttgtgaagcgataacggtgggcaaagtcgatttgtcttcctggagggaaaagatcgcgagggatgtggccggtgccacctgggggaatggttctggtgaagaggaggaggaagaggatgggcctgctgtccttgtagaacagcagacagactctgcgatggagcccaccggccctacacaagagcggtacaaggacggggtagtcacgatagggtgcgttggattcccaaacgtggggaaatcgtccttaatcaatggcctggtggggagaaaagtagtgtcggtgagccgcacccccggacatactagatattttcagacatatttcctgaccccctccgtgaaactctgcgactgccctggactgattttcccctccctgttaccgaggcaactgcaagtccttgctggaatctacccaatcgcgcagatccaggaaccctatacggctgtcggatacctcgcctcacgaatccctgtccaggcacttctgcatctacgacatcctgaggccgaagatccgtcagctgagcacccgtggtgcgcatgggacatatgtgaagcttgggccgagaagcgtggatacaagacagccaaggccgcaaggaatgacgtgtacagagccgctaatagtctactgcggctcgccgtggacggcagactatcactttgctttcacccccctggatatagtgaacagaagggtacctgggaaagtcaccccgagaccactgaacttgtggttctccagggcagagttggaccagctggcgatgaagaggaggaggaggaggaggagttgagctcctcatgtgaagaagagggcgaggaagaccgagacgcagatgaggagggtgagggggacgaggaaacccccacctcggcacctggctcttccctggctggacgaaatccttacgctctgctgggggaggacgaatgctag

SEQ ID NO: 225521 - DNA, 201 bp, synthetic construct
  misc_feature 1..201: note = Description of Artificial Sequence: Synthetic coding sequence
  source 1..201: mol_type = other DNA
gtggtgaactttccgcctgccctgtacgagtacgtgaccggtgagctgggcttggcactggttttagtactgaacaaggtggacctagccccaccagctctggtggttgcttggaagcactattttcatcagcattatccacagctacacgtcgtgctattcacgtccttccctagggaccctcgcactccacaagattag

SEQ ID NO: 225522 - DNA, 795 bp, synthetic construct
  misc_feature 1..795: note = Description of Artificial Sequence: Synthetic coding sequence
  source 1..795: mol_type = other DNA
atgggggagcgcgtgctgtggcccctgagggccggtcagcactggaggcaccggccattgcctgcaggcctccaggatggactccgtagcagtagtaattcccgctctggctctcgggagaggagagaggagcaaacggatacgagcgatggcgagtcggtgacccaccacatcagacgtctcaatcagcagcctagccagggcctgggtccaaggggttacgatcccaaccggtatagactgcactttgaacgtgattcaagagaagaagtggagcgacggaagcgcgcagccagagagcaggtgctccagcctgttagtgcggagctactggaattggatattcgcgaggtatatcagccaggaagcgtcctggactttcccaggaggcccccttggagctacgaaatgtcaaaggagcaattaatgagtcaggaggagagaagcttccaggactacctcggcaaaattcatggcgcttactcgagcgagaaattaagttactttgagcataacctcgagacctggaggcagctctggcgagtgctggagatgtccgatatcgtactgctcatcaccgacatccgtcatcccgtcgttaatttcccgcctgctctatacgaatacgtcaccggggaattgggccttgccctcgtgctcgtgctgaataaggttgatctggcaccacccgcactcgtggtagcatggaagcattatttccatcagcactatccccaacttcatgtagtactgttcacctcctttccccgagatccccgaacgccacaagactag

SEQ ID NO: 225523 - DNA, 1215 bp, synthetic construct
  misc_feature 1..1215: note = Description of Artificial Sequence: Synthetic coding sequence
  source 1..1215: mol_type = other DNA
atgagtaaggagcagttgatgtcacaggaggagcgcagcttccaggattatctggggaaaattcacggtgcctattcctctgaaaagctatcctatttcgagcataatttggagacatggcgccagttatggagggtgctcgagatgtccgacattgttctccttatcaccgacatccgacatcccgtggtgaatttccctcccgctctgtacgagtacgtcacaggcgaactgggccttgccttggtgctcgtgctgaataaggtggatctggccccacccgctctcgtggtcgcctggaaacattacttccatcagcactatccacaactgcacgtagtgcttttcacatccttccccagggaccctaggacccctcaagaccccagttccgtcctgaagaagagccgtagaagagggaggggctggacgcgcgctttgggtccagagcaactactgcgagcctgcgaggccattacagtcggaaaaggttttcccaacgttggcaagtcatcactgatcaacgggctcgttggccgtaaggtggtcagcgtttcccgcacaccaggccacacaagatacttccagacctatttcctgacaccgtccgtcaaactatgtgattgtcccggtctcatcttcccctcactgctgcctagacaacttcaggtgctggcgggaatctaccctattgctcaaatccaggagccatatacagccgtcggatacctggcctctcggattccagtgcaggctttactgcatctgagacacccagaggctgaagatccatccgccgaacacccctggtgcgcctgggacatttgtgaggcctgggcagagaagcgaggttacaagaccgctaaggccgctcggaatgacgtgtaccgggctgcaaacagtctcctgaggctcgctgtggacgggagacttagcctgtgctttcaccccccagggtactctgagcagaaaggcacatgggaaagccaccccgaaactaccgagttggttgttttgcaggggagggtgggcccagctggagatgaggaggaagaggaagaagaggagctttccagttcctgcgaggaggagggagaagaggatcgtgatgcagatgaggaaggggagggcgacgaagagacacccacctcggctccgggttccagcttggccggtcggaacccatacgcactccttggcgaggacgaatgttag

SEQ ID NO: 225524 - DNA, 789 bp, synthetic construct
  misc_feature 1..789: note = Description of Artificial Sequence: Synthetic coding sequence
  source 1..789: mol_type = other DNA
atggagccgactgggcctacccaggaacgctataaggacggcgtagttacaattggctgtgtgggcttcccgaacgtcggaaagtcaagtctaatcaacggccttgtgggtcgcaaagtggtcagcgtttccaggaccccaggtcatactagatatttccagacatacttcctcacaccaagtgttaaactctgtgactgcccgggtctgatcttcccctcacttttgcccagacagctgcaggtcctggcagggatttatcccattgcacagatccaggaaccatatacagcagtagggtacctggcgagccgtatacccgtgcaggctctgctccacctgaggcatccggaagccgaggatccaagtgctgaacacccgtggtgcgcgtgggacatctgcgaggcttgggccgaaaaacggggatataaaaccgctaaggcagcaaggaatgatgtctaccgggcagcgaactcgcttctgcgcctcgctgtggatggcagactgtcactgtgcttccaccccccagggtactcagagcaaaaggggacttgggaatcccacccagagacaaccgagttagttgtgttacaggggagagtaggaccagccggagatgaagaagaggaagaggaggaagagctgagctcgagttgcgaagaagaaggagaagaagatagagatgcagacgaggaaggcgagggagatgaggaaacacctacttccgcacccggaagctccctcgctggccgaaatccatacgcactgctgggagaagacgagtgttag

SEQ ID NO: 225525 - DNA, 789 bp, synthetic construct
  misc_feature 1..789: note = Description of Artificial Sequence: Synthetic coding sequence
  source 1..789: mol_type = other DNA
atggagcctaccggaccaacacaagagcgctacaaagacggcgtggtgactattggatgcgtaggcttcccgaatgtggggaagtcctcccttatcaacgggctcgtggggagaaaggtggtttcagtgagtcgtactccaggccacacaagatactttcaaacatactttttgaccccatcagttaaattgtgcgactgtcccggactgatctttcccagcctgcttcctaggcagctgcaagtgctcgccggaatttaccccatcgcacagatccaagagccttataccgctgtggggtaccttgccagcaggatcccagtgcaggcccttctgcacctgcgacatcctgaggcagaggatccctcagcagagcatccctggtgcgcctgggatatctgcgaagcatgggcagagaagaggggttataagactgcaaaagctgcaaggaatgatgtctatcgcgcagccaattcgctgctgcgccttgcagtcgacggacgccttagtctgtgcttccatccacccggttactctgaacagaagggaacctgggagtctcacccagaaacaacagaacttgtcgtgttacaggggagagttggaccagctggcgacgaagaagaggaagaggaagaagagttaagttcgtcctgtgaagaagaaggagaagaggatcgggacgccgacgaggaaggggaaggcgatgaagaaacaccaacgtcagctcccggaagtagcctggctgggagaaatccttacgctctgcttggggaggatgaatgctag

SEQ ID NO: 225526 - DNA, 1290 bp, synthetic construct
  misc_feature 1..1290: note = Description of Artificial Sequence: Synthetic coding sequence
  source 1..1290: mol_type = other DNA
atggaagccgcagtggtgctggagatgagcgacatagtcctgttgatcacggatatccggcaccccgttgtgaattttcctccagctctgtatgagtacgttacaggcgagttggggctggcattggtgctagtgctaaacaaggtagatctggctcctcctgcccttgttgttgcatggaagcattactttcatcaacactaccctcaactgcacgtggtactgttcacatcgtttccgcgtgatccacgcactcctcaggatccctcatctgttttgaaaaagtctaggcgcagggggcgaggctggaccagagcgctgggcccagagcagctgttgagggcttgcgaggcaattactgtcggtaaggtggacctctcttcctggagagagaagatcgcaagagacgtcgctggcgcaacctggggcaacgggagcggcgaagaagaagaggaggaggacggacccgctgtgctggtcgagcagcaaaccgactccgccatggagcccactggacccactcaggaacgctacaaagatggggtcgtgacgataggctgcgtagggttcccaaatgtcggaaaaagtagtctcatcaacgggctcgtgggccgaaaggtggtcagcgtgtcccgtacgcccggacacactcgctactttcagacatactttctcaccccctccgtcaaattgtgcgactgtccaggactcattttcccaagcctactgcctcgacagctgcaagtacttgccggtatatatcctatcgcccagatccaagagccatacacagccgtcggttacctggcctcgagaatccccgtgcaggctttactgcatctgagacaccccgaggcagaagacccctccgccgagcatccttggtgtgcatgggacatctgcgaagcctgggctgagaagcgcggatataaaaccgccaaagcagccaggaacgatgtatatcgggctgccaatagcttgttgcggctggccgtggacggacggctgagcttgtgcttccatcctccagggtactctgagcagaagggaacgtgggaatcgcacccagagaccaccgaattagtggtgctgcagggcagggtagggcctgcgggagatgaggaggaagaggaagaggaggaactgagtagcagctgtgaggaggaaggggaggaggaccgggacgctgacgaagagggagaaggagacgaggagacacctacatctgccccaggaagcagcctggccggtcgcaacccgtacgccctgctcggagaagacgagtgctag

SEQ ID NO: 225527 - DNA, 1215 bp, synthetic construct
  misc_feature 1..1215: note = Description of Artificial Sequence: Synthetic coding sequence
  source 1..1215: mol_type = other DNA
atgagtaaagaacagctgatgtctcaggaggaacgcagcttccaagattacctggggaaaatccacggggcttactccagtgagaagctgtcatattttgagcataacttggaaacatggagacagctgtggcgtgtccttgaaatgagcgatatcgtgctgctgatcacagacatacggcatccagttgtaaattttccgcctgccctttatgagtacgtgacaggagagttgggcctggcacttgtgttggtcctgaacaaggttgacctggcccctcccgcactggtggtcgcctggaaacactactttcaccagcactacccacaactccatgtcgtactttttacttcttttccgcgtgaccctcggaccccccaagatccttcctctgttttgaaaaagtcccggcgaagggggaggggatggaccagagcacttggccctgagcaactcctgcgagcctgtgaggctatcacagtgggcaagggattccccaacgttgggaaatccagcctgattaatggcctggtcggaaggaaagtcgtgtctgtctcaagaactcccggacatactagatatttccaaacatatttcctcacacctagcgtaaagctctgcgactgcccaggacttatctttccaagcctgctgcccagacagctgcaggtgctggccggtatataccctatagctcagatccaagaaccctataccgctgtggggtatttagccagcagaatccctgtacaggccctcctccacctacggcacccagaggccgaggacccatccgctgagcacccttggtgtgcttgggacatatgcgaggcctgggccgaaaaacgtgggtacaaaacggcaaaagccgcacgcaatgacgtctaccgcgcagctaattccttgctccgcctggcggttgatggcaggttgtctctgtgtttccaccctcccggttactccgagcagaagggaacatgggaatcccatcccgaaaccaccgaactggtggtgctgcaaggacgcgtgggtcccgctggtgatgaggaggaggaggaagaagaggagctctcttccagttgtgaagaggagggcgaggaagaccgcgatgccgacgaagagggcgagggcgacgaggaaacaccaacctccgctccgggtagtagcctcgcagggagaaacccctacgcgttactcggggaggacgagtgctag

SEQ ID NO: 225528 - DNA, 1215 bp, synthetic construct
  misc_feature 1..1215: note = Description of Artificial Sequence: Synthetic coding sequence
  source 1..1215: mol_type = other DNA
atgtcaaaagagcagctgatgtctcaggaggaaagatcgttccaggactacctgggcaagattcacggagcctatagcagcgagaaactttcttacttcgagcataaccttgagacatggaggcagctgtggagggtgctcgaaatgagcgacatcgtgctgctgattactgacatcagacatcctgtggttaattttcctcctgctctttacgagtacgtgaccggggagctcggtctggctttagtgctggtattaaataaagttgatctggccccacccgcactggtagtggcttggaagcattatttccatcagcactatcctcagttgcacgttgtgcttttcactagcttcccaagggacccaagaactcctcaggatcccagcagcgtcctgaagaagtctcggcgtcggggacgaggatggaccagggcgttgggccctgagcagctgctgagggcatgcgaagccatcacagtcgggaaggggttccctaacgtgggtaaatcctctctgatcaacggtctggtgggtcgcaaagtggtgtctgtaagccgcactccaggacacaccaggtacttccagacctattttttaacaccctccgtcaagctctgtgactgcccgggactgatattcccctcactcttgccaaggcagttgcaggtcctcgccggaatctacccgatcgcgcagattcaggagccatacacggccgtggggtatttggcatccagaattcctgtgcaggcacttcttcacctaagacatcctgaagccgaggacccttctgctgaacatccatggtgcgcgtgggacatctgcgaagcctgggccgagaagagaggttataaaacagctaaagccgctagaaatgatgtataccgcgcagctaactctctactgaggctcgccgtcgacggcaggctgagtctgtgtttccatccacctggttactccgagcagaagggcacctgggaatctcaccccgaaaccacagagctggtggttttacaggggcgagtgggtccagctggcgacgaggaggaggaggaagaggaagagttaagctcttcttgtgaagaggaaggcgaagaggaccgggatgcagatgaggagggggaaggcgatgaggaaactcccacatccgctccagggtcctctttagcagggaggaacccctatgccctactgggcgaggatgagtgttag

SEQ ID NO: 225529 - DNA, 789 bp, synthetic construct
  misc_feature 1..789: note = Description of Artificial Sequence: Synthetic coding sequence
  source 1..789: mol_type = other DNA
atggagcctactggaccgacacaagagaggtacaaggatggagtagttacaatcggatgtgttggctttcctaacgtaggaaagagctctctgattaacggtctcgtcgggcgtaaggtagtctctgtgtcacgcacacccggacataccagatacttccagacttactttttaacaccaagtgtgaagctctgtgactgccctggactgatctttccctcattactaccacggcagctgcaagttttggcgggaatctatcccatcgcgcagatccaggaaccgtatactgccgtgggatatctagcctcccggattcccgtccaggcactgctccacctgcgccatcctgaagctgaagatccaagcgcagagcacccgtggtgcgcctgggatatttgcgaggcttgggctgaaaaacgcggttataaaactgctaaggcagcccgtaatgatgtgtatcgggctgctaactcactgttgaggctcgccgtggacggtaggctcagcctttgcttccaccctcccggttactctgagcaaaagggcacttgggagagccaccctgaaacaacagaactagttgtgctacagggtcgggttgggcctgccggtgacgaagaggaggaagaagaggaggaattgagttcttcttgtgaggaggagggggaagaagatcgggacgcggacgaggagggggaaggagatgaggagacaccaacttcggcccctgggtcatcactcgccggtaggaatccctacgcactgcttggcgaggatgagtgctag

SEQ ID NO: 225530 - DNA, 1290 bp, synthetic construct
  misc_feature 1..1290: note = Description of Artificial Sequence: Synthetic coding sequence
  source 1..1290: mol_type = other DNA
atggaagccgctgttgtgctggaaatgagcgatatcgttttgctgattaccgatatccggcatccagtcgtgaacttcccaccagccttgtatgagtatgtgaccggggaactgggccttgccctagtacttgtcctcaacaaagttgacttggcccctccagcgctggtggtggcttggaaacactacttccaccagcattatcctcaacttcacgtggtcttgttcacttcctttccgagagaccccaggacccctcaggacccctccagcgtgctgaagaagtcacgtcgccgaggcagggggtggaccagagccctcgggccagagcagctcctgcgagcttgtgaagccatcacagtgggaaaagttgacctgtcttcatggcgggaaaaaatcgctcgggatgtggctggagctacgtggggaaatggaagtggagaagaggaagaggaagaggacggccctgctgtgctggtggagcagcagacagattctgcaatggagcctacagggccaacccaggagaggtacaaggacggcgtagtaacaatcgggtgtgtgggattccccaatgttggcaaaagcagtctgatcaacggcttagtggggcgaaaggtcgtgtctgtttcccgaacacctggccacacgcgctactttcaaacatacttcctaaccccatctgttaagctttgcgattgcccgggtctgatcttcccctccctactgcccaggcagctgcaagtgctggctggcatatatccaatcgcccagatacaggaaccatacaccgcagtcggttaccttgcctcccggattccagttcaagctcttctccatctccggcaccctgaggcggaagacccgagcgccgagcatccatggtgcgcctgggatatctgcgaagcatgggccgaaaaacgtggatataaaaccgctaaggcagccagaaatgacgtgtatagagccgcaaattcgctgctacgcttagccgttgacggcagactttccctctgcttccacccaccagggtactccgaacagaagggaacctgggagagccaccccgagacaactgaattggttgtcctccaaggaagagtcggcccagccggagacgaagaagaagaggaggaagaagagctgagctcatcttgcgaggaagagggcgaagaggaccgcgacgccgacgaagaaggcgaaggcgacgaggagactcccacttctgcaccaggaagctctctagccggtcgaaacccctatgccctgctgggggaggacgaatgctag

SEQ ID NO: 225531 - DNA, 1290 bp, synthetic construct
  misc_feature 1..1290: note = Description of Artificial Sequence: Synthetic coding sequence
  source 1..1290: mol_type = other DNA
atggaggctgccgtcgttctggaaatgtctgatatagtgcttctgatcaccgacatccgtcacccagttgtgaatttccccccagccctctacgagtacgtgaccggggaattgggacttgcgttggtgctagttctgaacaaggtggatttagcgcctcccgcactagtcgtggcctggaagcattattttcaccagcattatcctcagcttcacgtggtcttattcaccagtttccctcgtgacccccgaacacctcaggacccctcctctgtacttaagaagtcgcgtagacgaggaagaggctggacgcgcgctttaggacctgagcagctgctccgcgcatgtgaggccattacggttggcaaggtggacctgtcctcatggcgggagaaaatcgcgagagatgtcgccggagctacctggggaaatgggagcggagaggaagaagaagaggaagacggtcccgctgtcctagtggagcaacagacggactccgcgatggaacccaccggtccgacacaagaacggtataaggacggtgtggtgacaatagggtgtgttggcttcccaaacgtagggaaaagctcattaatcaacggactcgtgggcagaaaggtcgtcagtgtttctcgcacacccggacacaccaggtattttcagacctacttcctgacaccgagtgtcaagttgtgtgattgccctggactgatattcccttctctgctgcccagacagcttcaagtattggcaggcatctaccctatcgcacagatccaagaaccctacactgccgtgggctatctggccagtcgcattccagtccaggccttgctacatctgcgacaccccgaagccgaagatccttccgctgagcatccctggtgtgcttgggatatatgcgaagcctgggctgaaaagagaggttacaaaacagctaaagctgctaggaacgacgtttatcgcgctgccaactccctgcttcgcctggcagtggatggcaggctcagcctgtgcttccatccccctggatactccgaacaaaagggcacttgggagtctcaccccgagacaaccgagctcgttgtgctccagggcagagtgggtcctgccggtgatgaggaagaggaggaggaagaagagctgagctcaagctgtgaagaagagggcgaggaagacagagacgcagatgaggagggagagggggacgaagaaactcccactagcgcccctggatcttccctggccggtaggaacccatacgccctcctcggtgaagacgagtgctag

SEQ ID NO: 225532 - DNA, 789 bp, synthetic construct
  misc_feature 1..789: note = Description of Artificial Sequence: Synthetic coding sequence
  source 1..789: mol_type = other DNA
atggaaccaacgggccctacccaagaaaggtataaagacggggtagtgactataggttgcgtgggctttcccaacgtgggaaagtccagtttgattaatggcctcgtgggacgcaaagtggtgtctgtgtcgagaacccctggacacactaggtacttccaaacatatttccttaccccctcggtgaagttgtgtgactgccccggacttatatttccgtccttactgcccagacaactacaagtgttggcaggaatatatcccatagcacagatccaagaaccttataccgctgtcggctatttggctagccgaatcccagtccaggcactgctccatttgcggcatcctgaagccgaggaccccagcgccgagcacccatggtgtgcatgggacatctgcgaagcgtgggctgaaaaacgcggatacaaaacagctaaggccgctaggaatgatgtttatagggccgctaattctctccttcgcctagcggtagatgggaggctctcgctttgtttccatcctccaggatattccgaacagaaaggaacttgggaatcacacccagaaaccacggagttggtcgtactgcaaggacgtgtaggaccagcaggggatgaggaggaagaggaggaggaagaactgagctcttcttgtgaggaggaaggagaggaagatagagatgcagatgaagagggggagggggacgaggagacccccacctcagctcctgggtcatccctggcaggcagaaacccatacgcactcttaggggaagatgagtgttag

SEQ ID NO: 225533 - DNA, 1215 bp, synthetic construct
  misc_feature 1..1215: note = Description of Artificial Sequence: Synthetic coding sequence
  source 1..1215: mol_type = other DNA
atgtctaaagagcagctgatgtcccaagaagaacgcagcttccaggactatctcggcaagatccatggtgcttacagttctgagaagctttcctactttgaacacaacttggaaacatggaggcagctgtggagagttttagagatgtcagacatcgtgcttctgattactgatatccgccatccggtcgtgaatttcccacccgcactatacgagtatgtgactggcgaactgggactggcgttagtgttggtgcttaacaaagtcgacttagcgccacccgctctcgtggtcgcttggaaacactactttcaccagcattatccgcagctccacgttgtgctatttacgtctttccccagagaccctcgcacaccacaagacccctcatccgttctgaagaaatcgcggagaaggggcaggggctggacccgggcactgggcccagaacagctgttgcgagcctgtgaggcaataaccgtgggtaagggcttccctaatgtcggcaagagcagcctgattaatgggctcgtgggcagaaaggtagtcagtgtatcccggacccccggtcatactcgttactttcagacctatttcctgactccctctgtgaaactatgcgactgtccaggactgatcttcccctcactgctgccacgacagctgcaggtcctggctggcatttatccgattgctcagatccaagagccctatacggccgtggggtacctggcatctaggatcccggtgcaggcactcctccatctgagacatccagaagcagaagacccatccgccgaacatccatggtgcgcctgggacatctgtgaggcctgggctgagaagagaggctacaaaactgctaaggcggctcgcaacgatgtgtacagagccgctaactctctgctgcggctcgccgtcgatggacggctatccctttgcttccatcctccaggctattctgagcagaagggcacctgggaaagtcatcctgaaaccacagaattggtggtgctacagggccgagtcggtccagccggagacgaagaggaagaagaggaggaagaattaagttcttcatgtgaagaggagggcgaagaggacagggatgcagatgaggagggagagggagatgaagaaacccccacttctgcaccgggttccagcctggctggaagaaacccatacgcattactgggcgaagatgagtgctag

SEQ ID NO: 225534 - DNA, 1290 bp, synthetic construct
  misc_feature 1..1290: note = Description of Artificial Sequence: Synthetic coding sequence
  source 1..1290: mol_type = other DNA
atggaggcagctgtagtgctggaaatgagtgatattgttttgctgataacagacatccgtcatcctgttgtgaactttcccccagcattgtacgagtacgtgaccggagagcttggtctcgctcttgttttagttctcaataaggtggatctagcgcctcctgcgttagtggtggcatggaagcactacttccatcagcactacccccaattgcatgtggtgctgttcacgagcttccctcgggaccccagaaccccccaggatccttcgagcgtgctgaaaaaaagtcgccgacgcggaaggggctggacgagggccctcgggcctgaacaactccttcgggcttgtgaagcaatcactgtcggcaaggttgatcttagttcctggcgggagaaaattgcccgtgacgtagcgggagccacatgggggaatggcagtggcgaggaggaggaggaggaggatggacctgccgtacttgtggagcagcagacagattccgctatggagcccaccggacccacccaggagaggtacaaggacggggtggttacaatcggttgtgtgggtttccccaacgttggcaagtcatctcttatcaacggcctcgtggggaggaaagtcgttagcgtgtcacgcacgcccggtcataccaggtacttccagacgtattttctgaccccgagcgtgaagctatgtgactgcccgggtttgatcttcccatccctgctgccaagacaacttcaggtcttggctggcatttaccctatcgcccagatccaggaaccctatactgcggtggggtatctggcatcccgaatacctgttcaagcactcctgcatctcagacatcctgaagctgaagaccctagtgcagagcacccttggtgcgcgtgggatatctgcgaagcttgggccgaaaagcgcggatataagaccgctaaagccgcaagaaatgacgtgtatcgagcagcaaacagcctgctaaggctggcggtggatgggagactgtcactgtgtttccatcctcccggttattctgaacagaaaggaacttgggagagccacccagagactacagagttggttgtgcttcagggcagagttggaccggctggtgatgaggaggaggaggaagaagaagagcttagtagttcatgcgaggaggaaggtgaagaagaccgtgacgccgatgaggaaggggagggcgatgaagaaacacccacgtcggcccctggctcgtcgctggcaggccgtaatccttacgccctcctcggagaggatgagtgttag

SEQ ID NO: 225535 - DNA, 1290 bp, synthetic construct
  misc_feature 1..1290: note = Description of Artificial Sequence: Synthetic coding sequence
  source 1..1290: mol_type = other DNA
atggaggcagccgtcgtgctggagatgtctgatattgtgctgctcatcacggacataagacacccagttgtcaactttcccccagccctctacgagtacgtcaccggagagctaggcttagcactggtgctcgtgctgaataaggttgatctcgctccccctgctctggtggtggcctggaagcactacttccaccagcactacccacagctgcatgtcgtgctcttcacctcatttccacgagacccaaggactcctcaggatcctagttcagtgctcaaaaaatctcgtcgtcgcggacgcggttggactcgcgcactgggtccagaacagctgttgcgagcctgtgaggccattacggtaggcaaagtcgacctcagttcctggagggagaagatcgctcgggatgtagcgggtgccacttggggaaacggctccggcgaggaagaagaggaagaagatggtcccgcagtactggtcgagcagcagaccgactccgctatggagccgaccggccctacccaggagagatataaggacggagtggtcacaatagggtgcgtaggcttcccaaatgtgggtaaatcatctctgattaacggacttgtggggaggaaggtagtgtccgtgtctcgcactcccggtcacacaaggtacttccaaacttattttctcacaccttctgtgaagctgtgtgactgtcctgggctgattttccctagtctcctcccaagacagcttcaagttctcgccggtatttatccaatagcgcaaatccaggaaccctacactgctgtgggctacttagccagtagaatacccgtccaagcactgctgcacctgcgacaccccgaggccgaggacccatcagcagaacatccatggtgcgcgtgggacatttgcgaggcctgggccgagaaaagaggatacaaaactgctaaggcggctaggaacgacgtttatcgcgctgccaacagcttgctccgcttggccgtggatgggcgactttctctatgctttcatccgcctggctatagtgaacagaaaggtacctgggagtctcaccctgagacaacagagctggtggtcctgcagggaagggtgggcccagcaggggacgaagaggaagaagaggaggaggagctgtccagcagttgtgaggaggagggcgaagaggatcgagatgcagacgaagagggcgagggcgacgaggagaccccaacgagtgcccctggctcaagtttggcagggaggaatccctacgcactcctcggggaagacgagtgctag

SEQ ID NO: 225536 - DNA, 789 bp, synthetic construct
  misc_feature 1..789: note = Description of Artificial Sequence: Synthetic coding sequence
  source 1..789: mol_type = other DNA
atggaacctacggggcctacacaggagcgttacaaggacggcgtcgttacaatcggctgtgtcgggttcccaaatgttggcaaatcaagcctcatcaatgggctggttggaaggaaggtggtgtctgtgagccgcactccagggcacacccgctatttccagacgtacttcctgaccccctctgttaaactgtgtgattgtcctggtcttattttcccttcgctgctgccaagacagctgcaggtgttggctggtatctatccgattgcacagattcaagaaccatacactgcggtggggtacctcgcgagtaggattccagtccaggcactgctgcacttgcgacatcctgaggctgaggacccatctgctgagcacccctggtgtgcctgggatatctgtgaagcatgggccgaaaagcgcggttataagaccgctaaggccgcaagaaacgatgtttacagagccgctaacagtttacttcgcttagccgtcgatgggcgattatccctgtgttttcatccgccaggctactccgaacagaaaggcacctgggaatcacaccccgagaccacggagctagtggtgctacaaggtcgggttggccctgctggcgatgaggaagaggaggaggaggaagagttgtcaagcagctgcgaggaagaaggagaagaggatcgggacgccgacgaggaaggggagggcgacgaggagacacctaccagcgcccctggaagctcactcgcagggaggaatccatatgctctcctgggagaggatgagtgttag

SEQ ID NO: 225537 - DNA, 1290 bp, synthetic construct
  misc_feature 1..1290: note = Description of Artificial Sequence: Synthetic coding sequence
  source 1..1290: mol_type = other DNA
atggaagccgctgtggtcctggagatgagcgatatcgtgctgctgatcaccgacataaggcatccagtagttaactttccacccgctctgtatgagtacgttaccggggagcttggcctggctttggttctggtgttaaacaaggtggatctcgccccaccggcactggtcgtggcctggaagcactacttccaccagcattacccccagctccatgtcgtgctgtttacatcatttccacgcgatccgaggactccccaggacccctcctcagtgttgaaaaaaagcaggcgcaggggtcggggatggacacgagctcttggtccagagcaattgttacgcgcatgtgaagcaatcaccgtaggcaaggtcgaccttagctcatggcgtgagaaaattgcacgcgacgtggcaggtgcgacctggggaaatggtagcggggaggaggaagaggaagaggatgggccagcggttttagtggagcagcagactgactccgccatggagccaaccggcccaacccaggagagatataaagacggcgtggtgactattggttgtgtaggatttccaaatgtagggaagagtagccttataaatggcctggtaggacgtaaggtggtttcagtgagtcgaacccccggtcacactagatacttccagacctattttttgacccccagcgtgaaactttgcgattgtcctggcctgattttccctagtctgctcccacgccagctccaggtgcttgctgggatttacccaattgcccagatccaggaaccctatacagccgtggggtatctcgcgtctaggatacctgtacaagcccttcttcatcttagacatccagaggccgaggacccttctgcggaacacccatggtgcgcgtgggatatttgtgaagcttgggcagaaaagagaggatataagacagccaaggcagccaggaacgacgtctaccgagctgctaactccttattaagactggccgtggacggacgcctgagcctgtgctttcatcctcctgggtattcggaacagaagggaacatgggagagtcatcctgagacaacagaattagtggttctgcaggggcgagtgggaccagcaggtgatgaagaggaggaggaggaggaagagttgtcatctagctgcgaggaagagggggaagaggaccgcgatgctgatgaagaaggtgaaggcgacgaagagaccccaacctctgccccaggctcaagtctcgcgggtcgaaatccatatgctctgctcggtgaagatgagtgttag

SEQ ID NO: 225538 - DNA, 1215 bp, synthetic construct
  misc_feature 1..1215: note = Description of Artificial Sequence: Synthetic coding sequence
  source 1..1215: mol_type = other DNA
atgagtaaagagcagctcatgagccaggaagaacggagcttccaagattaccttggcaagatccatggggcttactcttctgaaaagctatcctatttcgagcataacctggaaacatggcggcaactctggcgtgtactggagatgtctgacatagtactgttgatcaccgatatacgtcatccggtagtgaactttccccctgccctctatgagtatgtcaccggcgaacttggcctggcactcgtgcttgtgctgaataaagtggatcttgcccctcccgcactggtcgttgcatggaagcactactttcaccagcactatcctcaactccatgtggttctgtttacatcatttcctcgtgaccctcggaccccgcaggacccttcatctgtcttgaaaaaatctcggaggcgcggaagaggatggactcgggctttgggcccagaacagctgctccgcgcttgtgaggcaatcactgtggggaaaggtttccctaacgttggaaagtcatcattaattaatggtctagtcgggaggaaagtggtatctgtgagccggactcccggtcatacaaggtactttcagacctacttcctgacaccaagcgtcaagctgtgcgactgcccgggactgatttttccttccctgctgccccgacagttgcaagttctggcgggaatatatcctatagcccagattcaggaaccttacaccgctgtcggctatctcgcaagccgtatccccgtgcaggctctcctgcacttgcgacatcccgaggctgaggatccctctgcggagcacccttggtgtgcctgggacatctgcgaggcctgggccgagaagaggggctacaagacagcaaaagccgctaggaacgacgtataccgcgcagcgaatagcctcctgagactggcggtagacgggagactgagtctttgctttcacccacctggatactcagagcaaaagggaacttgggaaagccaccccgaaactactgagctcgtcgttctgcagggtagagtgggcccagcaggtgacgaggaagaagaggaggaagaggagcttagctcatcctgtgaggaggagggggaagaggatagggatgccgatgaggagggcgagggagatgaggagactccaactagcgccccagggtcatccctcgctggcaggaacccctacgcgctgctgggcgaagatgaatgctag

SEQ ID NO: 225539 - DNA, 1215 bp, synthetic construct
  misc_feature 1..1215: note = Description of Artificial Sequence: Synthetic coding sequence
  source 1..1215: mol_type = other DNA
atgtccaaagagcagcttatgtcacaggaagaacgcagttttcaggactacttaggaaaaattcacggtgcctactcttcagaaaaactctcatacttcgaacacaacctggagacctggcgccagctgtggcgcgttctggaaatgagcgatattgtcttattaataacagatattcggcaccccgtggtcaattttcctcccgctctatatgagtacgttacaggggagcttggattggcactagtgttggtcttgaacaaggtagatctggcccctccagctcttgtggttgcatggaagcactattttcaccagcactatccccagttgcacgtcgtgcttttcacaagtttcccccgagatccacggaccccccaggacccctcctcagttctgaaaaagagcaggcggaggggacggggttggacccgagcgttgggtcccgaacagcttctcagagcttgcgaggccattactgtgggtaaaggctttccaaacgtcggaaagagttcgttaatcaacggccttgtcggtcggaaagtcgtgtccgtgagccgcactccgggacatacccggtatttccagacttattttctgacccccagtgtaaagctgtgtgattgtccagggctcatcttcccctccctgttgcccagacagctgcaggtgcttgccggaatctaccctatagctcagatccaggagccctacactgccgtggggtatctggcttcccgaatccctgtgcaggcactcctgcacctcaggcaccccgaggccgaggaccccagtgctgagcatccatggtgcgcatgggacatctgcgaggcttgggcagagaaaagggggtacaagacagcaaaggccgctagaaacgacgtgtatcgtgcagcaaactccctgcttagactggccgtcgatgggagactttctctgtgctttcaccccccaggttattctgaacaaaagggcacttgggaaagccatcctgagacgaccgaattggtggtcctacaagggagagtcgggcctgcaggtgatgaagaggaagaggaagaggaggaactgagctcaagctgcgaggaggagggggaggaggatcgagacgccgacgaagagggcgaaggagacgaagaaaccccgacttctgctcctggatcttccctcgccggacgaaatccctacgcgttattaggggaagacgaatgttag

SEQ ID NO: 225540 - DNA, 789 bp, synthetic construct
  misc_feature 1..789: note = Description of Artificial Sequence: Synthetic coding sequence
  source 1..789: mol_type = other DNA
atggaacctaccggtccaactcaggaacggtataaagatggagtagtgaccatcggctgcgtcggctttccgaatgttggcaagtctagcctgatcaatgggttggtgggcagaaaggtggtgtcagtgtctcggactccagggcacacgagatacttccaaacatatttcctcaccccctccgtgaaactgtgtgactgtcctggcctcatcttcccttcactactcccgagacaactccaagtcctggcgggaatatatcccatcgcacagatccaggagccttacacagcggtgggatatctggctagtcggattcctgtccaagccctactccatctccgccatcccgaagccgaggaccccagcgcagaacatccttggtgcgcttgggatatctgcgaagcgtgggcggagaaaagaggttacaagactgcaaaagctgctagaaatgatgtgtatagagcggcaaatagcttgttaaggctggccgtggacggacggctctcattgtgctttcacccaccgggatattctgagcagaaaggaacgtgggaaagtcaccctgagacaaccgaacttgtcgttctgcagggtcgagtgggccctgcaggcgacgaagaggaggaagaagaggaggaactttccagcagctgcgaggaggagggcgaagaagaccgggacgcggatgaggagggcgagggtgacgaggagaccccaacaagcgcccctggcagttctctggcgggacgaaacccctacgcacttctcggagaagatgagtgttag

SEQ ID NO: 225541 - DNA, 2196 bp, synthetic construct
  misc_feature 1..2196: note = Description of Artificial Sequence: Synthetic coding sequence
  source 1..2196: mol_type = other DNA
atggtgaagcccaagtacaaggggcgttccactatcaatccatctaaggcctcaactaatcccgacagggtacagggagccggaggacagaacatgagagaccgcgctacaattcgaaggcttaacatgtatcggcagaaagagcggaggaattctcgaggaaagattatcaagcctctgcagtatcaatcaacagtggccagcggtaccgtcgcaagagtcgagcccaatattaaatggttcggtaatacccgggttattaagcagtcaagccttcaaaagttccaggaggaaatggacacagtgatgaaggatccatacaaggtggtgatgaagcagtctaaattacccatgtcattgctccatgaccgaatacgccctcataacctaaaagtgcacattctggataccgaatcgttcgagaccacatttgggcctaagtcccaacggaaacggcctaatcttttcgccagtgacatgcagagcttgattgagaacgccgagatgtctacagagtcctatgatcaaggaaaggatcgggatctcgtgacagaagatactggggtgcggaacgaagctcaggaggagatttacaagaaagggcaatccaaaaggatttggggcgagctgtacaaagtgatcgactcatcagatgtcgtggtgcaggtgctggacgcccgagacccaatgggaacacggtcacctcacatagagacttatctaaagaaggaaaagccctggaagcatctcatcttcgtgcttaacaagtgtgatttagttccaacgtgggccacaaaacgatgggtcgctgtgctgtcacaggattatcccacattggcgttccacgcctcgctgaccaaccctttcggaaaaggggcattcatacagctattgaggcagttcgggaagctgcacaccgacaaaaagcagatcagtgtgggctttataggctacccaaacgtaggtaaatccagtgtcattaatacactcagaagtaaaaaagtgtgcaatgtcgcaccaatcgcgggagaaaccaaagtttggcagtacataacactgatgagacgcatcttcctgatcgactgcccaggcgttgtctacccttcggaagacagcgagaccgatattgtgcttaaaggggttgtgcaggttgagaaaatcaaatcccctgaggatcatattggagctgtactggaacgcgcaaagccagagtacattagtaagacttacaagattgatagctgggaaaacgcagaggatttcctcgaaaaactcgctttccgtacggggaagctactgaaaggaggcgagccagacctacagaccgtgggtaaaatggtgctcaacgattggcaacggggtcggatccccttcttcgtgaaaccacccaacgcggagcctttagttgcccctcaactgctgccctcatcatctctcgaggtcgttccagaggcggctcagaataaccctggcgaggaggtgaccgaaactgccggagaagggtcagaatcaatcatcaaggaggaaaccgaggagaatagccattgcgatgccaacaccgagatgcagcagatcctgacccgggtacggcagaactttgggaaaatcaacgtcgtgccacagttcagtggtgatgatctagtgccagtggaggtgtcagatttagaggaggagctcgaaagcttttcagacgaggaagaggaggagcaagaacagcagcgcgatgatgcggaagaaagctcctccgagcctgaggaagagaatgttggcaacgacaccaaagctgtcattaaggcattagacgagaagatcgccaagtatcagaaattcctcgataaagctaaggccaaaaaattctccgctgtgcgtataagtaaggggctgagcgagaaaatcttcgcaaagccggaagagcagagaaaaaccctggaagaggatgtggatgatcgggctcccagcaagaaggggaagaagagaaaagcccagagggaagaggaacaggagcactccaataaggctccccgagcactgacatcaaaggagcgcaggcgagcggtgagacaacagcgccctaagaaagtgggagtcagatactatgaaacccacaacgtaaagaacaggaacaggaataaaaagaagacaaatgactctgagggacagaaacataaacggaagaaatttagacagaaacaatag

SEQ ID NO: 225542 - DNA, 579 bp, synthetic construct
  misc_feature 1..579: note = Description of Artificial Sequence: Synthetic coding sequence
  source 1..579: mol_type = other DNA
atgcagtccttgattgagaacgctgagatgtccacagagtcatatgatcagggaaaggatagggatttagtcactgaggatacaggggtccggaatgaggcccaggaagaaatctacaagaaaggccagagtaagagaatctggggcgagctttacaaagtaatcgacagctcagatgtggtggtccaggtgctagatgcaagggaccctatgggaactcgtagccctcatattgaaacgtatctcaaaaaagagaaaccatggaaacacttaatttttgtcctgaacaagtgtgacctagtacctacctgggccactaagagatgggttgcagtactttcccaggactatcctacactggcctttcatgcgtcactgacaaacccttttgggaaaggagcgtttatccaactcttgcgccagttcggtaagttgcatacagataaaaagcagatcagtgttggatttatcgggtatcccaacgtgggcaagtcctcggtgataaatacccttagaagcaagaaggtgtgcaacgtcgcccctatcgcaggagagaccaaggtgtccatcctgctctag

SEQ ID NO: 225543 - DNA, 1614 bp, synthetic construct
  misc_feature 1..1614: note = Description of Artificial Sequence: Synthetic coding sequence
  source 1..1614: mol_type = other DNA
atgacttgtcataaaaggtacaagatccagaagaaggttcgtgaacatcataggaagttgcgaaaagaggcaaagaaacgcggacataaaaagccacggaaagatcccggagtgcctaacagtgcgccttttaaggaagctcttctgcgcgaagctgagctccggaaacaacgactggaggagttaaagcaacaacaaaaactggaccggcaaaaggagctcgagaaaaagcgcaagttagagacaaaccctgatatcaaaccttcaaacgttgagccgatggaaaaagaatttggtttgtgcaagaccgaaaataaggcaaagtcagggaaacagaacagtaaaaaactgtattgccaggagttgaagaaggttatcgaagcgtctgatgtggtattagaggtcctggatgcgagagacccgctaggatgcagatgtcctcaggtggaggaggcaatcgtccagtcgggccagaaaaagctggtgctgattctgaacaaatccgatttagtgccaaaagaaaacctggagtcatggttaaattacctcaaaaaggaactcccaactgttgtgttccgcgcttccaccaaacccaaggacaagggcaaaatcactaaaagagtaaaagccaagaaaaacgctgccccatttcggtctgaagtctgtttcggcaaggaagggttgtggaaacttcttggaggctttcaggagacttgcagcaaggctattagggtgggtgtgatcggattcccaaatgttggcaaatcaagcattattaactcgctgaagcaggaacagatgtgcaacgtgggagtttctatgggtctgacccgatctatgcaggtggtccccctggataagcagatcactatcatcgactctccctcattcatcgtgtcacctctgaatagttccagtgcccttgcactcaggagtcctgcgagcatagaagtcgtgaaacctatggaagccgcttccgccattttgagccaggccgatgccagacaggtcgtgctcaagtacaccgttcccggttaccgtaatagcctcgaattttttacagtgctggcgcagcggcgaggtatgcaccagaaagggggtattcctaacgtggaaggggcagccaagctgctgtggtccgagtggacaggcgcatcccttgcctattattgccatccgcctacctcctggaccccccctccgtatttcaacgagagcattgtggtagatatgaagtctgggttcaacttggaagaacttgaaaaaaacaacgcccaatcgatacgcgctataaagggtccccatttggccaactccatcctctttcagtcctcgggactgacaaatggtattatcgaagagaaagacattcatgaagaactcccaaagagaaaggaacgcaaacaagaggagagggaagacgataaggactctgaccaggagacagtcgacgaggaggtggatgaaaacagctcaggaatgtttgcagctgaagagaccggtgaagccctgtctgaagaaaccaccgccggagagcagtcaaccagatcctttatcctggataaaattattgaggaggacgacgcttatgattttagcactgactacgtttag

SEQ ID NO: 225544 - DNA, 1650 bp, synthetic construct
  misc_feature 1..1650: note = Description of Artificial Sequence: Synthetic coding sequence
  source 1..1650: mol_type = other DNA
atgaagagaccaaagctgaagaaagcatctaaaagaatgacctgtcataagagatataagatacagaagaaagttcgcgaacatcaccggaagctgcgcaaagaggccaaaaaacgtgggcacaagaagcctagaaaggaccctggtgtgccaaacagcgccccatttaaggaggctctgctgcgcgaagctgaactgcgcaagcagcgcctggaggagctcaaacagcaacagaaactcgaccggcaaaaggagctcgagaagaagagaaagctggaaactaatcccgatattaaaccttcaaatgtggagcccatggaaaaggaatttggcctgtgtaagacagagaataaagcaaaaagcggtaaacagaactccaagaagttgtattgtcaggagctcaaaaaggtgattgaggcgtccgacgttgtgctagaggtcctggacgccagagatccgttaggttgcagatgcccccaggtggaagaggcaattgtccagtcaggccagaagaaactggtgctcatcttgaataaatcagacttggtacctaaggagaacctcgagtcatggctgaattacctgaagaaggagcttccgactgtagtgttccgagcctccacaaaaccgaaagacaagggcaaaataacgaaaagagtcaaggctaagaaaaatgcagcaccctttcgctcagaggtgtgtttcggtaaagaaggtctgtggaagttactgggtggcttccaggaaacatgctccaaagccatccgcgttggcgtcattgggttccctaatgtgggcaaatcctcaattatcaatagccttaagcaggaacaaatgtgcaacgtgggagtcagtatggggctcacccgcagcatgcaagtggtacctcttgataagcagatcactatcatcgattcccctagttttattgtgtctcctttaaattcctccagcgctctggctctgcgatcccctgctagtatcgaggtggtgaagccaatggaggctgcatcagccatactctcgcaggctgacgccagacaggttgtactgaagtacaccgtccccggttaccgtaatagcctggaattttttacggtgctggcccagagaagaggaatgcatcagaaaggcggaatcccaaatgtcgagggggctgctaagttgctgtggtcagagtggactggggctagcctagcctactactgccacccccctactagctggactcccccaccgtatttcaatgagagcatcgttgtggatatgaagtctggattcaacctcgaggagcttgagaagaataacgctcagagtatcagggccatcaaaggtccacacttagccaactccatcttgttccagtcctctgggctgacaaatggaattattgaagagaaggatattcacgaagagcttccaaaaagaaaagaacgcaagcaagaagagagagaggacgacaaggatagtgatcaggagaccgttgacgaggaagttgacgaaaatagttcagggatgtttgcagctgaggagacgggtgaagccctgtcagaagagaccacagcaggagagcaaagtactaggtcttttattctggataagattatcgaggaagacgacgcctatgacttttcaacagattatgtgtag

SEQ ID NO: 225545 - DNA, 291 bp, synthetic construct
  misc_feature 1..291: note = Description of Artificial Sequence: Synthetic coding sequence
  source 1..291: mol_type = other DNA
atgacctgccacaagagatacaagattcaaaagaaggtccgcgagcaccacagaaagttaagaaaagaagccaagaagcgtggccataagaaacccaggaaggaccctggagtacccaactctgcacctttcaaagaggccctcctgcgggaggctgagttaagaaagcaacgacttgaagaactgaaacagcagcagaaactcgatcgccagaaagagcttgagaagaagaggaaactggaaaccaaccccgacattaaaccatccaatgtggaacccatggagaagtag

SEQ ID NO: 225546 - DNA, 408 bp, synthetic construct
  misc_feature 1..408: note = Description of Artificial Sequence: Synthetic coding sequence
  source 1..408: mol_type = other DNA
atgacttgtcacaagaggtacaagatccagaagaaggtgcgggagcaccataggaagctgaggaaagaggccaagaagaggggtcataaaaaacctcgcaaggatcccggagtcccaaatagcgcaccgtttaaagaggctcttctaagggaggccgagcttcggaagcagcggcttgaggaactgaagcagcagcagaagttggacaggcagaaagaactcgaaaaaaaacggaaactagagaccaatcctgatatcaagccatcaaacgtggagccgatggagaaggaatttggtctttgcaaaacagagaacaaggctaagagtggaaagcagaacagcaagaagctgtattgccaggagttgaagaaggtgatcgaggcgagcgatgtggtactagaagtgtag

SEQ ID NO: 225547 - DNA, 417 bp, synthetic construct
  misc_feature 1..417: note = Description of Artificial Sequence: Synthetic coding sequence
  source 1..417: mol_type = other DNA
atgaagaggccgaagcttaagaaggcatccaaaagaatgacctgccataaacgatataagatacagaaaaaggtgcgcgagcatcaccgcaagcttcggaaagaagccaagaaaagggggcataagaaaccacgaaaggaccctggtgtccccaactctgcaccttttaaggaggctctcctgcgcgaggctgaactacggaaacagcggctggaagagctgaaacagcagcagaagctagacagacagaaagaactcgagaaaaagaggaaactggaaaccaatcccgacataaagccatccaacgtggaacccatggaaaaggagtttgggttatgtaagaccgagaataaagctaaatccgggaaacagaatagcaaaaagctctactgccaggagctgaagaaagtctcatag

SEQ ID NO: 225548 - DNA, 1038 bp, synthetic construct
  misc_feature 1..1038: note = Description of Artificial Sequence: Synthetic coding sequence
  source 1..1038: mol_type = other DNA
atgcctaggatcgacgccgacctgaagctggatttcaaggacgtactgctgcggccaaagcgatcgtctctcaagtcacgcgcagaggttgacctggaaaggacctttacctttcggaattccaaacagacatactccggcatccctattattgtggcgaatatggatacagtgggtaccttcgagatggccgcagttatgagccaacactccatgttcactgctatccacaagcattactcgctagacgattggaaactatttgccacaaaccacccagaatgcctccagaacgtggcagtcagcagcgggtctgggcagaacgatttagaaaagatgaccagtatcctagaggctgtgccccaagtaaagttcatttgcttggatgtggccaatggctactctgaacactttgttgagttcgttaaactggttagggctaagttcccagagcatacaattatggctggcaatgttgtgaccggcgagatggtggaagaacttatcctgtccggagcagatattattaaagtaggcgtgggacctggcagcgtttgtactacgaggaccaagacgggcgtaggctatccgcaactttccgcagtgatagagtgtgccgatagcgcccacgggctgaaaggtcatattatcagtgatggcggttgcacatgtccgggagacgtcgctaaggcgttcggtgctggagccgacttcgttatgctgggtgggatgttcagtggccacacggagtgcgcaggagaagtattcgagcggaacggacgtaaattgaagctcttctacggcatgtcttcagatacagccatgaataaacacgcaggtggggtcgcagagtacagggcgagcgaaggcaaaacagtcgaggtaccctacaagggagacgtcgaaaatactattcttgatatcttggggggactcaggtctacctgtacatatgtgggggctgccaaactgaaggagttgtctagaagagcaacttttatccgggtaactcagcaacataatactgtgttttcttag

SEQ ID NO: 225549 - DNA, 1230 bp, synthetic construct
  misc_feature 1..1230: note = Description of Artificial Sequence: Synthetic coding sequence
  source 1..1230: mol_type = other DNA
atgccccatatcgataatgacgtcaaactcgacttcaaagatgtactcttgcgccctaaaagatcaacgctcaaaagcagaagcgaggtggacctgaccaggagcttttctttcaggaactctaagcagacatactcaggcgtcccaattattgccgctaatatggacaccgtgggaacgttcgaaatggcaaaagtcctttgcaaattctcactgttcacggccgtccacaagcattactcgctggtccagtggcaggagttcgctgggcagaacccagactgcttagagcacttggcggctagctcaggcaccgggtctagcgacttcgaacaactggaacagatactcgaggccatccctcaggttaagtatatatgcctcgacgtcgccaatggctactccgagcacttcgttgagttcgtgaaagatgtccgcaaacgcttcccccagcataccatcatggccggtaacgttgtcacaggcgaaatggtggaggagcttattctctccggcgctgatataatcaaagtaggcattggcccagggtctgtgtgtacgacgaggaagaagaccggggtggggtatccacagctaagcgctgtaatggagtgcgctgatgccgcacacgggctgaagggtcacatcatttccgatggcggttgctcttgcccgggtgacgtggccaaagcattcggggctggggcagatttcgtgatgcttggaggaatgttggccggacacagcgagtccggcggagaactgatcgaaagggacggtaaaaagtataagctcttctatggaatgtcgtcagaaatggctatgaaaaaatatgccggtggagtcgcagagtaccgatacgtgtggcgcccaagatcattggtcatcgtgtggcgccagaatagttggctgttacggggagggtggtactctagccagcgctccatggtgaaccgtggctccatgctgggcagtgtcgaaaagagtctcggtctccggaaccctgaaggggaagacaacaaagtattccccacattgcgtgcctcagagggaaagacagttgaggtgcccttcaagggagatgtagagcacacgattcgtgatatccttggaggcatccggtcaacttgcacgtatgttggggcagcaaagctaaaagagctgtcgcggcgaaccacatttattagagtaactcagcaggtgaacccaatcttttccgaggcttgctag

SEQ ID NO: 225550 - DNA, 1047 bp, synthetic construct
  misc_feature 1..1047: note = Description of Artificial Sequence: Synthetic coding sequence
  source 1..1047: mol_type = other DNA
atgcctcacatagataatgacgttaagttagactttaaggacgttttgttgcggccaaaacgctctacactgaaatccaggtccgaggttgacttaacccggtcattctctttccggaactccaagcagacatacagcggtgtgccaattattgctgccaatatggatacggtgggaactttcgagatggcaaaagtgctctgcaaattttcactgttcaccgcggtccacaaacactattcccttgtacaatggcaggagttcgcaggccagaatccggattgcctggaacatctggctgcttctagcggaaccgggtcatcagatttcgagcagttggagcagatccttgaagccatcccacaagtcaaatatatttgcctggacgtggcgaatgggtacagcgagcattttgtggaatttgtgaaagatgtgagaaagcgctttcctcagcataccattatggcaggaaacgtggtaactggggaaatggttgaagagctcatcctgtcaggcgcagatatcattaaagtgggaatcgggccaggctcagtgtgcaccactaggaaaaagactggagttggctacccacaactctccgcggttatggaatgcgctgacgccgctcatggtctgaaaggccacattatcagcgatggcggttgtagctgtcctggagatgtggcaaaggcattcggcgctggagccgactttgttatgcttggcggaatgctggcgggtcacagcgaaagcggaggtgagctcattgagcgcgacggcaagaagtacaaactcttttatggaatgagcagtgagatggccatgaagaagtacgcaggtggtgtggctgagtaccgggcaagcgaggggaagacagtggaagttcctttcaagggcgacgtggagcacactatccgcgatatactggggggaatccgcagcacctgcacgtacgttggggctgccaagcttaaagagcttagtagacggaccacattcatccgggtgacccagcaggtgaatcccattttttctgaggcttgttag

SEQ ID NO: 225551 - DNA, 1047 bp, synthetic construct
  misc_feature 1..1047: note = Description of Artificial Sequence: Synthetic coding sequence
  source 1..1047: mol_type = other DNA
atgcctcatatagacaatgacgtaaagctagattttaaagatgtactccttcgacctaaacgctccaccctcaaatccaggagtgaagtggatcttacacgctcttttagttttcgaaactccaagcagacttactctggagttcctatcatcgctgccaacatggatacagtgggtaccttcgaaatggcaaaagttctatgtaagtttagtctttttacagccgttcacaaacactacagtttagttcagtggcaggagttcgccggtcaaaatcccgactgcttggagcacctggcagcctcatctgggactgggtcgagtgattttgaacaactcgagcagatcctggaagccatcccccaggtgaagtacatctgtcttgacgtcgctaacgggtactcggaacatttcgtagaattcgtgaaggacgtgcggaagaggtttcctcagcatacaataatggctgggaacgtggtgaccggagagatggtagaggaacttatcctgtccggcgcagacatcattaaggtcggaatcggacccggtagcgtatgcacaacaagaaaaaagaccggggtcgggtacccccagctctctgccgtcatggagtgcgctgatgccgctcacggactaaagggacacataatcagtgacggaggatgtagttgtcccggagacgtcgcgaaagcatttggggcaggggcagactttgtgatgttaggtggaatgttggccggtcactccgaaagcgggggagagctgattgagagagatggcaagaaatataaacttttctacggtatgtcctcagaaatggcaatgaaaaaatacgcaggcggtgtggccgaatatcgcgcttcagagggaaaaactgtggaagtgccgtttaaaggggacgtggaacatactataagagatatcttggggggaatcagatctacctgtacctacgtgggcgctgcgaagcttaaggagctgtcgcgccgtaccactttcatccgggtcacccagcaggtcaaccctatattttcagaggcatgctag

SEQ ID NO: 225552 - DNA, 1101 bp, synthetic construct
  misc_feature 1..1101: note = Description of Artificial Sequence: Synthetic coding sequence
  source 1..1101: mol_type = other DNA
atgacatcgtgtctccctgctctgcggttcatcgcaactccacgcctttccgccatgccccacatagataacgatgtaaagctggacttcaaggacgttctcctcaggccaaagcgatcgacgcttaagtccagatcagaagtcgaccttactcgtagcttttccttccggaactccaagcagacttacagcggcgttccaattatcgctgccaacatggacacagtgggtacttttgagatggccaaagtgctgtgtaagttttcactctttaccgcggtccataagcactatagtctggttcagtggcaagaattcgctgggcagaatcccgattgcttggagcatttggccgcatcctcgggcacagggagctccgactttgaacagctggaacaaatcttggaggctattccccaggttaagtacatttgcttggatgttgccaacgggtacagtgagcactttgtggaatttgtaaaagatgtgcggaaaagatttccacagcataccatcatggctggcaacgttgtgaccggcgagatggtggaggagcttatcctgtccggcgctgacattatcaaggttggaatcggcccaggctcagtctgcactacccgcaagaagacgggcgtcggatacccgcagctgagtgcagtgatggaatgtgcagacgcggctcatggactgaagggccatatcatctctgacgggggatgctcatgccccggagacgttgccaaagcattcggggctggggctgatttcgtgatgctgggaggaatgttggccggacattctgaatctggcggtgagctaatcgagcgggacggtaagaagtataagctgttttatggaatgagttccgaaatggccatgaagaaatacgcgggaggagtggcagagtaccgggcatcagaaggaaaaaccgtcgaggtccccttcaaaggtgacgtagagcacacaatccgcgatatcctgggcggtattagaagtacctgcacctacgtgggtgctgcaaagcttaaggagctttcacggcgaactacatttattagggtgacccaacaggtgaatcccattttcagcgaagcatgctag

SEQ ID NO: 225553 - DNA, 1047 bp, synthetic construct
  misc_feature 1..1047: note = Description of Artificial Sequence: Synthetic coding sequence
  source 1..1047: mol_type = other DNA
atgccacacattgacaacgacgtcaaactggacttcaaagacgtactgctgcgcccaaagaggtctaccctcaaaagcagatctgaggtagatctaactcgctcgttctctttccggaacagcaagcaaacatacagtggcgtgcctatcattgcggcaaacatggacacggttggaactttcgagatggccaaggtgctctgcaaattctctctcttcacagcagtgcacaagcattacagtctggtccaatggcaggaattcgctggtcagaacccggactgtctcgagtccatttggctccccgctcaggcacaggcgctgctcactctctcgagttggaatagatcctggaaactgtttcctaggaaatacatctgtctggacgtggctaatgggtactccgagcatttcgtggagttcgtgaaagacgtgaggaagcgtttcccacaacacaccataatggctggtaacgtggtcaccggagaaatggtggaagaactgatcttgagcggcgctgacattatcaaagtaggaataggccctggatcggtttgcacaactcgaaagaagacaggagtgggctatcctcaactttccgctgtaatggagtgcgccgacgctgctcacggactgaagggacacattatttccgatggagggtgttcttgcccgggtgatgttgctaaagcattcggggctggagccgatttcgtgatgcttggtgggatgctcgctgggcacagcgaaagtgggggagagctgattgagcgagatggcaaaaaatacaaactgttctatgggatgagcagcgaaatggccatgaagaaatatgccggtggtgtagcagagtaccgagcttccgaagggaagaccgtcgaggtccccttcaagggagacgtcgaacacactatccgagacattttgggtggaattcgatctacatgtacatatgtcggggcagcaaagctaaaggaactatcccgcagaaccaccttcataagagtgacacagcaggtgaacccgattttcagcgaagcctgctag

SEQ ID NO: 225554 - DNA, 1047 bp, synthetic construct
  misc_feature 1..1047: note = Description of Artificial Sequence: Synthetic coding sequence
  source 1..1047: mol_type = other DNA
atgccacacatcgacaatgacgtcaagctcgatttcaaggatgtgctgctcaggccaaagcgaagtacactcaaatcgcggtctgaggtggatctgactaggtcattctcatttcgcaattcaaagcaaacgtattctggtgttccaatcattgccgctaatatggataccgtgggcacattcgagatggccaaggttttatgcaagttttctctgttcaccgccgtgcacaagcattactctctggtgcagtggcaggagttcgctggccagaaccccgattgcttggagcacctggccgctagctccggaacaggctcctcagatttcgagcagttggagcagatactcgaagctatccctcaggtgaagtacatatgccttgacgttgcaaacggatactctgagcatttcgttgagtttgtgaaggacgtgaggaaacgcttcccacaacatacaatcatggccggaaacgtcgtcaccggtgagatggtagaggaactaatcctgtccggagcagacatcatcaaggtcggtatcggcccagggagcgtgtgcacaactcgcaagaagaccggggtcggctacccacagttgtcagctgtcatggagtgcgccgatgcagcgcatgggctcaaaggacacattatcagtgacggcggatgctcatgccccggagatgtcgccaaggcctttggagccggtgcagatttcgtgatgctgggtgggatgcttgccggacatagtgagtctggcggtgaattaatcgagagagacgggaaaaagtataagctgttttacggcatgtcctctgaaatggccatgaagaagtacgctggaggggttgctgagtatagggctagcgaggggaaaaccgtggaagtgcccttcaaaggggacgtggagcacacaataagagatattctaggcggaatcagaagcacttgtacctacgtcggtgcagccaagctgaaagagctctcccgtcgcaccactttcatcagggtgacgcagcaggtgaaccccattttttctgaggcctgttag

SEQ ID NO: 225555 - DNA, 1779 bp, synthetic construct
  misc_feature 1..1779: note = Description of Artificial Sequence: Synthetic coding sequence
  source 1..1779: mol_type = other DNA
atggcaagcgaaatccacatgaccggcccaatgtgcctgattgagaatacaaatggaaggcttatggcgaatcctgaggcactgaagatcctgtccgccattactcagcctatggttgttgtggctatcgtgggtctttataggaccggaaaatcttacctgatgaacaagcttgcgggaaagaagaagggtttttcgctcggtagcacagtgcaatcacataccaagggtatttggatgtggtgcgtgcctcatcctaagaagccaggccacattcttgtcttgctggatactgaagggctcggggatgtagaaaaaggggacaaccagaacgatagttggatattcgccctagccgtcctgctgagttctacctttgtttataattccattggaacaattaaccaacaagctatggatcagctgtattacgtcaccgagctgactcaccgcataaggtcaaaatcttctcccgatgagaatgaaaacgaggttgaagattcagctgacttcgtgagtttttttcccgatttcgtttggacacttcgcgatttcagcctggacctggaagcagatggacaacccttgactcccgatgagtacttgacatattccttaaagttaaagaagggcacgtcccagaaagatgaaaccttcaatttaccacgactttgtatccggaaattctttcctaagaagaagtgcttcgtgttcgacagaccagtccaccggagaaaacttgcccaactcgaaaaactgcaagatgaagagctggacccagagttcgtccagcaagtcgctgatttttgctcctatatcttcagcaactcaaaaaccaagacattatccggaggtatccaggtcaatggccctagactcgaatctctggttcttacctatgtcaatgcaattagcagcggggaccttccgtgcatggaaaacgccgttttggcactcgcacagatcgagaactcagcagccgtgcagaaagccatcgcccactatgagcaacagatgggccagaaagtgcaattgcccaccgagactctgcaggaattacttgacctccacagagattccgagagagaggcgatcgaagttttcattcgatccagcttcaaggatgtggaccacctctttcagaaggagttggctgctcagctggagaagaagcgggacgacttctgtaagcagaatcaagaggcctcctcggaccgttgctccgctctcttgcaagtgatcttcagccccctggaagaagaagtgaaggctggaatttactcaaagcccggtgggtaccggttgtttgtgcagaaattgcaggatctcaagaagaaatattacgaagaacctagaaagggaatacaggctgaggagatcctgcagacttacctcaagtctaaagagagcatgactgatgctattctccagacagaccaaacactcacggagaaagagaaggagattgaggttgagcgagtgaaggctgaatctgctcaggcttctgcgaagatgttgcaggagatgcagcggaagaatgagcagatgatggagcagaaggaacgctcgtaccaggagcacttgaaacagctaactgagaaaatggaaaacgatagagtacagttgctaaaggaacaggaaaggaccctggcactcaagctgcaagaacaggagcagctcctgaaggaaggtttccaaaaggaatcgaggattatgaagaacgaaattcaggatttgcagactaagatgaggcgcaggaaggcttgtaccatcagttag

SEQ ID NO: 225556 - DNA, 1668 bp, synthetic construct
  misc_feature 1..1668: note = Description of Artificial Sequence: Synthetic coding sequence
  source 1..1668: mol_type = other DNA
atggtggtggtggccattgtggggctgtaccgcacgggaaagtcctacctgatgaataaactggccggaaagaaaaaagggttcagcctcggttctactgtgcaaagtcacaccaagggaatttggatgtggtgtgtgccgcatccgaagaagcccggacacatactggtactccttgataccgagggcctgggagacgtcgaaaagggcgataaccaaaatgacagctggatcttcgctttggcggtactgctgtcctccacctttgtttacaattcaataggcaccattaaccagcaagctatggatcaactctattacgtgaccgagctcacccacaggatccgctccaaaagctcgcccgacgaaaacgagaatgaggttgaagatagtgccgactttgtgagtttttttccagacttcgtgtggacattacgggactttagcctggaccttgaagctgacggccaacccttgacaccagatgagtacctcacctatagtctgaagctgaaaaagggaacctcccagaaagacgagacctttaacctgccaagactctgcatcagaaagttcttccccaagaaaaagtgctttgtctttgatagaccagtccatcgcaggaagcttgctcagctagaaaagctgcaggacgaggagttagaccccgagtttgtccaacaggtggctgacttttgctcttacatattttcaaacagcaaaacgaagactctgagtggcggtatacaagtgaacggtccccgattggagagtttggtgctgacttatgtgaatgctatcagtagcggagatctcccctgcatggagaacgccgtgctcgcattagcgcagatcgagaacagtgcagcggtgcaaaaagcaattgctcattacgaacagcagatgggacaaaaggtacagctccccaccgaaaccttgcaagaactcctggatcttcaccgtgacagcgagcgcgaggctattgaggtgttcatcagatcatcatttaaagacgtggatcacctgtttcagaaggaattggccgcacagctggagaagaaacgcgatgatttctgcaagcagaaccaagaggcttccagcgataggtgctccgcccttctccaggtgatcttttccccacttgaggaggaggtgaaggcaggaatctacagtaagcccggagggtatcgactgttcgtacagaaactgcaagatctgaagaaaaagtactacgaggagcctcggaagggtatacaggccgaagagattctgcagacttatctgaaaagcaaagagtccatgaccgacgcaattctgcaaactgaccagaccctcaccgagaaagagaaggagatcgaggtggagcgagtgaaggcagaatccgcccaggcatctgcaaagatgctgcaggagatgcagcgcaagaacgagcaaatgatggagcagaaggaaagatcatatcaggaacatctgaaacagctgacagaaaagatggaaaacgaccgcgtgcagttgctcaaggagcaggaacgaacactggcgctaaagctacaagaacaggaacaactgttgaaggaaggattccagaaggaatctcggatcatgaagaacgaaatccaggatcttcaaactaaaatgcggagaagaaaggcatgtaccatctcctag

SEQ ID NO: 225557 - DNA, 1776 bp, synthetic construct
  misc_feature 1..1776: note = Description of Artificial Sequence: Synthetic coding sequence
  source 1..1776: mol_type = other DNA
atggcccctgagattaacttacctgggccaatgagcctcatcgacaataccaagggtcagctggttgttaatcccgaggccctgaagatcttaagcgcgattacccagcctgtggtggtggtggccatcgtgggactctataggactggcaaatcctacctgatgaacaaactagctgggaaaaaaaacgggttctcactgggctctacggtcaagtcacacaccaaagggatctggatgtggtgtgtaccccaccccaagaaaccagagcatacgttagttctccttgacacagagggcttaggtgacatagagaaaggcgacaatgagaatgacagttggattttcgccttagccattttacttagctcaacatttgtctacaactcaatgggtaccatcaatcagcaggccatggatcaacttcactatgtcacagagctaacagatcggatcaaggcaaactcctcgccaggaaacaacagcgtagacgactcagccgacttcgttagctttttccctgccttcgtgtggacactgcgagatttcactttggaattggaggtagacggggagccgatcactgctgacgactatcttgagctcagtctgaagttaaggaaggggaccgataaaaagagtaagagctttaatgaccctagactgtgcattcggaagttcttccctaaaagaaaatgttttgtcttcgattggccagcccctaaaaagtacttggcccacctagaacagctgaaggaggaagagctgaatccagactttattgaacaggtggcagagttctgcagttacatcttgtctcactctaacgtgaagacgctgtccgggggtattcccgtaaacggacccagactcgagtcactggtcctgacatatgttaatgccatttccagtggggacctgccctgtatggaaaacgccgtgctggcactagcccaaattgaaaactccgccgcagtcgaaaaagcaatcgcccactacgagcagcaaatggggcagaaagttcaacttcccaccgagaccctccaggagcttctcgatctccatcgcgactctgagagggaagccatcgaggtctttatgaaaaactccttcaaggacgtggatcagatgttccagaggaagctcggggctcagttagaagcacgcagggatgacttttgtaaacagaatagcaaagcaagttcagattgctgtatggctctgctgcaagatatatttggaccattggaagaggatgtgaagcagggcacattttctaaacctgggggatatcgcttgttcacccagaaactgcaggagctcaagaacaagtactaccaggtcccaagaaaggggatacaggccaaggaagtcttgaagaagtatctggaaagcaaggaggatgtcgccgatgcattacttcagactgaccagtcgctatccgagaaggagaaagcaatcgaggtggagaggatcaaggcagagagtgctgaggccgcaaaaaaaatgcttgaggagatacaaaaaaagaacgaggagatgatggagcagaaggaaaaatcctatcaagagcatgttaaacagctgactgagaagatggaaagagatagagcccaactgatggccgagcaagaaaaaactctagcccttaagctccaggagcaagagcggcttctgaaggagggctttgaaaatgagtccaaaaggctccaaaaggacatctgggatatacagatgcggagcaaatcgctggaacccatttgtaacatattatag

SEQ ID NO: 225558 - DNA, 1776 bp, synthetic construct
  misc_feature 1..1776: note = Description of Artificial Sequence: Synthetic coding sequence
  source 1..1776: mol_type = other DNA
atggccccagagatcaatttacccggacctatgagccttatcgataacacgaaaggccagttggtggtgaacccagaggctctgaagatcctgagcgcaatcactcagcccgttgtggtcgttgccatagtgggactctacaggactgggaagtcgtacctgatgaacaaactagccggtaagaaaaacggcttctcccttggtagcaccgtaaagagtcataccaaaggaatctggatgtggtgcgtgccccacccaaaaaaacctgagcacaccctcgtgctgctggatacagagggccttggggacattgaaaaaggcgataacgagaatgatagctggatctttgccctcgccatattgctgtcaagcacatttgtatacaattcgatggggacaattaatcaacaggctatggaccagcttcattatgtgacggagcttaccgacagaatcaaggctaatagtagtcctggaaataatagcgtggatgacagcgcagacttcgtttccttcttccctgcctttgtctggaccctaagagattttactttggaacttgaagtggatggagagcctatcacagcagacgactatctggagttgagtttgaagctgaggaagggcaccgacaagaaatctaagtcctttaatgatccacgtctctgtattcgcaaattcttccccaaacgaaagtgcttcgtgttcgactggccagccccaaaaaagtacctcgcgcatctcgaacagttgaaagaagaggagctcaatcccgactttattgaacaagtggccgaattttgcagctacatcctgtcacactctaacgtaaagaccctgtccggcggtattcccgttaatgggccacggctggagtcactggtgctgacctatgtgaacgcgatttctagcggggatttaccttgcatggagaacgcagtcctggcactggcccagatcgaaaacagcgccgcagttgaaaaagctattgctcactatgagcagcagatgggacagaaggtgcagcttcccacggaaacactacaggagctgctggatctgcaccgagactctgaacgtgaggctatcgaggtcttcatgaagaattccttcaaggacgtggatcagatgtttcaaagaaaactcggcgctcagctcgaggctagacgcgacgatttttgcaaacagaactctaaggcttcgtcagattgttgcatggcactgctccaagatatttttgggccacttgaggaggacgtgaagcaggggactttttccaagcccggaggataccggctttttacgcagaagctccaggagttgaaaaacaaatactatcaagtccctcgcaagggcatccaggccaaggaagtactgaaaaagtacctcgagtctaaagaagatgtcgccgatgctctattgcaaacggaccagagcctgagtgagaaagaaaaagccatcgaagtggagaggattaaggcagagtccgctgaggccgctaaaaagatgcttgaggagattcagaaaaagaacgaggaaatgatggaacaaaaagagaagtcctatcaggagcatgttaaacaactgaccgagaaaatggagagggaccgggcacagctgatggccgagcaggaaaaaaccctggctctcaaactgcaggagcaggagaggcttctcaaggaaggctttgagaatgaaagtaaacggctccagaaggatatctgggacatccagatgcggagcaagtcattggagccaatttgtaatattctttag

SEQ ID NO: 225559 - DNA, 1323 bp, synthetic construct
  misc_feature 1..1323: note = Description of Artificial Sequence: Synthetic coding sequence
  source 1..1323: mol_type = other DNA
atggcaccagagatccacatgacgggacccatgtgcctaattgagaatactaatggtgaactggtcgccaaccccgaggcacttaaaatattaagtgcaatcacccagccagttgtggtggtagcaattgtcgggctctacagaacagggaaaagctacctcatgaataaactggccggtaaaaataagggattttcccttgggtcaacagtaaagtcacacaccaagggcatttggatgtggtgtgtcccacacccaaagaagccagaacacaccttggtgctgttggataccgagggactgggtgatgttaagaaaggcgacaaccagaacgactcctggatcttcacactggccgtcttattgagctctacacttgtgtacaattcaatgggcaccattaaccagcaagctatggaccaactgtattacgtgacggagctcacccataggatcagaagcaagagttctcctgatgaaaatgaaaatgaggactctgccgattttgtgtccttcttccctgactttgtctggacgctccgggatttctccctggacttagaggctgacgggcagccactgacccctgacgagtatcttgagtattcactcaaactgacccaggggacatctcaaaaagacaagaattttaacctgcctcggctgtgtatccggaagttttttcctaaaaagaagtgtttcgtctttgacttgccaattcaccgtaggaaacttgcacagttggagaaacttcaagatgaggaactcgatcccgagtttgtgcagcaagtcgcagacttttgctcttatatctttagcaattcaaagaccaaaacactgtctggcggaattaaggtgaacggccctcgtttggagtccctggtgcttacttacattaacgctatatccagaggcgacttgccctgcatggaaaatgccgtgctggcgctcgctcagatagaaaatagcgcagctgtgcaaaaggctatcgcacactacgaccaacagatgggacagaaagtgcaactgcccgctgagaccctacaagagctcttggaccttcaccgcgtgagcgagcgcgaggccaccgaggtctacatgaaaaattcattcaaggacgtggaccacttgttccagaagaagcttgcagctcagctagacaagaaaagggacgacttttgcaagcagaaccaagaagcaagttctgataggtgctccgccctcttgcaggtcatcttctcacctctcgaggaggaggtgaaagctggcatatacagtaaaccaggcggatactgcctgtttatccaaaaactgcaagactag

SEQ ID NO: 225560 - DNA, 1788 bp, synthetic construct
  misc_feature 1..1788: note = Description of Artificial Sequence: Synthetic coding sequence
  source 1..1788: mol_type = other DNA
atggctccagagatccacatgacggggccaatgtgcctgatcgagaacacgaacggcgaactcgttgcaaatcctgaggccctgaaaatactgagtgcgataactcaacccgtcgtggtcgtcgctattgtaggtctttataggactggtaaatcctacttaatgaacaaactggccggaaaaaataaagggttctctttagggtcaaccgttaagtctcacaccaaaggaatatggatgtggtgcgtgcctcaccccaaaaagcccgagcacactctggtccttttagataccgagggccttggagatgtgaaaaaaggagacaatcagaacgactcttggatattcactctggctgtgttgctttcgtcaacactggtgtacaactcgatggggaccatcaatcagcaggcaatggaccaattgtactatgtgactgagcttacccataggattcgaagcaaaagctctcctgatgagaacgaaaacgaagattctgccgactttgtaagtttctttcccgattttgtttggaccctgagggattttagtttagacctagaggctgatggacagccattgacccctgatgagtatctcgagtactctctcaagcttacccagggtacctctcagaaagacaagaatttcaacctcccaaggctgtgcatccgaaaatttttcccaaagaaaaaatgctttgtatttgacctgccgatccacaggaggaagctggcccagctagagaagcttcaagacgaggagctcgaccccgagtttgttcagcaggtggctgatttttgctcttacatcttttcaaacagcaagaccaagaccctgtccggtggaatcaaggtcaacggtccgcgtctggaaagcctggtgcttacctacattaacgccatctcccgcggtgatctgccctgtatggagaatgccgtactggccctggcccaaattgaaaatagcgcagctgtccagaaggctatagcgcactacgaccagcagatgggtcaaaaggtgcagcttcccgctgaaacgctccaggaactcttggatctgcatcgagttagcgagagagaagcaaccgaagtgtacatgaaaaatagcttcaaggatgtcgaccatcttttccagaaaaaactggccgcacagttggataaaaagagagatgatttctgtaaacagaatcaagaagccagtagcgacaggtgttctgcactgctccaggtcatcttctccccgcttgaagaggaggtcaaggctggtatatattccaagcccggtggatactgcctctttatccagaagctccaggatctagagaaaaagtactatgaggagccgcgtaaaggcatacaggcagaggaaattctgcagacttacttaaagtcaaaggagtccgtaacggacgccattctgcagaccgaccagatcttgacagaaaaagagaaggagatcgaagtggagtgtgtcaaggccgagtcagcccaggcatccgccaagatggtcgaggagatgcagatcaaataccaacagatgatggaagagaaagagaaaagttaccaggaacatgtgaaacagctaactgaaaagatggagagagagcgcgctcagctcctggaagagcaggaaaagaccctaacaagcaagctgcaagagcaagccagggtgctcaaggagagatgccagggagagtccacccagctccagaatgagatccagaaacttcaaaaaacactcaagaagaaaaccaagagatacatgagccataagctgaaaatatag

SEQ ID NO: 225561 - DNA, 1692 bp, synthetic construct
  misc_feature 1..1692: note = Description of Artificial Sequence: Synthetic coding sequence
  source 1..1692: mol_type = other DNA
atggccccagagatccacatgaccggccctatgtgtctcatcgagaataccaacggcgagttggtggcgaatcctgaggcgctcaagatactcagcgctattacacaacccgtggtggtcgtcgcgatcgtgggtctatatcgaacaggtaagagctacttgatgaacaagctcgccggaaagaacaagggattctcacttggatccactgtcaaatcgcatactaaagggatatggatgtggtgtgtgccccatcctaaaaaacctgagcataccctggtgcttttagacacggagggcctgggagacgtgaagaaaggcgataatcagaacgattcttggatcttcactctggccgtcctgctaagcagcacattggtctacaactcgatgggcacaataaaccaacaggcaatggaccagctttactacgtgacggagctgacccaccgcatcagatcaaagtcatctcctgacgaaaacgagaatgaggatagtgccgacttcgtgtccttctttccagattttgtttggactctccgagacttctccctagacctggaggccgacggccagcccttaacgcccgacgagtaccttgagtacagcttgaagctcactcaaggtaaccggaagctggcacagctggaaaagttgcaggacgaggaacttgaccccgagttcgtgcaacaggtggccgacttttgcagttacattttcagcaactctaaaacgaagactctgagcgggggaattaaagtgaatggacctagactggagagcctggtgctcacatatataaacgcaatctcgaggggggatctgccatgcatggagaacgcggtcttggcactcgcacagatagagaacagcgctgccgtccagaaagccattgcacactatgatcagcagatgggtcagaaggttcagctccctgcggaaactctgcaggaactccttgatttgcatcgggtgtctgagagggaggccaccgaggtgtacatgaagaattctttcaaggacgtggaccacctgttccagaaaaaactggccgctcagctcgataaaaagagagatgatttctgcaaacagaaccaagaagcatcttcggatcggtgttctgcgctgctgcaggttatcttcagtcccctggaggaagaggtgaaagccggaatctatagtaaacctggtggatattgtctgttcattcaaaaactgcaagatctggagaaaaagtattacgaagagccaagaaaaggcattcaggctgaagaaattctccaaacctacctgaagtctaaggagagcgtcactgacgcgatcttacaaactgatcagatactgaccgagaaagaaaaggagatagaagtggagtgtgtgaaagctgaatcagcacaggccagcgcgaaaatggtggaggaaatgcaaatcaaatatcagcagatgatggaagagaaggagaagtcctatcaagaacacgtcaagcagctgaccgagaaaatggaacgcgagcgtgcccagctgctggaagagcaggagaagacacttacctcaaaattgcaggaacaggccagagtccttaaggagcggtgtcagggtgaatctacgcagttgcagaacgaaatccagaagctgcaaaaaacgcttaagaagaagaccaagaggtatatgtcacataaactgaaaatatag

SEQ ID NO: 225562 - DNA, 414 bp, synthetic construct
  misc_feature 1..414: note = Description of Artificial Sequence: Synthetic coding sequence
  source 1..414: mol_type = other DNA
caagatgaggagctggaccctgaatttgtgcaacaggttgctgatttttgctcctacatcttcagcaactctaagacaaagacactgagcggcggaatcaaggctgaagaaatcctgcaaacatacctcaaatcgaaggagtccgtgaccgatgccatcctacaaacagaccagattttgactgagaaggagaaggaaatagaagtggagtgcgtcaaagcggaatccgctcaggctagcgctaagatggttgaggaaatgcagatcaagtatcaacagatgatggaagaaaaggaaaagtcctaccaggagcatgtgaagcagctcaccgagaaaatggagagggaacgagcccaactgctcgaagagcaggaaaaaaccctgacgtctaaacttcaggtatctaagtgttag

SEQ ID NO: 225563 - DNA, 1923 bp, synthetic construct
  misc_feature 1..1923: note = Description of Artificial Sequence: Synthetic coding sequence
  source 1..1923: mol_type = other DNA
atgggcgagcgtaccctgcatgctgcggtacccacccctgggtacccagagtccgaatctatcatgatggcccctatttgtctcgtcgagaaccaggaagagcagctcacagtgaacagcaaagctctggagatcttagacaaaataagtcagcccgttgttgtcgtggccatcgtcgggctatatcgaaccgggaagtcgtacttaatgaaccggttggccggaaagaggaacggtttccctctcggttccactgtgcaatcagaaaccaaagggatttggatgtggtgcgttccacacttgagcaaacccaatcatacgcttgttctactggacactgaggggcttggtgatgtagaaaagtctaaccccaaaaacgatagctggatctttgctctagccgtgttgctgtccagcagctttgtatacaactccgtctccaccattaaccaccaagcgctcgaacaactccactatgtgaccgaacttgcggaacttatcagggctaaatcctgcccgagacccgacgaggccgaggattcatctgagtttgcctccttcttccctgatttcatctggaccgtgagagactttaccttggaactcaaactggacggcaacccgattaccgaggatgagtatttggagaacgccctgaagctcattccaggtaagaaccctaaaattcagaactccaacatgcctagagagtgtatcagacatttctttcgaaagcggaagtgcttcgtatttgaccgccctaccaacgataagcagtacctgaaccacatggatgaagtgcccgaggaaaatttggagcgccatttcctcatgcaatctgataatttctgctcttacatcttcacacacgccaaaacaaagacgctgcgtgagggaatcatcgtgacggggaagcggctcgggaccctagttgtcacctatgttgatgccattaatagcggggcagttccctgcttagaaaacgccgtgactgctctcgcccagctggagaaccccgcagccgtgcagagggctgcagatcattactcacagcagatggcgcagcaactcaggctgcccactgatacactgcaggagctgctggatgtgcacgctgcttgcgaacgagaagcaattgctgtgttcatggagcattcatttaaagacgagaatcacgagtttcagaaaaagctggtggatactattgaaaaaaagaagggggacttcgtcctccaaaacgaggaggcctcagccaaatactgccaggccgaactaaagcggctcagtgaacacctcaccgagagtattctccgaggcatattctctgttcccggtggacataacctttacctcgaggagaaaaagcaagtggagtgggattacaagctggtgccaaggaagggggtgaaagccaacgaggtattgcaaaattttcttcagtctcaggtggttgtggaggaatccatccttcagtctgataaagcactgacggcaggtgagaaagccatagcagctgaaagggctatgaaagaagcagcagagaaggagcaggagctgctgagggaaaaacagaaggagcagcagcaaatgatggaggcccaggaacggagctttcaggaatatatggcacagatggagaagaagctggaagaggaacgggagaacctgctgcgggagcatgaaaggctactgaaacacaaactcaaagtccaagaggaaatgctgaaagaagagtttcaaaaaaaatctgagcagctcaacaaggaaatcaatcagctgaaggaaaaaattgaaagcaccaagaatgagcagctgcgactgctgaaaatactggatatggcgagcaacattatgattgtgacattacccggtgcctccaaattgttgggtgtagggacgaaatacttagggtcgaggatctag

SEQ ID NO: 225564 - DNA, 1761 bp, synthetic construct
  misc_feature 1..1761: note = Description of Artificial Sequence: Synthetic coding sequence
  source 1..1761: mol_type = other DNA
atggcgctggaaatccatatgagcgacccgatgtgcctgatagagaactttaatgagcagctgaaggtgaatcaggaagctttggagattctgtctgctataacccaaccagttgtggttgttgcgatcgtaggattatacaggacaggtaagagttaccttatgaacaagctggcaggcaagaacaaggggttcagcgtcgcttctacagtgcagtcacatactaagggtatttggatctggtgcgtacctcaccccaactggccaaatcacacccttgtcctgctggataccgaagggctcggtgatgtggagaaagctgacaacaagaacgatattcagatcttcgccctagctctgctgctttccagcaccttcgtctataatactgtcaacaagattgatcaaggggctatcgaccttctccacaatgttacggagctcacagaccttcttaaagctcgtaattctccagatttggaccgcgtggaagacccagcagacagtgcaagttttttccccgatttggtgtggacccttcgcgacttttgtctaggtttagaaatagacgggcagcttgtgacacctgacgagtatctagagaattcactgaggcccaagcaggggagcgaccaacgagtccaaaacttcaacctacctagattgtgcatccaaaaatttttccccaagaaaaagtgttttatatttgacctgccggcacaccagaagaagcttgcacaattagaaaccttgccagatgacgagcttgagccggagtttgtccagcaagtgacggagttctgcagttacatattctctcattctatgaccaagaccctgccaggtgggattatggtcaatgggagtaggcttaagaacctcgttctgacctatgtcaatgcaatctcgtcaggcgacctcccctgtattgagaacgcagtcttggctctcgctcaaagggaaaatagcgccgctgtccagaaggctattgcacattacgatcagcagatgggccagaaggtgcagctgcccatggagacacttcaggagctgctggatcttcaccggacatccgagcgcgaggcaatcgaggtgttcatgaagaactcttttaaagacgttgatcagagcttccagaaagaattggaaactctgctggatgcaaagcaaaatgacatctgcaaaaggaacctggaggcttcttcagactattgttccgcacttcttaaagatatcttcgggcctctagaagaggcagtgaagcagggtatttactctaagcctggcggacataacctattcatccaaaaaaccgaggagcttaaggctaaatactaccgcgagccccgaaaaggcatccaagctgaggaggttctgcagaagtatctgaagagcaaagaatccgtctctcacgccattttacagactgaccaggcactcacggagacagagaagaagaagaaggaagcccaagtaaaggcagaagcagagaaagcagaggcacagagactggcagctatccaacgccagaatgagcaaatgatgcaggagcgagagcggctgcatcaggagcaggtaaggcaaatggaaattgctaaacagaactggcttgcagagcaacaaaagatgcaggaacagcagatgcaagagcaggccgctcagctaagcactacgttccaggcccagaatcggtcactgctgtcggagctgcagcacgctcagcgcacagtgaataatgacgacccatgtgttttgctttag

SEQ ID NO: 225565 - DNA, 1761 bp, synthetic construct
  misc_feature 1..1761: note = Description of Artificial Sequence: Synthetic coding sequence
  source 1..1761: mol_type = other DNA
atggctttggagatccacatgtcagatccgatgtgtctgattgagaatttcaacgaacaactcaaagttaaccaggaggctctggagattctatcagccattactcaaccagtggtagtagtcgccattgttggattataccgcaccggaaagtcctatctgatgaacaagctggccggaaagaacaaaggcttttcagtggcttccaccgtgcagagtcacacaaagggcatttggatatggtgcgtgccccacccaaattggccgaaccacactttggtcttactggacaccgaaggcctgggcgatgtggagaaggcagataataagaatgacatccagatttttgccctcgcactgttattatccagcacgttcgtctacaacacagtgaataaaattgaccagggcgcaattgatctgctgcataacgtaactgagctgactgatctgctcaaggccagaaattcccccgatctggatagagtcgaggatcctgctgactctgccagttttttccctgacctagtctggactctccgcgacttctgtttaggactcgagatcgatggccagctggtcacccccgatgagtatctggaaaactcgctgcgtcctaagcaaggatctgatcagcgggtgcagaatttcaacctccccaggctgtgtattcagaagttcttccctaagaagaagtgctttatttttgacttgcccgcacatcagaagaaactggcccaacttgaaactctgccagacgacgagcttgagccagagtttgtgcagcaggtaacggaattttgttcatatatattttcacacagcatgaccaaaacgctgcccggtggcatcatggtgaacggctctagactgaaaaatcttgtactcacctacgtgaatgcaatctcctctggtgatctaccatgtatcgagaatgccgtgctggccctggcccagagggaaaatagcgcagcagtccagaaggctatcgcccactacgaccaacagatgggtcagaaggtacaactgcctatggagaccctgcaggaacttctggatctgcaccgcacgagtgagagagaagcaatcgaagtctttatgaagaacagctttaaggatgtcgaccaatccttccagaaggagttggagacgcttctcgacgccaaacagaatgacatctgcaaacggaacctcgaagcctctagcgactactgctcggcgctgctgaaggacatttttggtcctctcgaggaggctgtgaaacagggaatttactcaaaacccggagggcacaatctgtttatacaaaagactgaagagctaaaggccaagtactacagagagcccagaaagggcatacaggccgaagaagtgctacagaagtacttaaaaagcaaagaatccgtcagccacgcgattctgcagacagaccaggcattgactgagacagagaaaaagaaaaaggaggctcaggtgaaagctgaagctgagaaggcggaagcccagcggctcgcggcaatccagcgccagaatgagcagatgatgcaggaaagggagcggctacaccaggaacaggttaggcagatggagattgcaaaacagaactggctcgccgaacagcagaagatgcaagagcagcagatgcaggagcaggccgctcagctcagcaccactttccaggcccagaaccggagcctactttccgagctgcagcacgctcagcgcaccgtgaacaacgacgacccttgcgtactgctttag

SEQ ID NO: 225566 - DNA, 1452 bp, synthetic construct
  misc_feature 1..1452: note = Description of Artificial Sequence: Synthetic coding sequence
  source 1..1452: mol_type = other DNA
atggcactcgagatacacatgtccgatccgatgtgccttatcgagaacttcaatgaacagcttaaagtaaaccaggaggctttggaaatactgagtgccatcactcagcctgttgtagtggtggctatcgttggattgtacaggacggggaagagttacctcatgaacaagctggctggaaagaataagggcttcagtgtggcttccaccgtccaatcccataccaagggaatttggatttggtgcgtcccccaccccaattggcccaatcacacactagtgctcctggacactgaggggctcggcgacgtagagaaagccgacaacaagaacgacattcaaatctttgcactagcacttttgctgtcatctaccttcgtgtataacaccgttaacaagattgaccagggggctatcgaccttctgcataacgtgacagaattgacagatctgctgaaggcccgaaacagtcctgacctggatagagttgaggatcccgctgattccgccagctttttccctgacttagtgtggactcttcgggatttttgcctgggcctggaaatcgatggccaacttgtgacgccagacgaatatttggagaactcactgagaccaaagcaggggagcgaccagagagtgcagaatttcaatcttcccagactgtgcattcaaaagttttttccgaaaaagaagtgttttatctttgatctgcccgcacaccagaagaaactcgctcagctggagacactaccagatgatgaactcgagcctgagtttgtgcagcaagtcaccgagttttgcagttatatattcagccacagtatgacaaagaccctgcccggtgggattatggtcaacggatcaagactcaagaaccttgtgttaacttacgtgaacgccattagttccggagacctcccttgtatcgagaacgcagttttagctcttgctcagagggagaattccgcagctgtgcagaaagctatagcgcactacgatcagcagatgggccagaaggtacagctccccatggagaccctccaggagctgctggacctgcaccgaacgtccgaacgggaggctatcgaggtcttcatgaagaacagctttaaagacgttgaccagtcctttcaaaaagagctggaaacgctgcttgacgcgaagcagaacgacatctgtaagagaaacctagaggcttcttctgattattgctctgctctcttaaaggacattttcggtccgctggaagaagcagtcaaacagggaatttacagtaaacctggcggtcacaacctgttcatccaaaagactgaagagctcaaagccaaatactatcgggaacccaggaaaggaatccaagccgaggaagtgttgcagaagtaccttaaatccaaggaaagcgtgtcccatgccattcttcaaaccgaccaggccctgactgagacctag

SEQ ID NO: 225567 - DNA, 1917 bp, synthetic construct
  misc_feature 1..1917: note = Description of Artificial Sequence: Synthetic coding sequence
  source 1..1917: mol_type = other DNA
atggcctcggagatccacatgccaggtcccgtatgtttaacagagaacaccaaaggacacctggtcgtgaattcagaagccctcgaaatcttgagcgctattacacagccagtggtggtggtagctatcgtggggctctaccgcacagggaagagttacttgatgaacaaactcgccggaaagaataagggattcccgttgggctgtaccgtgaaatctgagactaaggggatctggatgtggtgtgtgccgcaccctagcaagcctaaccacacactgatcctcctggacacagaagggctgggcgacatggagaaatccgaccccaagtccgacagttggatctttgccctggcagtactgctatcttctagctttgtttacaacagtatggggactattaaccatcaagccctcgagcaactgcattatgtgacagagttaacggagctcatacgggcaaagtcatgcccaagacccgatgaggtcgaggactcatccgagttcgtcagcttcttccctgactttatttggacagtgcgcgattttacgttggagctcaagcttgacggccatccaatcaccgaagatgagtatctcgaaaacgccctgaaactaataagcggcaagaatccccaaatccagaattcaaacaagccacgggagtggatacggcattttttcccaaaacaaaagtgcttcgtctttgaccggccaattaacgataagaaactattactccacgtggaggaggtccgggaggaccagctggactcgaacttccagatgcagtctgaaaatttttgtagttacatttttactcacgcaaagactaaaaccctgcgggagggtattctcgttacaggcaatcggctgggaatgctggtcgagacctatctggatgcaatcaatagcggagctactccctgcctcgaaaacgccatggcagtgctcgctcagtgcgaaaattccgcagctgtccagagagccgcaaatcactacagtcagcagatggcccagcaggtccgcttccccaccgacacgttgcaggagttgctcgacgtacatgccgtgtgtgaaagggaagcaattgcggttttcatggagtactccttcaaggacaaatcccaggagtttcagaagaaactggttgatacaatggaaaagaaaaaggaggatttcgtgctccagaacgaggaggcttctgccaagtactgtcaggcagagctcaagaggctgtcggagctgctaactgaaagcatcagcagaggaaccttcttcgtgccgggaggccacaatatttacctggaagctaagaagaagattgaacaggactacactcttgtacctcggaagggcgtgaaggccgatgaagtgttgcagagttttctccaaagccaggtggtcatcgaggagtctatcctacagagtgataaggccttgacagcaggcgaaaaggccattgccgctaagcaggctaaaaaggaggcagcagaaaaggagcaggaactgctgcgtcaaaaacagaaggagcagcagcaaatgatggaagcacaagagcggagttttcaggaaaatattgcccagctcaaaaagaagatggaaagggaacgtgaaaactacatgcgcgaactgcgcaagatgttgagccataaaatgaaagtgctggaagagctcctgacagaaggctttaaggaaattttcgaaagcttgaacgaggagatcaatagactgaaggagcagatagaggccgcagaaaacgaggaaccttcagtcttttctcagattctcgatgtggccggaagcatttttattgcagcacttcctggcgctgcgaagttggtggacctgggtatgaagattctgtcatctctgtgtaatcgtctgcgcaatccaggaaagaaaattatttcatag

SEQ ID NO: 225568 - DNA, 1902 bp, synthetic construct
  misc_feature 1..1902: note = Description of Artificial Sequence: Synthetic coding sequence
  source 1..1902: mol_type = other DNA
atggagtctgggccaaagatgctggccccagtgtgcctggtcgagaacaataacgagcagcttcttgttaatcagcaggccattcaaatactggaaaaaatctcccagcctgtagtcgttgtcgccattgtgggtctttatagaaccggaaaaagttatctaatgaaccatctagctggacagaaccacggatttccattgggcagtaccgttcagagcgagaccaaagggatttggatgtggtgcgtcccccacccgtcaaagccaaaccacactcttgtcctgctggatactgagggactgggtgacgttgagaagggcgaccccaagaatgacagctggatctttgcactcgccgtgctgttgtgcagcacctttgtttataatagcatgagcaccattaaccaccaagctctcgagcaactgcactacgtgaccgaactcacagagctgataaaagccaagagctctccgcgaccagatggtgtggaggattcaaccgagttcgttagtttttttcctgacttcctgtggacagtgcgggacttcactctcgaattgaagttgaacggccatcccatcactgaggacgagtatttggagaatgccctgaaactcattcagggaaacaatcctcgggtgcagacttccaactttcccagagaatgcatacggaggttcttcccaaagcgtaaatgctttgtgtttgacaggcctaccaacgataaggacctgctggcgaatatcgagaaggtcagtgaaaagcagcttgaccctaaattccaggagcagaccaacatcttctgtagctatatctttacacatgcaagaactaagaccctacgagagggcatcactgtcactggaaaccgtttgggcactctcgcagtgacatacgtcgaggccattaattcgggcgctgtgccttgcctggagaatgctgtgatcaccctggcccagcgggagaactcggctgctgtacagcgtgccgctgactattatagtcaacagatggcgcagagagtcaaactccctaccgatacactacaggagctcttagatatgcatgccgcttgtgagcgggaagcaattgccatctttatggaacacagctttaaggatgaaaatcaggaatttcagaaaaagttcatggaaaccactatgaacaagaagggggatttcctgctgcaaaacgaggagagtagcgtccagtattgccaggctaagctaaatgagctgagcaagggattaatggagtccattagcgccggatctttctccgtgcctggaggacacaagctgtatatggagactaaagagcgcatagagcaggattattggcaggttccgaggaaaggcgttaaggcaaaggaagtattccaaaggtttctcgagagtcagatggtgatcgaagagtctatactgcagtccgataaagcactgaccgacagggaaaaggccgtggccgtggatcgtgcaaagaaggaagcagccgagaaggaacaggagctgttgaagcagaagctgcaggagcagcagcaacaaatggaagcacaagataaatcccggaaagaaaacatcgcccagctcaaagagaaactacagatggaacgcgaacacctgcttagggagcaaataatgatgctggagcatacacagaaggtacagaacgattggctgcacgagggatttaaaaagaaatatgaagagatgaatgccgagatttcccagttcaaaagaatgattgatacaacaaaaaatgacgataccccctggattgccaggactcttgataatctcgcagacgagctgaccgcaatactgtctgctcccgcaaaacttatcggccacggcgtgaaaggagtgagttcgctcttcaaaaagcataaactccccttctag

SEQ ID NO: 225569 - DNA, 1512 bp, synthetic construct
  misc_feature 1..1512: note = Description of Artificial Sequence: Synthetic coding sequence
  source 1..1512: mol_type = other DNA
atgtccacaattaaccaccaggctctggaacagttgcattacgtgacagagctgaccgagctgatcaaagccaagtctagcccgcgtccagatggcgtggaggattccaccgagtttgtgagtttctttcccgacttcttgtggaccgtaagggacttcacgctggagttgaaactgaatggccatcctataacagaggatgagtaccttgagaacgccctgaagctcatccagggaaataatcctagagtgcagacttccaatttccctcgggagtgcatccggaggttttttcctaagcggaagtgtttcgtgtttgacagacctaccaatgacaaggatctcttggccaacatcgaaaaggtgtccgagaagcaattggacccaaaattccaggaacagacgaatatcttttgttcatatatttttacacacgctcggaccaagacactccgagaaggcattactgtaacaggtaaccggctgggcaccctcgccgtgacatacgttgaggctattaattccggagccgtgccttgtttagaaaatgccgttatcaccctggcccagagggagaacagcgctgcagtgcagcgggctgccgactattactcacagcagatggcccagcgggtaaagctgcccaccgacacactgcaggagcttctggacatgcacgcagcctgtgagcgagaggcaattgctatcttcatggagcatagctttaaggatgaaaaccaggagttccaaaagaagtttatggagacaacaatgaacaaaaagggggattttcttctgcagaacgaggagtcttctgttcaatactgccaagccaagctgaacgagctatcaaaaggtctcatggagagtatctccgctggaagcttttcagttcccggaggacataagctgtacatggaaactaaagaacgaattgaacaggattattggcaggtccccagaaaaggcgtgaaagccaaggaggtattccaacggtttttagagagtcagatggtcatcgaagaaagtatcctgcagtccgataaagcactgacagatagagagaaggccgtggctgtcgacagggccaaaaaggaagcagctgagaaggagcaggagctcttgaagcagaagctgcaggagcagcaacagcagatggaggctcaggataagtctcgcaaggaaaacatagcccaacttaaagagaagctgcagatggaaagggaacacctgctacgtgaacagattatgatgctcgagcacacccaaaaagttcagaatgactggctccatgaaggtttcaaaaaaaagtacgaggaaatgaacgcagagatcagccagtttaaacggatgatcgataccacaaaaaatgacgacactccttggatagctaggactctggataacctcgcggacgaattgaccgcgatcctgtcagctcctgctaaacttatcggccacggggtcaagggagtcagttctctgttcaaaaagcacaagctgcccttttag

SEQ ID NO: 225570 - DNA, 1815 bp, synthetic construct
  misc_feature 1..1815: note = Description of Artificial Sequence: Synthetic coding sequence
  source 1..1815: mol_type = other DNA
atggagtccggcccaaagatgcttgcccctgtatgtctcgttgaaaacaacaacgaacagcttttagtgaatcagcaggctatccaaatcttggaaaagatttcccaaccagtggtggtggtggcaattgtgggcctctaccgaaccggaaagagctacttgatgaaccaccttgctggacagaatcacgggtttccattagacactgaagggcttggtgatgtggaaaaaggagaccctaaaaacgatagctggatattcgcccttgccgtgctgctgtgcagcaccttcgtttacaactcgatgtccaccattaatcatcaagcgctggaacagctccattacgtgacggaactgacggaactgatcaaggcaaaatcctctcctcgtccagacggagtggaggactcaactgagtttgtgtctttcttcccggacttcctctggactgtcagagattttacacttgagcttaaactcaacggacatccaatcacagaggacgaatatctggagaacgccttgaagctgattcaagggaataacccgcgtgttcagacctcgaacttccccagagagtgtattcgtcggttttttcctaaaagaaaatgcttcgtgttcgaccggccaaccaacgacaaagatctgctggcaaacatagaaaaagtatctgagaaacagctggaccctaagttccaggaacagaccaatatcttctgctcatacatatttacccacgcacgaacgaagactctgcgggaaggtataacggtgacaggaaaccgcttgggaacactcgccgtcacttacgtggaggccattaactctggggcagtaccatgcctggaaaacgctgtgattactttggcccagagggagaactctgcagccgttcagagagcggctgactactattcccaacaaatggcgcagcgcgtgaaactacctacggacaccttacaggaactgctggatatgcatgcggcttgtgagcgcgaagctattgcaatttttatggaacattcatttaaagatgagaaccaggagttccagaagaagtttatggaaaccaccatgaacaagaagggcgactttctccttcagaacgaagagagcagtgtgcagtattgccaggcaaaactgaatgaattatcaaagggactcatggagagtatcagcgccggtagcttttcggtccccggaggccacaaactgtacatggagactaaggagagaatcgagcaggactattggcaggtcccacgtaaaggggtgaaggctaaagaggtatttcaaagatttctagagtcacaaatggtcatcgaagagtcaatcctgcagtctgataaagccctcaccgaccgggagaaagcagtggccgtcgaccgagctaaaaaagaagctgcagaaaaggaacaggaactactgaaacagaagctccaagagcagcagcagcagatggaagctcaggataaatcccgcaaagagaacatcgcgcagctcaaagagaagctgcagatggagcgcgagcacctgctgcgcgaacaaattatgatgttggaacacacccagaaagtgcaaaatgactggctccatgagggatttaaaaaaaagtacgaggagatgaacgcggagatttctcagttcaagcggatgatcgacactacaaagaacgacgacaccccctggattgccagaacattagataatctggccgacgagttaactgccatcctgagtgcgccagctaagctgatcggtcatggagtaaagggagtgtccagtttgttcaaaaaacataaactgcctttttag

SEQ ID NO: 225571 - DNA, 1299 bp, synthetic construct
  misc_feature 1..1299: note = Description of Artificial Sequence: Synthetic coding sequence
  source 1..1299: mol_type = other DNA
atgaagtcaacgaaaccttctctctcaccgagcaaaccccaaagtagtctggtcatccccacgagcctgttttgtaagacatttccctttcatttcatgttcgataaggacatgaccattctgcagtttggaaacgggataaggcggctcatgaacagaagggacttccaggggaagccgaattttgaggagtatttcgagatcttgacacccaaaatcaatcagaccttttcgggcatcatgaccatgctgaatatgcagtttgtggtcagagttaggcgatgggataattcagttaaaaagtcatctcgagtcatggatctgaaaggccagatgatctacattgtagaaagctctgctatactgtttctggggtctccatgtgtggaccggttagaagactttacgggaagggggctctatctgagcgatatccctattcacaatgcgctgcgggacgttgtgctgatcggcgaacaagcgagggcccaagacgggctgaagaaacgtctggggaagctgaaagcgacccttgaacaggctcaccaggctctggaagaggagaagaaaaaaacagtcgaccttttgtgtagtatttttccctgcgaagtggcccaacagctgtggcagggtcaggtggtacaggcaaagaagttcagcaatgtcacaatgctgttctccgacatagtggggttcacagctatttgttcccagtgctctccactgcaggtgataaccatgctgaatgcactttacactcggtttgatcagcaatgcggcgagctcgatgtatacaaggtggaaaccataggcgacgcctactgcgtggcagggggtctccataaagaaagcgacactcacgcggtgcaaattgccctgatggcacttaagatgatggagctgagcgacgaggtgatgagtcctcacggggaacctattaagatgcgaatcggactgcacagcggcagtgtgttcgctggagtcgtgggtgtgaaaatgcctcgatattgtctgtttggtaacaatgtcactctggcaaataagtttgagagctgctccgtgcccagaaagattaacgtgagtcccactacttacagactgctgaaggactgccccggtttcgtctttacaccacggagtagagaagagttacctccaaacttcccgagtgaaataccaggaatttgccactttttagacgcctatcagcaaggcaccaacagcaagccttgctttcagaaaaaggacgtggaagatggtaatgctaacttcctggggaaagcaagtggtatagactag

SEQ ID NO: 225572 - DNA, 1875 bp, synthetic construct
  misc_feature 1..1875: note = Description of Artificial Sequence: Synthetic coding sequence
  source 1..1875: mol_type = other DNA
atgttctgcactaaactgaaagacctaaagatcacaggagagtgtccatttagcctactggccccaggccaggtgccaaatgaatcctctgaagaggccgctgggtcttctgaaagctgcaaggcaactgttccaatatgtcaagatatccccgaaaagaatattcaagagtccttgcctcagaggaagacatctaggagccgcgtgtacttacacacactggctgagtccatttgtaaactcatttttccagaattcgagcgcctgaatgtggcactgcagaggactcttgccaaacacaagattaaggagtcccgcaagtcattggaacgcgaggactttgagaagacaatcgccgaacaggcagtggccgctggcgtcccagtcgaagtcattaaggagagcctcggcgaagaggtgttcaagatctgttacgaagaagatgaaaatatacttggagtggtcgggggaactctcaaagatttcctcaatagtttcagtaccctgctgaagcagtcatcccactgtcaggaggcgggaaaaaggggcaggcttgaggacgcaagcatactatgcttagataaggaagatgacttcttacatgtatactacttcttccccaaaaggaccacgtctctcattctccctgggataattaaggccgcagcacatgtgctgtacgaaactgaagtagaggtgagtctgatgccaccctgtttccacaatgactgctctgaatttgtaaatcagccctacctgttgtattctgtgcacatgaaatccactaagccatcgttatcccctagcaagcctcaatcttctttagtcatccccacttctctcttttgcaaaacctttccctttcacttcatgtttgacaaagatatgacaatactgcagttcggaaacgggatccgacgactgatgaatcgcagagatttccagggcaaacccaactttgaggaatactttgagattcttactcctaaaattaatcagacctttagcgggatcatgactatgctgaacatgcagtttgtggttcgcgtgcggaggtgggataactccgtcaagaaaagctcccgggtgatggatcttaagggacagatgatttacatcgttgaaagttcagctatcttgttcttgggaagtccgtgcgtggaccgtctcgaggactttactggtcgcggtctgtacctgtctgacattccaatccacaatgcattgcgggatgtagtgctcatcggtgaacaagccagggcccaggacggcctgaagaaaagactaggaaagttaaaagccaccctggagcaggcccaccaggctctcgaagaggaaaagaaaaaaaccgttgatttgctgtgttccatcttcccctgcgaggtcgcccaacaattatggcaggggcaagtggtgcaggccaagaaattttccaatgtaacaatgctattctccgacatagtgggctttaccgctatctgcagccaatgtagccctctgcaagtgatcacaatgcttaatgcattatacacaaggtttgaccagcagtgcggggagctcgatgtatacaaagtagagactatcggtgacgcatattgtgttgctgggggactacataaggagtccgacacgcatgccgtccagatcgcattgatggcattgaagatgatggaattgagtgacgaagttatgtctcctcatggtgagcccatcaaaatgaggatcggtttgcacagcggctctgtgtttgccggagtggttggcgtgaagatgcccagatattgcctgttcggaaataacgtcactctggcaaataagttcgaaagctgcagcgtcccacggaaaataaatgtttctcctactacatatcgctag

SEQ ID NO: 225573 - DNA, 2292 bp, synthetic construct
  misc_feature 1..2292: note = Description of Artificial Sequence: Synthetic coding sequence
  source 1..2292: mol_type = other DNA
atgtcccgtaggaaaatcagcagcgaatctttcagttccctgggtagtgactacctcgaaacttcccccgaggaagagggtgaatgtcctctaagtcgtctgtgctggaacgggagtcgctcaccccctggacccctggagccatcaccggcagctgccgcagcagccgctgctcctgccccaacccctgccgcaagcgcagcagccgcagctgcaaccgcaggcgctcgcagagtgcagcgtcgcaggagggtgaatctagattccctgggcgagagcatcagcaggctgactgcgccttccccacagacaatacagcagaccctgaagaggacgttgcagtactatgaacaccaagtcattggatatagggacgccgaaaagaatttccacaacattagcaacaggtgttcttacgccgatcactccaacaaggaagagatcgaggacgtgtcaggcatcttacagtgcactgccaacatcctcgggctgaagttcgaagaaatacaaaagcgtttcggagaggagtttttcaacatatgcttccacgagaatgagagagtactgcgcgctgtgggcggtacgctgcaagatttctttaacggtttcgatgccctactggaacacatccgcaccagcttcggtaaacaagccacccttgaaagcccttccttcctgtgtaaggagttaccggaaggaacattgatgctgcattactttcacccacaccatatcgtgggcttcgctatgctgggcatgatcaaggctgccggaaaaaaaatataccggcttgatgtggaggttgagcaagtggctaatgagaaattgtgctctgacgtgtccaatccagggaactgcagctgccttaccttcctgattaaagaatgcgagaacacaaatatcatgaagaatcttccacaagggacctcccaggtccctgccgacctcaggatctcaattaatacattctgtcgggcattcccttttcacctcatgttcgatccatcaatgtccgtgcttcagttgggggagggactgaggaagcaactcagatgcgatacgcataaagtgctaaagtttgaagactgtttcgaaatcgtctcacccaaagtcaacgcgacttttgagcgagtcctgctccggctgtctacaccatttgtgatccggactaagcctgaggcaagtggctctgaaaataaggacaaagtgatggaggttaagggccagatgattcatgtgcctgaatccaatagcatcctgttccttggttccccttgcgttgataagttggacgaattaatgggacgtggcctgcatttaagcgatatccccatccatgatgccactcgagatgttatcctggtgggtgagcaggcgaaagctcaggacggcttgaaaaagcgtatggacaagctcaaggccacactcgagagaactcatcaagctttggaagaagaaaaaaaaaaaacagtcgacttgctctacagcatatttccaggagacgtagcccagcaactgtggcagggacagcaggtccaggccagaaaattcgacgacgtcacaatgctgttcagtgatatcgttggattcacagccatctgtgcccagtgcacccctatgcaggtgatctcaatgctcaacgagctatatacccggttcgaccatcaatgcggtttcctagatatttacaaagtagagaccataggcgatgcttactgtgtggcggcaggattacatcgtaagagcttgtgtcacgccaagcccattgccctcatggctctgaagatgatggagctgagtgaagaggtcttgactcccgatgggaggccaattcagccacagagatccgaactcctattcagctttccagtgtcgatacagctagtcccggaccagcatcagtccgagacagatctgggcaccgagaaaatgagaatagggatacattcaggctcagtactggccggtgtggtgggtgtccgcatgcctcggtactgcctgtttggaaataacgtgaccctggcatccaagttcgagtctggttcccaccctcggagaatcaacgtttcccctaccacataccagcttctaaaaagagaagagtccttcaccttcattcctcgcagccgcgaggagctgccagataactttcctaaagagatccctggcatttgttattttctggaagtgaggacaggtccgaaacccccaaagccatctctctcctcgtcgcgaatcaagaaggttagttacaacatcggtaccatgttcctgagggagaccagcctctag

SEQ ID NO: 225574 - DNA, 2199 bp, synthetic construct
  misc_feature 1..2199: note = Description of Artificial Sequence: Synthetic coding sequence
  source 1..2199: mol_type = other DNA
atgagccgacgcaagatctcatctgaatctttttctagcctagggtcagactatctggagacctctcctgaagaagagggtgaatgccctttgtctcggctgtgctggaacggtagcagatccccgccagggcctctcgagcctagccctgctgcagcagcggctgctgcagctcccgctccaactccagcggctagcgccgctgccgcagcggctaccgcaggggctcgacgcgtgcagcggcgaaggcgcgtgaacctcgactccctcggcgaatcaatttcacggctgactgcccctagcccacaaactatccagcagacactgaagcgcacactacagtactatgagcatcaagtcatcggataccgcgatgctgagaagaacttccataatatctctaaccgttgctcatacgcagaccattctaacaaggaggaaatcgaagatgtctcggggatcctgcagtgcaccgcgaacattttgggacttaaatttgaagagatccagaagaggttcggggaggaatttttcaacatttgtttccacgaaaatgagagagtgctcagggccgtgggcggaaccctgcaggacttttttaacggatttgacgccctactggagcacatccggaccagtttcggtaagcaggcaaccttagaatctccatccttcctgtgcaaggaacttccagagggcacgcttatgctgcattactttcacccccatcatattgtgggctttgcgatgctcggcatgatcaaggccgcagggaaaaaaatataccggctggatgtggaagtggagcaggtcgccaacgagaagctgtgctccgacgtcagcaaccctggcaattgtagctgcctgactttcctgatcaaagaatgtgagaatacgaacattatgaagaacctgccacaaggaacctcgcaggttcccgcagatctgcgcattagtatcaatacattctgcagagccttcccatttcatcttatgtttgatccatctatgagcgtcctgcagctgggagagggcctccgcaagcagttacgatgtgatacccataaagtgctgaaatttgaggattgctttgagatcgtgtccccaaaggtgaatgcgaccttcgaaagagttcttttgaggttgtccactccattcgtgatccggacaaagccagaagcctccggatctgaaaacaaggataaggtgatggaagtgaaaggtcagatgatacatgtccccgagagcaattctattctgtttctgggaagtccatgcgtagacaagctggacgagctgatgggtaggggtcttcacctgtctgatattcctatccatgacgccaccagagatgttattctggttggagagcaggccaaagcacaggacggtctgaagaaacggatggacaagttaaaggctacactggagaggactcatcaggccctggaggaggaaaagaagaaaactgttgacctcctctactccatctttccaggagatgtggcccagcagctatggcagggacagcaggtgcaggctcggaaattcgacgacgtcacaatgctgtttagtgatatcgtggggtttaccgctatttgtgcacagtgcacccccatgcaagtgattagcatgttgaatgagttatacactagattcgatcaccagtgtggcttcctggacatctacaaggtagagactatcggagacgcatactgtgttgccgctggcttacacaggaagtcactgtgccatgccaaacccatcgctctcatggccctcaagatgatggagctctctgaggaagtactcacccccgatggacgacccattcagatgcgaatcgggattcattctggcagcgtcttagctggagttgtcggagtccggatgcctcgctactgtctctttggaaataatgtgaccctggcgagcaagttcgaatctggctctcaccccaggagaatcaacgtgtcgcctacgacttaccaattgctcaaacgcgaggagagcttcacattcatacccaggtcccgagaggaacttcccgacaactttcccaaagagataccgggtatctgctatttcttggaagtgagaacaggtcctaagccacctaaaccatcactctccagtagccggatcaaaaaggtgtcctacaacataggaaccatgtttttgcgggagacgtcactgtag

SEQ ID NO: 225575 - DNA, 2073 bp, synthetic construct
  misc_feature 1..2073: note = Description of Artificial Sequence: Synthetic coding sequence
  source 1..2073: mol_type = other DNA
atgttctgtacgaagctaaaagatcttaaaattactggtgaatgtcctttttcgctgctggctcccggacaggtccctaacgagtcaagcgaggaagccgctggcagtagcgaatcttgtaaagccaccgtgccaatttgtcaggatatcccagagaagaatattcaggagagcctgccccagcgcaagacttctcgcagcagagtgtatctccacaccctagctgaatccatctgcaagctgattttccccgagtttgagcgcctgaacgtagcattacagaggactcttgccaaacacaaaattaaggagtccagaaagagcctagagagagaggattttgaaaagacgatagccgaacaggccgtagccgctggcgtgcctgtggaagtgatcaaggagtctttgggcgaggaggtgtttaaaatttgctatgaagaggatgaaaacatcctcggggttgtgggtggaacactgaaagactttctcaactcttttagcactctgctgaagcagagttcccactgtcaggaggctggtaaaaggggcagactggaagatgcatccatactgtgtctcgataaagaagacgattttctgcatgtatactactttttccccaaacgaacaacctcactcatcctgcctggtataatcaaggcggctgcccacgtgctgtatgaaactgaggtggaagtttcgctcatgcccccatgctttcacaatgattgctctgaattcgttaaccagccgtatctgctctatagcgtgcacatgaagagcacaaaaccatcacttagcccaagcaagccacagtccagcctggtcatccctacaagcctcttttgcaagacatttcctttccacttcatgttcgataaggatatgactatactccagtttggcaacgggatcaggcgtcttatgaatagacgcgactttcagggtaagccaaatttcgaagaatatttcgaaatacttactcccaaaattaaccagacatttagcggcatcatgaccatgctgaatatgcaatttgtggtgagggtccggagatgggacaactcagtgaaaaaatcctccagggtgatggatctcaagggccaaatgatttatatcgtcgaaagtagtgctatactgttcctcgggtctccttgcgtggatcggctcgaggattttacggggaggggtttgtacttgtccgatattcctattcataacgccctccgtgacgtggtgctgattggtgagcaagctcgggcacaggacggactcaagaaacgactgggcaagttgaaagcgacattggaacaggctcaccaggctttggaggaggaaaagaagaaaaccgtcgacctgctttgttcaatttttccgtgcgaggtggctcagcagctgtggcagggccaggtggtgcaggcaaaaaagttctcaaacgtgaccatgctgtttagcgatatagtgggatttaccgctatttgtagccaatgctctcccctgcaggtgatcactatgctaaacgccctgtacacccgcttcgaccaacagtgcggcgagctcgacgtgtacaaagtcgagacaatcggtgacgcctattgcgtggcaggaggactccacaaagaatcagacacgcacgcggtgcagatcgctttaatggcactcaagatgatggaactgagtgatgaggttatgagtccacacggggagccgattaagatgcgcatcggtctccatagtgggtctgtatttgcaggtgttgttggtgtgaagatgcctaggtattgcctgttcggcaacaacgttacgcttgccaataagtttgagtcttgctccgttcctcgcaagattaacgtgagccccacgacatatcgtctcctgaaggattgccccggtttcgtgttcactccacgttctcgcgaggaactgcctccaaacttcccgtccgaaataccaggaatttgtcacttccttgacgcataccaacagggcaccaatagcaagccctgttttcagaagaaagatgtcgaagatgggaatgctaacttcctggggaaggcaagcggtattgactag

SEQ ID NO: 225576 - DNA, 2073 bp, synthetic construct
  misc_feature 1..2073: note = Description of Artificial Sequence: Synthetic coding sequence
  source 1..2073: mol_type = other DNA
atgttctgcactaagttgaaagatctcaagataaccggagagtgcccattcagcctcctcgctccaggccaggtgcccaacgagagcagcgaggaggccgcaggttcatccgaatcatgtaaggccaccgtccccatctgccaggacatccccgagaaaaacatacaggagtctctccctcagaggaagacgtcccggtctagagtctacttgcatactttggctgaatccatctgtaagctgatcttccctgaatttgaacgactcaatgtcgccctccagcgaaccctggccaagcacaaaatcaaggagagcagaaaatcactcgagcgcgaggatttcgagaaaactattgctgagcaggcagtcgctgccggagtgccggtggaagtcatcaaggagagtctgggcgaggaggtctttaagatttgctacgaggaagacgagaacatccttggcgtggtgggcggtactctgaaggattttctcaacagctttagtaccctgctaaaacagtcgtcccattgtcaggaagcgggaaaaaggggtaggctcgaggatgcgtctatattgtgcttggacaaggaagacgatttcttacacgtgtactacttcttccccaagaggaccacatctctcattcttcccggtatcatcaaggcagccgctcacgttctatacgaaaccgaagttgaagtaagcctgatgcccccatgcttccataacgactgtagcgaatttgtgaaccaaccatatctgctgtactccgttcatatgaagtcaaccaaacccagcctctcgccaagtaagccccaatcctccctggtgatccccaccagcctcttttgcaaaacgttccccttccattttatgttcgataaggatatgacgatcctacagttcggcaacggtatccgtcgcttgatgaacaggcgggatttccaggggaagccaaactttgaggaatacttcgagatccttactcctaagattaaccagacattctccggaatcatgaccatgttgaatatgcagtttgtcgttcgggtcaggaggtgggacaattccgtcaagaagtcttcacgggtcatggacctgaaggggcaaatgatctatatcgtggaaagctccgcaatacttttcctaggctccccatgcgtcgatcggctcgaagactttaccggaaggggactgtacctgagtgatattccaatccataatgcgcttcgagacgtggtattaatcggggagcaagcacgtgctcaagatggccttaagaagcggcttgggaagctgaaggctaccctcgagcaggcccaccaagctctcgaagaggagaagaaaaaaacagtggacctgctgtgcagcatcttcccgtgtgaggtcgcacagcagctgtggcaggggcaggtcgtgcaggccaagaagtttagtaacgtcaccatgctctttagcgatatcgtaggcttcaccgcgatatgcagtcagtgcagccctttacaggttatcacgatgctcaacgccctctacactagatttgaccagcagtgcggtgaattggacgtgtataaagtggagaccataggtgacgcatattgtgtcgccggtggtttgcacaaggaaagcgacactcacgccgtccaaatcgcgctcatggcgctcaagatgatggagctaagcgatgaggtcatgagccctcacggcgaacccatcaagatgaggattggcttgcacagcgggagtgttttcgccggtgtcgtaggggtgaaaatgcctcgctactgcctgttcggaaataatgtgactctcgctaataagtttgagagctgcagtgtgcccaggaagatcaacgtctcaccaactacctatcggctgctcaaagattgcccaggattcgtctttacgccccgttctcgtgaggagctccctccaaactttccatcagaaattcccggaatctgtcacttccttgacgcctaccagcagggaacaaacagtaaaccttgtttccaaaaaaaggacgttgaggacggcaacgcgaattttctgggaaaagcttctggaattgactag

SEQ ID NO: 225577 - DNA, 2073 bp, synthetic construct
  misc_feature 1..2073: note = Description of Artificial Sequence: Synthetic coding sequence
  source 1..2073: mol_type = other DNA
atgttttgcacaaagcttaaggacctgaagatcactggggagtgcccatttagcctactggcccctggccaggtaccaaatgagtccagtgaggaggccgctggcagttctgaatcctgcaaggccaccgttcccatctgccaagatatccccgagaagaatattcaggaaagcctcccacagcgaaaaacctcaagatcgcgggtctatttgcacacactggcagaatccatctgcaagcttatttttcctgagttcgagagattgaatgtagcactgcaacgcacactggctaagcacaaaatcaaggagtcccggaaaagccttgagagggaagacttcgaaaagactatcgctgaacaggccgtcgctgctggggtgccggtggaggtaatcaaagaaagcctgggagaggaggtgttcaaaatttgttacgaagaggatgagaacatcctgggcgttgtgggcggaacacttaaggattttctcaattcatttagcacactgctaaaacagtcatcccactgccaggaggcgggtaagaggggacgcctggaggacgcctccatactttgtcttgataaggaggacgattttctgcacgtgtactacttctttcccaaacgtactacatcactcatcctgcccggaattatcaaggctgctgcccatgttctatatgaaactgaggtggaagtttccctcatgcccccttgcttccacaatgattgctccgagtttgtgaaccagccttatcttttgtacagcgtgcacatgaaaagcaccaagcccagcctgtcaccatcaaaaccacagagctccctggtcatcccaacctctttgttttgcaagacatttccatttcatttcatgttcgataaggatatgactattctgcagttcggcaacggcatcagacggctgatgaacagaagagactttcagggaaagccaaattttgaggagtactttgaaatcctgacgcccaaaattaatcagaccttcagcgggatcatgactatgctcaatatgcagttcgtggttcgagtgcggagatgggacaattctgtgaagaaatcctcccgagtgatggatctgaagggccaaatgatttacattgtggaaagctctgccattctgttcctgggaagcccctgcgttgaccgcctggaggacttcaccggaagagggctctacctgtcagatatacccatacacaacgccctccgtgacgtggtcctgattggagaacaagcaagagctcaggacgggttgaagaaaagattgggaaaactgaaggctactctggaacaggctcatcaagccttggaagaagaaaagaaaaaaactgtggatctgctttgtagtatcttcccctgtgaggtggctcagcagttatggcaggggcaggtggtacaagctaaaaaattctctaatgtgactatgcttttctccgacatcgttggctttactgccatatgttctcaatgctccccgttgcaggtgattactatgctaaacgcactctatacacgattcgatcagcagtgtggcgaacttgatgtttataaggtagagaccatcggagacgcctattgtgttgcaggaggcctgcacaaagagtccgatactcacgccgtgcaaatcgccctcatggccctcaaaatgatggaactctcagacgaggtgatgagcccacatggagagcctataaaaatgcgtattggtcttcacagtgggtcagtgttcgccggtgtggtaggggtgaaaatgcccaggtactgcttatttgggaacaatgtgactctcgctaacaagttcgaaagctgttccgttcccagaaaaattaatgtgtctcctacaacttacaggctgttgaaggattgcccaggctttgtattcacacctaggtcccgagaggagctaccccctaactttccaagcgaaatcccaggtatctgccacttcttagacgcatatcaacaggggacgaactcaaaaccctgtttccagaaaaaagacgtggaggacgggaacgccaactttttaggaaaagccagtggcattgactag

SEQ ID NO: 225578 - DNA, 2073 bp, synthetic construct
  misc_feature 1..2073: note = Description of Artificial Sequence: Synthetic coding sequence
  source 1..2073: mol_type = other DNA
atgttctgtactaagctgaaagatctgaagattactggcgagtgtccctttagccttctcgctccaggtcaagttcctaacgagagctcagaggaagcagccggttcatccgagtcatgcaaggccactgttcccatctgccaggatatcccggaaaagaacatacaggagtccctccctcagcgtaagacatcccgttctagagtgtacctgcatacactggccgaaagcatatgcaaacttatattcccagaattcgagaggctcaacgtggcgctgcagcgcactctagccaagcataaaataaaagaatcacggaaaagcctcgagcgtgaagacttcgagaaaactattgccgagcaggccgtggcagccggagttccagtcgaggtaattaaggagagcctgggagaagaagtgtttaaaatttgctacgaggaggacgaaaacatccttggagtggtcggaggcactcttaaagactttctaaactcttttagtacacttttgaaacagtcctcccactgccaggaggctggcaagagggggaggctggaggacgcctctattttgtgcctggataaagaagacgattttctacatgtttattacttctttccaaaacgtacaacctctctgatcttacctggcataatcaaggcagccgctcacgtgctgtatgagacagaagtcgaagttagcctgatgccgccttgttttcacaacgattgctccgaatttgttaatcaaccgtacttactctattcagtccatatgaaaagtacaaaaccatctctaagcccgtcaaaacctcagtcctccctggtcatacctacaagcctgttttgtaagacctttcccttccacttcatgttcgataaggacatgactattctgcagttcggcaatggcatacgcaggctgatgaatagacgggactttcaggggaagccaaatttcgaagagtacttcgagattctaacccctaagataaaccaaacgttttcaggcatcatgactatgttaaacatgcagtttgtggtccgggtgcggcgttgggacaacagcgtgaagaaatctagcagggtgatggatttgaaagggcagatgatttacatcgttgagtcaagcgccattttgttcctggggagcccatgcgtggatagactcgaggatttcactggaaggggcctttacctctccgacatccccatacataacgctttgagggatgtggtacttatcggagagcaagctagggcccaggacggtctgaagaagagacttgggaagcttaaggccacattggaacaggctcaccaggctctggaggaggagaagaagaagacggtagatcttttatgtagcatttttccctgtgaggtcgcacagcaactttggcaggggcaagttgttcaagctaagaaattctctaatgtcactatgctcttctctgacatagtgggctttacagccatatgttcccagtgctcgcctctgcaagtgatcaccatgttgaatgccttgtacactaggtttgatcagcagtgtggcgaacttgatgtgtataaggtagaaaccattggcgatgcatactgtgtagcaggtgggctgcataaggaatccgatacccatgccgtgcagattgcgctgatggcactgaaaatgatggaactctcagatgaagtgatgagtccacatggcgaacctatcaagatgcggattgggctgcacagcggctccgtcttcgcaggcgtcgtcggtgtgaaaatgccaagatactgtctgttcggaaacaacgtgactctggccaataagtttgagtcttgcagtgtgcccagaaagattaatgtgtctccaactacctacaggctcttgaaggactgtccaggattcgtgtttaccccccgatcacgggaagagctgccccctaactttccaagcgaaattcctgggatctgccacttcctcgacgcataccagcagggcactaatagcaagccatgtttccaaaagaaggacgtggaggatggcaatgcaaacttcctagggaaagcttccgggattgactag

SEQ ID NO: 225579 - DNA, 2073 bp, synthetic construct
  misc_feature 1..2073: note = Description of Artificial Sequence: Synthetic coding sequence
  source 1..2073: mol_type = other DNA
atgttctgcaccaaactcaaagacctcaagattactggggagtgtccgttttctctactggcaccagggcaggtgcccaatgagtcttcggaggaagcagccggaagctcggaatcatgtaaagccaccgttcctatctgccaggatattcccgaaaaaaacatacaggagagccttcctcagcgaaagactagtcgatcacgtgtctatctgcacacattggccgaatctatatgcaaacttatttttcccgaatttgaacgcttgaacgtcgctttgcagagaacgctcgcaaagcacaagatcaaggagagccgcaaatcactggagagagaagatttcgagaagacaatcgccgaacaggcagtcgccgctggcgtgcccgtggaagtgataaaggagtccttgggagaggaggttttcaaaatttgttacgaggaagatgaaaacatcctgggtgtcgtaggaggaacactcaaagattttcttaatagtttctccacattgctaaaacagtcatcacactgccaggaagccggaaaacgcggaagattagaagacgccagcatcttatgcctggataaggaagatgactttctgcatgtttactatttcttcccaaagcggacgacatctctaattctgcctggcatcattaaggccgctgcccatgtgctgtacgagactgaggtcgaggtctctttaatgcctccctgcttccacaacgactgctcagaatttgtgaatcaaccttatctgctctattctgtgcacatgaagtccacaaagcctagtctcagtcccagcaagccacagagtagtctggtgattcccaccagcttgttctgtaagacatttccgttccactttatgttcgacaaggacatgacaatcttgcagttcgggaatgggattcgcagactgatgaacagacgcgattttcaggggaaaccgaacttcgaggagtactttgaaatcctgactcccaagattaatcaaacgtttagcggaattatgacgatgctaaacatgcaattcgtggtaagagtgagacggtgggacaatagcgtgaaaaagtcctctagagtgatggacctgaaaggccaaatgatttacatcgtagaatcatccgcaatcctttttctgggcagtccttgtgtggaccgcctggaggatttcaccggccgagggctttatctcagcgacatcccgattcacaatgcccttagagatgtcgtactgatcggagaacaagctcgagcacaggacggactcaaaaagaggctgggaaagctgaaggcaaccttggagcaagcccaccaggccctggaagaggaaaagaaaaagacagtcgatcttctatgttccatattcccctgtgaagtcgctcaacagctgtggcagggacaggtggttcaggctaagaagttctccaacgtgacaatgcttttttcagacatcgtggggtttaccgccatctgctctcagtgctctcctctgcaggtgatcaccatgctcaatgccctgtacaccaggtttgaccagcagtgtggagagcttgacgtctataaggtggagaccatcggtgatgcctactgtgtggcgggtggcttacacaaggaaagcgacacacatgccgtccagatagcccttatggccctaaagatgatggagctgagcgatgaggtcatgtctccacacggggaacccatcaaaatgcggatcggactgcacagcggctccgtttttgccggagtagtgggggttaagatgccgcgatattgtttatttggcaataatgttaccttggccaacaaattcgaatcctgttccgtgccacgcaagattaacgtttcccccacaacatatcgtctccttaaggattgtccagggtttgtgttcacacccagatctcgagaagagctaccacccaacttccccagcgaaatccctggaatctgtcattttttagatgcctaccagcaggggacaaacagcaaaccttgttttcagaagaaagacgtggaagacggaaatgccaacttcttgggcaaagctagtggcatcgactag

SEQ ID NO: 225580 - DNA, 1860 bp, synthetic construct
  misc_feature 1..1860: note = Description of Artificial Sequence: Synthetic coding sequence
  source 1..1860: mol_type = other DNA
atgtacggctttgtgaatcatgcccttgagttgcttgtcatccggaattacggcccagaggtgtgggaggatattaagaaggaagcccagctggacgaagaggggcagtttctggtcaggattatctatgacgatagcaaaacctacgacctagttgcagcagcttccaaggtcctaaacctcaacgctggcgagatcctccaaatgtttgggaaaatgttcttcgtgttctgccaggaaagtgggtatgacacgatcttacgggtcctaggaagcaacgttagagaattcctgcagaatctcgatgctctccatgaccacctggcaacaatctatccgggaatgagagcgccatcttttcgctgcaccgacgccgagaagggaaagggcctgatcttgcattactacagcgagcgagaagggctgcaggacatcgtgatcggtatcatcaaaacggttgcgcaacaaatccacgggaccgaaatcgacatgaaagtgatccaacagcgtaacgaggagtgtgaccatacacagtttttaatcgaggagaaggagtccaaggaagaagacttctacgaggaccttgaccggttcgaggaaaatggaacccaagagtccaggatttctccttatacattctgcaaggccttcccttttcacataatttttgaccgtgatcttgtggtgacgcagtgcgggaacgctatttacagagtcctgcctcagctgcagccaggtaattgctccctgctgagcgtgttttctctagtcaggccacacatcgatatctcttttcatggtattctgagtcacattaacaccgtcttcgtcctgcgaagcaaagaggggctgcttgatgtagagaagttagagtgcgaagacgagctgactggaaccgagatatcgtgcctccgccttaaaggacagatgatttacctgcccgaagctgactcaatccttttcctctgctccccttcagtgatgaatcttgatgatcttacgagacgagggctgtatctgtctgatattcccctgcatgacgccacccgtgacctcgtgctgctgggcgaacagttcagggaagagtataagttaacccaagagctggagatcctcactgatcggcttcaactcaccctccgggctctcgaggatgagaaaaagaaaaccgataccctcctgtactctgtgctgccaccctccgtagccaacgaactccgacataagcggccagtgcctgctaaacgctacgataacgtgactattttattctccggcattgttgggttcaacgctttctgcagcaaacatgcctccggcgagggcgctatgaaaatagtgaacctcctgaacgatctctacacacgtttcgacactctcaccgattcacggaagaatccgttcgtgtacaaagttgagaccgtcggtgataagtacatgacagtgtcaggtcttccggagccctgcatccatcatgctcgctctatctgtcacttggcattggacatgatggagattgccggacaggtacaggtcgacggagaatctgtccagataacaattggaattcacacgggggaggtggtgaccggcgtaattggccagcgtatgccaaggtattgtttgtttggaaatacagtgaacctaaccagcagaaccgagactacaggcgagaaagggaagattaacgtatccgaatacacttataggtgcctcatgtcccctgagaacagcgaccctcagtttcatctggaacacagagggcctgtctctatgaagggaaaaaaggagccgatgcaagtgtggtttctgagccgaaagaatactggaactgaggaaaccaaacaggacgacgactag

SEQ ID NO: 225581 - DNA, 1656 bp, synthetic construct
  misc_feature 1..1656: note = Description of Artificial Sequence: Synthetic coding sequence
  source 1..1656: mol_type = other DNA
atgtttggtaaaatgttttttgtattctgtcaggagtcgggatacgataccatccttcgcgtcctcggctctaatgttagagagttcttacaaaacctggacgcactgcatgaccacctggcaacaatatacccaggaatgagagctcctagctttagatgcaccgacgcagaaaaggggaaaggactcatcctccactactattctgaacgggaaggcctccaggacatcgtcattgggataatcaagaccgtggcccaacagatccacggaactgagatcgacatgaaagttatccagcagagaaatgaggaatgcgaccacactcaatttcttattgaggagaaggagtctaaggaagaggacttctacgaggatctggatcgattcgaagagaacggcacacaggagtcgagaatcagtccatacaccttctgtaaggcatttcctttccacataatctttgacagagacctcgtggttactcagtgtggtaacgctatttatagagtgctgcctcagctccagccgggaaactgttcccttctttccgtcttcagcctcgtccgccctcacatagatattagttttcacgggatcctgtctcacatcaacacggtgtttgtgctgcggtcaaaagaaggactcctggacgtggaaaagctcgagtgtgaagatgagctgacaggcactgagataagctgcctgcgattaaagggccagatgatctacctgccagaggccgattcaattctcttcctgtgctccccttccgtaatgaacctagatgacctgactcgcagaggcttgtacctttccgatattccgctgcatgacgccactcgcgacctcgttctcctaggagagcaatttcgcgaggaatacaagcttacacaggaactggagattctcactgatcgcctccagctcaccctgagagcgctcgaagatgagaaaaagaagacggacaccctgttgtattccgttctgcccccttccgtggccaatgagcttcgacataaacgacctgtgcccgctaaaagatatgataacgtgactatcttatttagtgggatcgtaggattcaatgctttctgctccaagcacgcttcgggggaaggcgcaatgaaaattgtcaatctgctaaatgatctttatacccggttcgataccctgaccgattcaagaaaaaatccttttgtatacaaagttgagaccgtgggggacaagtacatgacagtctccggcctcccagaaccttgcatccaccacgcccgttctatctgccacctagctttagacatgatggagatcgcgggacaggtccaggtcgacggcgagtcagtacagatcacaatcgggatacacaccggcgaagtggttacgggcgtgatcggacagagaatgccaagatattgcttgtttggtaacaccgttaacctcacttccagaacagagaccaccggcgaaaaggggaaaatcaatgtgtcagagtacacatatagatgtctgatgtcacccgagaactcggatccacaatttcacttagagcaccggggtccggtgtctatgaaagggaagaaggagcccatgcaggtctggtttctgtccagaaaaaacacaggaactgaagaaaccaagcaggatgacgattag

SEQ ID NO: 225582 - DNA, 1800 bp, synthetic construct
  misc_feature 1..1800: note = Description of Artificial Sequence: Synthetic coding sequence
  source 1..1800: mol_type = other DNA
atgctgatgtgttttatcaaagaggcgcagttagatgaggaaggccagttcttagtcagaataatctatgacgactcaaagacatacgatctcgtggccgcagccagtaaggtgctgaatttaaacgccggagagatcctccagatgttcggtaagatgttctttgttttttgtcaggagagcgggtacgatactatcctgagggtgctaggttctaacgtgagagagttcctgcagaacttagatgcattgcatgatcacctcgccactatttaccccggtatgagagctccgagttttcggtgtaccgatgctgagaagggcaagggcctgatcctccactactattccgaacgcgaggggctccaggatatagtaatcgggatcattaagactgtggcccaacaaattcacggcacagagatcgatatgaaagttatccagcagcgcaatgaggagtgcgaccatacccagtttctgatcgaagaaaaagaaagtaaggaggaagatttttacgaggacctggatagatttgaagaaaatggaacacaggagtccaggatcagtccttataccttctgtaaggccttccctttccacataatttttgaccgtgacctggtggtgacccaatgcggaaacgcgatttatcgcgttctgccacagcttcagcccggaaattgctcactccttagcgtgttcagccttgtgcgaccccacatagatatctcctttcatggaattctgagccacataaataccgtgttcgtcttgcggtctaaagagggtctcttggacgtcgagaaactggaatgtgaggatgagctgactggcaccgaaatctcatgtctgagactcaagggccaaatgatttatctgcctgaagcggattcaattctgttcctgtgcagcccctcagtcatgaacctggacgatctgactagaagagggctgtacctgtccgacatccctctgcatgacgcaactagggacttagttctcctgggcgagcagtttagagaggaatacaaattaactcaagaactggaaatcctaaccgacaggctgcaactgaccttgagggcactagaagacgagaaaaagaagacagataccctgctttactcagtgttgccaccttccgtggcaaacgaactgcggcacaagcggcctgtgcctgccaagcgctacgacaacgtgaccatccttttctcggggatcgtcggctttaatgctttttgtagcaagcatgcctcaggtgagggcgctatgaagatcgtaaacttattgaatgacctctacaccagattcgacacgctcacagattctcgcaagaaccctttcgtgtacaaggtggaaacagtgggggataagtacatgaccgtgtctggacttcccgaaccctgcatacatcacgctaggtctatttgtcacctggccttggacatgatggagatagcaggacaagtccaggtcgatggagaatcagtacagattactatcggcatacacaccggcgaagtcgtcactggcgtaatcggtcagagaatgccgaggtactgtctgttcggtaataccgtgaatttaacttccagaactgaaacgactggtgagaagggaaaaataaacgtgagtgaatatacctacaggtgcctcatgtccccggagaactccgatcctcaattccatctcgaacataggggccctgtctcgatgaaggggaagaaagagcctatgcaggtttggttcctgagccgtaagaacacaggcacagaggaaaccaaacaggacgacgactag

SEQ ID NO: 225583 - DNA, 1656 bp, synthetic construct
  misc_feature 1..1656: note = Description of Artificial Sequence: Synthetic coding sequence
  source 1..1656: mol_type = other DNA
atgtttggcaagatgttttttgtgttttgccaagagagtggttacgatacaattctgcgcgttctcgggagcaacgttagggagtttctgcagaacctggatgcactgcatgatcatctggccaccatatatcctggcatgagggccccatcatttcgttgtacagatgctgagaagggtaaagggttgattttgcactactatagtgagcgggagggattacaggacatcgttattgggattattaagacagttgcgcagcagattcatggaaccgaaattgatatgaaagtgatacagcagagaaacgaagagtgcgatcacacccagttcctgatagaggagaaggaatccaaggaggaagacttttatgaggatctggaccggttcgaagagaacggaacccaagagtccaggatcagtccctataccttttgcaaggccttccccttccatattattttcgatcgggatctcgtggttacacaatgtgggaacgctatatatcgggtcctgccgcaattgcagcctggcaactgttccctcctgtccgtcttttctctggtgagaccacatatcgacatctcattccacgggatcctgtcccatatcaacacagtatttgtgttacgcagtaaggaaggcctgctcgatgtcgagaaattggagtgcgaggacgagctgacggggaccgagatctcttgtctgcggctgaaagggcagatgatttatctcccggaggccgatagcatcctgtttctttgcagcccatccgtgatgaacctcgacgacctgacacggcgtgggctgtatctctcagatataccacttcacgatgccacaagagatctggtgttgttgggggagcagtttagagaagagtataaattaactcaggaattagagattctgacagaccgattacagctcaccctgagggccctcgaagacgaaaaaaagaagacggacactctgttatacagcgtattgccaccaagcgttgctaacgagttgcggcataagcggccagtcccggcaaagcgctacgataatgttacaatcctgttctccggaatcgttggtttcaacgcattttgcagcaagcatgcttcgggggaaggagccatgaagatcgtcaacttactgaacgatctttatacaagatttgatacactgaccgattcgagaaagaatccgtttgtttacaaagtcgagactgtgggcgataagtatatgaccgtatcagggctgccagaaccgtgtattcatcatgcgcgttctatctgccatttagcgttggatatgatggagatcgctggacaggttcaggttgacggagaatccgtacagattacaatcggtattcataccggtgaggtcgtgacaggagtgatcggtcagaggatgccgaggtactgccttttcggcaacactgtaaacctgacctcccgcacggaaacaactggagaaaaaggcaaaattaatgtgagcgaatacacatataggtgcttaatgtcgcccgaaaactctgatccccagttccatctggagcacagaggccctgtgtctatgaaaggcaaaaaagaaccaatgcaggtgtggttcctcagtaggaagaacacggggacagaagagaccaagcaggacgacgattag

SEQ ID NO: 225584 - DNA, 3222 bp, synthetic construct
  misc_feature 1..3222: note = Description of Artificial Sequence: Synthetic coding sequence
  source 1..3222: mol_type = other DNA
atgaagaccctgctcctcgacctggccttgtggagtctgctgtttcagcccggatggctttccttcagtagccaggtgtcgcaaaattgccacaacggttcctacgagatctccgtactgatgatgggcaactctgcattcgccgagcctctgaaaaacctagaggatgccgttaacgaggggctcgagatcgtgcgcggtcgacttcagaacgctgggctgaatgtgactgtcaatgccaccttcatgtacagcgatggactgattcataatagcggcgactgtcgatcgtcaacctgcgaaggactcgatctgctgcggaagattagcaatgcgcagaggatgggttgcgtgctaatcggcccatcctgtacgtattctaccttccagatgtacttagacactgaactttcctaccccatgattagcgccggatcatttgggctctcttgcgattacaaggagacattgactaggctgatgagcccagccaggaaactgatgtacttcctggtaaacttctggaagacaaatgacctaccctttaagacatacagttggagtacctcatacgtttataaaaatggcaccgagacggaggattgtttctggtaccttaacgccctcgaagcatctgtctcctactttagccacgagcttggattcaaagtcgtgctccgccaagataaagaatttcaggacatactgatggatcacaacaggaaaagtaacgtgattattatgtgtggcggtccagagttcctgtataagctgaaaggagacagggcggtggccgaagacatcgttatcattttagtcgacctgttcaacgatcagtattttgaggacaatgtgacagccccagattatatgaagaatgtattggttctgactctcagtcctggtaattccctcctcaatagcagttttagccgcaatttgtccccgaccaaaagggatttcgctctggcctacctgaatggaatacttttgttcggtcatatgctgaagatctttctggagaatggcgaaaacataacaactccaaagtttgcccatgctttcaggaacttgaccttcgaggggtacgacgggcctgtgactctagacgactggggggacgtcgacagtacaatggttttgctctacacctctgtggacacgaagaagtacaaggtactgctgacctacgatacacacgtaaataagacataccccgtggacatgagtcccactttcacttggaaaaattccaaattgcccaacgatattaccggacgaggaccccaaattcttatgattgccgtctttaccttaaccggcgctgttgtgttgttgctgcttgtcgcccttctcatgttgcgcaaataccggaaggactacgaactgaggcagaagaagtggagtcatattccacctgagaatatttttcccctcgaaaccaatgagactaaccacgtgtctctgaagatcgacgacgacaagcgcagagataccatacagcggctgcgccaatgcaagtacgataagaaacgggtcatcttgaaggatttaaagcacaatgacggcaacttcacagaaaagcagaagattgaactgaacaagctgttgcagatcgattactacaacctgacaaaattttacgggactgtgaaactcgatacaatgatcttcggcgtcattgagtattgtgagagaggatccctcagagaggtcctcaatgataccatttcatatcccgatggcacctttatggattgggaatttaagatttctgtactgtacgacatagccaagggcatgagttacttgcatagttctaagacagaagtccacgggcgtttgaagagcacgaactgtgttgtggatagccggatggtggttaagataaccgactttgggtgtaactctattctaccaccgaaaaaggatttatggactgcccctgagcatcttcgacaggcaaatatctcccagaagggggatgtctactcctatgggatcattgcccaggaaataattctgcgcaaggaaactttttataccttgagctgtagagatcgcaacgagaaaatttttcgggtggagaactccaatggtatgaagcctttccgcccagaccttttcttagaaacagcagaagagaaagagctggaagtatacttgctggtgaaaaactgttgggaggaggaccctgaaaagcggcctgactttaaaaagatcgagacaaccctcgccaaaatatttggactatttcatgatcaaaaaaacgaatcttacatggacaccctgatcagacggctgcaactctacagtcggaatctcgagcacttggtggaggagcggacgcaactatataaggcggaacgggatcgggctgatagattgaactttatgttactgccgcgtctggtggtcaagtcactgaaagaaaaggggttcgtggaacccgaactttacgaagaagtcactatatatttctcggatatcgtgggcttcacaacaatctgcaaatacagcacccctatggaggtcgtagacatgcttaatgatatttataaaagcttcgatcacattgttgaccaccacgacgtgtataaagttgagacaattggggacgcctacatggtcgcatcaggcctgccaaagcgaaacggcaaccgacatgctatagacattgccaagatggccctagagatcctttctttcatggggacgttcgagttggagcacctgccaggcctacccatctggatccgaatcggcgtccacagcgggccttgtgctgccggagttgtggggatcaaaatgcccaggtattgcctgttcggggatactgttaacaccgcctcacgcatggagagtactggtcttcctctgcggatccacgtgtcgggatctacaatcgccatcttgaagcgcaccgagtgccagtttctctacgaggtgcgcggtgaaacatacctgaagggtagaggaaatgagacaacatactggctcaccggaatgaaggatcagaagttcaacctccccacaccacctaccgttgagaaccagcagagactgcaagccgaattttcagatatgattgccaactccctgcagaagcgtcaagccgctggcatccgctcccagaagcctagacgcgtcgctagttacaaaaaaggaactctcgaatacttgcaactcaatactacagacaaggagtccacatatttctag

SEQ ID NO: 225585 - DNA, 3312 bp, synthetic construct
  misc_feature 1..3312: note = Description of Artificial Sequence: Synthetic coding sequence
  source 1..3312: mol_type = other DNA
atgactgcgtgtgcacgccgtgcgggaggcctccccgatccaggcctgtgtggaccggcttggtgggccccttcattgcctcgattacccagggcactgccaaggcttcccttgctgcttctgctgttgttgttgcagcctccggctttgagtgctgtatttacagttggcgtgctgggcccttgggcttgcgacccaatctttagccgcgctcggcctgacctggcggcacgactggctgcagccaggctcaatagagacccagggctcgcgggaggaccaaggtttgaggtagctctcttacccgaaccctgtcgaacccctgggagtctgggcgcagtttcaagcgctctcgcaagagtttcgggactggtcggaccagtcaatcctgctgcctgtagacctgcagagctgctggcggaggaagcgggaatcgctcttgtcccttgggggtgtccttggacccaggctgagggcactacagctccagccgttactcccgctgcagacgccctttacgctctcctgagagcgttcggatgggcgcgagtagcccttgtgaccgctccacaggacctgtgggtagaggccggtcgttctttgtccacagcattgagggctagggggctgcccgttgcctctgttacgagtatggagcctctggacctctccggagcccgagaagctctgagaaaggttcgagacggacctagggtgaccgccgtgataatggtcatgcattccgtcctgttgggcggagaagaacagcggtatctcttagaagccgcagaggagctgggtttaaccgacggaagtttggtgttccttccatttgacacgattcactacgccctctctccaggtccggaagcactcgccgctttggcaaatagctcccagctcaggcgcgctcacgatgccgtcctgacactgacgcggcattgtccatccgagggatcggtgctcgacagtctgagaagagcccaggaacgaagagagttacccagtgacttgaacctacaacaggtttcacctctgttcggaactatctacgatgccgtgttcttgctggctcgaggtgtagccgaagcacgggctgcggctggcggaaggtgggtaagcggggcagcagtagctcgacatattagagacgcacaggtgccaggcttctgcggagacctcggcggagacgaggagccacctttcgttttgctggatactgacgcagccggagataggctgttcgccacctacatgttagaccctgcgagagggtcattcctttcggccggtacccggatgcattttccaagaggcggttcagccccaggacctgaccctagttgttggttcgaccccaacaatatctgcgggggtgggctggaacctggcctggtgttcctgggattcctgttggtagtcggaatgggactggccggagccttcttggcacattacgtgcggcatcgtctgctgcacatgcagatggtgagtgggccaaataaaatcatactcacagtggatgatataacctttctgcatccacacggtggaacaagccggaaggtggctcaaggaagtcggtcctcactgggtgcacgctctatgtcggacatacgttccggaccctcccagcacttggacagcccgaatataggagtgtatgaaggcgaccgagtgtggcttaaaaagttccccggagaccagcacatcgccatccggcctgcaacgaaaaccgcatttagcaaactgcaagagctgcgtcatgagaacgtcgctctgtatcttgggctgtttctggccaggggagcagagggccctgccgcattgtgggaaggaaatttggcagttgttagcgaacactgtacacggggatctctccaggatctcctcgctcagcgggagatcaaactcgattggatgtttaaaagcagcctattactggatctgatcaaaggaattaggtatctccaccaccgaggggtggcccacggtagactgaagtccagaaactgcattgttgacggcagatttgtgttgaagattactgaccacggccacggaaggttgctggaggctcagaaggttctgccagagccaccccgagccgaggaccagctgtggacagcccctgaacttttgcgcgatcccgcactggagcggagagggactctcgcaggtgacgtcttttccctcgccattattatgcaggaagtagtgtgtcgatctgctccatacgctatgctcgaactgactcctgaagaggtagtgcagcgcgtcagatcccccccacctttgtgccgcccacttgtcagtatggatcaggctccagtggaatgtattctgctgatgaagcagtgctgggcggagcagccagagctgcgccctagcatggatcacacatttgacctgttcaaaaacattaataaaggcaggaaaactaacatcatcgactccatgttgcggatgcttgagcaatatagctccaatctcgaagacttaatcagggaacgcacagaggagctggaactggaaaagcagaagacggacaggctgttaacccagatgctccctcccagtgtggcagaagccctgaaaacagggacacccgtggagccagaatactttgagcaggtgacactgtatttttctgacattgtggggtttacaacaatctccgcgatgagcgagcccatcgaggtggtagacctccttaatgacctctacactttatttgacgcaatcatcggtagccacgacgtgtataaggtggagactattggcgacgcttacatggtggcgagtggactgccacaaaggaacggccaacgtcacgctgccgagatcgcaaacatgagcctggacattctttctgctgtgggcacttttcggatgcgccacatgcccgaggttcccgttcgcattagaatagggctgcatagcgggccatgtgtggccggtgtcgtagggcttactatgcccaggtattgtttgttcggcgacacggtgaacacagcctcacgtatggagtcaacaggactgccctacagaatacacgtgaatctatccaccgttggcattctcagggctctggactccggctaccaagtagagcttcggggtagaaccgagttgaaaggaaaaggagccgaggacactttttggctggtcgggagacggggatttaacaagcccatacccaaaccaccagatctgcagcccggttcatccaaccacggtatatccctacaggaaataccccctgagcgtcgtcgcaagttagaaaaggctagaccaggacagttttcctag

SEQ ID NO: 225586 - DNA, 594 bp, synthetic construct
  misc_feature 1..594: note = Description of Artificial Sequence: Synthetic coding sequence
  source 1..594: mol_type = other DNA
atgaggaaataccgcagccattggagtcaaggcgatcgggagggttaccagagacgctccaactattacgagggaccacatacttctcacagcagccccgctgaccggactagggaggaagtggtaacaccaactctgcctgagcatactgctacgcgttcacagatggctactagcctggacttcaagacttatgtggatcaagcatgtagagccgcagaagagttcgtcaatatctattacgagactatggacaagcggcgacgggcactgacccggttgtacttggacaaggccactttgatttggaatggaaacgcggtatccgggctggatgccctcaataacttcttcgataccttgcctagttctgaatttcaggtgaacatgcttgattgtcagcctgtgcacgaacaggccacacagtctcagacaaccgtcctcgtggtgacttctggcacagtaaagttcgatgggaataagcaacacttcttcaatcaaaatttcctgcttaccgctcaaagcacgccaaacaacacggtatggaaaatcgccagtgactgtttcagattccaagactggtcaagttcctag

SEQ ID NO: 225587 - DNA, 606 bp, synthetic construct
  misc_feature 1..606: note = Description of Artificial Sequence: Synthetic coding sequence
  source 1..606: mol_type = other DNA
atgggtaacgtaatggagggcaaaagtgtggaggaactgtcatcaaccgagtgccaccaatggtataagaagttcatgactgaatgcccttccgggcagttgactctgtatgagttccggcagttcttcggccttaaaaacttgtctccatccgcgagccagtatgtcgagcagatgtttgagactttcgactttaacaaggatgggtatattgacttcatggaatatgtggccgcactgtccctggtattgaagggcaaagttgagcaaaaattgcgatggtactttaaactgtacgacgtggatggtaatggctgtatcgacagggatgagcttttaacaatcattcaggccattcgggctattaacccatgttccgatacaactatgaccgctgaggagttcacagacaccgtgttctctaagatcgacgtaaatggggatggcgagctgagcctggaggagtttatagagggggtccagaaagaccagatgctgcttgatacccttaccagatcgctcgatctgacccggatagtaagaaggctgcagaacggggaacaggacgaggagggagccgacgaggctgcagaagccgcaggttag

SEQ ID NO: 225588 - DNA, 606 bp, synthetic construct
  misc_feature 1..606: note = Description of Artificial Sequence: Synthetic coding sequence
  source 1..606: mol_type = other DNA
atgggcaacgtgatggagggtaagtcagtggaagaactttcaagtactgaatgccaccagtggtacaagaaatttatgaccgagtgccccagcggacagctgaccctttatgaatttagacagtttttcgggctcaagaacctgagcccatctgcatcccagtacgtagagcagatgttcgagacatttgacttcaataaagatgggtacattgattttatggaatatgtggctgcccttagccttgtgctcaaaggaaaagtcgaacagaaacttcggtggtactttaagctatatgacgttgatgggaacgggtgcatcgaccgggatgagctgctgacaataatacaggccattcgcgctattaacccatgttctgacactacaatgacagcagaggagtttaccgatactgtcttcagtaaaattgacgtgaatggcgatggcgaactgtctctagaagagttcatagaaggcgtgcaaaaagaccaaatgctcctggatactctcaccaggagcttagacctgacccgcattgtgagacgactgcagaacggcgaacaggacgaagaaggagccgatgaggcagcagaagcggcaggctag

SEQ ID NO: 225589 - DNA, 618 bp, synthetic construct
  misc_feature 1..618: note = Description of Artificial Sequence: Synthetic coding sequence
  source 1..618: mol_type = other DNA
atggagggcaagagcgttgaggagctgagcagcactgaatgccatcagtggtacaagaagttcatgacagagtgcccaagtggacagttgaccttatacgagtttcgccaattctttggcctgaagaacctttctccaagcgcttcacagtatgttgaacagatgtttgagacttttgactttaataaggatggctatattgatttcatggaatacgttgcagccctgtctttggtgctcaaaggaaaagtggagcagaaactgagatggtatttcaagctctacgacgttgacggaaacggatgcatagatcgggatgaattactcaccatcatccagtttccacaccagtaccagaagactgcaatccgtgctattaacccatgcagtgacaccacaatgactgccgaggaatttaccgataccgtcttctccaaaatcgatgtcaacggagacggggagctgtctttggaagagttcatcgaaggcgtgcagaaagaccagatgctgcttgatacgcttactcggagtttggacctgactcggatcgttcgcagactacagaatggcgaacaggacgaggagggcgcagatgaagctgcagaagcagcaggatag

SEQ ID NO: 225590 - DNA, 606 bp, synthetic construct
  misc_feature 1..606: note = Description of Artificial Sequence: Synthetic coding sequence
  source 1..606: mol_type = other DNA
atgggcaacgtgatggagggaaagtcagtggaggaactgagctcgactgagtgtcaccaatggtacaaaaaatttatgacagagtgtccgtccggtcaactaacgttgtacgaatttcggcagttttttggcttaaagaatctgtcccccagcgcatcccagtacgttgagcagatgtttgagacattcgatttcaacaaagatgggtatatcgacttcatggaatacgtggcagcccttagcctggttctgaaaggaaaggtagagcaaaagttacggtggtacttcaagctgtacgatgtggatgggaatggctgtattgatcgtgacgagttgttgacaatcatccaggctatcagggctattaacccctgtagcgacaccaccatgactgccgaggaattcacagacaccgttttcagcaagatcgatgtgaatggagacggagaactctctttggaggagttcatcgaaggcgtccagaaggatcagatgctcctcgacacattaactcgttcattggatcttaccagaatcgtacggaggctccagaacggcgagcaggacgaagagggagccgacgaggctgcagaagcggcaggatag

SEQ ID NO: 225591 - DNA, 267 bp, synthetic construct
  misc_feature 1..267: note = Description of Artificial Sequence: Synthetic coding sequence
  source 1..267: mol_type = other DNA
atgggcaatgtgatggagggaaagagtgtggaagagctaagtagcaccgagtgtcatcagtggtataagaaattcatgacggaatgcccttcgggccagctgactctctatgagtttcgacagtttttcggcttaaaaaatttaagcccatccgcgtcccagtacgttgaacagatgtttgagacctttgactttaacaaagacggttacattgactttatggagtatgtggccgctctgagcctcgtgctcaagggcaaggtgtag

SEQ ID NO: 225592 - DNA, 606 bp, synthetic construct
  misc_feature 1..606: note = Description of Artificial Sequence: Synthetic coding sequence
  source 1..606: mol_type = other DNA
atgggaaatgtaatggagggcaaaagcgtcgaagaactgtcttcgacagaatgccatcagtggtacaaaaaatttatgactgagtgcccatctgggcagctgacgctatacgagttcagacaattttttggcctgaagaacctgagtcccagtgcaagccaatatgtggaacagatgttcgagacttttgacttcaacaaggacgggtatatcgattttatggagtacgtagcagccctcagtttagtgcttaagggcaaggtcgagcagaagcttaggtggtactttaaactctacgacgttgacggaaatggatgcattgacagggatgaacttctgactattatacaggcaattcgagcgatcaacccttgcagcgataccacaatgaccgcagaagagttcactgatacagtgttcagtaaaatcgatgttaacggagacggtgaactgagcctcgaggagttcatagaaggagtgcagaaggatcagatgctgttagacaccctcactcgctcattggatctgactcgtatcgtgagacggcttcaaaatggagagcaagacgaggagggtgcagacgaggccgctgaagccgcaggctag

SEQ ID NO: 225593 - DNA, 1020 bp, synthetic construct
  misc_feature 1..1020: note = Description of Artificial Sequence: Synthetic coding sequence
  source 1..1020: mol_type = other DNA
atggaccagaataattcactcccaccatacgcccagggcctggcgagccctcagggcgcaatgacccccggaatcccaatcttcagtcccatgatgccatatggcacaggactgacccctcagccaatacagaacaccaacagcctgtctatcctggaggagcagcaacggcagcaacagcagcagcaacagcagcagcagcagcagcagcagcagcagcagcaacagcaacagcaacagcagcagcaacagcaacagcagcagcagcagcagcagcaacaacaggcagttgcggctgcagcggtgcagcagtctacgtcacagcaggcaacgcaaggaactagcggacaggcacctcagcttttccatagccagacgttaacaaccgccccactgcctggcaccacccccctctacccttccccaatgacaccaatgacccccatcaccccagcaactccagcatctgaaagttctggaattgtgccgcagctgcagaacattgtttccacagtgaacttaggttgcaagctggaccttaagaccattgcactgcgagcgcgaaacgctgagtacaatccaaaacgcttcgccgcagtcataatgagaatacgagagcccagaacaacagccttaatctttagttccggaaagatggtctgcaccggtgccaaaagcgaagaacagagccgcctggccgctcgcaaatatgctagagtcgtgcagaaactcggcttccctgccaagtttctggactttaagatccagaatatggtgggaagttgcgatgttaagttccccattagactggaaggactcgtgctgacacatcagcagttctctagctacgaacccgagctctttcctggtctaatttaccggatgatcaaaccacggattgtacttctcatctttgttagtggcaaagtggtcctcactggagccaaagtccgagcagaaatttacgaggcttttgaaaatatctacccaatcttaaaagggtttcgcaaaactacatag

SEQ ID NO: 225594 - DNA, 519 bp, synthetic construct
  misc_feature 1..519: note = Description of Artificial Sequence: Synthetic coding sequence
  source 1..519: mol_type = other DNA
atgggccaggaattctcgtgggaagaggcggaagctgccggtgaaattgacgttgctgagttacaagagtggtacaaaaaattcgttatggagtgcccctccggcacgttgtttatgcatgagtttaagcgattcttcaaagttaccgatgatgaggaagcctcccagtatgtggagggcatgttcagagctttcgacaaaaacggcgacaacaccattgactttctcgagtacgttgccgctcttaacctcgtgctcagagggacccttgagcacaagctcaagtggacctttaagatctacgacaaggacggcaacgggtgtatagacagactagagctactcaatatcgtggaatgtcggagagagctgcaaaccgagcagggacagttactcacacccgaggaggtggtggacaggatttttctattagtcgacgaaaacggtgacgggcagctgtctctcaatgagtttgtagagggtgccagaagagataatttgttaatgcccaccctgtag

SEQ ID NO: 225595 - DNA, 630 bp, synthetic construct
  misc_feature 1..630: note = Description of Artificial Sequence: Synthetic coding sequence
  source 1..630: mol_type = other DNA
atggggaacggaaaatctattgccggtgaccaaaaggcagtgcctacccaggaaacacacgtctggtacaggacctttatgatggaatacccttccggcctccagaccttacatgagttcaagacacttttagggctacagggcctgaatcagaaggcaaataaacatatcgatcaggtgtataatacgtttgacactaacaaagatggctttgtcgattttctcgagttcatcgccgctgtgaacctgataatgcaggagaagatggaacaaaaactgaagtggtacttcaaactgtacgatgcagatggaaatgggtccatcgataaaaacgagcttctcgatatgtttatggccgttcaggctctcaacggtcagcagaccttgtctccagaggagtttatcaatctcgtgttccacaaaatcgatatcaacaatgacggcgaattaacattggaggaatttatcaacggcatggccaaagaccaggatctgctggagatcgtttacaagtcttttgatttctccaatgtcctcagagtcatctgcaatggaaaacagcccgacatggagacagacagctctaaatcaccagataaagcaggactgggcaaggtgaaaatgaaatag

SEQ ID NO: 225596 - DNA, 591 bp, synthetic construct
  misc_feature 1..591: note = Description of Artificial Sequence: Synthetic coding sequence
  source 1..591: mol_type = other DNA
atggggaatgggaaaagcatcgcaggagaccaaaaggctgttcctacacaggaaacccacgtttggtatcggacttttatgatggagtatccttcaggattacagaccctacacgagtttaagacacttctcggcctgcaggggctcaaccaaaaggctaacaaacacatcgatcaggtatataataccttcgacactaacaaagatggatttgtcgacttcctagagtttatcgctgccgtaaacctgattatgcaggaaaagatggaacagaagttaaagtggtacttcaagttatacgacgctgatgggaacggcagcatcgataagaatgaactgctggacatgttcatggcagtgcaggcactcaacggacagcaaaccttgagtcctgaagaatttatcaacctcgtgttccacaagatcgatattaacaacgacggcaatggggctaccctgtattggatcacctttcccacgaagggcatcgattttaggcgtatataccagtggcacggcaagcggtccggatcccccggtgactgccttcaagaactgcggctgcttcaatgtgcggaatcaaatctgtag

SEQ ID NO: 225597 - DNA, 348 bp, synthetic construct
  misc_feature 1..348: note = Description of Artificial Sequence: Synthetic coding sequence
  source 1..348: mol_type = other DNA
atgaacgcgtttctgctgtcggccctctgcttgcttggggcatgggctgcgttggccggaggagttacggtgcaggatggcaacttcagcttttctctagagtccgttaagaaactcaaagacctgcaggaaccacaggagccgagagttggtaagctcagaaacttcgcccctatccctggcgagcctgtcgtgcctattctctgcagtaaccccaacttccccgaagagcttaagccactctgtaaagagccaaatgctcaggaaattctccagagattagaggaaatcgctgaagacccaggaacgtgtgagatctgtgcctacgccgcttgcacagggtgttag

SEQ ID NO: 225598 - DNA, 339 bp, synthetic construct
  misc_feature 1..339: note = Description of Artificial Sequence: Synthetic coding sequence
  source 1..339: mol_type = other DNA
atgggatgtcgcgctgcctctggccttcttccgggtgtggccgtcgtgcttctgcttctcctgcaatccacccagagcgtctatatccagtatcagggttttcgggttcagctcgagagtatgaaaaaactcagtgacttggaggcccagtgggcgccttccccgcgtcttcaggctcagtctttgttgccagccgtctgccaccaccccgcattacctcaggacttgcagcccgtttgcgcatctcaggaggcatcatccatcttcaagactcttaggaccattgctaatgacgactgtgaactgtgcgtgaatgtcgcctgtacaggatgtctttag

SEQ ID NO: 225599 - DNA, 594 bp, synthetic construct
  misc_feature 1..594: note = Description of Artificial Sequence: Synthetic coding sequence
  source 1..594: mol_type = other DNA
atgtcaggacctcgccctgtcgttctgtctggaccgtctggcgcagggaaatctacactgctgaaaagactgctgcaggaacacagtggtatattcggctttagcgttagccacacgactcgcaatcccaggcccggtgaggagaatgggaaagactactactttgtgacccgcgaggtcatgcagagagacattgccgctggtgattttattgagcatgccgagttttccggcaacctatacggaactagcaaagtcgcagtgcaagccgtgcaagccatgaacaggatctgtgtgctggatgtagacctgcagggggttaggaacattaaagccacagatttgcgacccatctatatctcagtgcaaccaccctctctgcatgtcctggagcaacggcttcgccagcggaacacagaaaccgaagagtctttagtgaaacggctggcagcagcccaggcagacatggagagctccaaggaacctggattatttgacgtagttataatcaacgattcccttgatcaggcttacgctgagctgaaagaagctctgagcgaggaaattaagaaagctcagcggaccggagcctag

SEQ ID NO: 225600 - DNA, 594 bp, synthetic construct
  misc_feature 1..594: note = Description of Artificial Sequence: Synthetic coding sequence
  source 1..594: mol_type = other DNA
atgtctggcccaaggccagtagtccttagcggaccgtcaggggctgggaaatccaccctgctcaaacgattattgcaagagcatagtggaatctttgggtttagtgtgtcacatacaactagaaacccacggcctggcgaggaaaacggtaaggactactactttgttacacgggaggtaatgcagcgggatatcgccgctggagacttcattgagcacgcagagttttctgggaacctgtacggaacgtccaaagtcgcggtgcaggccgtgcaggccatgaataggatatgtgttctcgacgttgatctccaaggcgtgcggaatattaaagcgacagacctgcgcccaatttacatatctgttcagccaccatcactgcatgtcttggaacaacgtctccgacaacgcaatacagagacagaagagagtctggtgaaacggctagctgcagcccaggccgatatggagtccagcaaggaaccagggctgttcgatgtcgtgattataaacgacagtcttgatcaggcctatgccgagctgaaagaggcactatcagaagagatcaaaaaggcacagcgcacaggcgcttag

SEQ ID NO: 225601 - DNA, 594 bp, synthetic construct
  misc_feature 1..594: note = Description of Artificial Sequence: Synthetic coding sequence
  source 1..594: mol_type = other DNA
atgtctggacctagacccgttgtgctatcagggccttccggcgcaggaaagagtaccttgctgaagcgactgctccaggaacactccggtatatttgggttctcagtgtcccatacaacaagaaatcctcgacccggagaggagaatggtaaagattactacttcgtgactcgtgaggtgatgcagcgggatattgccgcaggagattttatcgagcatgcagagtttagtggcaatctctacggaactagcaaagttgccgtacaggcagtccaagcaatgaatcggatctgcgtgctagatgtagacctccagggagtgaggaatataaaggccactgatcttcggccaatctacatttccgtccagcctccttcactgcacgttctggaacaacgactccgtcaacgcaacacagagacggaagagtcactcgtcaagagactcgccgcagcccaggctgacatggaaagtagcaaggagcccggactttttgacgtggtcataattaacgactctttggaccaggcatacgctgagctcaaggaggccttgagcgaagagattaagaaggcgcaacggactggcgcatag

SEQ ID NO: 225602 - DNA, 600 bp, synthetic construct
  misc_feature 1..600: note = Description of Artificial Sequence: Synthetic coding sequence
  source 1..600: mol_type = other DNA
atgtcaggtccccgacctgtcgtgctgagcgggccaagcggggctggcaaaagcacactgttgaaaaggctgctgcaggagcactcaggtatcttcggattcagcgtatcacgagaatcccgcgcacttgtcgagggataccacgaagaaccggaggcaaggaggggcgagcggcaaagggaggttatgcagagagacatcgccgctggtgacttcatcgagcacgccgaattctccggtaatctgtacggcacatccaaggtggccgtccaggcagtgcaggctatgaacaggatatgcgttttagacgtggatctccagggggtgagaaacattaaggcgactgaccttcgtccgatctatatatccgtgcaaccaccctcactgcacgttctggagcagcggctgcgccagcgaaacaccgaaaccgaggagtccctggtgaagagattagccgctgcacaagcagacatggaaagttcgaaggaaccaggcctgttcgatgtggtgattatcaacgacagtctggaccaggcttacgcagagcttaaggaggccctcagtgaggaaattaaaaaggcccaacgcaccggcgcttag

SEQ ID NO: 225603 - DNA, 729 bp, synthetic construct
  misc_feature 1..729: note = Description of Artificial Sequence: Synthetic coding sequence
  source 1..729: mol_type = other DNA
atgagtggcccacgtcccgtagtgttgagcggcccatccggggctggcaagtcaacgctgctcaagcggttgctgcaggaacacagcgggatttttggctttagcgtgtcacataccactcggaaccctcgcccaggcgaggaaaatggtaaggattattattttgtgacacgagaagtcatgcagcgggatattgcagccggagactttattgaacacgctgaattttctggcaacctgtacggaacgagcaaagttgctgtacaggctgtgcaggcgatgaaccggatttgtgtgttggacgtcgacctgcaaggagttagaaatattaaggcaaccgatctccggcctatctatatttcagtgcagccccctagtctgcacgtgctgagattacggcagcgcaacaccgagaccgaagagagtcttgtcaaaaggcttgccgctgcacaggctgacatggaaagtagcaaggaacccggactcttcgatgtggtcatcattaacgattctctcgatcaagcttatgccgaactgaaagaggctctgtcggaggtcggcccttcactgtgcctgccgggtcaaggccctcggggaggcctgggcgcacgtcccctgctgtcaatgagaccactacgcaaatcgaggaaactcaagggacctgccccagaggcttgttgccttttctccgcccctagggcccatacgggccctggtcagcagcactag

SEQ ID NO: 225604 - DNA, 657 bp, synthetic construct
  misc_feature 1..657: note = Description of Artificial Sequence: Synthetic coding sequence
  source 1..657: mol_type = other DNA
atgttaaggcgccctctagctgggctggctgcagcagccctggggagagctcctcccgatggaatgagtggtccgcgaccagtggttttgtccggcccatctggcgcaggcaaatctactttactcaagcgcctactgcaggaacatagcggaattttcggcttctctgtgtctcacacgactagaaatcctcggccaggagaggagaatggcaaagattattatttcgtcacgcgagaagtgatgcagcgcgacatcgcagcaggcgactttatcgagcacgcagaattttccggaaacttgtatggaacttccaaggtggctgtccaggctgttcaggccatgaaccgcatttgcgttctggacgtggatttgcagggggtgcggaatatcaaggccacagacttgcggcctatttacatctctgtacagccaccctcactgcacgtactcgaacagcgactccggcagaggaacacggagaccgaagagtccctggtcaaaaggcttgcagctgcccaagctgacatggagagcagccctgccggactggagagctgtcccaccgccgctgtaagaacagccgcagggcagtcacctgcttgtcttatgtggtcaagtctcaccacagcatggacacgcccaacccaatcctag

SEQ ID NO: 225605 - DNA, 594 bp, synthetic construct
  misc_feature 1..594: note = Description of Artificial Sequence: Synthetic coding sequence
  source 1..594: mol_type = other DNA
atgtctggaccgaggcccgtagtgctgtctggaccctcaggagcagggaaatccacattgctgaagcgactgctccaggagcattctggcattttcggattctctgtgtcgcacactaccaggaacccaaggccgggagaggaaaacggcaaagattattactttgtgacccgcgaagtgatgcagcgggatatcgctgccggagatttcattgagcatgccgagttttccggcaatctatacggcacatcgaaggtggccgtccaggccgtacaagccatgaaccggatttgtgttctggacgtagatcttcagggcgttaggaatatcaaggccacagacctgcggcctatctatatctcagtgcagccaccgagccttcacgtcctcgagcagaggctccgacagaggaatactgagaccgaggagagcctggtaaagcgactcgcagccgctcaggctgacatggagagtagtaaagaacctggcctctttgacgtggtcattatcaacgatagccttgaccaggcctatgcagaactcaaagaagccttaagtgaggaaatcaaaaaggcacagagaactggggcatag

SEQ ID NO: 225606 - DNA, 726 bp, synthetic construct
  misc_feature 1..726: note = Description of Artificial Sequence: Synthetic coding sequence
  source 1..726: mol_type = other DNA
atgcttcgcagacccttggctggtcttgcagccgctgccttgggaagggcacctccggacggcatgtcggggcctaggccagtggtgctgtctggaccgtccggcgcaggtaaatcaacgctgctgaagaggctcctgcaggaacatagcggtattttcgggttctccgtgtctcacacaactaggaatcccaggccaggggaggagaatggcaaagactattatttcgtgaccagagaggtgatgcagcgagacatagcggcaggtgactttattgaacacgccgaattcagtggcaatctgtatggcacaagcaaagtggccgttcaagctgtgcaggctatgaatagaatctgtgtcttggatgtggatctgcagggcgtgaggaacattaaagccacagacctgcgcccaatctacatctctgttcagcctccgtccttacacgtcctcgaacaaaggttaagacaacgaaataccgagaccgaggagagcttggttaagcgcctggctgcggctcaagcagacatggaatccagaaaccaggaaagctcaaaggataggcggctgagattggccgtttgcagtcgacaccccggaccgatccaggaccagggctcctccatagagccgcctccttggcaagctatacgtcagctgtgtgcacttgggcaacacgtggaatggcgtcgctgctgcccatgcggctggaatattctcggatag

SEQ ID NO: 225607 - DNA, 594 bp, synthetic construct
  misc_feature 1..594: note = Description of Artificial Sequence: Synthetic coding sequence
  source 1..594: mol_type = other DNA
atgagcggcccaagacccgtggttttgagcggtcctagcggggctggcaagtcaacccttctgaagcgtctcctccaagagcacagtggaatatttggcttttcagtgagccatactactagaaaccctcgtccgggtgaagaaaacgggaaggactattattttgtgacgagagaagtaatgcagagggatattgccgcaggcgatttcattgagcacgccgagttttcaggtaatctgtacggtacatccaaggtggcggtacaggccgttcaggccatgaaccgcatctgtgtgctggacgtcgatctgcagggggtccggaatatcaaggcgaccgacttacgtccgatatatatttctgtccaacccccttccctgcacgttctggagcaaagactgcgtcaacgcaatactgaaacagaggagagcttggtaaaaaggctcgccgcagcccaggccgacatggagagttcgaaagagcccggactgtttgatgtggtcatcattaacgacagccttgatcaagcgtacgccgagctgaaagaggcgttgtctgaggagatcaagaaggcccaaagaactggggcttag

SEQ ID NO: 225608 - DNA, 657 bp, synthetic construct
  misc_feature 1..657: note = Description of Artificial Sequence: Synthetic coding sequence
  source 1..657: mol_type = other DNA
atgctccgcaggcctctcgctggtttggcggcagctgctctcggcagggcacccccagacggaatgagcggaccacgtcccgttgtgctgagtggccctagcggcgcaggcaaaagtaccctgctaaaacggcttctgcaggagcatagcggcatctttggattctcggttagccacaccacgcggaacccgcgacccggagaggaaaatggaaaagattactacttcgtgactcgcgaagtgatgcagcgagatatcgctgcgggtgatttcatcgagcatgcagaattttcaggtaacctgtatggtacgtcgaaagtggccgtgcaggccgtgcaggcaatgaacaggatctgtgtgcttgacgtggaccttcagggcgtgagaaatattaaggccactgatctgcggccaatatacatatctgttcagccacctagcttacacgtgttggagcagaggctgcgacagcggaacacagagaccgaggaatccctcgtgaagcggctcgcagccgcacaggccgatatggagtcgtccaaggagcctggcctgtttgatgtggtcattatcaacgattctttggaccaagcatacgctgagctaaaggaggcgctgagcgaagagataaagaaggcccagcgcacaggcgcttag

SEQ ID NO: 225609 - DNA, 762 bp, synthetic construct
  misc_feature 1..762: note = Description of Artificial Sequence: Synthetic coding sequence
  source 1..762: mol_type = other DNA
atggccggaagccagaaagaggaaataatgccacctcagcagggtgtgccttttcaggagtccgggtgttggggatcgatgggcgcacaatccagagagaggtcaggcagggaccacagcggcacctggatctgtgccggtggttcacaggaaacttttcacctgggcgctcccgtggagaccacctgcctagctggaatgagcggacccagaccagtcgtgctctccggaccctccggcgctgggaagtctaccctgctgaagcggctacttcaggagcacagtggcatcttcggcttcagtgtgtcccataccactcgcaatcctcgccctggtgaggagaacggaaaggactattactttgtgacacgtgaagtcatgcaaagggatatcgcggctggagatttcattgagcacgcggaattcagcggaaatttatacggaactagcaaggtggccgtccaggcagtacaggccatgaatcgcatttgcgttctagatgtggacctgcagggagtgaggaatatcaaagccacagacctgcgcccaatctatatctcggtgcagccaccatcacttcatgtcctggagcagcgacttaggcagaggaacacagaaaccgaggaaagtctggtgaagagattggctgcggctcaggcagatatggaatcttccaaggagcctgggctttttgacgtcgttattataaacgactccctagatcaagcttatgctgaacttaaagaagccctgtcggagtag

SEQ ID NO: 225610 - DNA, 516 bp, synthetic construct
  misc_feature 1..516: note = Description of Artificial Sequence: Synthetic coding sequence
  source 1..516: mol_type = other DNA
atgtctggtcctcgtccagtggtgttgtcaggtccttctggtgccggtaaaagcaccttactgaaacggcttctccaggaacattccggcattttcggcttcagcgtctcccgtgaatcaaatacaacaaggaacccgcgtcctggcgaggaaaacggaaaagattactactttgtaacccgcgaggttatgcagagggatattgccgctggtgattttatagagcatgctgaattttccggcaatctctatggaaccagcaaggtggccgtgcaggccgtgcaggcaatgaatagaatttgtgtcctggacgttgaccttcagggcgtaagaaatattaaagccactgatcttaggcctatctatatctctgtgcagcccccaagcctgcatgttcttgaacaaagactacgacagaggaacaccgagactgaagaatccctggttaaaaggctggccgcagcccaggcggacatggagtctgaaatcaagaaggcgcaacggactggagcctag

SEQ ID NO: 225611 - DNA, 819 bp, synthetic construct
  misc_feature 1..819: note = Description of Artificial Sequence: Synthetic coding sequence
  source 1..819: mol_type = other DNA
atggcgggatctcaaaaagaagaaatcatgcctccgcagcagggcgtgcccttccaagaatctggatgctggggctctatgggagctcagagcagagaacgaagcgggagggaccatagtggtacctggatttgcgccggtgggagtcaggagacattccatcttggggctcccgttgagacaacctgcctggctgcgtcactgctgactcctcgacatgtgggtcctcaggcatgtggggctgaacgggcattcgggtcctgggaggagcatcctgctgaagaggccgctcctggtgctcaaagacacctatggctgcagagggttccatatcacgaggaacccgaggcaaggcggggagaaaggcagagggaggttatgcagagagacatcgcagcaggggatttcattgaacatgccgagttcagcggcaatctgtacgggacctccaaggtagccgttcaggcagttcaggctatgaaccgcatatgcgtgctggacgtcgaccttcagggggtccgcaatattaaagctacggaccttagacctatttatattagcgtacagcctccatccttacacgtacttgaacaacgcttgagacaacgcaatacagagacagaagagagtctggtcaaaagacttgcggctgctcaggccgatatggaatcaaggaaccaagaatctagcaaagatcggcgactgcgtctagcggtgtgttctcgtcaccccggacctatccaggatcagggatcaagtatcgaacccccaccatggcaggccatccggcagctgtgcgctttaggccagcatgtctag

SEQ ID NO: 225612 - DNA, 654 bp, synthetic construct
  misc_feature 1..654: note = Description of Artificial Sequence: Synthetic coding sequence
  source 1..654: mol_type = other DNA
atgctgagaagacctttagccggactcgcagccgctgcgttgggcagagcacctccagacggcatgagtggacctagacccgtcgtgcttagcgggcctagcggagcagggaagtcaactctgctgaaacgcctgctgcaagaacactccgggatattcggtttcagtgtcagtcacaccactaggaaccccaggcctggtgaagagaacgggaaggattactactttgtgacaagagaggtcatgcagagagatatagcagcgggtgacttcattgaacacgccgagtttagcggcaacttgtacgggaccagcaaggtggcggtgcaggcggtgcaggcaatgaacaggatatgcgtgcttgatgtggacctgcaaggggtacgtaatattaaagctaccgacctgcgcccaatttatatatctgtccagcccccatctctgcacgtactggaacagcgtctacgccagcgaaatacggaaacagaagagagtctggttaagcggctggccgcagcccaggccgacatggagagctctaaagagccaggtcttttcgatgttgtcatcatcaacgacagtcttgatcaggcttacgccgagctgaaagaggcattgtcagaagagataaagaaagcccagcggaccggttag

SEQ ID NO: 225613 - DNA, 915 bp, synthetic construct
  misc_feature 1..915: note = Description of Artificial Sequence: Synthetic coding sequence
  source 1..915: mol_type = other DNA
atgaaccgggctttttcccgaaagaaagacaagacatggatgcacactccggaggccctgagcaaacacttcatcccctataacgctaagttcctaggatctactgaggttgagcagcctaaaggaactgaagtggtgcgcgatgccgttcgcaagctcaaattcgcccgacacattaaaaaaagcgaggggcaaaagatcccgaaggtggagctacagatctccatatacggggttaagatcctggagccaaaaacaaaagaagtgcagcataactgccaacttcaccgaatcagcttctgtgccgatgacaagacggataagagaatcttcaccttcatttgtaaagattccgaaagcaataagcacctctgctacgtctttgattctgaaaagtgcgctgaggaaatcacactgacaatcgggcaggcattcgatctggcctacaggaaattcctggaatccggcggtaaagatgtcgagacacgaaagcaaatcgccggtctccaaaagaggatccaagaccttgaaaccgaaaacatggaattaaagaacaaggtgcaggacctcgagaatcagctgcgcattacacaggtgtctgctcctcccgctggctctatgacgcccaaatctccaagcactgacatatttgacatgattcccttttctccaatctctcaccagtcaagcatgcctacacgcaatggtacacagccacctcctgtcccctctagatccaccgagattaaaagagacctgtttggcgcagagccatttgaccctttcaactgcggggctgccgatttcccccctgatatccagtccaaactggatgagatgcaggagggatttaaaatgggactgacattggaggggactgtgttctgcctcgacccactggattctaggtgctag

SEQ ID NO: 225614 - DNA, 915 bp, synthetic construct
  misc_feature 1..915: note = Description of Artificial Sequence: Synthetic coding sequence
  source 1..915: mol_type = other DNA
atgaatcgtgctttcagccggaagaaagacaaaacgtggatgcacacaccagaggctctctccaagcatttcattccctataacgccaagtttctgggcagcacagaggtagagcagcccaagggcacagaagtggtgagagacgcagtgaggaagctgaaattcgcgaggcatataaagaaaagcgaggggcagaaaatacccaaggtggagctgcagatctctatttacggagttaagatactggagccgaaaactaaggaggttcaacacaattgccagctccatcggatttccttttgtgccgatgataaaacagataaacggatcttcacatttatttgtaaagatagcgagtctaacaaacacctgtgttatgtcttcgacagcgaaaagtgcgcggaggaaataaccctcaccatagggcaagcctttgatctggcataccgcaagttcctggaaagcggtgggaaagacgtcgaaactagaaagcagattgcaggtttgcaaaaaagaattcaggacctagagaccgaaaacatggaactcaagaataaagtacaagacctggagaaccagctccgcattacacaggtgagcgctcctccagctggttccatgacccccaaatcccctagcacagacatcttcgatatgatcccattctctccaatttcccaccaatcaagtatgcccacaagaaatggtactcagccgccacctgtaccctctagatcaacggaaataaaacgggacctgtttggtgctgaaccattcgatccgtttaattgcggggcagccgacttccctcccgacatccagagcaagctggatgaaatgcaggaaggctttaaaatgggactaaccttagaagggactgtcttctgtctagacccactagactcaaggtgctag

SEQ ID NO: 225615 - DNA, 915 bp, synthetic construct
  misc_feature 1..915: note = Description of Artificial Sequence: Synthetic coding sequence
  source 1..915: mol_type = other DNA
atgaacagagctttcagcagaaagaaggataagacatggatgcacacccctgaggcactctccaaacatttcataccctataatgccaaattcctgggctctactgaagtggagcaaccgaagggaactgaggttgtcagagatgctgttcgtaagctgaagtttgctcggcatatcaaaaaaagcgagggtcagaaaatacctaaagtggaactgcagataagcatatacggcgtgaaaatcctcgagcccaagacaaaagaggtgcagcacaactgccagctgcataggatcagcttttgtgccgatgacaaaacagacaagcgcatctttactttcatatgcaaagacagcgagagtaacaaacatctgtgctacgtgttcgatagcgagaagtgtgccgaggaaatcactctgaccattggccaggcttttgatcttgcctaccggaaattcctcgaatctggcggtaaggacgtagagactcgtaaacagatcgctggtctccaaaaacgaatacaggacctcgagacagaaaacatggagcttaaaaacaaggtgcaggacctagagaatcagctcaggattacacaggtttccgctccaccagccggttctatgactcctaaatcaccaagtaccgacattttcgacatgatcccctttagtcctatctctcaccaatccagcatgcccactaggaatgggacgcaacccccacccgtaccctcacggtccaccgaaattaaaagggatctcttcggggctgagcccttcgatccgttcaattgtggcgcagccgacttccctccggatatccagtcaaagctggatgagatgcaggaaggtttcaaaatggggctcacactcgaagggaccgtgttttgcctggaccccctggactctagatgttag

SEQ ID NO: 225616 - DNA, 504 bp, synthetic construct
  misc_feature 1..504: note = Description of Artificial Sequence: Synthetic coding sequence
  source 1..504: mol_type = other DNA
atgaatcgagcatttagtaggaagaaggataagacgtggatgcatacacctgaagccttgtcaaagcattttataccgtacaatgcgaagtttctcgggtccacagaggtggaacaacctaagggcacagaagtagtccgtgatgctgtgcgaaaactgaagtttgccaggcatattaaaaagtcagaaggccagaaaatcccaaaagttgaactgcagatcagcatttacggagtcaagatactggaacctaagaccaaagaggtgcagcacaattgtcagctgcacaggatctccttttgcgccgatgataaaactgacaagcgtatttttacattcatctgcaaagacagcgaaagtaacaagcacctctgttatgtgttcgacagcgaaaagtgtgtatcgataccggatgtggtgggctggttcgtgctgttctataagcctgggatcgtgctcttattagcccttgctaagtacttgaaaatgaacaactttttgtag

SEQ ID NO: 225617 - DNA, 915 bp, synthetic construct
  misc_feature 1..915: note = Description of Artificial Sequence: Synthetic coding sequence
  source 1..915: mol_type = other DNA
atgaaccgcgctttctctagaaaaaaagataagacctggatgcacacccctgaggccctttctaaacactttatcccctacaacgccaaatttctgggatcgactgaggtggaacaacccaagggcaccgaagtggttcgggatgcagtgaggaagctcaaattcgccagacatattaaaaagagtgaaggtcagaaaatcccgaaagtggagctgcagatcagtatctatggtgtgaagattctggagcccaagacaaaagaggtgcagcacaactgtcagctacatcgcatatcattttgcgcagacgataaaacagataaacggatattcaccttcatatgtaaggactccgagtccaataaacacctgtgctatgtgtttgactctgagaaatgcgccgaggaaatcaccctcactatcggacaagctttcgacctcgcatataggaagtttctggaatcggggggtaaggacgtcgagactagaaaacagattgccggactgcagaagcgcattcaggatctggaaaccgaaaacatggagctcaagaacaaggtacaagacctagaaaaccagctgagaattacacaggtgagcgcaccgcctgccggatcaatgacgcccaaatctcctagtacagacattttcgacatgataccatttagtccgatttcacaccaatcgtcgatgcctacgagaaacgggacccagcccccacccgtccccagtcgctcaacagagattaagcgggacctatttggagccgaaccgtttgatccatttaactgtggcgctgcagatttcccacccgatattcagtcaaaactagacgagatgcaagagggattcaagatgggcctaaccctggaggggaccgtcttttgcctggaccctctggactcaagatgctag

SEQ ID NO: 225618 - DNA, 207 bp, synthetic construct
  misc_feature 1..207: note = Description of Artificial Sequence: Synthetic coding sequence
  source 1..207: mol_type = other DNA
atgaatcgagctttctcacgaaagaaagataaaacgtggatgcacacccccgaggcactgagcaagcacttcatcccctataatgcgaagttcctgggttcaaccgaagtagagcaaccaaaggggaccgaagtggtgagagacgccgtgcgaaagctgaaatttgccaggcacattaagaaatcggaagggcaaaagataccatag

SEQ ID NO: 225619 - DNA, 504 bp, synthetic construct
  misc_feature 1..504: note = Description of Artificial Sequence: Synthetic coding sequence
  source 1..504: mol_type = other DNA
atgaatcgtgccttttcacgcaagaaagataagacctggatgcatacccctgaagccttgtccaaacatttcatcccatacaatgccaagtttctgggttccacagaggtggagcagccgaaaggtaccgaggttgttagggacgcagtacgcaaactgaagttcgcaagacacatcaaaaaatcggaaggccagaaaataccaaaagtcgaactgcaaatcagcatctacggcgtgaaaatcctggaaccgaaaacgaaggaagtacagcacaactgccagctgcatcgaatttctttctgtgccgacgacaagacagacaagaggatcttcactttcatttgtaaagactcagaaagtaataaacatctgtgttacgtattcgatagcgaaaaatgtgttagtattcccgatgtagttggatggtttgtacttttttataagccaggaattgtgctgcttctcgccctagccaaatatcttaagatgaataactttttgtag

SEQ ID NO: 225620 - DNA, 585 bp, synthetic construct
  misc_feature 1..585: note = Description of Artificial Sequence: Synthetic coding sequence
  source 1..585: mol_type = other DNA
atgaccgaaaatagcactagcgccccagccgctaagccaaaacgagctaaagcttctaagaaatcaacagatcacccaaaatactcagacatgatcgttgcagcaatccaagctgagaagaaccgagctggcagttccaggcagagcatccagaaatacatcaagtctcactacaaggttggcgagaatgcagatagtcagattaagctcagcataaaaaggctggtgacgacaggtgtactgaaacaaaccaagggagtcggggcttctggttcatttcgccttgcaaagagcgacgaacccaagaaaagtgttgcattcaagaagacaaaaaaagagatcaagaaggtggccactccaaagaaggctagtaagcccaagaaggccgcttccaaagctccaaccaaaaagcctaaggcaaccccagtcaagaaggccaaaaagaagctggccgcaactcccaaaaaggccaaaaagcccaaaaccgtcaaagccaaacctgtgaaagctagcaagcccaaaaaagcaaagccagtgaagcctaaggcgaagagttcagcaaagagggctgggaaaaaaaagtag

SEQ ID NO: 225621 - DNA, 534 bp, synthetic construct
  misc_feature 1..534: note = Description of Artificial Sequence: Synthetic coding sequence
  source 1..534: mol_type = other DNA
atgacagaaaagtctacggaccatccaaagtactcagatatgattgtcgccgcaatccaagctgaaaagaatcgtgctggcagctccaggcagtccattcaaaagtacatcaagtcacactataaagtaggggaaaatgctgacagtcagataaaactgtcgattaagcgtctggtgacgacaggcgtccttaagcagacaaagggtgttggggcatctggaagcttccgtcttgcgaagagcgatgagcctaagaaatctgttgccttcaaaaagaccaagaaagagattaagaaagtagccacgcccaaaaaggccagtaaaccaaaaaaagctgcatcaaaggctcccaccaaaaaacccaaagctaccccagtgaagaaggcgaaaaaaaagctcgccgctacgccaaagaaggcaaagaaacctaagaccgtaaaggcaaagcctgtgaaggccagcaaacctaagaaggccaagcctgtgaagccaaaggccaaatcatccgctaaacgggctgggaaaaagaaatag

SEQ ID NO: 225622 - DNA, 411 bp, synthetic construct
  misc_feature 1..411: note = Description of Artificial Sequence: Synthetic coding sequence
  source 1..411: mol_type = other DNA
atggctcggactaaacagacagcgagaaaatccaccgggggtaaagctcctcggaagcagcttgcaaccaaggccgctagaaagtccgccccttccaccggaggagtgaagaaaccgcataggtatcggcctggcaccgtggctctcagggaaattcgcaggtaccagaagagtaccgaattactgattagaaaattgccattccagcgtcttgtcagggaaatcgcacaagatttcaaaacagatttgaggttccagagtgccgctatcggagctcttcaggaagcttccgaggcctacctcgtcggcctgttcgaggatactaacctctgcgcgattcatgcaaaacgggttaccataatgccaaaggatatacagctggctcgaaggatccgcggagagcgggcttag

SEQ ID NO: 225623 - DNA, 372 bp, synthetic construct
  misc_feature 1..372: note = Description of Artificial Sequence: Synthetic coding sequence
  source 1..372: mol_type = other DNA
atggccagaaccaagcagacagccagaaaaagcaccggaggtaaggcccctcgcaaacagcttgctaccaaggcggctaggaagtctgctccaagcactgggggagtcaagaaacctcacagataccgaccagggacagtggctctgcgcgaaattagacgttaccagaaatctactgaacttttaattaggaaactgccgtttcagaggctggtgagggagattgcccaggacttcaaaacagacctgcgatttcagtccgctgccattggtgccctgcaggtcaaatggtgggtggggaggttgagagtgtgcatacccgtcgtttaccaggagcagtttcaaatagtcgcttgtgcttacatcatctag

SEQ ID NO: 225624 - DNA, 411 bp, synthetic construct
  misc_feature 1..411: note = Description of Artificial Sequence: Synthetic coding sequence
  source 1..411: mol_type = other DNA
atggcccgaacaaaacagacagccagaaaatcgacaggcggaaaagctcctcgcaagcagctggccaccaaggccgcaagaaagagcgccccttctactggtggagttaaaaaacctcatagataccgcccaggaacagtggccctgagggagatccgcagatatcaaaagtctaccgagctgctgattagaaaattaccatttcagagactcgtgcgtgagatcgctcaggacttcaagaccgacctgagattccaatccgccgcaatcggggctctgcaagaggctagtgaggcttacctagtggggctgttcgaggacacgaacctgtgtgcaattcacgccaaacgagttaccataatgcccaaggacatccagttggctcgcaggatcaggggcgagagggcgtag

SEQ ID NO: 225625 - DNA, 411 bp, synthetic construct
  misc_feature 1..411: note = Description of Artificial Sequence: Synthetic coding sequence
  source 1..411: mol_type = other DNA
atggcacggacgaagcagacagccaggaagtcaacgggcggaaaggctccccgaaagcagctagccacaaaggccgctcggaagagtgcaccttccaccgggggagtcaagaaaccccaccgatatcgtccgggtaccgtcgccttgcgcgagatcagaaggtaccagaagagcaccgagttgctgataagaaaactcccattccagaggctcgtgagggaaattgcacaggattttaagaccgacctacggttccaaagtgctgcaatcggtgccctgcaggaagcgtctgaagcatatctggtgggactttttgaggatactaatttgtgtgcgatccacgcgaaacgggtcactatcatgcccaaggacatccagcttgcacggagaatccgcggagaacgtgcctag

SEQ ID NO: 225626 - DNA, 411 bp, synthetic construct
  misc_feature 1..411: note = Description of Artificial Sequence: Synthetic coding sequence
  source 1..411: mol_type = other DNA
atggcgaggaccaagcaaactgccagaaaatccaccggtggcaaggctcctaggaagcagttggccacgaaagcggctcggaaatctgcaccaagcacaggaggcgtcaagaaacctcatcggtaccgccctgggactgtggccctacgagagatcaggagataccagaagtctacggagttgctgattcggaaattacctttccagagacttgttcgagagatcgctcaagacttcaagacagacctgcggttccaatcagctgctataggcgcattacaggaggcctctgaggcgtacctcgtggggttgtttgaggataccaatttatgcgcaatccacgctaaacgagtgaccattatgccaaaggacattcaacttgccaggcgaataaggggtgaacgcgcttag

SEQ ID NO: 225627 - DNA, 1047 bp, synthetic construct
  misc_feature 1..1047: note = Description of Artificial Sequence: Synthetic coding sequence
  source 1..1047: mol_type = other DNA
atgcctgacgaactgacggagccaggtcgggctacgccggcaagggcatcatcatttctgattgaaaatctcctcgctgcggaggccaaaggagccggtcgcgctacacagggcgacggctctcgggaagatgaagaagaagacgatgatgaccctgaagatgaagatgctgagcaggcacggcgacgtagacttcagagacgcaggcaactgctggccggtactgggcctggcggtgaagcgcgtgcacgtgccctcctgggcccaggcgcactcgggttaggacctcgcccaccgcctgggcctggtcctcccttcgcgctgggttgcgggggtgccgcacgatggtatcctagagcgcacggagggtacggtggcggattgtcacctgacacttcagaccgcgattctccagaaacgggagaggaaatgggacgcgcagaaggcgcatggccaagaggtcccggacccggtgccgttcagagagaggcggcagagttagctgccaggggacctgccgcaggcacagaagaggccagtgagctggctgaagtaccagctgctgctggagagaccagggggggagtgggcgtcggaggaggccgaaaaaagaagactagaacagtcttctctaggtcacaagtatttcagttagaaagcacctttgatctcaaaagatacctgtcatcggccgaaagagccggacttgctgctagcctgcagctaaccgagacacaagtgaagatctggtttcaaaatcgccgtaacaagtggaagaggcagctcgcagccgaacttgaagctgccagcctgagtccaccaggagctcagcggctcgtgagggtgccggtgctgtatcacgagtctccaccagccgcagcagctgcgggacctcccgcaaccctgccgtttcccctggcacctgcagcccctgcgcctccacctcctctgctcgggttttccggggcactcgcctaccctctcgctgcatttcccgctgctgcctccgtgcctttccttcgggctcagatgcctggcctggtgtag

SEQ ID NO: 225628 - DNA, 822 bp, synthetic construct
  misc_feature 1..822: note = Description of Artificial Sequence: Synthetic coding sequence
  source 1..822: mol_type = other DNA
atgggaagcaaggaagacgctggaaaagggtgtccagcggctggtggagtttcttcttttactattcagtctattctggggggaggtccaagcgaagccccacgggagccagtgggatggcccgctagaaaaaggtcactgtcggtctcttcagaagaagaggagccggacgacgggtggaaggcccctgcttgcttctgtcctgatcagcatggacctaaggagcagggccctaaacaccacccacctattccttttccctgcctgggcaccccaaagggaagcggaggctccggacccggtgggcttgagaggacccctttcttgagtccatcacattccgacttcaaggaagaaaaagagcgtttgctcccagccggatcaccaagccccggaagcgagcgaccaagagatggcggtgccgaaaggcaggccggtgctgcaaaaaagaagacacgcaccgtgttttcacggtcacaagtatatcagctggaatccacatttgacatgaagaggtatctgtcttcctcagagcgggcttgtctggcctcctcgctacagttgactgaaacacaggtgaaaacctggtttcagaacagaaggaataagtggaaacggcagctaagcgccgagctagaggctgccaatatggcccacgcaagcgctcaaactttagtgtcaatgccccttgtctttcgagactcctctctactccgagtacccgtgccccgtagcctagccttccctgctccactttactacccagggtccaacctttcggcgttacccctgtacaacctgtataataaactggactattag

SEQ ID NO: 225629 - DNA, 1074 bp, synthetic construct
  misc_feature 1..1074: note = Description of Artificial Sequence: Synthetic coding sequence
  source 1..1074: mol_type = other DNA
atgccggaacctggccctgacgcggcaggcaccgctagtgctcagccccagcccccaccaccccctccaccggctcccaaggagagccccttctcaatcaagaacctgctgaacggcgatcaccaccgccctcctccaaagccacaaccgcctccccgtaccctgtttgccccagcttcagcggctgctgctgccgctgcagcggctgccgctgcggctaaaggcgcactggaaggcgctgcaggatttgcactgagtcaggtgggcgatcttgcattccctaggttcgaaatacccgcacagaggttcgctctgccagcccactacctagaacgctcgcccgcttggtggtacccatatactcttactcccgcaggaggacatttgcccaggccagaggccagcgagaaggcattactacgggatagcagccccgcttccggtacggatcgagactccccagagccactgctaaaggcagaccctgaccacaaggagctggacagcaaaagccctgacgagatcattctggaggaatctgatagtgaagagtccaaaaaggaaggggaagctgcccctggggctgctggagcaagcgtcggcgcagccgcagccactcccggagcagaagactggaaaaagggagctgaaagcccagaaaaaaaacccgcatgccgaaagaaaaaaaccagaacagtgtttagccggagccaggtgttccagttggagagtacatttgatatgaaacgctatctgtctagcagcgagcgggctggactggccgcttctctccatcttacagaaacgcaggtgaagatctggttccaaaatagacggaacaaatggaagcgacagctcgccgcagaacttgaggctgccaatctgagccacgctgctgcgcaacggattgtgcgggttcccattctgtaccacgagaattcagctgctgagggcgctgcagccgctgctgccggagctcccgtacccgtgtctcaaccattgctgaccttcccccatcctgtgtactatagtcatccggtcgtctcttccgttcccctgctgcggcctgtgtag

SEQ ID NO: 225630 - DNA, 3405 bp, synthetic construct
  misc_feature 1..3405: note = Description of Artificial Sequence: Synthetic coding sequence
  source 1..3405: mol_type = other DNA
atggagtctactccaagttttctcaaaggaactcccacatgggagaaaaccgcgcctgagaatggcatcgtcagacaggagcccggtagtcctccgagggacggcctccatcacgggcctttgtgcctgggggaacctgctcccttttggagaggcgtgctttccacacccgactcttggttgccccctggatttccacaggggcctaaggacatgctgccgctcgttgaaggtgaagggcctcagaacggagaacgaaaagttaactggctaggatctaaggagggtctgaggtggaaggaagctatgttgacacacccgttagcgttttgcggcccagcgtgtcctccacgatgtggccctctgatgcctgagcactctggaggacatcttaagtctgatcccgtcgccttcagaccctggcactgtccattcttgctggaaactaagatcttggagcgggcaccattttgggttcctacgtgcctacctccatacctggtgtccggattacctcctgaacacccatgcgattggcccctgacacctcacccttgggtgtactctgggggacaaccaaaggtgcctagcgccttctcgctgggctcaaaaggtttctactataaagacccgtcgataccgagactggcaaaggagcccctagccgctgctgaaccaggcttgttcgggttgaattccggaggccacctgcagcgcgctggggaagccgagaggcctagcttgcaccagagggatggcgagatgggagctggaaggcaacaaaacccttgccccctctttctgggtcagcccgacacagtcccctggacatcctggcccgcttgtccacccggactcgtgcacacgctgggcaacgtgtgggccggaccaggagatggcaatttaggctaccagcttggtcctccggcaactcccagatgccccagtcctgaacctccagttactcaacgcggatgctgttcgtcttatccccctaccaaagggggtgggctgggcccttgcggcaaatgtcaggaaggcttggagggcggtgcaagcggtgcatctgaaccaagcgaagaggtcaataaggcatctggaccccgagcgtgtcctccctcccaccatacgaaacttaagaagacctggctgactagacattctgagcaatttgaatgcccgagaggctgtcctgaggtggaggaacgccctgtcgcgcgtctgagggccttaaaacgtgccggaagtcctgaggtccagggcgctatgggctctcctgccccaaaacgaccgccagatcctttccctgggactgccgaacagggtgcgggtggatggcaagaggtgcgcgacacttcgatcggaaataaggatgtggattcaggccagcacgatgagcaaaaaggcccacaggatggacaagccagcttgcaggatcccggactccaggatatcccttgcctggcccttcccgcaaagttggcccagtgtcagtcttgtgcacaggcagcaggagaaggtggcggtcacgcctgccattctcagcaggtgcggagatcccccctgggcggagaactgcagcaggaggaagataccgccactaattcttccagtgaagaaggtcctggatcaggacctgatagtaggctgagcaccgggctagctaagcatctgctgtccggtctgggagaccggctttgccggttgctccgacgcgagcgggaggcactggcctgggcacagagagaaggacagggcccagcagtgacggaggattctcccggaattcctcgctgttgttcgcgctgtcatcatggactttttaacacgcactggcgttgtccgcgttgctcacatagactatgtgttgcttgcggaagagtggcaggtacaggtcgcgcaagggaaaaggcgggatttcaggagcaaagcgctgaggaatgtacacaggaggctgggcacgctgcatgctcacttatgctcacacaattcgtttccagccaggcactggctgaactgtcaacggccatgcatcaggtctgggttaagtttgatatcagaggtcattgtccctgtcaggccgatgccagggtctgggctcctggggacgcaggccagcaaaaagaatccactcaaaagacaccaccaacaccacagccatcctgtaatggcgatacacacaggactaagtctattaaggaagaaacaccggactccgccgagaccccagcagaggatcgcgcaggacgcggtcccctgccctgcccgtctttatgcgagctcctggcatcaaccgcagttaaactctgcctggggcacgagcgcatacatatggcttttgccccagttacccctgctctcccgtcagacgacaggattacgaacattctggactctataattgcccaggtcgtagaaaggaagattcaagaaaaggcactgggacccggtcttagagccggtcctgggctcaggaagggtctgggactgcctctctctccggtcaggcctcgtctccctccccctggagcactcctgtggctgcaggagccacaaccatgccctaggagagggtttcacctctttcaagagcattggcggcagggacagcctgtactggtgagcggtattcagcgcacactgcaaggcaacttgtggggcactgaggcgttaggggcactgggagggcaggtgcaggccctgagcccgctgggaccgcctcaacctagctccctcggctctactacgttttgggaaggtttttcttggccagaacttaggccaaaatcagatgaaggaagtgtgctcctgctgcaccgcgctttaggtgatgaagacacaagcagagtcgaaaatctggccgcttcactgccactgcccgagtattgcgcactgcacggcaaattaaacttggccagttacctgcctcctgggctggctttgcggcctctcgaacctcagctgtgggcagcatatggggtttcccctcataggggccacctcgggacgaagaatctctgcgtggaagtggcagacctcgtctccatcctcgtgcatgctgatacgcccttgcctgcctggcacagggctcagaaagacttcctgtctgggctcgacggcgaggggttgtggtctcctggatcccaagtctccaccgtgtggcacgtctttagggcccaggatgctcagcggattcgacggtttctgcagatggtgcagggtctggtgtccaccgtgtctgtgacacagcatttcctcagccccgagaccagtgccctttctgctcagttgtgccaccaagggcctagcctgcctcccgattgtcacctgctctatgctcagatggattgggcagtgtttcaggctgtgaaagtggcagtaggcaccctgcaggaagccaagtag

SEQ ID NO: 225631 - DNA, 3570 bp, synthetic construct
  misc_feature 1..3570: note = Description of Artificial Sequence: Synthetic coding sequence
  source 1..3570: mol_type = other DNA
atggaatctactcctagctttcttaaagggactcctacatgggagaagaccgcgcctgaaaacggaatcgtgaggcaggaacccggttccccccctagggatgggctccatcacggacccctttgcctgggcgaacccgctccattctggcggggtgttctatcaacccccgatagttggctccctccaggcttcccacaggggccaaaggacatgctgcccctggtggaaggcgagggtcctcagaacggagaacggaaagtgaactggttgggttcaaaggaagggcttaggtggaaggaagcgatgttgactcacccgttggccttttgcggccctgcatgcccaccgaggtgcggacccctgatgcccgaacatagcggagggcatctgaaaagtgacccagtggcattcagaccttggcattgcccgtttttactggagacaaagatcctggaaagagctccattttgggtgcccacttgtctgcccccttatctggtgagcggattaccacctgagcatccctgtgactggccactcactcctcacccatgggtgtacagtggtggacagccaaaggtcccgagcgcgttcagtctgggaagcaaggggttttactataaagatccttccatccccagactcgcgaaagagcctttggctgccgctgaacctgggctctttgggcttaacagtgggggtcacctccagcgggctggggaagccgaacggccatctctacatcagcgtgacggcgagatgggggcaggcagacaacaaaatccttgtcctttattccttgggcagccagacacagtcccatggacctcctggcctgcgtgtcccccagggcttgttcacaccctcgggaatgtgtgggcagggcctggcgacggtaacttgggctaccagctgggacctcctgcgacacccagatgtcccagccccgaacccccagtaactcaaaggggatgttgcagtagctatcccccaacaaagggtggaggtcttggaccgtgtggcaagtgtcaagaagggctggagggaggggcttctggggcttcggagccctcagaagaagtgaacaaagcaagcgggcctagagcctgcccgccaagccatcacaccaagctgaagaaaacctggctaacacgccattcagagcagttcgaatgccctcgcggttgccccgaggttgaggagcgtcctgttgcaaggctcagagcactgaaacgcgctggctcacccgaagtgcagggcgctatgggctctcctgcaccaaagagacctcctgaccctttccctggaaccgccgagcaaggagcgggagggtggcaggaagtccgcgacacatccattgggaataaagacgtcgattccggccagcacgacgagcagaaggggccacaggacgggcaggcaagtttacaagatccaggactccaggacataccgtgtttagcgctgcctgctaagctcgctcagtgtcagagctgtgcacaggctgccggagagggaggaggacacgcatgccattcgcagcaggtacgaagatcccctcttggaggcgaactgcagcaggaggaagacactgctactaattcatctagcgaggagggacctgggtcaggtcctgatagtcgcctctccacggggctggccaaacacctacttagcggactgggtgatcggctttgtagattgctccggagggagcgagaagccctcgcttgggctcaaagagaggggcagggcccagccgtaactgaagactcccccggaattccgaggtgctgctcgagatgccaccacggcctttttaatacgcattggagatgtcctcgctgcagccacagactctgtgtggcttgtggcagggtggctggcactggtagggcacgcgagaaagcaggcttccaagagcaatccgccgaggagtgcacacaggaggccggacacgcggcatgctccctgatgctgacacagttcgtgtcgtcccaagctctcgctgagctaagcacagccatgcatcaggtgtgggtcaagtttgacatcaggggccattgtccatgtcaggccgatgcgagggtttgggcacccggtgatgctggccagcagaaggaatcaacgcaaaagacccctccgactccccagccaagctgcaatggagatacccacagaacgaaatctataaaggaggagacacccgacagcgctgaaactcctgcagaggaccgcgctggccgagggcctttaccctgtccgtctctgtgcgaactgttagccagcacggccgtcaagctctgcctgggacatgaaaggatacacatggcattcgcccctgtaacaccagcgctgccgagtgatgataggattaccaatatcttagattccatcattgctcaggtggtagagcggaaaatccaggaaaaagctctgggccctggcctaagggccggtcctggcttgagaaagggcctgggattacctctctctcctgtgcggccaagacttccgccacctggagccctcctatggctgcaagagccgcagccttgcccccgtagaggcttccatctgttccaggaacattggaggcaggggcaacccgtcctggtgtctggtattcagagaaccctccaggggaatctatggggaacagaagccctgggcgctctcgggggacaggtccaggctctatctccactgggccctcctcagcctagtagcttgggcagcactacattctgggaggggttttcctggcctgaactgagacctaaatctgatgagggcagtgtgcttctcctccacagggcactgggcgatgaggatacttccagagttgaaaatctggctgccagccttccacttccagaatactgcgctcttcacggcaagctgaacctcgcctcctatctcccgccagggcttgccctgcgcccactggaacctcaactgtgggccgcttacggcgtgtcacctcaccgaggccacctaggcaccaagaacctctgcgtggaggttgcggaccttgtgtcaattctcgtacacgcagatacccccctcccagcctggcaccgggctcagaaggatttcctctctgggctggacggggagggcctgtggagccctggttcacaggtcagcacagtgtggcacgtcttcagggctcaagatgcacaaaggatccggagattccttcagatggtgtgtcctgcaggtgcaggtgcactggaacctggggcaccaggcagctgctacttagacgcaggcctgcgcaggcgtctacgcgaagagtggggggtctcctgctggacgctgctccaggccccaggggaggcagtcctcgtgccagctggcgcacctcatcaagtgcaaggcttggtttccactgtcagcgtgactcagcactttctgtcaccggagactagcgccctgtcagcgcaattgtgccatcagggcccatcacttcccccagactgtcatctgctgtacgcacagatggattgggccgtgttccaagccgtgaaggtcgccgtcgggacgctgcaggaagctaaatag

SEQ ID NO: 225632 - DNA, 1410 bp, synthetic construct
  misc_feature 1..1410: note = Description of Artificial Sequence: Synthetic coding sequence
  source 1..1410: mol_type = other DNA
atggctagccccagggaacttacacaaaacccccttaagaaaatttggatgccttacagcaacggtcgcccagcgttgcacgcatgccagaggggtgtctgtatgacaaactgtcccacactcatcgtgatggtcggtttgcccgctaggggcaagacgtatataagcaagaaactgactcgctacctaaattggataggagtgcccacgagggagttcaacgtgggacagtacaggagagatgtggtaaaaacatataaatcattcgagtttttcctgccagataatgaagaaggcctgaaaattagaaaacaatgtgcattggctgctctgcgggacgtgaggagatttctcagtgaagaagggggacatgtggcagtattcgatgccacaaacaccacccgtgagagacgcgctacgatctttaatttcggcgaacaaaacggctataagacattctttgtggagtcgatctgtgtcgatcccgaggtgattgcagccaatattgtgcaggtaaagctcgggagcccagactatgtcaatagagattcagacgaggcaacggaggatttcatgaggcgaattgaatgttatgagaattcatacgaaagcctggatgaggacctggatcgggatctgtcatacatcaaaatcatggacgtgggccaatcatacgttgtgaatcgcgttgcggatcacatccagagtcggatcgtctactatctgatgaatatacatgtcacccctcgcagcatttacttatgccggcatggggaatcagagctgaacctcaagggtcgcataggaggcgaccccggtttgtccccaagggggagggagtttgccaagagcttagctcagttcatctctgaccagaacattaaggatctgaaggtatggaccagccaaatgaagcgtacaatacaaaccgcagaggcccttggcgtgccttatgaacagtggaaggtgttgaatgagatcgatgccggtgtatgtgaggaaatgacttatgaggaaatccaggacaattatcccttagagtttgctctcagagaccaggacaagtataggtaccgctatcccaaaggagagtcatacgaggacctggtgcagcgactcgagccagtgattatggagctggagcgccaggagaacgtcctcgttatctgtcaccaggctgtgatgaggtgcctcctggcctactttctggataaagcagccgaacagttaccttacctgaagtgccccctgcacaccgtgctaaaactgacccctgttgcctacggatgcaaggtggagagcatcttcctcaacgttgccgctgttaacactcatcgcgatcgccctcagaacgttgacatttcccgccctcccgaagaagcgctcgtcacagtgcccgctcaccagtag

SEQ ID NO: 225633 - DNA, 522 bp, synthetic construct
  misc_feature 1..522: note = Description of Artificial Sequence: Synthetic coding sequence
  source 1..522: mol_type = other DNA
atgggccttccgaggcgagctggcgacgcggcagagttacgaaaatcactgaaaccactgctggagaaacggagacgagccaggatcaaccaatccctgtctcagctgaaagggttgattctgcctctgcttgggcgagagaacagtaattgtagcaagctggagaaagctgatgttttagaaatgaccgtgaggtttctccaggagctccccgcttcatcatggcctaccgccgctcctcttccttgcgattcatatagggaggggtacagcgcttgcgttgctcggctggctagagtgcttcccgcttgccgcgtgttggaacctgctgtttcggctaggctgctggaacacctgtggcgtcgcgcagcatctgccaccttggacggtggcagggccggagattctagtggtccatctgcacccgctcccgcacccgcttcagccccagagcccgctagcgcacccgttccgtccccaccttcccccccatgtgggcctggcctatggcgcccttggtag

SEQ ID NO: 225634 - DNA, 231 bp, synthetic construct
  misc_feature 1..231: note = Description of Artificial Sequence: Synthetic coding sequence
  source 1..231: mol_type = other DNA
atgggtctcccccgacgcgcaggggatgccgcagagctgagaaaaagccttaagcctcttctagagaagagaagacgtgcacgcatcaaccagtccctgtcccagctgaaggggctgatcttacccctcctcggacgggaggacgcctccggatggcacacgtggctacctctccatgcccagaattgctttctcctttatatccaggcccctgaacagcccccagcttag

SEQ ID NO: 225635 - DNA, 231 bp, synthetic construct
  misc_feature 1..231: note = Description of Artificial Sequence: Synthetic coding sequence
  source 1..231: mol_type = other DNA
atgggccttcctagacgtgccggagatgcggcagagcttagaaagtcattgaagcctctgttagagaagcggaggagagctcgcatcaatcagagcttatcgcagttgaaagggttgatccttcctcttcttgggagagaagatgcctcgggctggcatacctggcttccattgcacgctcagaattgttttttgttatacattcaggcaccagagcagccaccggcatag

SEQ ID NO: 225636 - DNA, 561 bp, synthetic construct
  misc_feature 1..561: note = Description of Artificial Sequence: Synthetic coding sequence
  source 1..561: mol_type = other DNA
atggagaaaaagcggagggctaggatcaacgtgagcctggagcagttgaagtcgctgcttgagaaacactactcgcaccagatacgaaaaaggaagctggagaaagccgacatccttgaattatctgtcaagtatatgaggtcgctccaaaattccttacagggactttggccagtgccgcgtggtgccgaacagccatcaggctttcgatcgtgcctcccaggcgtctcccagctgttgaggcgaggggacgaggtgggctctggcctgcgatgccctctggtgcctgagagcgcagctggtagcacaatggattctgccggtctaggtcaggaggcaccagctctttttaggccatgcaccccggcagtgtgggcccctgctcctgccgcagggggtccacggagcccccctcctttactcctgctgcccgaatctcttccgggaagcagcgcttctgtgcctcccccacagcctgcctcttccagatgcgccgagagtcctggcctgggactgagggtgtggcgtccttgggggagcccaggagacgacctcaactag

SEQ ID NO: 225637 - DNA, 666 bp, synthetic construct
  misc_feature 1..666: note = Description of Artificial Sequence: Synthetic coding sequence
  source 1..666: mol_type = other DNA
atggccgcagatacccctgggaagccaagcgccagtcccatggcaggagctccggctagtgcttcaagaacacctgacaagcccaggtctgctgccgagcaccgcaaatctagcaagcccgtgatggagaaaaggcgaagggcgagaatcaacgaaagtctcgctcagctgaagacactcattctcgatgctctgcgaaaggagtcttcacggcactcaaaattagaaaaggccgatattctggagatgaccgtccgccacttgcgaagtctcagacgagtccaggtcacagccgctctgtctgctgatcctgctgtcttggggaaatatagagctggcttccatgagtgccttgccgaagtgaatcggttcttagctggctgtgagggcgtgcccgctgacgttaggtctcgcttgctgggccacctagccgcttgcctgcggcagctaggcccttctcggaggcccgcttccctgagccctgccgcacctgccgaagccccagctcccgaagtgtatgccggtagacctctgctgccttcactgggtggcccttttcctctgttggcccctcccttactgcccggactgacacgtgcactgccagcggctcctcgagctggcccacagggacctggtggcccttggaggccctggttgcgctag

SEQ ID NO: 225638 - DNA, 744 bp, synthetic construct
  misc_feature 1..744: note = Description of Artificial Sequence: Synthetic coding sequence
  source 1..744: mol_type = other DNA
atggcagccgacactcccggaaaaccttccgctagtcctatggctggggcaccagcttcagcgtccaggacgcccgataaaccccgtagcgccgctgaacacaggaaggtgggcagccgtcccggtgtgcggggtgcgacaggcggaagggagggcagggggacccagcctgtccctgacccgcagagctctaaacctgttatggagaaaaggcggagagcacgcattaacgagagtttagcgcaactgaagacactgatcctcgatgcattgagaaaggagagcagcagacactccaaactagagaaggccgacattctggagatgacagtacggcatctgcgaagcttacgcagggtacaggtcaccgcagcactgagcgccgacccagccgtgcttgggaagtacagagccggattccatgagtgcctcgctgaggtgaatcggtttctggccggatgtgaaggagtcccagctgacgtcaggagccggcttctgggacatctcgcagcctgcctccgccagctcggcccttccagacgacccgcttcacttagtcccgcagcacccgcagaagcacccgctcccgaggtttacgccggtcgaccactcctcccaagcctaggaggaccattccctctgctagccccacctttattgcctggcctcacgcgcgcactaccagctgccccaagggcgggtcctcaggggccaggcggtccatggcggccatggctccgctag

SEQ ID NO: 225639 - DNA, 501 bp, synthetic construct
  misc_feature 1..501: note = Description of Artificial Sequence: Synthetic coding sequence
  source 1..501: mol_type = other DNA
atggctccatctaccgtggccgtagagctactaagccccaaggaaaaaaatagactaaggaaaccagtggtagaaaagatgcgcagggacagaattaacagcagtattgagcaactcaagctgcttttggaacaagagtttgctcgacaccagccaaatagcaagctcgaaaaagccgacatcctcgagatggctgtgtcctacctgaagcactcgaaggcattcgtggccgctgctggccctaagtccttacatcaagattacagcgaaggttacagctggtgcttgcaggaggcagtacagttcctcactttacacgcagcatccgacacacagatgaagctgctctaccactttcagcgccctcccgcagcacccgcagccccagccaaggaacctaaagctcccggagccgctccgcctcccgcacttagcgctaaagcgactgctgccgctgccgctgctcaccagccagcctgcggcctgtggaggccgtggtag

SEQ ID NO: 225640 - DNA, 675 bp, synthetic construct
  misc_feature 1..675: note = Description of Artificial Sequence: Synthetic coding sequence
  source 1..675: mol_type = other DNA
atggcaccccctgccgctcctggacgcgatcgagtgggccgagaagatgaagatggatgggaaaccaggggcgatagaaaggcaaggaagccactggtcgagaagaagaggcgcgcacgcattaacgagtctctccaggagctgaggcttctactagccggagccgaggtccaggcaaaactggaaaatgcagaggtgctcgagctgacagtgaggcgagtgcaaggagtgctccgcggacgggctcgcgagagagagcagctgcaggccgaagcttctgagcgcttcgccgctgggtatattcagtgcatgcacgaggtccatacattcgtctcgacttgtcaggccatagacgcaacggttgcggcagagttgctaaatcacctcctcgaatccatgccattgagggaggggagttcttttcaagatctcctgggcgatgcactggccggacctccacgcgcaccaggaagaagcgggtggcctgcaggcggagctccgggttccccgatcccatcaccgcctggacctggcgacgacctgtgcagtgacctggaggaggcccctgaggccgaactgtcccaggccccagcagaaggccctgatctcgtgccagctgcccttggatccctcactacagcacagatagccaggagcgtttggcggccttggtag

SEQ ID NO: 225641 - DNA, 645 bp, synthetic construct
  misc_feature 1..645: note = Description of Artificial Sequence: Synthetic coding sequence
  source 1..645: mol_type = other DNA
atggcccctcccgcagccccaggccgtgatcgtgtaggccgagaggatgaggatggatgggagacacggggagaccgcaaagccaggaaaccactagtcgagaagaaaaggcgtgcacgcataaacgaatctcttcaagagttgagattgctgctggcaggagccgaagttcaggccaaactggagaacgcagaggtgcttgaactgactgtgaggagagttcaaggcgtcctgcggggaagggcccgtggtgagtggcgccgtgggggaagaggcagaagacctcgcgcacctgtcacacccgctcgtaggcgtacatcgttaccagcccctctgagctgtcggagacggggtttgccgccagaacagggagcccctcccaggcttctaggagagccacgaccccgtggtccaggcggacttgggcatgccgtggccgcacacagagcaggacgtggatctctgccccctacccttggacccagagcaagggctgccgcagggggaagtgagagagccttgaggtgtagactgcatccagtgcacgctaggggtgcacacgtgcgggtgcacgtgccaggacatcgacgctaccgccgttgtagggcccctgagcctagtgccagagtgcacgccgctgcttag

SEQ ID NO: 225642 - DNA, 669 bp, synthetic construct
  misc_feature 1..669: note = Description of Artificial Sequence: Synthetic coding sequence
  source 1..669: mol_type = other DNA
atggcccctcccgctgcccctggcagagaccgggtcgggcgtgaagacgaggatggttgggaaacccgcggtgaccgtaaagccaggaagccgctcgtcgaaaaaaaacgcagggctcggattaacgagagcctacaagagctacgcctgctgttagcaggtgcagaggctaaactggaaaatgctgaagtgctcgagcttacggtgaggagggtccagggagtgctgcgaggtagggctagggagcgcgagcagctccaggctgaggctagtgagaggtttgccgcaggatacatccagtgcatgcacgaagtgcacacattcgtttccacctgccaggctattgacgcaacagtggccgctgagctgctgaaccacctacttgagtctatgcccctacgggaaggttcttctttccaggatctcttaggtgatgcccttgcaggacctcctcgcgcacctggcagaagcgggtggccagcagggggagccccagggagccccatcccaagccctccaggcccaggggacgatctgtgcagcgatttggaggaggcccctgaggcagaattgagtcaggctccagccgaggggccagacctggtccccgctgcactaggctccctgacaaccgcccagattgcaagatctgtctggcgcccatggtag

SEQ ID NO: 225643 - DNA, 678 bp, synthetic construct
  misc_feature 1..678: note = Description of Artificial Sequence: Synthetic coding sequence
  source 1..678: mol_type = other DNA
atggttaccagagatcgcgcagagaaccgcgacgggcctaagatgctaaagcctctggtagagaagcgaagaagggatcgaatcaaccgaagtcttgaagagctgcgactgctgttgctagagagaaccagggaccagaatttacgcaatcctaagctggagaaggcggagattctggaatttgcagtgggctacctgcgagaaagatcaagggtggagcccccaggcgtgccgagaagtcctgtgcaggatgccgaggcactcgcaagttgttatctctctggattccgggagtgtctgctgcgcttagcagcattcgcacacgacgccagccctgctgctcgggcacagttgttctcagctctacacggataccttagaccaaagcctcctagacctaaacccgttgaccccaggccacctgcacccagaccttctttagacccagctgcccctgcactgggcccagccctgcatcagcgccctcctgtccatcaagggcaccccagtcccagatgcgcatggagcccctcactgtgctctcctcgggctggagattcaggggcaccagcaccgttgaccgggctactacccccacctccaccaccccacagacaggatggggcacccaaggccccactgccaccacctccggctttctggcgcccatggccttag

SEQ ID NO: 225644 - DNA, 693 bp, synthetic construct
  misc_feature 1..693: note = Description of Artificial Sequence: Synthetic coding sequence
  source 1..693: mol_type = other DNA
atggttacgcgggatagggcagaaaacagagacgggcctaagatgttgaagcctctggtggagaagcgtagacgcgaccgcatcaaccgctccttagaagaattaaggctgctgctactggagagaacccgggatcagaatctgagaaatcccaagctcgagaaagcagagatcctggaatttgcagttggatatcttcgtgaacggtcccgcgtggaacccccagcagcggctgcaccaggtgtccccagatctcctgtccaagatgctgaggcccttgcatcgtgctacctgagcggtttcagggagtgcctacttcgactcgcagctttcgcccacgatgcctcacctgcagcaagagcgcagctctttagtgccctccatggttatctgcggcctaaacccccacggcctaaaccagtggacccgaggccccctgcgcctcgccctagcctggatcctgctgctcccgctcttggtcccgcactgcaccaaaggccacctgtacaccaggggcacccctctccacgttgtgcttggagtcccagtttgtgctctcccagagccggtgacagcggagctcccgcaccactcactgggctgctcccccctccaccaccaccccatcgccaggatggtgctccaaaggcacctcttccccctcccccagcattctggcggccatggccctag

SEQ ID NO: 225645 - DNA, 1014 bp, synthetic construct
  misc_feature 1..1014: note = Description of Artificial Sequence: Synthetic coding sequence
  source 1..1014: mol_type = other DNA
atgaaacgcccatgtgaagagacaactagtgaatccgacatggacgagacaattgacgtggggagtgaaaacaattactccggccagtccaccagctccgtgattaggctgaactcacctactacgacctcccaaattatggctcgaaagaaaaggcgagggatcatcgagaaaagaaggagagataggataaataattctctctccgagctcagacgactggtgcctaccgccttcgagaaacaggggagcgccaaactcgaaaaggctgaaatattgcagatgaccgtggatcacctgaagatgttgcaggccaccgggggtaaagggtactttgacgcccacgcactcgcaatggacttcatgagcatcggatttagggaatgcctgacagaggtggctcggtatctgtcgagtgtggaagggctggatagttcagaccctctgagggtgcgccttgtgtcgcatctatcaacatgtgcgactcagcgggaggctgcagcaatgacttccagtatggcccaccatcaccaccccctgcacccacaccactgggccgctgccttccaccacctgccagctgccctgttgcagcccaatggtctccatgcgtctgagtcaaccccctgtaggctgagtacaacctcagaggtgccccctgcacatggtagcgcgctcctgacggctaccttcgcccatgccgatagcgctcttcgtatgcctagcacgggatccgtagccccatgtgttcctcccctgtccacttctctcctttcccttagtgctactgtccacgcagcggctgctgccgctacggccgctgcacacagtttcccgctgtctttcgctggggcttttcccatgctgccaccaaacgctgccgctgccgtggcggctgccaccgcaatctcaccaccactgagtgtgtctgccacatcatctccacagcagacatcttcggggacaaacaacaagccttaccgcccatgggggacagaggttggggcattctag

SEQ ID NO: 225646 - DNA, 876 bp, synthetic construct
  misc_feature 1..876: note = Description of Artificial Sequence: Synthetic coding sequence
  source 1..876: mol_type = other DNA
atggcacggaagaagcgacgcggaattatcgagaagaggcgcagggataggatcaataacagtctgagtgaactgcgccgactggtccccacagcgttcgagaagcaagggagcgctaaattagaaaaagccgaaattctgcagatgaccgtggaccacttaaagatgctccaagccacggggggtaaagggtacttcgacgctcacgctttggccatggacttcatgtctatcggctttcgggagtgtctgactgaggtggcaagatacctgagctcagtggaaggtctcgactcctccgatcctttgcgggtcaggctcgtctcccatctgtccacgtgcgctacgcaaagggaagcggctgccatgacctccagcatggcacaccaccaccacccgttacatccccaccattgggctgctgctttccaccacctgccagcagcgcttctgcagcccaatggcttacacgctagcgagtctaccccttgccgtctgagcaccacttcggaagtgcccccagcgcacggttccgccttgctaaccgccacatttgcacacgcggacagcgcattacgcatgccatccaccggatccgttgcgccttgcgtgccgcctcttagtacctctcttctttcactcagtgccaccgttcatgcagccgcagcagcagccaccgccgcagcacactcctttcctctttcctttgccggtgcattccctatgctgcctcctaacgctgccgctgcagttgccgcagccaccgctatttcccctccattgtctgttagtgccaccagcagcccacagcagacaagctctgggaccaacaacaaaccatatcgaccctggggcactgaagtaggtgccttttag

SEQ ID NO: 225647 - DNA, 1221 bp, synthetic construct
  misc_feature 1..1221: note = Description of Artificial Sequence: Synthetic coding sequence
  source 1..1221: mol_type = other DNA
atgtccgccttgggtgctgtgatcgccctgctgctctggggccagctatttgccgtggatagcgggaatgatgtaactgacattgccgacgacggatgtccaaaaccccctgaaatcgctcatggctacgttgaacactcagtacgttaccagtgcaaaaattactataaactgaggactgaaggagacggcgtctatactctgaacgacaagaaacagtggatcaacaaggctgtgggcgataagttgcctgagtgcgaggccgacgatggctgccccaaaccccctgagatcgctcacgggtacgtagagcactcagtgaggtaccagtgcaagaattattacaaacttcggacagaaggcgacggtgtttataccctcaataatgagaaacagtggattaacaaagccgtcggcgataaattacctgaatgtgaggccgtctgcggaaagccaaagaacccagcaaaccccgtgcagaggatcctgggaggacatctcgatgccaaagggtcatttccatggcaggctaaaatggtcagtcatcacaacctgactaccggggctactttgataaatgagcaatggttgctcacaactgcgaagaacctgttcttgaaccactctgaaaatgctactgctaaggatatagctccaacgctcaccctgtacgtcgggaaaaaacagttggtcgagatagagaaagtcgttttgcatcccaattacagccaggttgacattggactgatcaagctcaaacagaaagtgtcggtgaacgagcgtgtaatgcctatatgccttcccagcaaagactatgccgaagtcggcagggtgggatatgtttccgggtggggaaggaatgcaaacttcaaatttactgaccatttgaaatacgttatgttacccgttgccgaccaagatcagtgtattagacattatgaaggtagcactgtacctgaaaaaaagacaccaaaaagtcccgttggtgttcagcccattctaaatgaacacacgttctgtgctgggatgagtaagtatcaggaggatacgtgctacggagatgccggatcggcatttgccgtacacgatctagaggaggacacatggtacgctacgggcatcctttctttcgacaagtcctgcgcggtagccgaatacggcgtatacgtgaaagtgacctctattcaggactgggtgcaaaaaaccatcgctgagaattag

SEQ ID NO: 225648 - DNA, 1149 bp, synthetic construct
  misc_feature 1..1149: note = Description of Artificial Sequence: Synthetic coding sequence
  source 1..1149: mol_type = other DNA
gtgtacgcctgtgtgtgtgtctgtgtgtacatgcacgtgtgcgtggacgcctgtatgtgttgtgaggctggccgactggcattccacagttccttgtcttccttatgctccgccttaggcgcagtaatcgccttgctgttgtggggccagttgtttgccgtggacagcggtaacgatgtgaccgacattgctgatgacggttgtcccaagccgcctgaaatcgctcatggctacgtggaacactcagtgagatatcagtgcaagaattattacaaactccgcacagagggcgatggagtgtacacattaaatgacaaaaaacaatggattaacaaagccgttggagacaaactgcccgagtgcgaagccgtgtgtgggaagcctaagaacccggcaaatcccgtccagagaatcttgggaggtcacttggatgcaaagggttcattcccctggcaggcgaagatggtcagtcatcacaatctgacaaccggggcaacactaatcaacgaacaatggctgctcactaccgccaagaacctgttcttgaaccactctgagaacgcaacggcgaaagatattgcgccaacgctcaccctgtacgttggcaaaaaacaattggtggagattgagaaggtagtgctgcaccctaattactctcaggttgacatcgggctcattaaactaaagcaaaaggtgtccgtcaatgaacgtgtgatgcctatctgcctgccctccaaggattacgccgaagtcgggcgtgtgggctacgtgagcggatggggcaggaatgccaatttcaagttcactgatcacctgaagtatgtgatgcttccagtggctgatcaagatcagtgcatacgacactatgagggatcaactgtgccagagaaaaaaacacccaagtcacctgtgggggttcagcctatcctgaatgaacacacgttctgcgccggaatgtccaagtatcaggaggacacttgttacggtgacgccggaagcgcgttcgccgtacatgacctcgaggaggacacatggtatgcaactggtatcctgtcatttgataagtcgtgtgcggtggctgagtatggcgtctacgttaaggtaactagcattcaggactgggtacagaagactatagcagagaattag

SEQ ID NO: 225649 - DNA, 1044 bp, synthetic construct
  misc_feature 1..1044: note = Description of Artificial Sequence: Synthetic coding sequence
  source 1..1044: mol_type = other DNA
atgagtgcactcggtgcagtgatcgcccttctcttgtggggccagctctttgcagtggactccgggaatgacgtaacagacattgctgatgatgggtgccctaagccgcctgagatcgcccacgggtacgtggagcactccgttaggtatcaatgtaaaaactattacaaactcaggacagagggggacggggtctataccctcaacaacgagaagcaatggattaacaaagctgttggtgacaagttacctgagtgcgaggccgtatgtgggaaaccgaaaaatccggctaaccctgtccagcgcatcctgggtggacatttggatgcaaaaggctcattcccatggcaggctaaaatggtctcccaccacaacctgaccacgggcgctacactaatcaatgaacaatggctgctaaccaccgccaagaacttgttcctgaatcacagtgaaaacgcgactgctaaggacatagctcccactctcaccctgtatgtcgggaagaaacaattggtggagatcgaaaaagtagttctccacccaaactattcccaggtggatatcggactcatcaaactaaagcaaaaggtctctgtcaatgaaagggtcatgcccatctgcctccccagcaaggactatgcagaggtgggcagagtcgggtatgtgagcggctggggtcgaaacgctaactttaaatttactgatcacttgaagtacgttatgctccccgtggcagaccaggaccagtgtattaggcactatgaggggtcgaccgtacctgagaagaagactcctaagtccccagtgggggtccagccgattctgaacgagcacacattctgtgcaggtatgtctaagtaccaggaggatacatgctatggtgacgctggatccgctttcgctgtgcacgacctggaggaggacacctggtacgctacgggtatcttatctttcgacaaaagttgtgcagtagcagagtatggcgtgtacgttaaagtgactagcatccaagactgggtgcaaaagactatagcagaaaactag

SEQ ID NO: 225650 - DNA, 846 bp, synthetic construct
  misc_feature 1..846: note = Description of Artificial Sequence: Synthetic coding sequence
  source 1..846: mol_type = other DNA
atgtcacggatctcccaaatgactgccgcacggtccccaccccgactgcatatggctatgtggtccaccagatttgcgacgagtgtccgaactaatcccgtgcagcggatactggggggacatcttgacgctaaagggtcatttccctggcaggcaaaaatggtgagtcaccacaatctgacaacaggcgctaccctgatcaacgagcagtggctattgacaacagctaaaaacctttttttgaatcactccgaaaatgcaaccgctaaagacattgcaccaacactcaccctgtacgtgggcaagaaacaactcgtggaaatcgagaaagtggtgctgcacccaaattatagccaggttgatataggcctcatcaaactaaaacagaaggtgagcgtaaatgagagagttatgcctatttgcctaccttcaaaagattatgctgaagtaggtagggtgggatacgttagcggatggggcaggaatgcgaattttaaattcactgatcacctgaagtatgtaatgctgcctgtggccgaccaggaccagtgcatccgccactacgagggatccacagtgcctgagaaaaaaacaccaaaatccccggtgggagttcaaccaatcttgaacgaacacacattttgtgccggtatgagcaagtatcaggaggatacatgttacggcgatgcagggagtgcatttgctgttcatgatctcgaagaggacacctggtacgccacaggcattctgtcattcgacaagtcttgtgctgtggctgagtatggggtctacgttaaagttacgagcatccaagattgggtgcaaaagacaatcgctgagaactag

SEQ ID NO: 225651 - DNA, 552 bp, synthetic construct
  misc_feature 1..552: note = Description of Artificial Sequence: Synthetic coding sequence
  source 1..552: mol_type = other DNA
atgtcagccgctcgcgagtctcacccgcatggtgtgaagcgcagcgcttccccggatgacgacctgggcagttcaaattgggaagcagccgaccttggcaacgaagaacgcaagcaaaagttccttcggctgatgggagctggcaagaaagagcatacaggccgactggtaataggtgatcataagtcaacaagtcatttcagaacaggcgaagaagacaagaagatcaacgaggaactggagtcccagtaccaacaaagcatggacagtaagctctccggccgttacagaaggcactgcggtcttggattctctgaagtagaggatcatgatggagagggggacgtggcaggggatgatgacgacgacgatgatgattccccagatcccgagagtcctgacgacagcgagtcggacagcgagagtgaaaaggaggaatcggctgaggagctccaggctgcggagcacccagacgaagtcgaggaccccaagaacaaaaaggacgctaaatcaaactacaaaatgatgttcgttaagtcttctgggtcctag

SEQ ID NO: 225652 - DNA, 1047 bp, synthetic construct
  misc_feature 1..1047: note = Description of Artificial Sequence: Synthetic coding sequence
  source 1..1047: mol_type = other DNA
atgagtgacctgggagccgtaattagccttcttctatgggggcgtcagttgttcgctctctacagcggcaatgatgtgaccgacatcagcgacgacaggttccctaagccccctgagatagctaacggttacgtggagcatctgtttcgatatcagtgcaagaactattacaggctgcgcacggagggcgatggtgtgtacaccctgaacgataagaaacagtggataaacaaggccgttggcgacaaattgccagagtgtgaggccgtatgtgggaagcctaaaaatcctgctaaccccgtccaaaggatcctgggcggtcacctggatgccaagggttcttttccctggcaagctaaaatggtcagtcatcataatctgacaactggggcaactttgataaatgagcagtggctccttaccaccgcaaaaaatctattcctgaatcactccgagaatgctaccgcaaaggacatcgcccctacactaactctgtacgtcgggaaaaagcagctggtagagattgagaaggttgtcctccacccgaactaccaccaggtggacatcggcctgataaagctgaagcagaaggtgctggtgaacgaaagggtcatgcctatctgtctaccctccaaaaattatgcagaagttggcagggtggggtacgtgagtggatgggggcagtccgacaatttcaaactcactgaccatctcaaatacgtgatgcttccggtggccgatcagtacgactgtataactcattacgagggaagcacttgtcccaagtggaaagcacctaagagcccagtgggagtccagcctattctgaacgagcacacattttgcgtcggaatgagtaaatatcaggaagacacttgttatggcgatgcagggtctgcgtttgcagttcatgacctcgaggaggacacatggtacgccgcaggcattctaagttttgacaagtcttgcgccgtggccgagtacggtgtctacgtcaaagttaccagcatccagcactgggttcaaaaaaccatagctgagaactag

SEQ ID NO: 225653 - DNA, 1047 bp, synthetic construct
  misc_feature 1..1047: note = Description of Artificial Sequence: Synthetic coding sequence
  source 1..1047: mol_type = other DNA
atgtccgatcttggcgctgtcatcagcctgttgctatggggcagacagctgttcgccctttacagcggcaatgacgtaaccgatatctccgacgacaggtttccgaagccccctgagattgccaatggctacgtcgagcacttattccgatatcaatgcaaaaactactacaggctccggaccgagggagacggcgtgtatacgctgaacgacaagaagcaatggatcaataaggcggtgggagataaacttcctgaatgtgaagccgtatgtggtaaaccaaagaatcccgctaatccagttcaaaggatcctcggcggacatttggacgccaaagggtcttttccatggcaggccaagatggtctcccatcacaatctgacaaccggagccactctgattaacgagcagtggctcctgacaaccgcaaagaacctattcctcaatcactcggaaaatgctacagccaaagacatcgccccaacgttgactctgtacgtgggcaaaaaacagctggtcgagattgagaaagtcgttctacacccaaactatcatcaggtggacattggcttgatcaaattaaaacagaaagtgctggtaaatgaaagagtgatgcctatctgtctgcctagcaagaactacgcggaagtcgggcgagtagggtatgtgtccggttgggggcagagcgataactttaagcttaccgatcacctcaagtatgtaatgctgcccgtcgcagatcagtatgattgcattacccattatgagggttccacctgtccaaagtggaaggccccaaagagtccggtgggcgttcagcctatcctcaacgagcatacgttctgtgtcggaatgagcaagtatcaggaggatacctgctatggcgacgccggatccgcttttgcagtccatgacttggaggaggacacctggtatgccgctggaatattaagcttcgataagagctgtgctgtggccgagtatggcgtttacgttaaggtgacttccatccaacattgggttcagaaaaccattgcggagaactag

SEQ ID NO: 225654 - DNA, 615 bp, synthetic construct
  misc_feature 1..615: note = Description of Artificial Sequence: Synthetic coding sequence
  source 1..615: mol_type = other DNA
atggcagctgccaacccttgggaccccgctagtgctcctaatggggctggattggtgcttggccactttattgcttctggaatggtcaatcagaagaatctcgagattgagctgctcaagcttgaaaaggacaccgcagacgtggtgcacccctttttcctcgcccaaaagtgtcataccctgcagagtatgaataatcacctggaagcggtgctgaaggaaaagcgctccctgcgccaacggctccttaagcccatgtgccaagaaaacctgcccatcgaggccgtgtaccatcgctatatggttcatctgctcgaacttgcagttacattcatcgagcggttagaaactcatctggaaacgatcaggaatatcccccaccttgccgcaaatctaaagaaaatgaaccaggctcttgcgaagatggatatcctcgtgaccgagacggaagagctcgctgaaaatattcttaagtggagaaagcagcagaacgaggtatcctcttgcattcccaaaatactggccgaagagtcttacctctacaagcatgacattattatgccaccactgcccttcacttctaaagttcacgtgcagacaatcaacgctaagtag

SEQ ID NO: 225655 - DNA, 837 bp, synthetic construct
  misc_feature 1..837: note = Description of Artificial Sequence: Synthetic coding sequence
  source 1..837: mol_type = other DNA
atggaacctcaggaagagcgagagacccaggtggctgcatggctcaagaagattttcggagaccaccccatcccccagtacgaagtgaacccccgaactacagagatccttcaccacttaagcgaacgcaatcgcgtgcgtgatagggacgtctatctggtgattgaggatttgaaacagaaagcctcagagtatgagagcgaagccaagtacctccaggatctactgatggaatccgtcaattttagtccagcaaacctatcctccacaggctccaggtacctaaacgccctagtcgactccgccgttgcgctggaaactaaagacaccagcctggcttcgttcatcccggctgtaaacgacctgactagtgatctgtttcggacaaaaagcaaaagtgaggaaatcaaaatcgaattagagaagctggaaaaaaatctgacagccactctcgtcctagaaaagtgtctgcaagaagacgtcaagaaggccgaactgcacctttccacagagagggctaaggtcgataatcgcagacagaatatggactttttgaaggccaaatcagaggaattccgatttggtattaaagcagcggaagaacagctttccgcccgtggtatggatgcaagcctgagtcaccagagcctcgttgccctcagcgagaaactagctagactgaagcagcagaccatacccttaaagaaaaagcttgaatcctacctggacctcatgcctaacccgtctctggcccaggtaaagattgaggaggccaaacgggaactcgactccatcgaggccgagctgacacgacgtgtcgacatgatggaactttag

SEQ ID NO: 225656 - DNA, 708 bp, synthetic construct
  misc_feature 1..708: note = Description of Artificial Sequence: Synthetic coding sequence
  source 1..708: mol_type = other DNA
atggccgctgccaacccctgggatcctgccagcgcccctaatggggcaggcctggtcctcggtcacttcattgcctcaggcatggtcaatcaagagatgctgaacatgagtaaaaagactgtgtcatgctttgttaattttactcgtctgcagcagataaccaacatccaggcggaaatttaccagaagaacctcgaaatagagctgcttaagctcgagaaagatacagcagatgttgtccatcccttttttctagcccagaaatgtcatactctgcagtccatgaataatcatctagaagcggtcctgaaggaaaaaagaagtctcaggcagcggctgctgaaaccaatgtgccaggagaacctgcccatcgaagccgtttatcatcgatatatggtacacttgcttgaactggcagtaacttttattgagagactggaaacacaccttgagacaataaggaacattccccacctggctgccaatctgaaaaagatgaatcaggccctcgcaaagatggacatcctcgtgacagagacagaagagctcgctgagaacatcctgaaatggagaaaacagcagaacgaagttagctcatgcattcctaagatccttgcagaggagagttacctttacaagcacgacattattatgccgcctctgcctttcaccagcaaggttcatgtgcaaacgattaacgccaaatag

SEQ ID NO: 225657 - DNA, 615 bp, synthetic construct
  misc_feature 1..615: note = Description of Artificial Sequence: Synthetic coding sequence
  source 1..615: mol_type = other DNA
atggccgctgctaacccctgggaccctgcgtcggcccctaatggtgccggactggttctcggacattttatagctagcgggatggttaaccaaaaaaatttggagattgaactgctgaaactggaaaaagacactgctgatgttgtacaccctttttttctcgcacagaaatgtcacacacttcagtccatgaataaccatctggaggccgtgcttaaggagaaacgttcactgcgccagaggctgctgaagccgatgtgtcaggagaatctaccgatcgaagcagtgtatcatagatacatggtccatttgttggagctggcggtgaccttcattgaacgactggaaacccaccttgagaccatccggaatatcccgcatcttgctgcaaacctgaagaaaatgaatcaggccctcgccaagatggatattcttgtcactgaaactgaggaactggccgagaatatcctgaagtggcgaaagcagcaaaatgaagtgtcttcatgcattcccaaaatactcgccgaggaatcgtacctttacaaacatgatattattatgccacccctaccattcacctcaaaagtccatgttcagacgattaatgccaaatag

SEQ ID NO: 225658 - DNA, 1812 bp, synthetic construct
  misc_feature 1..1812: note = Description of Artificial Sequence: Synthetic coding sequence
  source 1..1812: mol_type = other DNA
atgtcctgcgggaatgagtttgtagaaaccctgaagaaaattggctacccaaaggctgataatttgaacggagaagacttcgactggctgtttgaaggtgttgaagatgagagtttccttaagtggttttgcgggaacgtgaatgagcagaacgttcttagcgaacgcgaactggaagcgtttagtatactccagaagagtggaaagccgatcctggagggagctgcccttgacgaagccctgaaaacctgtaagacgtcggacctcaagactccccgtttggatgacaaggagctggaaaagctggaggacgaagtccagaccttactcaaattgaaaaatctgaaaattcagagaagaaataagtgccagttaatggccagcgtaacctcacataaaagtctaagattgaatgcgaaagaagaggaggctaccaaaaagctgaaacagtctcaggggatattgaatgctatgattacgaagatctccaatgagctgcaagcactcaccgatgaggttacccagctaatgatgttctttcgccattccaatctcggacagggcacgaaccccctggtttttttaagccagttcagcttggaaaagtacctgagccaagaggagcaatctaccgcagctttgactctttacactaagaagcagtttttccagggcattcacgaggtagtggagagcagtaacgaggataatttccagctattagatatccagaccccgagtatttgcgataaccaggaaattctggaggagcgtcgcctcgaaatggcccgactgcagctggcctacatatgtgcacagcaccagctcatccacctcaaggcaagcaattcctcaatgaagagttccataaaatgggccgaagagagcctccatagcctcaccagtaaagccgtcgacaaggaaaatctggacgccaagatctcatcgctgacctctgaaattatgaagttggagaaagaggtgacccagattaaagaccgatctctgccagctgttgtccgagagaatgcacagttgctgaatatgccagtcgtcaagggagatttcgacctacagatcgctaaacaggattattatactgctaggcaggagctggtactcaaccagctgattaagcagaaagcctctttcgagctgctccagttgagttacgaaatcgaacttcgcaaacaccgcgatatttataggcaactggagaatctggttcaggagctgtcccagagcaatatgatgctttataagcagctcgaaatgttgactgatccatctgtgtctcagcaaattaatccccgaaatacaattgacaccaaggattactccacacaccggctgtatcaggtgttggagggtgaaaacaagaaaaaggagctattcttgacccacggcaatttggaggaggtggctgagaagctgaaacagaatattagcctggtgcaggaccagctggccgtgtccgcccaggagcactctttcttcctgagcaagagaaataaagatgtcgacatgctgtgtgacacattgtatcagggtggcaaccagttacttctgtccgatcaggagttgacagaacagtttcacaaagttgagtcccagcttaataagttgaaccatttgcttaccgacatactcgccgacgttaagacaaagcgaaagacactggcaaataataaactccaccagatggagagggagttttatgtctactttctgaaggacgaggactacctaaaagatatcgtggagaatctggaaactcagagtaagattaaagctgtgtccctggaagactag

SEQ ID NO: 225659 - DNA, 1812 bp, synthetic construct
  misc_feature 1..1812: note = Description of Artificial Sequence: Synthetic coding sequence
  source 1..1812: mol_type = other DNA
atgagctgcggtaacgaattcgtggaaacacttaagaagataggctacccaaaagccgacaatctgaacggggaggatttcgactggctgtttgaaggagtagaagacgagagcttcctgaagtggttctgtggaaacgttaacgagcaaaatgtcttgagcgagagagaattagaggcatttagtatcctgcagaaatccggaaagcctatcctggagggagccgctctggacgaggcactcaagacctgtaagaccagcgatcttaagactccaaggttagatgataaagaattggaaaagctggaagatgaggtgcagaccctattgaagttgaagaatctcaagatccagaggaggaacaaatgccaacttatggcaagcgtaacgtcccacaaatccctgcggttaaacgctaaagaagaggaggccacaaagaagcttaagcagtcgcaaggcattttaaacgccatgatcacaaagatcagtaacgagctgcaggctctcaccgacgaagtcacccaattaatgatgttctttcggcatagcaatctgggacaggggaccaatcccctggtttttctctcccagttttctctcgagaaatacctgtctcaagaggagcagagcacggctgccttaaccctctatacaaaaaaacaattctttcagggaatccacgaggtcgtcgagagcagcaatgaggataacttccagctgttggatatccaaaccccgagcatctgtgacaaccaggagatactcgaggagcgtcgccttgagatggccagactccaactcgcctacatttgtgcccagcaccagctgatccatctgaaggctagcaactcctctatgaaatcctcaatcaagtgggcggaggagagccttcacagcctgacttccaaggccgttgacaaggaaaatttggatgctaagattagtagcctgacatcagagatcatgaaattggagaaagaggtcacacagatcaaggatcgtagccttcccgcagtcgtccgagagaacgcccaattgctgaatatgcctgtcgtgaagggcgacttcgatttgcagatcgccaagcaggattactatacagcaagacaggaacttgtcttgaatcagctcatcaagcaaaaagcgtcattcgaactgttgcaattgtcttatgaaattgagctcagaaaacaccgtgatatttaccgacaacttgaaaacttagtccaggagttgtcacagtccaacatgatgctctataagcaactcgagatgctgactgatccatcagtgtcccagcagataaatcctcgaaacactattgacactaaagactattccacgcaccgactgtaccaagtgctggaaggggaaaacaaaaaaaaagagctcttcttaacacacggcaacctggaagaagtggctgaaaagctgaaacagaacattagtctggtgcaggaccaacttgcggtttccgcccaagagcattctttttttctgtccaaaagaaataaagatgtcgacatgctgtgcgataccctgtaccagggaggcaaccaactgctgctgtccgatcaggagcttaccgagcagtttcataaggtggaaagccagttaaacaaactgaatcacctgcttactgatatcctagctgacgttaagacaaagcggaaaaccctcgcaaacaacaaactccaccagatggagagagagttctacgtctacttcctgaaagacgaggattatttgaaagatattgttgaaaacctggagactcagtcgaagatcaaagctgtttcgcttgaggattag

SEQ ID NO: 225660 - DNA, 33 bp, synthetic construct
  misc_feature 1..33: note = Description of Artificial Sequence: Synthetic coding sequence
  source 1..33: mol_type = other DNA
atgagttgcgggaacgaatttgtggagacatag

SEQ ID NO: 225661 - DNA, 102 bp, synthetic construct
  misc_feature 1..102: note = Description of Artificial Sequence: Synthetic coding sequence
  source 1..102: mol_type = other DNA
atgagttgcgggaatgagttcgtggaaacattgaaaaagatcggctacccaaaagccgataacctgaacggagaagatttcgactggcttttcgaagggtag

SEQ ID NO: 225662 - DNA, 456 bp, synthetic construct
  misc_feature 1..456: note = Description of Artificial Sequence: Synthetic coding sequence
  source 1..456: mol_type = other DNA
atgggcaagcgacctaatctgctcgctttgcagctctcagactcaaccctggcagacatcatcgccaggctgcaggccggacagaaactgtctggctcgtccccgtttagtagcgccttcaattctctctcactcgataaagagagtggactgctcatgtttaaaggagacaagaagccgcgtgtctgggtcgttcctactcagctgcgtagagacctgatcttttcagtgcacgacatcccactgggcgctcaccaaaggccggaagagacttataaaaaactgcgtttgttgggttggtggcccggaatgcaggaacacgtgaaagattattgtcgttcctgcctcttctgtattcccagaaacctaattggaagtgagcttaaagtgattgagtctccaccagcatccgtgctgcgaggtcagggtgtatgcaacaggagcggaaccagatag

SEQ ID NO: 225663 - DNA, 957 bp, synthetic construct
  misc_feature 1..957: note = Description of Artificial Sequence: Synthetic coding sequence
  source 1..957: mol_type = other DNA
atggcatctggggatttttgcagtccgggagaaggaatggagatcctgcaacaggtgtgtagcaaacagttaccaccctgcaacctttctaaggaggatttacttcaaaacccatacttcagcaagctgcttctgaatttatctcagcacgtcgacgagtcgggattgagtctgactctggccaaggaacaggcgcaggcttggaaggaggtgcgacttcacaagacaacatggttgcgttcagagattctccaccgcgtgattcaggagttgcttgtagattactacgttaaaatccaggatacaaacgtgaccagtgaagacaaaaaggattttgtttggatgcgcgctcgattacagcaggaggtggaagagcagctgaagaaaaaatgctttacactattgtgttattatgaccccaattcagatgcagacagcgagactgtaaaggcggcaaaagtctggaaactcgccgaggtgttagtaggggagcagcagcagtgtcaggacgcgaaatctcagcagaaagagcagatgttgctgttggagaagaagtcggcggcttattctcaagtgttgctgcggtgcctgacactgctccagagactgctgcaggagcataggctcaagacccagtcggagttggataggattaacgcacaatacctcgaagtgaagtgcggggctatgatcctgaagttgaggatggaagagttgaaaatcctcagcgacacttataccgtggagaaagtcgaggttcaccggctgattcgcgatagacttgagggagcgatccacctgcaggaacaggacatggaaaactctagacaggtgttgaatagttacgaggtcttgggtgaggagttcgacagacttgtgaaggaatacactgtattaaaacaggctaccgagaacaagcgctgggctttgcaagagtttagcaaggtctatcgttag

SEQ ID NO: 225664 - DNA, 714 bp, synthetic construct
  misc_feature 1..714: note = Description of Artificial Sequence: Synthetic coding sequence
  source 1..714: mol_type = other DNA
atggctagcggggatttctgcagccccggagagggcatggagatcctgcagcaagtgtgttctaagcagctgcctccttgtaatctctcaaaggaagatctcctccagaacccttattttagcaagctgctgctaaacctaagccagcacgtggacgaaagcggactttctttaacacttgctaaggagcaggcgcaggcctggaaggaggtgcggcttcacaagacaacatggctgcgctcggaaatactgcaccgggtcatacaggaattgttagttgactactacgtcaagatccaggatactaacgtgaccagtgaggacaaaaaagttctgctgcgctgtctgacgctcttgcagagactgctgcaggagcataggctgaagacacaatctgagctcgacagaatcaatgcccagtatctcgaggttaagtgcggcgcaatgatacttaaactacgaatggaggaactcaagatactgagcgacacctatactgtggagaaggtggaggtgcatcgactgataagggatcgactcgagggcgcaattcaccttcaagagcaggatatggaaaatagtaggcaggttctgaatagctatgaagtgctgggagaagaatttgatagacttgtgaaggagtataccgtgctcaaacaagccaccgagaataaacgctgggcgttgcaggagttctcgaaggtttacagatag

SEQ ID NO: 225665 - DNA, 714 bp, synthetic construct
  misc_feature 1..714: note = Description of Artificial Sequence: Synthetic coding sequence
  source 1..714: mol_type = other DNA
atggcctccggcgacttctgttctccgggtgagggaatggagattcttcagcaggtctgctcaaaacagctgcctccctgtaacctgtccaaagaagatctcctgcagaacccctacttttccaaactccttcttaacttgtcacagcacgtcgacgaatccgggctgtcactgaccttggccaaagagcaggctcaggcctggaaagaggtccgactccacaagactacttggttgcggagtgaaatcctccatagggtgatccaggaacttctggtggactactatgtgaaaatacaggacaccaatgtgacatcagaggacaagaaggttctgttgaggtgtctgactctcttacagagactcctgcaagagcataggctcaagacccagagcgaactggatcgaatcaacgcccaatacctcgaggtgaagtgcggcgctatgatcctgaagttgaggatggaggagttgaaaatcttgagcgacacttacaccgtggagaaggtagaagtacatagactcatccgagaccgacttgaaggcgctatacacctccaggagcaggacatggagaactcacgccaggtgctcaactcttacgaggtcttaggagaagagttcgatagactggtgaaagaatacaccgtgctgaaacaggccacagaaaacaagaggtgggcactgcaggaatttagcaaggtgtaccgatag

SEQ ID NO: 225666 - DNA, 720 bp, synthetic construct
  misc_feature 1..720: note = Description of Artificial Sequence: Synthetic coding sequence
  source 1..720: mol_type = other DNA
atgcgtttgctcggcccttctcaagagagagagattccacccctgcttggcttagagaaggctgatctgttagaattgatgccactatcagaagacttcgtatggatgagggcaaggctacagcaggaagtggaggagcagttgaagaaaaaatgttttactctgctctgctactatgacccaaattcagacgcagactcagagaccgtgaaggccgctaaggtttggaagttggccgaagtgttggtgggtgaacaacagcagtgtcaggacgccaagtcccagcagaaggagcagatgctcctcttagagaagaaaagcgccgcttacagccaggttctgctgcgctgtctcacactgctgcaacgacttctccaggagcaccggctgaagacgcagtcagagctggaccgtatcaacgcccaatatctggaagtcaagtgcggcgcaatgattctgaagttgaggatggaagagctgaagatactgtccgatacttacactgtggagaaggtcgaagtgcacagactcattcgcgatcgcctagaaggggcaattcatctccaggagcaggacatggagaacagtaggcaggtgctcaatagctacgaggtccttggcgaggaatttgaccggttggttaaagagtacacagtgctgaagcaggccacggagaataaacgatgggctctgcaggagttcagcaaagtctaccgctag

SEQ ID NO: 225667 - DNA, 1092 bp, synthetic construct
  misc_feature 1..1092: note = Description of Artificial Sequence: Synthetic coding sequence
  source 1..1092: mol_type = other DNA
atggcgagcggggacttctgcagccccggtgaggggatggagatcctgcaacaggtgtgttccaaacaactgcccccttgcaatctgagcaaggaagatcttctgcagaatccctacttttcaaaacttctgttaaacttatcacagcatgtggacgaaagcgggctttccttgactctggcaaaagagcaggcccaggcctggaaggaggtaagactccataagactacctggctacggagcgagatcttacatagggttatccaggaattattagtggattactacgtcaagatccaggacacaaatgtcacatcagaagataagaaattccatgagaccctggagcagagacttttggtcaccgagttgatgcgcctgctggggcctagccaggagcgggaaatcccccctttgctggggctcgaaaaggccgatctgctagagctaatgcccctgagcgaggacttcgtatggatgagggcaagactgcagcaagaagtagaggaacagcttaagaagaagtgtttcaccctcctatgttactacgaccctaattcagacgccgactcagagaccgttaaagcagctaaagtttggaagctggcagaggttctagtcggtgagcaacaacaatgtcaggacgcaaagtcacagcaaaaggagcagatgctgctactcgaaaagaaatctgccgcttactcacaagtcctgctcaggtgcctgactcttctgcagcgtctcctgcaggagcatcgcctgaagacacagtccgaactggataggataaacgctcagtacctcgaggtcaaatgtggggcaatgattctaaaattaaggatggaggagttaaagatcctcagtgacacgtacactgtcgagaaggtggaggtgcaccgacttatccgtgacaggctggagggcgctattcatctgcaggagcaggacatggaaaacagccgtcaagtgctgaatagctacgaggtcctgggtgaggagtttgatagactcgtcaaggagtacaccgtcttgaagcaggcgaccgaaaataagcggtgggctttacaagagttttcaaaggtgtatcgctag

SEQ ID NO: 225668 - DNA, 54 bp, synthetic construct
  misc_feature 1..54: note = Description of Artificial Sequence: Synthetic coding sequence
  source 1..54: mol_type = other DNA
atgcggcttttaggcccatcacaggagcgggaaattccccctctactaggttag

SEQ ID NO: 225669 - DNA, 564 bp, synthetic construct
  misc_feature 1..564: note = Description of Artificial Sequence: Synthetic coding sequence
  source 1..564: mol_type = other DNA
atggcatccggcgacttttgctctcctggcgagggaatggaaatcctccagcaggtgtgcagcaaacaactcccaccatgtaacctatctaaggaggatctgttacagaacccttatttctccaagcttctacttaacctatcccagcacgttgatgagagcggattatcacttactctagcaaaggaacaggcccaggcgtggaaggaggtccgacttcacaagacaacttggctccgttccgagatactgcaccgggtcattcaggagttgctggtggattactatgtgaagattcaggacaccaatgtgaccagtgaagataagaaatttcacgaaacactcgaacagcgactcctggtcaccgagctgatgcgactgcttggcccatctcaggaaagagagatacctcccctgctggggttggaaaaagctgatctgctggagcttatgcctctaagcgaagattttgtgtggatgcgcgcacgacttcagcaggaagtggaagagcaactgaagaagaagtgctttacgctgctgtgctattacgacccaaacagctag

SEQ ID NO: 225670 - DNA, 840 bp, synthetic construct
  misc_feature 1..840: note = Description of Artificial Sequence: Synthetic coding sequence
  source 1..840: mol_type = other DNA
atggcctctggcgacttttgttcgcctggggagggcatggagatattacagcaggtttgctcaaaacagctccctccatgtaacttgtctaaggaagacctccttcagaacccatatttttctaagctgttactgaatttgtctcagcacgtggacgagagcggactgtctttgactttggccaaagaacaagcccaggcatggaaagaggtccgcctccacaagacaacatggctgaggagcgaaatcttacatagagtaatccaggagctcctagtagactattacgttaaaattcaggacaccaacgttacaagcgaggataagaagttccatgaaacactcgagcagcgcttgctggtgacggagcttatgagactgttggggccatctcaggaaagggagattccccctctcctaggacttgaaaaggcggaccttctggagctgatgcccctgtctgaggatttcgtttggatgagagctcgcctgcagcaggaagtcgaggagcagctaaagaagaagtgctttacactgctttgctattacgatccaaactcagatgcagatagcgaaacggtgaaggctgctaaagtgtggaagcttgcagaagtgttggtgggagaacagcaacagtgccaagacgcaaaatcccagcagaaagagcagatgctactgttggaaaaaaaatcagcagcatattcccaggtgctgctgcgttgtctcacacttctccagagactgctgcaggagcatcgcctgaaaacccaaagcgagctcgacagaatcaacgcccagtatctagaagttaagtgcggggcaatgatactcaaattatag

SEQ ID NO: 225671 - DNA, 957 bp, synthetic construct
  misc_feature 1..957: note = Description of Artificial Sequence: Synthetic coding sequence
  source 1..957: mol_type = other DNA
atggcctccggtgatttctgctcccctggcgaaggcatggagattctgcagcaggtgtgcagtaagcagttgccaccatgtaacttgagtaaagaggacctgctgcagaatccgtacttcagtaagctcttattgaatctgagccagcatgttgacgaaagcggtttaagcttgaccttggccaaagaacaggcccaagcatggaaggaagtcagactgcataagaccacttggttgagatctgagattctccaccgagtaatacaagagctgttggtggattattacgttaaaattcaggacaccaatgtgacttctgaagacaaaaaagattttgtatggatgagggccaggctgcagcaggaagtggaggaacagttgaagaaaaagtgttttactctgctctgttactacgaccctaacagcgatgcagactccgaaacggtgaaggccgctaaggtatggaagctcgccgaggtgctggtgggagagcaacagcaatgtcaggatgccaagtcccaacaaaaggaacagatgctcctgctggaaaagaagagcgctgcatacagccaggtcctcctgagatgtttgacacttctgcaacggctgctccaagagcatcgtctgaaaacccaaagtgagctcgaccggataaatgcccaatatctggaggtgaaatgcggggctatgattcttaaactgcgtatggaagaactaaagatcctgagtgacacttataccgtcgaaaaagtggaagtacaccgactgattagagataggctcgagggtgctattcatctccaagagcaggatatggaaaactcgcgccaggtgcttaactcctatgaggtgctaggagaagagtttgacagacttgtgaaagagtataccgttctgaaacaagctactgagaacaagcgatgggctctgcaggagtttagcaaggtgtataggtag

SEQ ID NO: 225672 - DNA, 957 bp, synthetic construct
  misc_feature 1..957: note = Description of Artificial Sequence: Synthetic coding sequence
  source 1..957: mol_type = other DNA
atggccagcggagacttctgttcacccggtgagggtatggagattctgcaacaggtgtgtagcaaacagctccccccttgtaatctctcgaaggaagatctgctccaaaacccatattttagcaaactgctgcttaacctttcccagcatgtcgacgaatcaggactgtcactgaccctggccaaagagcaagcccaggcctggaaggaagtccgcctgcataagacaacctggttaagaagtgagatcctgcaccgggtgatccaagagctgctggtagattactatgtaaaaatccaggatacgaacgttacctcagaagacaaaaaagactttgtgtggatgcgagcaagactacagcaggaggtagaagaacagctgaagaagaaatgctttacgcttctctgctactacgatcccaactcggacgccgacagcgaaaccgtaaaggccgcaaaggtctggaaattagccgaggtcttggtcggagagcaacaacagtgccaggacgccaaatctcagcaaaaagagcagatgctgctgctggaaaagaaatccgctgcatacagtcaggttctcctgaggtgcctgactctgcttcagaggctgttacaagaacatcggctgaagacccagtcggaactggacaggataaacgcccagtacctcgaagtgaaatgtggtgcgatgatccttaaattaaggatggaggagttaaaaattttaagcgatacctacacagtggaaaaagtggaagttcatcggctgatccgggaccgactggagggagccattcacctacaggaacaggacatggaaaattctcgacaggtcctcaattcctacgaagtactgggagaggagtttgaccgattggttaaagagtacacagtcctcaagcaggccaccgagaacaaacgatgggcgctccaggagtttagcaaggtgtatagatag

SEQ ID NO: 225673 - DNA, 483 bp, synthetic construct
  misc_feature 1..483: note = Description of Artificial Sequence: Synthetic coding sequence
  source 1..483: mol_type = other DNA
atggcaagcggagacttttgcagtcctggagagggtatggaaatactccagcaggtatgctccaagcagctgccgccttgtaatctgtcaaaagaggatttgctgcagaacccgtatttctctaaactcttgctgaatctgtcacagcatgtggacgagagcggtctgagtttgacactggctaaagagcaggcacaggcctggaaggaggtccggctccacaagacaacatggctgcgctccgagattctccatcgagtgatacaagagctcctggtggattactatgtgaagatccaggacactaatgtgacctccgaggacaagaaattccatgaaactttggaacaaaggctgctggtcaccgaactgatgcgactcctgggtccaagccaggagagagagattccccctctattgggtctcgagaaagcagacctgctcgaactgatgcccctgagtgaggattttgtttggatgtag

SEQ ID NO: 225674 - DNA, 1902 bp, synthetic construct
  misc_feature 1..1902: note = Description of Artificial Sequence: Synthetic coding sequence
  source 1..1902: mol_type = other DNA
atggaactagcccaggaggcgagggagctgggttgttgggccgtcgaagagatgggcgtacctgttgcagctagagctccagaatccactctccggaggctgtgtttaggtcaaggcgctgacatttgggcctacatcttacagcacgtgcattcgcagaggacagtcaagaaaattcgcggaaacttgctgtggtacgggcaccaagacagcccccaggtcaggcgtaaactggaattggaggccgctgttacgagactgcgggcagagattcaagagctggaccagagcctcgagcttatggaacgagatactgaggctcaggacactgccatggaacaggcgcgacaacacacccaggatactcagcgccgagcccttctgctcagggcacaggccggtgccatgagacgccagcagcacaccctgagggatcctatgcagaggctgcagaaccagctgagaaggctgcaggacatggagcggaaggccaaggtggatgtcacttttggtagcttgacctccgcagccctcggactggagcctgtggtccttagagacgtgcggacggcttgtacgcttcgagcgcagttcctgcaaaacttattgcttcctcaggccaagcgaggttcactcccaacccctcatgacgatcactttggtacgagctatcagcagtggttgtcgagcgtagaaactttgctcactaaccacccaccaggccacgtgctcgcggcactggagcacctggcagctgagcgagaggcagagatccggagcctgtgtagcggcgacgggcttggcgatacagaaatttctaggccccaggccccagaccagtcggatagctctcaaacattgccgagcatggtccacctgattcaggagggctggcgcactgtcggagtactggtgtctcagcgctccacacttctgaaagaacgacaggtcctgacacagcggctccaaggattggtggaggaagtggagaggcgagtgctgggtagctcagaaagacaagtgcttatcctcggactaagaagatgttgtttgtggacagaactgaaggccctccatgatcagtcacaggaactccaggatgctgcaggccatagacagctcctgcttagggagctgcaggctaagcagcaaaggatcctccactggcgtcagcttgtagaggaaacacaggagcaagttcgactgttaatcaagggaaattcagcatcaaagacaaggttgtgcaggtccccaggtgaggtgctggcactggtgcagcggaaagttgtaccaacattcgaggcagttgctcctcagagccgagagctgttgagatgtctggaagaagaggtcagacatttgcctcacattctgctgggaactttgctgcggcataggcctggggagctgaagcctttgccaactgtgctgccgtctattcatcagttgcacccagcaagtcccaggggatctagctttatcgctctctcccataagctgggactgcctccaggcaaggcctccgagctgttgctgcctgctgccgctagtctccggcaagacctactcctccttcaggaccagcgttctctgtggtgttgggatctcctgcacatgaagacctcattacctcctggactccccacccaagagttactgcagattcaggcgagccaagagaagcagcagaaagagaatctgggacaggccctcaagcggctggaaaaactgttaaagcaagctctggaacggatacccgaactgcaagggatcgtgggtgactggtgggagcagcccggacaggctgccctcagtgaagaattatgtcaaggtctctctctcccccagtggagactgagatgggtgcaggcacaaggcgctctacagaagctgtgctcctag

SEQ ID NO: 225675 - DNA, 873 bp, synthetic construct
  misc_feature 1..873: note = Description of Artificial Sequence: Synthetic coding sequence
  source 1..873: mol_type = other DNA
atggagctcgcccaggaggctcgtgagctgggttgttgggccgtggaggagatgggcgtcccagttgcagccagagcccctgagagtactcttagaaggctctgtcttggacaaggcgctgacatctgggcctatatactgcagcacgtgcacagccagaggacagtcaagaagatccggggaaatttactctggtacgggcaccaagacagtcctcaggtccgacgcaagttggaactggaggctgcagtgactcgtctgcgtgctgagatccaagaattggaccaatccctggagctgatggaaagggacacggaagcacaggacaccgccatggagcaggcaaggcagcatacacaggacacccaacgtagggctttattgctgcgagctcaggccggagccatgaggcgacaacaacacaccctgcgcgacccaatgcagcgcctgcaaaatcagctccgcaggctgcaggatatggagcggaaggcaaaggtcgatgtaaccttcggctctttgacaagcgcagctcttggccttgaaccagtggtgctgcgggatgttcgaaccgcctgtaccctgcgggctcagtttctgcagaatctcctactgccacaggctaagcgcggatccctccccacaccgcacgacgatcactttggtacatcataccagcagtggctctcctcagtcgagacgttgttgacaaatcacccgccaggccacgtcctggcagctcttgaacacctcgcagccgagagggaggccgagatccgcagcctgtgttcgggcgacggactaggagatactgagatttctagacgagccggagggctgtgggtttgttggtctccttctggtgcgccatcttag

SEQ ID NO: 225676 - DNA, 2409 bp, synthetic construct
  misc_feature 1..2409: note = Description of Artificial Sequence: Synthetic coding sequence
  source 1..2409: mol_type = other DNA
atgaagtatataaagagcaattcaaagaacagctcccatcattttgtcgagacttttaacattaaaccacaggatttgcacaaatgtatcgctcgatgccacttcgccaggtcccggttccttcagatcctgcaacggcaggattgcgtgacccagaaatatcaggagaatgcccagctgtcagtgaagcaggtccggaatctgcggagtgagtgcatcgggctggagaatcaaatcaagaagatggaaccttatgacgatcattctaacatggaggagaaaatccaaaaggtacgcagcttgtgggcttctgtgaatgagacacttatgtttttggagaaggagcgcgaggtggtgtccagcgtgctatccctggtgaaccaatacgccctggacggaaccaacgtggccataaatataccccgacttcttctcgacaagatagagaagcagatgtttcagttacatatcggtaacgtgtacgaagctggtaaactgaacttgttgactgtcatccagctgctcaatgaggtcctcaaagtgatgaaatacgaaaggtgccaggctgatcaagctcgccttacagttgatcttcactatctggaaaaggaaacaaagttccagaaagaacgcttgagcgatcttaagcatatgcgctaccggattaaagacgacttgaccaccattcggcattcggtggtggaaaaacaaggggagtggcataaaaagtggaaggaatttcttggcctgagcccctttagtctcattaaaggatggacacctagtgtggatcttttaccccctatgtcaccgctgtctttcgaccccgcttcagaggaggtatacgcgaagtccatcctgtgtcagtatcctgcctctctgcccgatgctcacaagcagcacaatcaggagaatgggtgccggggagactcggatacattaggcgcactacacgatctggcaaattctcctgcgagctttctgtcacagtctgtgtcttctagtgacagaaatagtgtcaccgtgttggagaaagacactaagatggggactccaaaagagaaaaatgaagctatttccaagaagatccccgaatttgaggtggagaatagtcctctgtcggacgtagccaaaaacaccgaatcttctgccttcggcggtagccttcccgcaaaaaagagtgatcctttccagaaggaacaggatcaccttgtcgaggaggtcgcacgtgcagtgctgagcgattccccccagctgagcgagggcaaagaaatcaaattagaggagctcattgacagcctggggtctaatcctttccttacaagaaatcaaattccaagaactcctgagaacctcattactgagatccgctcttcttggagaaaagcgatagagatggaagagaatcggaccaaggaacctattcaaatggatgctgagcatcgcgaggtgctgcctgagtccctccccgtcctccataaccaaagggaattttctatggcagactttctgctggagaccacagttagtgatttcggtcaaagtcatttaaccgaggaaaaggtgatctccgactgcgagtgcgtgccccaaaagcacgtgttaacctctcatattgacgagccccctactcagaaccagtccgatctgctgaataagaaggtgatctgcaagcaggacctggaatgcttggcgttcaccaagttaagcgagaccagccggatggaaacattctccccagctgtcgggaatcgcattgacgtaatgggcggaagcgaagaggaatttatgaaaattctggaccacttggaagtgtcctgtaataagcccagcacaaataagacgatgctttggaactcatttcagatcagcagcggtatcagcagtaaatcttttaaagacaatgactttggtatccttcacgagaccctcccagaggaggtaggacacctctcctttaatagctcttcgtcatccgaggctaatttcaagctggagccaaattctcccatgcatggcggaaccttgctcgaggatgttgtcgggggtcggcaaactaccccggagagcgacttcaacctgcaggccctgcggagccggtacgaggcgcttaaaaaaagtttaagtaagaaacgggaggagagttacttgtcaaattctcagactccggagcggcacaagccagagctctctcccaccccacagaatgtccagacagatgacaccctgaatttcttggatacctgtgacttacacaccgagcatataaagcctagccttcgcaccagcataggggaaaggaaacggagcctgtccccactgatcaagttctcacccgtcgagcagcggcttcggaccaccatcgcttgtagtctgggtgaactgcccaaccttaagggtaaggtttag

SEQ ID NO: 225677 - DNA, 2868 bp, synthetic construct
  misc_feature 1..2868: note = Description of Artificial Sequence: Synthetic coding sequence
  source 1..2868: mol_type = other DNA
atgagctcagcctctgtaaccgcttttgagaaagagcatttatggatgtacttgcaggcactgggattcgaaccgggacccgcaaccatcgcgtgcggcaaaatcgtcagtcatacccatctcggcgtcaatatgttcgacaaattgaaccgggatgccttccatattatttcctattttttgttccaggtcttggatcaaagcttgacaaaggaggtatttaaattctgttggccgcctttcgaccagaaatctgatacagaatttcggaagcattgctgcgagtggattaaaagaatttccggagagtgtggctctagcttcccccaggtagtgggcagcctgttcctcagccccggtggacctaagtttattcacttaatgtatcacttcgctcgattcgtggccatgaaatatattaagtccaattctaaaaatagctcacatcacttcgtggaaaccttcaatattaagcctcaggacttacacaagtgtatcgcaagatgccattttgccaggtctcgatttctacagattctccaacgccaagactgcgtcacgcagaaataccaggaaaacgcccagctttccgtgaaacaagtccgaaatcttagatctgagtgcattggcctggaaaaccagatcaaaaagatggaaccctacgatgaccactcgaacatggaggagaaaattcagaaagtgagatctttgtgggcgtcagtgaacgaaacacttatgtttttggaaaaggaaagagaagtcgtttcgagcgtgttatctctggtcaaccagtatgcgctcgatgggacgaatgtcgccatcaatatcccgagactgctgctggacaaaatagagaaacagatgttccagctacatatcggcaacgtgtacgaagccggtaaattaaatctactgactgtcatccagctactcaacgaggtgctgaaagtgatgaaatatgaacgatgtcaggcagaccaggcacgcctcacggtcgacttgcattatttggaaaaggagacaaaattccaaaaagaaagactgtcagacctgaagcacatgcgttacagaattaaagatgatttgaccacaatcagacattccgtggtcgaaaagcagggggagtggcataaaaaatggaaagagttcctggggctgtcgcccttcagtctgatcaagggctggactcccagtgttgatttactaccccctatgtcccctttgagcttcgacccggctagtgaggaggtgtacgccaaaagcatcctttgccagtacccagcgtccctgcctgacgcccacaaacagcataatcaggagaacggctgtaggggcgactctgacacactcggagcacttcatgatcttgccaactcaccagcatcgtttctgtcccaatcggtaagtagctccgatagaaacagtgtcaccgtattagagaaagatactaaaatgggcacaccaaaagagaaaaacgaggcaatctccaaaaagatccccgagttcgaggtcgagaatagccccttgagtgacgtagctaaaaacaccgaatctagtgctttcggaggttcacttcctgcgaaaaagtctgacccctttcagaaggaacaggatcacttagtggaagaggtcgccagagcggtcctgtctgattctcctcaactgagcgaaggcaaggaaattaagctggaagaactgatcgactcattggggagtaaccccttccttacccgcaatcagatcccacgtacccctgagaacctaatcacggaaataagaagcagttggcgcaaggccatcgagatggaggagaaccgcacgaaggaacctattcagatggacgctgaacacagggaggtgctgcccgaatccttgcccgtgttgcacaatcagcgtgaattttctatggccgattttctcctggagactacagtctccgacttcggacagtctcatctgaccgaagagaaggtgatcagcgactgtgaatgcgtaccgcagaaacacgtcctgacgtcgcacatcgacgagcctccaacccagaatcaaagtgatttgctgaacaaaaaggtgatctgcaagcaggacctcgagtgcctggccttcacaaagttgtcagaaacttctagaatggagacattctcacctgcggtgggcaatcgtatcgacgttatgggcggttcggaggaggagtttatgaaaattctggatcatctggaggtgtcatgcaacaaaccatccacgaacaaaacaatgctctggaactcctttcaaatttcaagcggtatctcgtcaaaaagttttaaagataacgacttcggaatcctccacgagacactgccagaagaggtaggccacttgagcttcaacagctccagtagctctgaggctaactttaagctcgaaccaaattcacctatgcatggcggtactttgctggaagacgttgtggggggtcggcagaccactcctgagagtgacttcaacttgcaggccctgcggtcacggtatgaagccctgaagaaatccctgtccaagaaacgggaggagtcatacctgtccaattctcagacccctgaaagacacaaaccagagctgagccccacccctcagaatgtgcagactgatgataccttgaatttcctggacacctgcgatctccatacggagcacatcaaaccgagtttgcggaccagcatcggggaaagaaaacggtctctgtcccccctaattaaatttagtcccgttgagcagcgtttgcgtactacgattgcttgttccctgggtgaactacctaatctgaaggaggaagacattctgaataaatcccttgatgccaaggaacctccttccgacttaactcggtag

SEQ ID NO: 225678 - DNA, 552 bp, synthetic construct
  misc_feature 1..552: note = Description of Artificial Sequence: Synthetic coding sequence
  source 1..552: mol_type = other DNA
atgggtacgcccaaagagaaaaacgaagcaatatcaaaaaagatccccgagtttgaggtggagaatagcccactgagtgacgtggccaaaaatactgaaagctcagccttcggagggagcctcccagctaagaaatccgaccctttccaaaaagagcaagatcacttggtcgaagaagtcgctcgcgcagtattgagtgactcgcctcagctgagcgagggcaaggagataaagctggaggagttgatcgatagtctgggcagcaacccgtttctgacgaggaaccaaatacctcgcactcctgaaaatctgattactgaaatcagatccagctggaggaaagctatcgagatggaagagaacagaacaaaggaacctatccagatggacgctgagcatagagaagtacttccagagtccctgcctgtgctgcataaccaacgcgaattctcgatggctgattttttgctggaaaccaccgtgtcggacttcggacaatcgcatctgacagaagagaaagtgatatccgattgcgaatgcgtgccccagtag

SEQ ID NO: 225679 - DNA, 1077 bp, synthetic construct
  misc_feature 1..1077: note = Description of Artificial Sequence: Synthetic coding sequence
  source 1..1077: mol_type = other DNA
atggccggacaggacgctggttgtgggagggggggagacgattactcagaagatgagggagactcctccgtgtccagagccgcagtggaagtctttggtaagctgaaagatctgaattgcccattcttagaaggcctatatatcaccgagcccaagacgattcaggagctcttatgctcaccctcggaataccgattagaaatactggaatggatgtgtacaagagtctggccctctctgcaagataggttctcctcattgaagggagttccgacagaggtgaagatacaggagatgactaaactcgggcatgagctaatgttatgcgctcctgatgatcaggaacttctcaaaggttgcgcgtgtgcccagaaacagctgcacttcatggatcaactgttagacaccattagatccctgacgatcggttgttcttcatgcagctctctcatggagcactttgaagacaccagggaaaagaatgaggcgctactcggggaactattcagtagtccccacctccaaatgttgctgaacccagaatgtgatccttggccgctggacatgcagcctcttttaaataaacagtctgatgactggcaatgggctagtgcttctgcaaagtccgaggaagaggaaaaattggccgaacttgctcgccaactgcaggagagcgcagcaaagttgcacgcactgaggaccgagtacttcgcccaacatgagcaaggagcagccgctggagccgcagacatttctacactggaccagaaattgcgtctggttacttctgatttccaccagttaatcctggcctttctccaagtgtatgacgatgagctgggtgagtgctgccaacgccctggcccagatctccacccttgcggccctatcattcaggcaacacaccagaacctgacgtcctattcccagctgttgcaagtggtgatggcagttgcagacacaagcgcaaaagccgtggaaacagtaaaaaagcaacagggagaacaaatatgctggggaggatcttcctcggttatgagtctggccaccaaaatgaacgagctgatggaaaaatag

SEQ ID NO: 225680 - DNA, 1284 bp, synthetic construct
  misc_feature 1..1284: note = Description of Artificial Sequence: Synthetic coding sequence
  source 1..1284: mol_type = other DNA
atggggggtgctagactgggcgcaagaaacatggcagggcaggacgctggctgcggacgtggaggcgatgattactcagaggatgaaggggattcctctgtgtccagagccgctgtggaggttttcggaaagctcaaagatctgaactgcccattcctcgagggcctctacattactgaacccaagacgatccaggaacttctgtgtagtccttccgaataccggttagagattctggaatggatgtgtacccgggtctggccctccctacaggaccggttctcaagccttaagggagtgcctaccgaggtgaagattcaggagatgaccaaactcgggcatgaattgatgctgtgcgccccagacgatcaggagctgcttaaagggtgcgcctgtgcacagaaacagctccactttatggaccagctgttggatacgatcagatctctgacaatcggctgttccagttgttcgagccttatggaacactttgaagatactagggagaagaacgaggctctcttgggagagttatttagttcgccacacctgcagatgctgctaaaccccgaatgcgacccctggccattggatatgcagcccctgcttaataaacagtctgatgactggcagtgggccagcgccagcgctaagtccgaagaggaggagaagctagcggagctggcaaggcagctccaggaatcggctgccaagctgcatgcactccggaccgaatacttcgctcagcatgagcagggcgctgccgctggggcagcggacataagcaccctcgaccaaaagctgcgactcgtgacaagcgattttcatcagctgatactggcctttcttcaggtttatgatgatgaattgggggaatgctgtcaacggcctggccctgatctccacccctgcggccctatcatacaagcaacgcatcagaatttgacctcctatagccaaattcctcgtggacaacctaagaaacccgctttggtaaccatgacgacggtaccaacctgcgccacattgcctcttgcacagggattcagagacgtgcacttcggatttctgtccgaacgtttaagggcctttcagcccctcactggctggagttgtgaaacccctagatccggcatgttactccaggttgtgatggccgtggccgatacatccgccaaggccgtcgaaactgtgaagaagcagcaaggtgagcagatctgttggggtgggagctccagcgttatgagtcttgccactaaaatgaacgagctcatggaaaagtag

SEQ ID NO: 225681 - DNA, 1107 bp, synthetic construct
  misc_feature 1..1107: note = Description of Artificial Sequence: Synthetic coding sequence
  source 1..1107: mol_type = other DNA
atgggcggtgcaagattaggagctagaaacatggcaggacaagatgcgggatgcggccgtggaggagacgactactccgaggacgagggagactcatcggtctctcgtgctgctgtggaggtgttcggtaaattaaaggacctaaattgcccatttcttgaaggcttatacattactgagcccaagacgatccaagagctcctgtgtagtcctagtgaatatcggttagagatcctggagtggatgtgcactcgagtgtggccttctcttcaggatcgcttttcctccttaaaaggggtgccaacagaggtgaaaatccaggaaatgacgaaacttggtcatgagctgatgctgtgtgccccagacgaccaggaattactcaagggctgtgcctgtgcacaaaagcagctgcattttatggatcagctacttgacactattcgctcactcaccatcggctgctccagctgcagctctcttatggagcacttcgaagatacaagagagaagaacgaagcccttcttggggaactgttttcaagccctcacctgcagatgttgctaaatcctgagtgtgatccttggccactcgacatgcaacctctcctgaataagcagtccgatgattggcagtgggcgtccgcatctgccaaatccgaagaagaggagaaacttgccgaactggctaggcagcttcaggagtcagcagccaaacttcacgccctacggacagaatactttgctcaacatgagcagggcgcagccgcaggagccgctgatatcagcacattggaccaaaaactcaggttggtgacgtcagactttcatcagctgattctggcttttctgcaagtctacgacgacgaactgggtgaatgctgccagcgccctggtcctgaccttcacccctgtggacctattattcaagctacccaccagaacctcacatcctacagccagctgctgcaggttgttatggccgtggccgatacgtccgctaaagcagtagaaactgtgaagaaacaacaaggagagcagatctgttgggggggaagcagctctgttatgagtctggcaactaagatgaacgagttgatggagaaatag

SEQ ID NO: 225682 - DNA, 411 bp, synthetic construct
  misc_feature 1..411: note = Description of Artificial Sequence: Synthetic coding sequence
  source 1..411: mol_type = other DNA
atggaccagctgctcgacactataaggtcactgactatagggtgcagttcttgttccagtcttatggagcacttcgaggatactcgcgagaaaaatgaagcacttcttggagagctgttttcctcgccccacctacagatgctgttaaatcctgagtgtgacccatggccgttagacatgcaaccactcctgaacaaacagagcgacgactggcaatgggcctctgcctctgccaaatcagaggaggaggagaaactggccgaactggccagacagctgcaagagtccgcagctaagttacatgctctaagaactgaatctaccactactagctgggcttctgccgcatccgcccaggcactgacgagtacacgggctgccccttcttctcgaccacggacaagaatctag

SEQ ID NO: 225683 - DNA, 516 bp, synthetic construct
  misc_feature 1..516: note = Description of Artificial Sequence: Synthetic coding sequence
  source 1..516: mol_type = other DNA
atggtcaaacgaagacgttcgccagctttgggagaagaaaggttcagccccagctctattctgcatccacgcctaccactggtactcttgggcactcgggtgcctctgtccggtggcggacccggagagccggatcagggacggtctgccccatcctggaagagtttggcctctacacatcatcatagccgacccgcagctggcgcaacccccgcaaggccagccactcagtcacagcttggacctttcgctcctccgcttccgggagtacggccagcacctttccccgctgttgaggtcttcggcaagctcaaagatcttaattgcccattcctggagggtctttatatcactgagcccaagaccatccaggagctgctctgttcccccagcgagtaccgtctggagatcttggaatggatgtgtacccgggtgtggccctccttgcaggataggttcagctctctgaaaggcgttcctacagaagtgaaaatccaaggacttctggccggatag

SEQ ID NO: 225684 - DNA, 1233 bp, synthetic construct
  misc_feature 1..1233: note = Description of Artificial Sequence: Synthetic coding sequence
  source 1..1233: mol_type = other DNA
atggccgatagcagcgggcgtggagccggtaaaccagcaacaggaccaactaacagcagtagtgccaagaaaaaggataaaagggtccaaggcggaagagtcatcgaatcccgctaccttcagtatgagaagaaaacaacccagaaggcccctgcgggagatggaagccagacccggggtaagatgtctgagggtggacgaaaaagctctcttcttcagaaatcaaaggctgattcttcaggcgtaggaaaaggtgacctgcaatccacgttattagaaggacacggcactgctcctcccgacctcgacctcagtgccatcaatgataaatcaatagtgaaaaagactccgcagttggctaagactatttctaaaaaacctgagagcacgagcttcagcgccccacgtaagaaatcaccagatcttagtgaagccatggagatgatggagagccagactctattactgactctgctgagcgtcaagatggagaacaatctagccgaattcgaacggagggccgagaaaaatctgctcataatgtgtaaagagaaggagaaattgcaaaaaaaagctcacgaactcaaacgcaggctgctgctgagtcagagaaaacgcgaactggccgacgtgctggatgcccagatcgaaatgctgtccccttttgaggccgtagcaaccagattcaaggagcaatatcggacattcgccaccgcgctcgatactaccaggcacgagcttccagtccggagcatccatttagagggagatggacaacagctgcttgatgctctgcagcacgagttagtgaccacacaacggctgttgggcgagctggacgttggcgactccgaggaaaatgttcaagttcttgaccttttatctgagctgaaagatgtcaccgctaaaaaagacttagagctgcgtaggtccttcgcacaggtcctggaactgagtgccgaagccagcaaggaagctgctctggcaaatcaggaggtctgggaggaaactcagggcatggctccaccaagtcgttggtatttcaaccaggactcggcctgccgcgaatccgggggagccccaaaaaacactcccctgtctgaggatgacaatcctggcgctagctccgcccctgctcaggcaacctttatatcaccttccgaagacttttcttcatcctctcaggctgaggtcccaccgtcactgtcgaggagcggaagagatctgtcctag

SEQ ID NO: 225685 - DNA, 1230 bp, synthetic construct
  misc_feature 1..1230: note = Description of Artificial Sequence: Synthetic coding sequence
  source 1..1230: mol_type = other DNA
atggcagacagcagtggcagaggagcaggaaagcctgccacgggcccaacaaactcaagttctgccaaaaaaaaggacaaaagggtacaggggggtcgggtcattgagagcaggtacctgcagtatgaaaagaaaaccacccagaaggcgccagctggcgatggctcccagacacgtggcaaaatgagcgagggaggccgaaagtcctccctgctgcagaagagtaaggattccagtggggtggggaaaggcgatctgcagtcgaccctgttagagggacatgggacagcaccgccagatctcgacctgagcgctataaacgataagtcgatagtgaagaaaacgccgcagctggctaagaccatatctaaaaagcctgagtccaccagtttcagtgcaccacgcaagaaaagtcccgacctgtccgaggcaatggagatgatggagtcacagaccctgttgctgactttgctgtcagttaagatggagaataatcttgccgaattcgaacgccgagctgaaaagaacttgctcatcatgtgtaaagagaaagagaagctccagaaaaaggctcacgagcttaagcgtagattactgctgtctcagcgtaagcgcgagctagcagacgtgctcgacgcccagatagagatgctctcaccttttgaagccgtagctactcgattcaaagaacagtataggacgtttgccacggccctcgacacaacaagacatgaactgccagtccgatcaattcacctggagggcgacggtcagcaattgctcgacgccttgcagcacgaactagtcaccacacagaggctgctgggcgagctggacgtgggggacagcgaagagaatgtccaggttctggacctgttgagcgagctgaaagatgttaccgcgaagaaggacctcgagctaagaagaagtttcgcccaagtgctcgagctgagcgctgaggcctccaaggaggcggctctggccaatcaggaagtatgggaggagacccagggcatggcgcctcccagcagatggtatttcaatcaagactcagcctgtcgcgagtcaggaggtgcccctaagaacacacctttgtccgaggacgacaaccccggtgccagttccgctcccgctcaagccacgttcatttcgccttctgaagacttcagcagctccagccaggcagaggtgcctcccagtctttctcgtagcggacgcgatctcagttag

SEQ ID NO: 225686 - DNA, 1899 bp, synthetic construct
  misc_feature 1..1899: note = Description of Artificial Sequence: Synthetic coding sequence
  source 1..1899: mol_type = other DNA
atggccagacataggaatgtgcggggatacaactacgacgaggactttgaggacgatgacttgtacggacaaagtgtcgaagacgactattgcatctcccctagtacagccgcacagttcatttacagcagacgagacaaaccgtctgtggagccagtggaggagtatgattacgaagatctgaaggagtcctcaaactctgtcagtaatcaccagctgtccggctttgaccaagccaggctgtatagctgtctggaccacatgcgcgaagttctaggcgacgccgtacccgatgaaatcctgatagaagcggtgctcaagaataaattcgatgtccagaaggctctgagcggggtgttggagcaggacagggtgcagagtctgaaggataaaaacgaagccaccgtgagcaccgggaagattgccaaaggggttctgttttccagctccgaagtgtcagctgacaacgtccagtcatcgtatccacaatcagccaaccacttggattattcaagcaagccctttgattttgcctcctccgtgggcaagtacggtctgagccacaattccagtgtgccaacccactgtctgctgcacagaaagaagaaactggatacgcgcaagtcagagaagaaactagagtcttgcaagctgactaaagaactgtctcttgctaacttgattcatgacatgtctagggatagctgtgaaagtcaaccctccgtgcgactgtcttccaccgattctctggagagcttgctctcaaaaaatctggacgctgatctactccggccacacgcctccgaatgtatttctaaggacgactcagcattcaaggaaattcccgatctgaagactattatcatcaagggcacaaccccaaataactccttgtacatccagaacaactctctctcagattttcagaatattcctgtccaagatagtctcggttctagcaataaccccctgtatttaactagtagcctggaaaacatgaccgtggacaatctgaatgccagtaaggagaccgaggttggcaacgtttcactggttgaacagtccgccaaaaatcataccttcaagaatgacaatctccagtttagccagtgcgaaagtccaagcctcacggaactgtttcaagagcataaagagaacaatatatcccagtgctttacactgtcagacctgtgcaaccaatctagcgcttcttttactgatctgtctctagggtccttccctctcagccagctcgccaatcgttgccaatcctctcccggaataagcgaactaactggatcgttgagtagcttggcctttcacaaagcaagccccacacgcgacctcgagaatctgtcgctcagcgagctgatcgccgaaactatcgatgtggacaattctcagattaagaaggagtcattcgaagtttccttaagcgaggtacggtcccctggtatcgattctaacatagacctatccgtcctgatcaagaaccctgactttgttcctaaacctgttgtggacccatcgattgccccttcctctagaacaaaagtactgtcgtcaaaactgggcaaaaacagcaattttgctaaagataataagaaaaacaacaaagggtctctcacgagaaagcctccattttccctgtcctggacaaaagctctcgcagccagaccgagcgcctttgccagcacactgtgtcttcgctacccactaaaaagttgtaagcgtcggacactggacttgtacaaaacatttctctacagccgccaggtgcaagatgtgaaagacaaggagatatctcctctcgtagccataacgccgttcgatttcaagtcagcatctccagacgatatcgtgaaagctaatcaaaagaaggcctttacgcgggagtag

SEQ ID NO: 225687 - DNA, 1563 bp, synthetic construct
  misc_feature 1..1563: note = Description of Artificial Sequence: Synthetic coding sequence
  source 1..1563: mol_type = other DNA
atgacggtttccgggaagaagcagaccatggggttcgaagtgcccggagtgagcagcgaggagaatgggcacagcttccatacgcctcagaaggggcctccaatcgaagacgctatcgccagcagcgacgtgctggaaacagctagcaaatcggctaacccgccacatacaattcaggccagcgaggaacaaagtagtacccctgcaccagtgaagaagtccggtaagctgagacagcagatcgacgtcaaggctgagttggagaaacggcaggggggtaaacagctgctgaatctggtcgtcatcgggcacgtggacgccggtaaaagtacactgatggggcacatgctgtacctgcttggtaatattaataagcggacaatgcataagtatgagcaggaatcaaaaaaagcaggcaaagcctccttcgcttatgcttgggtgctggatgagacaggcgaagagagagaaaggggtgttacgatggacgtgggcatgaccaagttcgaaaccaccaccaaagtgatcacattgatggacgctccaggtcacaaggactttataccgaatatgatcaccggcgctgctcaggccgatgtcgccgtcctggttgtggatgcctctaggggcgaatttgaagcaggattcgagactggtgggcagactcgtgagcatggcttgttagttcggagcttgggcgtcacccaactcgctgtggccgtgaataaaatggatcaggttaattggcagcaggaaaggttccaggagatcacgggaaaattagggcattttctcaaacaggctggcttcaaagaatcagacgtaggcttcatccccacctcgggcctgtctggcgagaaccttattacacgaagccagtcctctgagctgacaaagtggtataagggcctctgtcttcttgagcaaatcgattcctttaagccaccccagcgtagcattgacaagccctttagactgtgtgtttccgacgtgttcaaggaccaggggtcaggattttgcatcacgggcaaaatcgaggcgggttacatacagaccggggacagattacttgcaatgccacccaacgagacttgcactgtgaagggcattacactccatgacgaacccgtcgactgggcagctgccggagatcacgtgtctctgactctcgtaggcatggatatcattaaaatcaacgtgggctgtattttttgcggcccaaaagttccaattaaggcttgcacacgctttcgcgctcggatcttaatattcaatatagagattccgatcaccaagggcttcccagtcctactccactaccagactgtcagcgaacccgctgtcatcaagagattgatctctgtgcttaacaagtcaacaggagaggttacaaagaagaagccaaaattcttgacgaaaggacaaaacgcgctggttgagttgcagactcagaggccaattgcactagaactatataaggatttcaaggaactgggccgttttatgctgagatacggtgggagcacaattgccgctggggttgttacggaaattaaggagtag

SEQ ID NO: 225688 - DNA, 1929 bp, synthetic construct
  misc_feature 1..1929: note = Description of Artificial Sequence: Synthetic coding sequence
  source 1..1929: mol_type = other DNA
atggctcgccacagaaacgttaggggctataactatgatgaggacttcgaagacgatgatctgtacggccagtcagtcgaagatgattactgcatcagcccatcaaccgcccgattgtactcttgtctggaccatatgcgcgaggtgctgggtgacgctgtgcccgacgaaatcctcatcgaggctgtgctgaaaaacaagttcgacgtacaaaaggccctgtccggtgtgttggagcaggatcgggttcagtcactgaaagataagaacgaggccacagtgagtacagggaaaattgcaaagggaaaaccggttgactctcagacctctagatctgaaagtgagattgtgccaaaggttgccaagatgaccgtgtccgggaagaagcagacaatgggattcgaggtgcccggagtatcttcggaagagaatggacacagctttcacaccccacagaaagggcctcccattgaggacgccatcgcctcatccgacgtactcgagactgcgagtaaatccgccaatccacctcatactatacaagccagtgaagaacaaagctccaccccagcccctgtcaaaaaatccgggaagctcagacagcagattgatgtaaaggctgagctcgaaaagaggcaaggaggcaagcaattactcaatctggtagttattggccacgtagatgccggtaagtctaccctgatgggacacatgctctacctgcttgggaacattaataagcgaaccatgcacaaatatgagcaggagtcgaaaaaggcgggtaaagcttcttttgcttatgcatgggtcctggatgagacaggagaggagcgagagcggggagtgaccatggatgttggaatgaccaagttcgaaactaccaccaaggtcatcactctgatggacgccccaggacacaaggatttcattcccaatatgatcactggcgcagcccaggcagacgtggccgtgctagtagtggatgctagcagaggcgagttcgaagccggatttgaaactggcggacagaccagagagcacggtttgttggtcagatctcttggggtcacacagctggccgttgccgtgaacaagatggaccaggttaactggcagcaagagaggttccaagagataaccggaaagctgggacatttcctaaaacaggctggcttcaaggaaagtgatgtgggattcattccaacctcaggtctgagcggggagaacctcatcacacggagtcagagctctgagttgaccaaatggtataaaggcctgtgtttgctggagcagattgatagcttcaaaccaccgcaaaggagtattgataagccgttcagactctgcgtgtccgacgtgtttaaggaccaggggtccggattttgtatcaccggcaaaattgaggctggctatattcagacaggtgaccggctcctcgctatgccaccgaacgagacctgcacggtcaagggcataaccttgcacgatgaaccagtcgactgggcggcagccggtgatcacgtctcgctgacgctggttggaatggacatcatcaagattaacgtgggctgcattttctgcggacctaaggtccccatcaaggcttgcacaaggtttcgtgctaggatcctgattttcaacattgaaattccgattaccaagggtttccccgttctcctgcactatcagacggtgagcgaacccgcagtaatcaagcgtctgatctcagtcctgaacaagagcactggagaggtgactaagaaaaagccaaagttcctcaccaaagggcagaacgcactcgtggagctgcagactcagcggcctattgccttggagctgtacaaagactttaaggagctcggcagatttatgttaagatatggcggaagcactattgcagcaggcgtcgtgaccgaaatcaaagagtag

SEQ ID NO: 225689 - DNA, 2055 bp, synthetic construct
  misc_feature 1..2055: note = Description of Artificial Sequence: Synthetic coding sequence
  source 1..2055: mol_type = other DNA
atggctagacacagaaacgttcggggatacaactacgatgaggatttcgaagacgacgatctatatggccagtctgttgaggacgactattgcatctctccgtcaaccgctgcccagtttatttattctcgcagagacaagccttccgtggaaccagtcgaggagtacgattatgaggacttgaaggaatcttccaattctgtgagtaaccaccagttatcgggctttgaccaggctcgcttgtattcttgtctggatcacatgagagaggtgttaggtgatgctgtgcctgatgaaattctaatcgaagctgtgctgaagaataagtttgatgtccaaaaggcactgtccggggttcttgagcaggatcgagtgcagtcactcaaggacaagaacgaagccacagtctccaccggcaagatcgctaagggaaaaccagtggattcccaaacttcacggagcgaatcagagattgtgcccaaagtcgccaagatgacagtgtccgggaagaagcagactatggggttcgaggttccaggagtgtcctcggaggagaatggtcactcattccatactcctcagaagggcccacccatagaggacgctattgccagtagtgacgtcttagagaccgcctcaaagtctgccaacccacctcacaccatccaggcgagtgaggaacaaagctccacccccgctccagtgaagaaatcaggcaaactgaggcagcagatcgatgtgaaagcagagttggaaaagagacagggcggaaagcagctgctgaacctggtggtgatcgggcacgttgacgctggcaagagcaccctaatgggacatatgctgtatcttttgggcaatattaacaagcggactatgcacaaatatgaacaggaaagcaaaaaggcaggtaaggcctcttttgcatacgcatgggtcctcgacgaaaccggagaggagagggagagaggcgtcacgatggacgttggtatgaccaagtttgagaccaccactaaggtgattaccctcatggacgcccctgggcacaaagatttcattccaaacatgataacgggtgcggcacaggcagacgtggcggtgctggtggtggacgccagtcggggtgagttcgaggcgggtttcgagactgggggtcaaacacgtgagcacggcctgttggttcggtctctaggggtcactcaactcgcggtggcggtaaataaaatggaccaggttaattggcagcaagaacggtttcaagagatcacaggcaaactggggcactttctcaaacaggccggatttaaagagtccgatgtgggcttcattcccacttctggtctttccggagagaatctgatcacccgctctcagtcttctgaactaacgaagtggtataagggcctctgtctgttagaacagatcgatagttttaagccgcctcagaggagcatcgacaaaccctttcgcctttgtgttagcgatgtgttcaaggatcaaggtagcggtttctgtataactggcaagatcgaagccggatatatccagaccggcgatcgactcctggctatgcccccaaatgaaacctgcacggtaaagggcatcactttgcacgacgaacctgttgattgggcagcagccggtgatcatgtttcattgacactggtcgggatggatattattaagatcaatgtgggctgtattttttgcggcccaaaggtgcctataaaggcttgtactcgcttccgcgctagaatactaatatttaatattgaaatcccaattaccaaaggatttcccgtcctgcttcactaccaaacagtgtcagagcccgctgtgataaagagactgatttctgtgctgaataaatcaactggcgaggtcaccaaaaaaaagcctaaatttctcaccaaagggcagaatgcactggttgaactccaaacacagagacctatcgctttggagttgtacaaggacttcaaggaactggggaggttcatgctacgctacggtggatctaccatcgccgcaggggttgtcacagagatcaaggagtag

SEQ ID NO: 225690 - DNA, 1227 bp, synthetic construct
  misc_feature 1..1227: note = Description of Artificial Sequence: Synthetic coding sequence
  source 1..1227: mol_type = other DNA
atgggccatatgctttatctgttgggaaatattaacaagagaactatgcacaagtacgagcaggagtctaagaaggccggtaaggccagctttgcttacgcgtgggtgttggatgaaacaggagaggagagggagcggggagtgacgatggatgttggaatgaccaaatttgagacaacaaccaaggtcatcacacttatggatgcccctggccataaagactttattcccaatatgatcacaggtgctgcacaggccgatgttgcagttctggtagtggacgcttccagaggggaattcgaggcaggatttgaaactggcggacagacacgggaacatggtcttctggtgcggtctcttggcgtcacccaactcgccgtggcagtgaacaagatggaccaagtaaattggcagcaggaacgctttcaggagattaccggaaagctgggccattttctgaagcaagccggttttaaagagtccgatgtcggctttattccaacctcgggcctgtctggggagaacttgatcacaaggtcccaaagtagcgagctcactaagtggtacaagggactgtgtctgctggagcagatagactccttcaagccgccacagagatcgatcgataagccttttcgattatgcgtttccgatgttttcaaagatcagggaagtggattttgtatcacgggaaaaatcgaagctggctacatccagacgggagaccgacttctggccatgcccccaaacgaaacatgcaccgtaaagggaatcactctgcatgacgagcccgtggattgggctgccgcaggggaccacgtgagtctgacactggtgggcatggacatcatcaagatcaacgtgggatgtatcttttgtggacccaaggtgcccatcaaggcgtgtacaagatttagggctcgcatcctcatttttaacatcgaaattccaattactaaaggctttcccgtactgttgcactaccaaacagtgtccgagcctgctgtgatcaaacggctcatcagcgtgctgaacaagagtaccggcgaggtgaccaagaaaaagcccaagttcttaaccaaggggcagaatgcccttgttgagttgcagacacagcgaccaatcgccttggagttgtataaggacttcaaggagttgggcagattcatgctcagatatgggggaagcacgatcgccgctggagtcgtgaccgagattaaggagtag

SEQ ID NO: 225691 - DNA, 840 bp, synthetic construct
  misc_feature 1..840: note = Description of Artificial Sequence: Synthetic coding sequence
  source 1..840: mol_type = other DNA
atgtcactatttgacctgtttcgcggattcttcggcttcccgggtccaaggtcacaccgcgacccattctttgggggaatgactagagacgaggatgatgacgaagaagaggaagaggaggggggtagttggggacggggaaacccaaggtttcacagccctcaacacccacccgaggagtttgggtttggcttcagtttttcccctggtggcggaattaggttccacgataattttggcttcgacgatctggtgcgcgattttaactcaattttcagcgacatgggtgcctggactctcccttcccaccctccggagctccccggacctgagtcagaaacaccaggcgaacgcttgagggagggacaaacccttcgggattccatgcttaaatacccagattctcaccaacccagaatctttggaggtgttttagagtccgatgcgagatcagaatccccacagccggctcctgactggggttcccagagaccttttcaccggtttgatgacgtttggccaatggatcctcatcctcgaactcgggaggacaacgatctggacagccaagtatctcaggagggcctgggccctgtgctgcaaccccagcccaagtcgtattttaaaagtatctcagtcaccaaaattaccaagccagatggcatagtggaagagagacggacagtagtcgatagcgagggcagaacggagactactgtaactaggcacgaagccgacagttcccctaggggcgaccctgaatcgcctaggcccccagcccttgacgatgcattttccatactggatctgttcctgggacgatggttccgtagccgctag

SEQ ID NO: 225692 - DNA, 696 bp, synthetic construct
  misc_feature 1..696: note = Description of Artificial Sequence: Synthetic coding sequence
  source 1..696: mol_type = other DNA
atgtctctctttgatctcttccggggtttttttgggttccccggaccccgaagcttttcaccaggcggtggtatccggtttcacgataactttggattcgatgatctggttcgcgactttaatagcatcttttcggacatgggcgcttggacactcccctcccaccctcccgagctgccgggtccggaatccgaaacaccaggggagaggctccgggagggccagaccctccgagactcaatgctaaaataccccgattcacaccaaccacgaattttcggaggggtgcttgagtccgatgcaaggtctgagtcacctcagccagcgccagattggggatctcagagacccttccacaggttcgacgacgtttggccgatggacccccaccctcggacccgggaggataacgatctcgattctcaggtgtctcaggaaggccttgggccagttctgcagcctcagccgaaaagctacttcaaatctatctcagttaccaagatcaccaagcctgacggcatcgttgaagagagaagaactgtcgtggactccgagggcagaaccgagaccactgttacccgtcacgaggctgacagtagccctagaggggatcccgagagtccccgtcctcccgctttagacgacgctttttcgattctcgacctctttctgggcaggtggtttcgctccagatag

SEQ ID NO: 225693 - DNA, 864 bp, synthetic construct
  misc_feature 1..864: note = Description of Artificial Sequence: Synthetic coding sequence
  source 1..864: mol_type = other DNA
atgagtctgttcgacctctttcggggattctttgggttcccgggacctaggtctcatcgcgacccctttttcggcggaatgacaagagatgaggacgacgatgaggaagaagaggaggaagggggatcctggggcaggggaaacccacgctttcattctcctcagcacccaccagaggagtttggattcggattttcctttagccccggtgggggtattcggttccatgataactttgggtttgatgatctagtcagggacttcaattcaattttcagcgacatgggggcatggacgctgccatcccatcctccagctaatacctgtcacctctcggcggagctgcctgggccagaatcagagacccccggagaacggctccgggagggtcagacgctccgggactccatgcttaagtaccccgacagccaccagccgagaatatttgggggtgtcctggagagcgacgcacgctccgagtccccacaacctgcacctgattggggcagtcagagaccctttcatcgattcgatgacgtttggccaatggaccctcatccgagaactcgggaggacaatgatctcgacagtcaggtctctcaagaaggtttagggcctgtcctccagccacaacccaaaagttactttaagtccatttccgtcaccaagatcactaagcccgacgggatcgttgaggagcgaagaacagtggttgattcggaaggacgcacggagacaacagtgacacgccacgaagccgatagctcacctaggggtgaccctgagagtcctcgcccaccagctctcgatgatgcctttagtatcctggatttatttctgggccgatggttccggagtcgttag

SEQ ID NO: 225694 - DNA, 1179 bp, synthetic construct
  misc_feature 1..1179: note = Description of Artificial Sequence: Synthetic coding sequence
  source 1..1179: mol_type = other DNA
atgcaatcccccgctgtattggtgacctccaggagactccagaatgcccacacgggtttggacctgactgtgccccaacaccaagaagtcagggggaagatgatgtccggacacgtggagtatcagatcctggtcgtcacccgccttgcagcgtttaagagcgcaaaacaccggccagaggacgtggtgcaattcctggtatcaaagaaatatagcgagattgaagaattctatcaaaaactctcatctagatatgccgctgcctccctcccaccactgccccgaaaggttttgtttgtgggcgaatccgacatccgggaacggagagccgtgttcaacgagatcctgcgatgtgtgtcgaaagacgcggaactggcgggttctcccgagctgctagagttcctaggcactcggtcccccggagctgctggcttgacatcccgggactcttccgtgttagacggtactgactcccaaactggcaacgatgaggaggccttcgatttttttgaggaacaggaccaagtggctgaagagggtccgcctgtccagtcattaaaaggcgaggatgcagaagaatccctcgaagaagaagaggctctggacccactgggcataatgaggtctaagaaacccaaaaaacatccaaaggttgctgtgaaggcaaagccatctcccaggctaacaattttcgacgaggaggtcgatccagatgagggcctgtttggacctggcaggaagcttagccctcaggacccctctgaggacgtcagtagtgtggacccactcaaactttttgatgaccccgatctagggggtgccatacctctcggagactctcttttattgcccgctgcgtgcgagagtggcggtccaacacccagcctcagccaccgtgatgcaagcaaggagctgtttagagtggaggaggatctggaccagatcctaaatttaggggcagagcccaagcctaagccacaactaaagccaaagccgccagttgcggcaaaaccggtaatacctcgtaaacctgctgttcctcccaaggcagggcctgctgaggcagttgctggacagcagaagcctcaggagcagatccaggctatggacgagatggatatcttgcaatacatccaggaccacgacacacccgcacaggctgctccctccctgttttag

SEQ ID NO: 225695 - DNA, 654 bp, synthetic construct
  misc_feature 1..654: note = Description of Artificial Sequence: Synthetic coding sequence
  source 1..654: mol_type = other DNA
atgtctctggtgggcggttttccacatcacccagtggtacatcatgagggatacccttttgccgctgccgcagctgccgctgctgccgcagccgcatcccgctgctcccatgaggagaacccatacttccacggatggctcattggccaccccgagatgtccccccctgattactccatggccctctcctactcccctgaatatgcctccggtgcggcagggctggaccattcacactatggtggtgtgcccccaggcgctggtccccctgggctgggtggtccaaggccggtgaagcggagaggtacagccaacaggaaagagcgcaggcgcacccaaagcataaatagtgccttcgcggagctacgggaatgcataccaaacgtgcccgctgacaccaaactgtcaaagattaaaaccctccgtttggccacatcctacatcgcttaccttatggacctcctggctaaggatgaccagaatggggaagcggaggcctttaaagccgagattaaaaagactgacgtgaaggaagaaaagagaaagaaagagctgaatgagattctgaagtcgacggtgtcctcaaatgataaaaagaccaaaggcagaaccggctggcctcagcatgtatgggcccttgagttgaaacaatag

SEQ ID NO: 225696 - DNA, 561 bp, synthetic construct
  misc_feature 1..561: note = Description of Artificial Sequence: Synthetic coding sequence
  source 1..561: mol_type = other DNA
atgtcccttgttggtggcttccctcaccatcctgttgtgcaccatgaaggatatccctttgccgctgctgcagcggcagctgccgctgctgcagctagtagatgcagccatgaagagaacccttacttccacgggtggctcattggacatccggagatgagtcctcctgattactccatggccctgagttattccccagaatacgcgtccggaaccgccaatcgcaaggagagacgacggacccagtctattaattccgcctttgcagaactgcgtgaatgcatccctaacgtcccggcagacaccaagctgtccaaaattaagaccttgagactggcaacgagctacattgcctacctgatggacctcctagcgaaagacgatcagaatggcgaggccgaggcgtttaaagctgagattaagaaaacagacgtcaaagaagagaagcgtaaaaaagaactgaatgaaatcctgaagtcaaccgtctcctctaatgataaaaagaccaaaggacgcacagggtggcctcagcacgtatgggccctggagcttaaacagtag

SEQ ID NO: 225697 - DNA, 498 bp, synthetic construct
  misc_feature 1..498: note = Description of Artificial Sequence: Synthetic coding sequence
  source 1..498: mol_type = other DNA
atgtcaccaccggactattcaatggctctttcttacagccccgagtatgccagcggggctgccggactcgatcatagccattacggaggcgtgcctcccggagccggaccgcctggattgggcggtccacggcctgtcaaacgccgaggaaccgccaacagaaaggagagaagacgcacgcagtcaatcaatagcgcatttgccgagctgcgcgaatgcataccgaatgtcccagctgatacaaagctgagcaaaattaaaacattaaggttagctacttcctacattgcttatctgatggacttgctggcaaaggacgatcagaatggcgaggcagaagcttttaaagccgaaatcaagaagactgatgtgaaagaagagaaaagaaagaaagagcttaatgaaatactgaagtctaccgtctccagcaatgataaaaagaccaagggtcgcaccggttggcctcagcatgtatgggctctcgaactgaagcagtag

SEQ ID NO: 225698 - DNA, 2577 bp, synthetic construct
  misc_feature 1..2577: note = Description of Artificial Sequence: Synthetic coding sequence
  source 1..2577: mol_type = other DNA
atgtccgtggtaggcctggatgtaggatcacagagctgctacatagccgtcgccagagccggtgggatcgagaccattgcaaacgagttctccgaccggtgtactcctagcgtgatatcatttgggtctaagaatcgcaccattggcgtcgcagccaagaatcagcagatcactcatgccaataataccgtgtcgaactttaaaagatttcacggacgcgcatttaatgaccccttcatccagaaagagaaggagaatctttcttacgatttggtacccctcaagaacggaggagtgggcattaaggttatgtacatgggcgaggagcatctgttcagcgtggagcagattacagccatgcttttgacaaagctaaaagagaccgctgaaaacagtttaaaaaaaccagtgaccgattgcgtcatttcggtccctagctttttcacggatgctgaacgcagatccgttctcgatgctgctcaaatcgtagggctcaactgcctgagactgatgaatgatatgacagccgttgctctgaattatggtatctataagcaggacctcccgagtctagatgagaaacctagaatcgtggtgtttgtggacatggggcatagcgcctttcaggtgtcagcgtgtgcattcaacaaggggaagctgaaggtccttggcacagctttcgatccgtttctgggaggaaagaatttcgatgagaaactggttgaacacttttgcgccgagttcaaaacaaaatacaaactagatgccaaatccaagatccgagccctcctgaggctgtaccaggaatgtgaaaagttaaaaaaactgatgtctagcaacagcactgatcttccacttaacatagagtgcttcatgaacgataaggatgtgagcggaaagatgaatcgctcccagtttgaggagctctgtgccgagctactgcaaaaaatagaagttcctctctatagcttgctggagcagacccatctaaaggtggaagatgtcagtgctgtggaaatcgtggggggagctacacgaataccggctgtgaaagagcgaattgctaagttttttggaaaggatatctccaccacgttaaacgccgacgaggccgtggctcgtgggtgtgccttgcagtgcgccatcctcagtccagccttcaaggtgcgcgaatttagtgtaactgacgccgtgccattccccatatcattgatctggaatcacgatagcgaagacacagaaggtgtccacgaggtgttttctcggaatcacgcagcccctttctcgaaggtcttgacctttttgcgacgtggcccatttgagctggaagccttttattctgatccccagggagtcccctaccctgaagctaagatcggacgcttcgtagtccagaacgtttctgcccagaaggacggagaaaagtcacgggtcaaagtcaaggtacgtgtgaacacacacggtatctttacaatcagcaccgccagcatggtggagaaggtgcccactgaagaaaacgagatgtcatcagaggcagacatggaatgtctaaaccagcggcctcctgagaaccccgacacggacaagaacgtccagcaggataactctgaggccggtacccagcctcaggtgcagaccgatgctcagcagacatcccaatctcccccatccccagagctgacttcagaggaaaacaagatcccagatgccgataaagccaatgagaaaaaggtagatcagccccctgaggccaagaagccgaagattaaggtggtgaacgtggagctcccaattgaggccaacctggtatggcagttgggaaaggatctgctgaacatgtatatcgaaactgagggtaagatgattatgcaagacaaattagaaaaggaacgaaacgatgccaaaaatgcagtggaagagtacgtatatgaattccgagacaaactgtgtggaccttacgaaaagttcatatgcgagcaggaccatcagaactttttaaggcttttgacggaaaccgaggactggctgtatgaggaaggcgaggaccaggcgaagcaagcttacgttgataagttggaggagcttatgaagattggtacccctgtgaaggtacgattccaagaggccgaagagcgccctaaaatgtttgaagaattggggcagcgcctgcaacactatgccaagattgccgctgacttcaggaataaagacgaaaaatacaatcacatcgacgagtccgagatgaaaaaagtggagaaatcggtgaacgaagtgatggaatggatgaacaacgtaatgaatgctcaagccaaaaagagtctggaccaggaccccgtggtcagggcacaggaaattaagacgaaaatcaaagaactgaataatacctgtgagccagtggtcacacagcccaaacccaagattgaatcacctaagctggaaaggacgccaaatgggccaaacatcgacaagaaggaggaagacttagaagataaaaataactttggtgcggagccacctcaccagaatggcgagtgctatcccaatgaaaaaaattctgttaatatggacttagattag

SEQ ID NO: 225699 - DNA, 414 bp, synthetic construct
  misc_feature 1..414: note = Description of Artificial Sequence: Synthetic coding sequence
  source 1..414: mol_type = other DNA
atgtttgaagagttaggccagcgactgcaacactacgccaagatcgccgctgactttcgcaacaaagacgaaaaatacaaccacatagatgaaagtgagatgaagaaggtcgaaaagagcgttaatgaagtgatggaatggatgaataacgtgatgaacgcccaggccaagaaatctctcgatcaagaccccgtggtgcgagcacaggaaatcaagaccaaaataaaagaactgaacaacacctgcgaaccagtagttacccagccaaaacccaaaatcgagagtccaaaacttgaacggacgcccaacggtccaaatatcgacaaaaaggaagaggaccttgaggacaagaacaacttcggggctgagccaccacaccagaacgactcgtgtggcattgtgaactcatattag

SEQ ID NO: 225700 - DNA, 2034 bp, synthetic construct
  misc_feature 1..2034: note = Description of Artificial Sequence: Synthetic coding sequence
  source 1..2034: mol_type = other DNA
atgtacatgggcgaagagcatctgttcagcgtggaacagatcaccgccatgctgctcacaaagctgaaagagacggccgaaaatagcctcaagaaacccgtcacagactgtgtcatttcagtgctcgggaccgcctttgacccctttctggggggaaaaaatttcgacgagaagttggtcgagcacttttgcgcagaattcaaaacgaaatacaaactggatgccaagtcaaagataagagccttgctcagactttaccaagagtgcgagaagttgaaaaaacttatgagctccaattccactgacttgccactcaatatcgagtgcttcatgaacgacaaggacgtttctggcaagatgaaccggagtcaattcgaagagctgtgtgcagagctgttgcagaagatcgaggtacccctgtacagtttactggagcaaacgcacttgaaggtcgaagatgtcagcgcagttgagatcgtcggcggagccactaggatacctgcagtaaaagagaggattgctaaattctttgggaaggatatttcaactaccctcaacgcggatgaggccgttgcaagaggttgtgctcttcagtgcgccatcctctctcctgcttttaaagtgcgggaattcagtgtgacagacgcggtacccttcccaatatcactgatttggaaccacgattccgaggacacagaaggagtccacgaggtgttcagcaggaatcatgctgcccctttctccaaagtccttacctttctccggaggggcccttttgagctggaggctttttactccgatccacagggtgtgccttacccagaagccaagatcgggcgatttgtggtacagaatgtgtcagcacagaaggacggtgagaaatcacgagtaaaggttaaggttcgcgtgaacactcacggaatcttcactatctcgaccgcgtctatggtggagaaagtaccaaccgaggaaaatgagatgagcagtgaggccgacatggaatgcctcaatcaacgtccccctgagaatcccgacactgataaaaacgtccagcaggacaactctgaagcagggacgcaaccccaggtgcagaccgacgcccaacaaacctctcagtctccccctagcccggagctaaccagtgaagagaacaaaattcccgatgctgacaaagcgaacgaaaaaaaagttgaccagcctcccgaggccaagaaacccaaaataaaggtagtcaatgtggagctcccaattgaggccaaccttgtgtggcagctcggaaaggacctgttgaacatgtatatcgagacagagggtaagatgatcatgcaggacaagctcgagaaggagcggaatgatgccaagaacgccgttgaagagtatgtctatgagttcagggacaagctgtgcgggccatatgaaaagttcatttgtgaacaagatcaccagaacttcctgcgtttgcttacagagaccgaggactggctgtatgaggagggagaggaccaggcgaaacaagcatacgtagataagctggaggagctgatgaagatcggcacaccggttaaggtgcgatttcaagaggccgaggaaagaccaaagatgttcgaggaactcggccagcgcctgcagcattacgcgaagatcgctgcagatttcaggaataaagacgagaagtacaaccatatagatgagtcggagatgaaaaaggtggagaagtctgtcaacgaggtgatggagtggatgaataacgttatgaatgcccaagccaagaaatctctggaccaggatccagtggtgcgcgctcaggaaattaagaccaagattaaagaactgaacaacacttgcgagcccgtcgtcacgcaaccaaagcccaagatagaaagtccgaagctggagcgaactcccaatggccctaacattgacaagaaggaagaggatctggaagacaaaaacaatttcggtgctgagccacctcatcaaaatggtgagtgttatcctaacgagaaaaatagcgtgaatatggatctggactag

SEQ ID NO: 225701 - DNA, 1920 bp, synthetic construct
  misc_feature 1..1920: note = Description of Artificial Sequence: Synthetic coding sequence
  source 1..1920: mol_type = other DNA
atggccagggagagaccctgtagatgtcacggcaacggtggacgctccccaggaacgggctgtcctctgggtaggatattcccagagggatcacggaggaggaagagaaaatggcacgttgaaggcccagtggaagctccccgaaacgggcagaccccccgtgctggagcggagcgcggtcaaggacgtaagagacgacaagagaagcaggctggtggcatcgaaaccatcgccaacgaattctctgacagatgtaccccttccgtgatctctttcggctctaaaaacagaacaataggggtcgccgctaagaatcagcaaattacccacgccaacaacacagtctccaattttaagcggtttcacgggagagcttttaacgatcctttcattcagaaagaaaaggagaacctttcgtacgatctggtgcctctgaagaatggaggtgttggaatcaaggtcatgtatatgggggaagagcatctcttctccgtggaacagatcactgccatgctcctgacaaaactgaaggaaaccgccgagaattctcttaagaaacccgtgactgactgcgtaatatccgtgcccagttttttcacagacgcggaaagaaggagtgtgctggacgctgcacaaatcgtcggccttaactgcctccgtctgatgaatgacatgacagctgtcgcgttaaactatggtatctacaagcaggacctgcctagcctggacgaaaaacctcgcatcgtggtttttgttgacatggggcactctgcattccaggtgtcagcatgtgcctttaataaggggaagctcaaagtgctgggtacagcattcgatccttttcttgggggaaaaaattttgacgagaagctggtggagcacttttgcgccgagtttaaaactaagtataagctggacgcaaagtcgaaaattcgcgctttattacgcctgtatcaggagtgtgaaaagctcaaaaaactcatgtcctcaaactccacagacctacctctcaatatcgaatgtttcatgaatgataaggatgtatccggtaagatgaaccggtcccagtttgaggagctctgtgccgagctgctccaaaagatcgaagtgcctttgtatagcttactcgagcagacacacctgaaagtggaggatgtctctgcggttgaaatagtgggcggtgcaacaagaattcctgcggtgaaggagagaattgcgaagtttttcggcaaggatatctccaccactctgaatgctgatgaagctgtagcacggggatgcgccctgcaatgtgcaatcttgtctccggctttcaaggtgcgggagtttagcgtcaccgatgctgtacccttcccaatttctttgatctggaaccatgacagcgaagataccgagggagtgcacgaagtgttcagtcggaaccacgccgctccattttcaaaggtgctcacttttctccggcgtggcccatttgagctggaggctttttacagtgacccccagggggtgccatacccagaggccaaaattgggaggtttgttgtgcagaacgtcagcgcccagaaggacggggagaagagtagagtgaaagtgaaggtccgggtgaacacccacggcatttttaccataagtaccgcttccatggtggagaaggtgcctaccgaggaaaacgaaatgtcctccgaggcagacatggagtgcctcaaccagcgtccgcctgaaaatcctgatacagacaagaatgtccagcaggacaactccgaagcaggaacacagccccaggtgcaaaccgacgcacagcagaccagccagagcccgccttctccagaactaacatccgaagagaacaaaatccctgacgccgacaagcagatgaaaaagaaactcactagccttcagaaattgaaatcaccgaagtag

SEQ ID NO: 225702 - DNA, 2583 bp, synthetic construct
  misc_feature 1..2583: note = Description of Artificial Sequence: Synthetic coding sequence
  source 1..2583: mol_type = other DNA
atggctaccgccgctgtccttagggggccagcagcccattgggtcgaatcgttccagaaagccagagaggaggggagtggctcaggcacctggaggggtcggtggcgacgcaggtctgtgatctcttttggcagcaagaaccgcacaattggtgtcgcagctaagaaccagcagataacccatgctaataacactgtttctaactttaagagattccacggtcgggcattcaatgacccctttatccaaaaggagaaagagaatctaagctatgatttggtgccactaaagaacggcggagtgggcatcaaggtgatgtatatgggtgaggagcacctcttcagcgttgagcagattaccgccatgctcctcactaaactcaaggagaccgcagagaactcactcaagaagcccgtgaccgattgcgtgatctccgtgcccagcttttttacagatgctgaaaggcgatcagtactggatgctgcgcagatcgtggggctcaattgcctgcgtttgatgaacgatatgaccgcagtggcactgaattatggcatatataaacaggatttaccttccctcgacgagaagccacggattgtggtctttgtggatatgggtcacagtgccttccaagtctcggcatgcgccttcaataaggggaaactcaaagttttgggcaccgcattcgatccatttctcggcggaaagaactttgacgagaagctggtggagcacttctgtgccgagttcaagactaagtataaactcgacgccaagtctaaaatccgggctttactgcgactctaccaggaatgtgagaagctcaagaaacttatgtcttcgaacagcacagacctgccacttaacatcgagtgcttcatgaacgacaaggacgtctctggcaaaatgaataggtctcagttcgaagaactctgcgccgagctgctgcagaaaatcgaggtgccactgtattcgctcctggaacagacacaccttaaagttgaagacgtcagcgcagtggaaattgtgggcggagcgacccgcatccctgctgtcaaggaacgaattgccaaattttttggaaaagacatctcgaccaccttgaatgcagatgaggccgttgcccgaggttgtgcacttcaatgcgcgatcctgagccctgcctttaaggtgagggagttctctgtgaccgatgccgtcccctttcctataagcctgatctggaaccacgactccgaggacacagaaggcgtgcatgaggtattttctagaaatcatgctgcccctttctctaaagttttgaccttcctgcggcgaggaccgtttgagctggaagcattctacagtgacccacaaggggtcccgtaccccgaggcaaaaatcggaagattcgtggtgcaaaatgtttcagcgcaaaaagacggcgagaaaagtcgggtgaaagtgaaagtgagagtgaatacccacgggatttttactatttccacagcctcgatggttgagaaggtcccgactgaggagaacgaaatgtcgtctgaagctgacatggaatgtctgaaccagcgaccgccagagaaccctgatacggataaaaatgtgcaacaggacaattccgaagcgggtacccagccccaggtgcagacagacgctcaacagacgagccagtctccccctagtcccgagcttacttcagaggagaacaagatccccgatgccgacaaagccaacgaaaagaaggtagaccaaccacccgaggctaaaaagccaaaaattaaagtggttaatgtggagcttcctatcgaggcaaacctggtctggcagttaggcaaggacctgttaaatatgtacattgagacagaggggaagatgataatgcaggacaagctggaaaaagagcgcaacgacgccaaaaacgccgtggaggaatacgtctatgaattcagagacaaactgtgcggcccatacgaaaagttcatttgtgagcaggaccaccaaaacttcctcaggttgctgaccgaaaccgaggactggctgtacgaagagggggaggaccaagcgaagcaggcctacgtggacaagcttgaggaactgatgaaaattggtaccccggttaaagtacgatttcaggaagctgaggagagaccaaagatgtttgaagagcttggacagagactccagcactatgctaaaatcgcagctgacttcagaaacaaagacgaaaagtataaccatatcgatgagtcagagatgaagaaggtggagaaatctgtaaatgaagtcatggaatggatgaacaacgtgatgaacgcccaggcaaaaaaatctctggaccaggatccagtcgtccgggcacaggaaattaaaacaaagatcaaagagctgaataacacttgtgaacccgttgtgacacagcctaaacccaaaattgaatcgcctaaactagagaggacaccaaacgggcctaacattgataagaaggaggaggacctggaggataagaataacttcggagccgaacccccacaccagaacggggagtgttaccccaacgagaaaaacagtgtcaatatggatcttgattag

SEQ ID NO: 225703 - DNA, 582 bp, synthetic construct
  misc_feature 1..582: note = Description of Artificial Sequence: Synthetic coding sequence
  source 1..582: mol_type = other DNA
atggattcgactttagctgtgcaacagtatatccagcagaacattcgagccgattgttctaacattgataaaatcctcgagccaccggaaggccaggacgagggcgtgtggaagtatgaacacctcagacaattttgcttagaactgaatggactggctgtgaagctacagtcagagtgccaccctgatacctgcactcagatgacagctactgagcagtggatcttcttatgcgccgctcataagacgcctaaggagtgcccggctattgattacacacggcatacactggacggggctgcttgtctcttgaatagtaacaagtatttcccatctagggtcagcatcaaggaaagtagcgtcgccaagctcggcagtgtgtgcagacggatctacaggatcttcagccacgcgtatttccaccaccgtcagatcttcgacgagtacgaaaacgaaactttcctatgccacaggttcactaagtttgtgatgaagtataatttgatgtctaaggacaacctgatcgtgccaatactggaagaagaagtacaaaatagcgtttcaggcgaaagcgaagcatag

SEQ ID NO: 225704 - DNA, 306 bp, synthetic construct
  misc_feature 1..306: note = Description of Artificial Sequence: Synthetic coding sequence
  source 1..306: mol_type = other DNA
atggcgggtcaggctttccgcaaattccttcccctcttcgacagggtgctggtcgaacgcagcgctgcggagacagtcactaaagggggtatcatgctgccagagaagagccagggaaaagtgctgcaggccacggttgtggctgttgggagcggtagcaaggggaaaggtggggagatccagccagtgtctgtgaaagtcggtgacaaggtgctccttcctgagtatggcggaaccaaggtggtgctcgacgataaagtgtgcaagctcaataactcaaagaaaaagagcgacatctgtaactag

SEQ ID NO: 225705 - DNA, 144 bp, synthetic construct
  misc_feature 1..144: note = Description of Artificial Sequence: Synthetic coding sequence
  source 1..144: mol_type = other DNA
atggggggagaaattcagccagtttcagtaaaagtaggcgataaggtcctgctgccagaatatgggggaacaaaagtcgtccttgacgacaaggactacttcctgttccgggacggtgatatccttggcaagtatgtggactag

SEQ ID NO: 225706 - DNA, 591 bp, synthetic construct
  misc_feature 1..591: note = Description of Artificial Sequence: Synthetic coding sequence
  source 1..591: mol_type = other DNA
atggcagatggccaaatgccattctcttgccactaccccagcagactgcgtcgagatccattcagagatagccccttgagttctcggctcttggacgatgggttcggaatggatccgttcccagacgacctcacagccagctggcccgattgggctctgccacggctgtcttcagcttggcctgggaccctgcggtcaggaatggttcctagggggcctacagctaccgccaggttcggggtgccggcagaaggcagaacccctccacccttcccgggagagccatggaaggtctgtgtaaatgttcactcatttaagcctgaagaacttatggtcaaaaccaaagacggttacgtcgaggtctcaggcaaacacgaagaaaagcagcaggaggggggaattgtgagcaagaattttacaaagaaaattcagttgccagcagaggttgaccccgtcacagtgttcgcatctctgagccctgagggattgctgatcattgaagcacctcaagttcctccatactctacttttggtgagagcagctttaataatgaattaccacaggatagtcaggaagtcacttgcacatag

SEQ ID NO: 225707 - DNA, 453 bp, synthetic construct
  misc_feature 1..453: note = Description of Artificial Sequence: Synthetic coding sequence
  source 1..453: mol_type = other DNA
atggcaaaaataatcttacgccacctaatagaaatacccgtgcgatatcaagaagaattcgaggccagagggcttgaggactgtaggctggatcacgcgttatatgcactcccaggcccaactattgtcgacttgagaaaaacccgggctgcgcaatctccccctgtggatagcgctgccgaaaccccccctcgggaaggtaagtcccattttcagattctgttagacgttgtccagttcctgccagaagacattataattcagacctttgagggttggttgttgatcaaagcacagcacgggacccggatggacgaacatggcttcatttctagatcctttacgaggcaatataaactcccagacggagtggagattaaggacctgtcagccgtgttgtgtcacgatggaatcctggtggtagaggtaaaagatcccgtggggacaaaatag

SEQ ID NO: 225708 - DNA, 513 bp, synthetic construct
  misc_feature 1..513: note = Description of Artificial Sequence: Synthetic coding sequence
  source 1..513: mol_type = other DNA
atgagtcacaggacatcttccactttccgggctgaacgttcatttcattccagcagctcatctagctcatcctctacatcatccagcgcctccagggccttgcctgcacaggatccacctatggaaaaagcattgagcatgtttagcgatgacttcggcagcttcatgcggccacattcagagcctctcgccttcccagccaggcctggtggggcaggtaatataaagaccctcggggacgcttatgaattcgctgtcgacgttcgcgacttttcccctgaagatattatcgtgacaacaagcaataatcacatcgaggtgcgcgctgagaagttagccgctgacggcacagtgatgaacacctttgcccataagtgtcagcttcctgaggacgtggacccgaccagtgtgacctcggccttaagagaagatgggtctctaacgatccgggctcgcaggcatccccatactgaacatgtgcagcagacgttccgtaccgaaataaagatatag

SEQ ID NO: 225709 - DNA, 792 bp, synthetic construct
  misc_feature 1..792: note = Description of Artificial Sequence: Synthetic coding sequence
  source 1..792: mol_type = other DNA
atgtctggatgtgaactatcaccattaggactgagagttggcctgtccgcaggcccagctcacgggaggcgattcccggctccttcgggaccctggcggggtctcaacctagcctcacgtcagggcgcaggcccaaaacctcgcgatagtaggccgtacaaggccgcagccgtcggagcctggcatgcccgacctgaagcctgtgcgcacactttgagctgccctgccttggccagactaggtagggctaggcggcgaccttggatgagtcaccgaacgtctagcacattccgtgcagaaagaagcttccactctagtagctcctcttccagtagctcaaccagctcaagcgcttctcgcgcactgcctgcacaagacccccctatggaaaaggctctgtctatgttctcagacgattttgggtcttttatgaggccccatagcgagccactcgctttccccgctgcgcatccaacagcgagacccggaggggcagggaacattaagacactaggggacgcatacgaattcgccgtggatgtgagggacttctctcccgaggatataattgtgactacttccaataaccatatcgaggtacgcgcagagaagctggccgctgatgggacggtgatgaacaccttcgctcataaatgccagctcccagaggatgtggatcccacatccgtaaccagcgcccttcgggaggatggttccctgactattagggcacggcgtcacccacatacggagcacgtgcagcaaaccttccggaccgaaattaaaatatag

SEQ ID NO: 225710 - DNA, 528 bp, synthetic construct
  misc_feature 1..528: note = Description of Artificial Sequence: Synthetic coding sequence
  source 1..528: mol_type = other DNA
atgtctcaccgcacaagctcaaccttcagggccgagcgatctttccattcctcttcaagctcgtcaagttcaagcaccagcagcagcgccagtcgcgcactgccagcccaggatccacctatggagaaggcgctaagcatgttctccgatgacttcggtagtttcatgcgccctcattccgagccacttgcttttccggcagcccatccgaccgcgaggcccggaggagcgggtaatattaaaacactgggggatgcctacgaattcgccgtcgacgtccgagactttagcccagaggatatcatagttacgacaagcaacaaccacattgaggtccgtgccgagaagctggcagccgacggtaccgttatgaatacctttgcccacaaatgtcaattgcctgaagacgtggaccctacgagtgtgaccagcgcacttcgagaggacggctccctgactatacgggcaagacggcacccccacactgaacatgtccagcagaccttccggactgaaattaaaatctag

SEQ ID NO: 225711 - DNA, 207 bp, synthetic construct
  misc_feature 1..207: note = Description of Artificial Sequence: Synthetic coding sequence
  source 1..207: mol_type = other DNA
atgtcacataggaccagtagcacgttcagggctgagagaagcttccacagcagcagttccagttcgagtagtagtacttcaagctccgccagcagggcattgccagcacaggaccccccaatggagaaggctctaagcatgttttctgacgacttcggaagctttatgcgccctcatagtgagcccctcgcctttcctggcaagtag

SEQ ID NO: 225712 - DNA, 1722 bp, synthetic construct
  misc_feature 1..1722: note = Description of Artificial Sequence: Synthetic coding sequence
  source 1..1722: mol_type = other DNA
atgctgcggctgccaaccgtgttcagacagatgcgccctgtttcgcgtgtactggcacctcatcttacccgagcctacgccaaagacgtcaaatttggcgcagatgccagggccttaatgttacagggagttgatttgctcgccgatgcagtcgccgttaccatgggacccaaagggaggactgtgatcatcgaacagtcatggggaagccccaaggtgacaaaagatggagtgacagtcgccaaatctattgacctcaaagacaagtataaaaacatcggagccaagttagtgcaggacgtggctaataacacaaatgaagaggccggtgatggtaccactactgctactgttctggcccgttccattgctaaggagggcttcgaaaagatcagtaaaggagcaaacccagttgagattcgtcggggtgttatgttggcggttgatgccgttatagccgaacttaagaagcaatcgaaacccgtcacaaccccagaggaaatagcacaagttgcgacaattagcgctaacggggacaaggaaataggcaacatcatctctgacgcgatgaaaaaagttggcaggaagggcgtaattactgtgaaggatggtaagaccctgaatgacgaactggagatcatcgaaggcatgaaattcgataggggttatattagcccttactttatcaacactagcaaagggcagaagtgtgaatttcaggacgcctacgttctgctatctgaaaaaaagatttcttcgattcaaagcattgtgcctgctctggagattgctaacgcccatcgaaagcctctcgtgattatagccgaggacgtggacggggaagcactcagcactttggtactgaacaggttgaaggtaggacttcaggttgtggcggtgaaggcacccggtttcggcgataaccgaaagaatcagctcaaggacatggccatcgctacgggcggtgccgtattcggcgaggaaggtctcaccctcaacctggaggacgtccagccacacgatttgggcaaggtcggcgaggtgattgtgactaaagatgacgctatgctcctcaaaggaaagggtgacaaagctcaaattgaaaaacgaatacaagaaatcattgagcagctggacgttactaccagcgaatacgagaaggaaaagcttaatgagagactggcaaagctgagcgatggtgttgccgtgctgaaggtgggcggaacaagcgatgtcgaagttaatgaaaagaaagatagagtcacggatgcacttaatgctacccgggctgcagtggaggagggaatcgtgcttggaggcggttgtgcactactgcgatgtatcccagccctggattcgttgacaccagccaacgaagatcagaaaatcggcattgagattatcaagcggaccctgaagattccagctatgactatagctaaaaacgccggagtggagggaagtttaattgtggagaagattatgcaaagttccagtgaagttgggtacgatgctatggccggagatttcgtgaatatggtagagaaggggattatcgaccctacgaaagtcgtgcgcacagccctgctggatgcagctggggtcgcctctcttctcacaacggccgaggtagtcgttacggaaataccaaaagaagagaaggaccctggaatgggcgctatgggagggatgggaggaggcatgggcggtggcatgttttag

SEQ ID NO: 225713 - DNA, 1722 bp, synthetic construct
  misc_feature 1..1722: note = Description of Artificial Sequence: Synthetic coding sequence
  source 1..1722: mol_type = other DNA
atgctgcggctcccaactgtgtttcgccaaatgaggccagtgtctagagtcttagccccacacttgactagagcgtatgctaaagacgttaagtttggagctgacgcaagagctctcatgctccaaggagtcgacctgttagctgatgccgtggccgtcacgatgggacccaaaggcagaacagttatcatcgaacagagttggggctctccaaaggtgacaaaggacggcgtcaccgtagctaaaagcattgatcttaaggataaatataagaacattggcgctaagctggtgcaggatgtcgcgaacaatactaacgaggaggcaggtgacggtaccaccacagccaccgtactcgccagatccatcgcaaaggagggattcgaaaaaatctcaaagggggctaatcccgtggagatccgtcgaggtgtgatgctcgccgtggacgcggtcatcgctgagttgaaaaagcagagtaagcctgtcaccacaccggaggaaattgcacaggtggccactatttccgctaatggagataaggagattggcaacataataagcgatgccatgaaaaaggttgggagaaaaggggtgataactgtgaaggatggcaagacacttaacgacgagctcgagatcatcgaaggaatgaaattcgatcggggatacatttcaccctatttcatcaatacctcaaagggtcagaaatgcgaattccaggacgcctatgtactgctctctgaaaagaagatttccagtattcagtcaatagtgcccgctctggagatcgctaacgcgcaccggaagcctctcgtcataatagccgaagacgtcgacggggaagcattatcaactctggtactgaatcgactgaaggtcggtcttcaagtggtcgcagttaaggccccagggtttggggacaacagaaaaaaccaactgaaagacatggccatcgcaactggcggagcggtgtttggggaagaggggctcactctgaacctggaagatgtccagccccatgacttggggaaggtaggagaagtaatcgtgaccaaagacgatgctatgttactcaagggaaagggcgacaaagcacagattgaaaagcgcatacaggagataatcgagcagctggacgtcacgacttcagagtacgagaaggaaaaactgaatgagaggctggctaaactctcagatggtgtagcagttctgaaggtcggtggcactagcgacgtggaggtgaatgagaagaaagacagagtcacagacgccctcaacgcaaccagggctgctgtcgaagaaggcattgttctggggggaggttgcgcccttcttaggtgcatccccgctctggacagtctgactcctgccaatgaggatcagaaaattgggatcgagatcatcaagcgtacgcttaagatccctgcaatgaccattgccaagaatgcgggtgtggaaggatccctgatagttgagaagatcatgcagtctagctctgaagttggatatgatgcgatggcaggagacttcgtaaacatggtcgagaaaggtataatcgatccaacaaaggttgtgaggaccgcactcctagacgcagccggtgtagcaagtctgctgacaacggctgaggtggtcgtaacagagattccgaaagaggaaaaagacccgggtatgggtgccatgggcggaatggggggtggaatgggtggcggtatgttctag

SEQ ID NO: 225714 - DNA, 177 bp, synthetic construct
  misc_feature 1..177: note = Description of Artificial Sequence: Synthetic coding sequence
  source 1..177: mol_type = other DNA
atgttacgactgcccacagtatttcggcagatgcgcccagtctctcgggtccttgccccacatctgactcgtgcatatgccaaggacgtgaagttcggagccgacgcaagagcccttatgctgcaaggcgtggacctcctggcagatgctgtagctgtgactatgggcccaaagtag

SEQ ID NO: 225715 - DNA, 285 bp, synthetic construct
  misc_feature 1..285: note = Description of Artificial Sequence: Synthetic coding sequence
  source 1..285: mol_type = other DNA
atgttgagattgccgacagtcttcagacaaatgcgtcctgtttcccgcgtgctggcaccccatctgacccgtgcgtatgcaaaggatgtcaaattcggggctgacgcgagggcacttatgttgcaaggcgtggatctcctggctgatgctgtagccgtgaccatgggacccaagggaagaacagtcatcatcgagcagagctggggttctccgaaggtaaccaaggacggtgtgaccgtcgcgaagtctattgatctgaaggacaagtataagaacataggctag

SEQ ID NO: 225716 - DNA, 705 bp, synthetic construct
  misc_feature 1..705: note = Description of Artificial Sequence: Synthetic coding sequence
  source 1..705: mol_type = other DNA
atgcttcgcctacccaccgtgttccgacagatgaggcccgtaagccgcgtgctggcccctcatctgacgcgtgcctacgccaaggatgtaaaattcggcgctgacgccagagctcttatgctgcaaggagtggacctgttggctgacgcagttgctgtaacaatgggccctaagggtaggaccgtgatcattgaacagtcttggggcagccccaaggttacaaaagatggcgtaactgtggccaagagcatagacctgaaggacaagtataagaatattggcgctaagctcgtccaggacgtagcgaataatacaaatgaagaagcaggagacggcaccacgacagccactgtgctagcgcgttcaattgccaaggaaggctttgagaaaatctcgaagggcgctaaccctgtagaaatacgcaggggcgttatgttggcggtcgatgccgtcatagccgaactgaagaaacagtctaaaccagtgaccacccccgaagagattgcgcaggtagccaccataagtgccaatggggacaaggagatcggaaacatcatatctgacgcgatgaagaaagttggcagaaagggtgtcataacagacggaaaaaccttgaacgatgagcttgagatcatcgaggggatgaaattcgaccggggttacatttctccctattttataaacaccagcaaagggaagaattag

SEQ ID NO: 225717 - DNA, 252 bp, synthetic construct
  misc_feature 1..252: note = Description of Artificial Sequence: Synthetic coding sequence
  source 1..252: mol_type = other DNA
atgcttcgccttccaaccgtctttcggcaaatgaggcccgtttctcgggtgctggccccacacctgacacgggcttatgcaaaggacgttaagtttggcgcagatgcacgggcactcatgctgcagggggtggacctgcttgcagatgccgtggccgtgacaatgggacctaaaggaagaacggtgattattgaacaaagctggggttcccccaaggtgacgaaggacggcgtcacagttgctaagtcctag

SEQ ID NO: 225718 - DNA, 666 bp, synthetic construct
  misc_feature 1..666: note = Description of Artificial Sequence: Synthetic coding sequence
  source 1..666: mol_type = other DNA
atgctgagattacccacggtcttcagacagatgagaccggtctccagagttttggcaccccaccttacacgcgcttatgccaaggatgtgaagttcggggctgacgccagggctctcatgttgcagggtgttgatcttctcgccgacgcagtggctgtgactatggggcctaagggcagaaccgtcatcattgagcagtcctggggctcgcctaaagtgacgaaagacggtgtgaccgtggccaagtccatcgatctgaaagacaagtacaaaaatatcggcgctaaattagtgcaggacgtcgcgaacaatacaaacgaagaggccggtgacggaactacgaccgctactgtgctggcacgctccattgcaaaagaaggatttgagaagattagtaagggggctaatcccgtggaaattcggagaggcgtgatgctcgcagtcgacgctgttatcgcagagctgaagaaacagagtaagcctgtaacaaccccggaggaaatcgctcaggtggcgaccattagcgccaacggcgataaggaaattgggaacatcataagtgacgctatgaagaaagtgggtcgcaagggagtgatcaccgtgaaagacggcaaaaccctgaacgatgagttggagatcatcgagggcatgaaatttgaccggtag

SEQ ID NO: 225719 - DNA, 738 bp, synthetic construct
  misc_feature 1..738: note = Description of Artificial Sequence: Synthetic coding sequence
  source 1..738: mol_type = other DNA
atgctggcggtagatgccgtgattgccgagctgaagaaacagtccaagcccgtaacgacacctgaggagatcgctcaggttgcaaccattagcgcgaatggggataaggaaataggcaatatcatttctgatgctatgaagaaagtcggcaggaagggtgtgataacagtaaaggacggtaagactttgaacgatgagttggagatcatcgagggcatgaagtttgaccgcggatatatatctccttatttcatcaacacaagcaagggacagaagtgcgaatttcaggatgcttatgtgcttcttagcgaaaagaaaatctcgtccattcagagtatcgtcccggcattggaaattgcaaacgcccatcggaagcctctcgtgattattgccgaggatgttgacggagaggcattgagcacgcttgtgctaaataggctcaaagttggccttcaggtggtggccgtgaaggcccctgggtttggcgataacaggaagaatcaactgaaagacatggctatcgctacgggaggcgcagtgtttggcgaggaaggcctaacactcaacctcgaggacgtgcaaccccacgacctgggcaaggtgggcgaagtgatagtcaccaaagacgacgccatgctgctcaagggtaagggagataaagcccagatagagaagcggatacaggagatcatagaacagctcgatgtcaccacgtctgagtatgaaaaagagaattag

SEQ ID NO: 225720 - DNA, 477 bp, synthetic construct
  misc_feature 1..477: note = Description of Artificial Sequence: Synthetic coding sequence
  source 1..477: mol_type = other DNA
atgctgcgccttcccaccgtttttcgccagatgcgacccgtgtcgcgtgtcttagcccctcatctcactcgagcctacgcaaaggatgtgaagttcggggctgacgccagggccctcatgctgcaaggggtagatctgctcgctgatgccgtggccgtgaccatgggccctaaggggaggactgtgatcatcgagcaatcctggggtagtcctaaggttactaaagatggcgtaacagtcgctaaaagcattgatctgaaggacaagtataaaaatatcggagcaaagttggttcaagatgtggctaacaataccaatgaggaagcaggagacggtacgactaccgccaccgtgctggccagaagtattgctaaggaaggttttgaaaagatttccaagggcgcaaatccagtcgaaattagacgtggtcgtaacgtgtgctgccatcactctgtgctgaacttttcagtcctctag

SEQ ID NO: 225721 - DNA, 2061 bp, synthetic construct
  misc_feature 1..2061: note = Description of Artificial Sequence: Synthetic coding sequence
  source 1..2061: mol_type = other DNA
atgctagccgtgcctgaaatggggttgcaggggctgtatatcgggtcttcaccagaaagatcaccagtccccagcccacccggtagtcctcgaactcaggagagctgcggaattgccccactgacgccgtcacagtctccgaaaccagaggtccgcgctccacagcaggcttctttttctgttgtggttgcaatcgattttggaaccactagttccggctacgccttttccttcgcctccgacccagaagccattcacatgatgagaaagtgggaggggggagacccaggcgtggcacatcagaagactccaacctgtttgctgctcaccccagaaggcgcattccacagctttgggtacactgctcgtgactattaccatgaccttgacccagaggaggcccgtgattggttgtacttcgagaagttcaagatgaagatccactccgccacagacctaacactcaaaacccagctggaagctgtgaatgggaaaactatgcctgccctggaagtgttcgcccatgcactgcggttttttagagagcacgcccttcaggagctgagagaacagagccctagtctccctgaaaaggatacagtgcgatgggtgctgacagtgcccgcaatttggaagcagcctgctaagcaatttatgagggaggccgcatacctggctggactggtttcccgcgaaaatgctgaacagctgctgatcgcactagaacctgaggccgcaagcgtctattgcaggaagttaagactccaccagctcttggaccttagtggtcgggcacccggtgggggtagacttggtgaacgcaggtccatcgactcctcattcaggcaggccagagagcagctgaggcggtccagacactccaggaccttcctggtcgagagtggggtgggcgagctctgggcagagatgcaggccggagaccgatacgtcgtggcagactgcgggggtggcaccgtcgaccttaccgtgcaccagctggagcagcctcacggcacactgaaggagttatataaggcctcgggtggtccctatggcgcagtgggagtcgacctcgccttcgagcaactcctgtgcagaattttcggcgaagattttatagccacctttaagagacagcgacctgctgcctgggtagacctgaccattgctttcgaagcgaggaagaggactgccggtcctcaccgggctggcgctttgaatatttcactccctttttccttcatcgatttttatcgcaagcagcgagggcataatgtggaaacagccctgcgaaggtcaagcgtgaatttcgtcaaatggagctcacaaggcatgctgagaatgagctgtgaagcaatgaatgagttgtttcagcctaccgtaagcggcatcatccaacatatcgaggctcttctcgcccgacccgaagtccagggcgttaaactgctgtttcttgtaggtgggtttgccgaatctgctgttctgcagcatgccgtccaggctgcccttggagcccgaggattgcgggtggtggttccacacgacgtgggacttacaattcttaaaggggcagtgctttttggccaagccccaggcgtggtgcgggtccgcagaagtcctttgacctatggggtaggcgtgctcaacagatttgttccgggaagacatcctcccgagaagctgttagtccgggacggaagaagatggtgcactgacgtgttcgaacgctttgtggcggctgagcagagtgtggccctcggtgaagaggtccggagaagctattgccccgctcggcctgggcagcgaagggttctcataaacctatactgctgtgcggcagaggacgctagattcatcaccgacccaggggtgagaaaatgtggagctctcagcttagagttggagcccgctgattgtgggcaagacaccgcaggggctcccccagggagaagggaaatccgcgctgctatgcagtttggagacacggaaattaaggtaaccgccgtcgacgtgtcaaccaatcggagcgttcgcgcttccatagacttcctgtctaactag

SEQ ID NO: 225722 - DNA, 1803 bp, synthetic construct
  misc_feature 1..1803: note = Description of Artificial Sequence: Synthetic coding sequence
  source 1..1803: mol_type = other DNA
atgatgcgaaaatgggaaggaggagacccgggtgtcgcccatcagaagacccctacttgcttgcttcttacccccgaaggcgcattccattcctttgggtacacagccagggactactatcatgacctggatccggaggaggctcgtgactggctgtatttcgagaaatttaagatgaaaattcactccgccactgaccttactctgaagacacagcttgaggctgtgaacgggaaaaccatgcccgctttggaggtgttcgcgcatgcactgcggttttttcgcgagcacgccctgcaagagttgcgtgagcagagcccaagtctccctgagaaggacacagttcggtgggtgctgactgtcccagcgatttggaaacagcccgcaaagcaattcatgagagaagccgcttacctggccggactggtgagtcgcgaaaacgcagagcagcttttgattgcgctggaacctgaggcagcctcagtttactgtagaaaactgaggttacaccagctgttggatctctcgggtcgagctcccggtggcggacgacttggggagagacgttcaatcgactccagcttccgtcaggcgagagaacagctgaggcggtcccgacatagtcgcacattcctcgtggagtccggcgtgggcgagttatgggcggagatgcaggcgggagatcgttacgtcgtcgctgactgtggcggtggcaccgttgatctcactgtccaccagctcgagcagcctcatggcaccctcaaggagctatacaaggcttcgggcggtccctacggcgcagtcggagtggatctcgcttttgagcagctgctttgccgaatattcggtgaggattttatcgctacttttaaaaggcagcgacccgcagcttgggtggaccttactattgcatttgaggcacgcaaacggactgccggacctcacagggccggtgccctgaatatcagcctgcccttctcttttattgatttttataggaagcaacgtggtcacaatgtggagaccgccctgagaaggtcgtccgtcaactttgtcaagtggtccagccaggggatgctacgtatgtcctgtgaggccatgaacgaactgtttcaacccactgtctcgggcatcatccagcatattgaagccctgctcgcccgtcctgaagttcagggagtcaagctgttgtttttagtgggaggatttgcagagagcgcagttcttcagcacgctgtccaggcggcactgggagcccgaggtctccgggtcgttgtacctcacgatgtggggttaacaattcttaagggcgcagtgctgtttggacaggcaccaggcgtggtgagagtaagaaggtctccgctgacctatggagtcggtgtcttgaacaggtttgtccccggacgccacccccctgaaaaattgctcgttcgcgatggtcgtaggtggtgcacggatgtgttcgagcggtttgtggccgcagagcaatccgtggcattaggcgaggaagtccggagaagttattgtccagcacgacctggccagcggcgtgtcttgattaatctatactgttgcgcagctgaggatgcacggtttataaccgaccccggtgtccgcaagtgtggtgcactgtccttagaactggagcccgctgactgcgggcaagatactgccggagcaccacccggacgaagggagatccgggctgcgatgcagtttggggacaccgaaatcaaggtcactgccgtagacgtgtcaaccaaccggtccgttagagcgagcatcgacttcttgtccaactag

SEQ ID NO: 225723 - DNA, 1563 bp, synthetic construct
  misc_feature 1..1563: note = Description of Artificial Sequence: Synthetic coding sequence
  source 1..1563: mol_type = other DNA
atgccggctctggaagtgtttgcccacgccttgaggttcttcagggaacacgcattacaggaactgagagagcaatcaccctcactgccagaaaaagatactgtcagatgggtattaaccgtgccggcaatctggaaacagccggcaaaacaatttatgagggaagctgcctacctggcagggctggtgagcagggagaacgccgagcagctattgatcgctttagaacctgaggcagcttcagtctactgccgaaaacttcgcctgcatcagctgctcgacctttcaggacgggcacctggcggaggtcgcctaggagagcggagaagcattgactcctcgttcagacaggccagagagcagctgaggcgcagcagacatagtcggacatttctcgtcgagtcaggcgtgggtgaactctgggcagagatgcaagcaggtgatagatacgtagtcgccgactgtggcggtgggaccgttgacctgaccgttcaccaattggaacaaccccacggtaccctgaaggaactctataaggcatcagggggaccttacggtgcggtgggggttgatctggcgttcgaacagttgttgtgtcggatcttcggcgaagacttcattgccacgttcaagaggcagaggcccgcagcgtgggtagacctgaccatagcttttgaagccaggaagcggacagccggtcctcatcgagcaggtgcgctgaatatatccctgcccttttcattcatcgacttctaccgcaagcaacgtggacacaacgtcgagaccgcactccgccgttcatcggtcaattttgtgaagtggtcgtctcaaggcatgctcaggatgagctgtgaggcgatgaatgaactttttcaaccgaccgtttccggcattatacaacacatcgaggccctgctggctcgtcctgaggtgcagggagtaaagttgctgttcctggtgggtggattcgcagaatcagcggtcctgcagcatgcagtgcaggcagcgctgggagcgcgaggtctccgtgtggtcgtgcctcatgacgttggactgactattctgaaaggggcagtgctgtttgggcaggctccaggggtggtcagggtgcgcagatcccccctgacctacggcgtgggcgttttaaaccgctttgtacccggacgccatccccctgagaagctcctcgttagagacggacgcagatggtgtacagacgtgtttgaaaggtttgtggcagctgagcagtcggtggccttaggcgaggaggtgaggaggtcctattgccctgccaggcctggccagcggcgagtgctgatcaacctgtattgttgtgccgcagaagatgcacggttcataactgatccgggagtcagaaaatgcggagctttgtcactggagctagagcccgctgactgcggccaggacaccgccggagctccacctggccgtcgggaaatacgcgctgctatgcagttcggagatactgagattaaggtcaccgccgtggatgtatctactaaccgctccgtgcgggcaagcatagattttcttagcaactag

SEQ ID NO: 225724 - DNA, 2028 bp, synthetic construct
  misc_feature 1..2028: note = Description of Artificial Sequence: Synthetic coding sequence
  source 1..2028: mol_type = other DNA
atggctgataaagaggcgggaggaagcgatggtccacgagagacggctcccaccagcgcttattcgagtcccgcacgtagcctaggagataccggtattacccccttgtccccatctcacattgtcaacgacactgatagcaacgtgagcgagcaacagagtttcctggttgtggtcgcagtagactttggaacaacatcatccgggtacgcttattcctttactaaggagccagagtgtattcatgttatgcgccgttgggaaggcggtgatcccggtgtttcaaaccagaagacgccaacaactattttgctaaccccagaaagaaagttccactcttttggctacgctgcgcgagacttctaccacgatctcgatcctaacgaggccaaacagtggctctacctggaaaagtttaagatgaaacttcacacgaccggcgatcttactatggataccgacctgaccgcagctaatggcaagaaggtgaaggcactggaaatatttgcctatgctctacagtattttaaagagcaagccctcaaagagttatcggaccaggccggaagcgagtttgaaaactcagacgtccgctgggtgatcaccgtccctgctatttggaagcaacccgctaagcaatttatgagacaggccgcttaccaagctggcctggccagtcccgagaactctgagcaacttatcatcgcactggagccagaggccgcttccatctactgccgaaagctgcgcttgcatcagatgatcgagctaagtagcaaagcggcagtaaacggctactctgggagcgatacagtgggcgctgggttcactcaagctaaggaacacattaggaggaaccgccagagcaggacgtttctggttgaaaacgtgataggtgagatatggtctgaattggaagagggcgataagtatgtggtggtcgactctggcggtggcaccgtggacctaacggtccaccagatacgcctacccgaaggccaccttaaagagttgtacaaagcgaccggcggaccttatggctcactgggcgtggattatgagttcgagaaactgttatacaagatttttggcgaagatttcattgaacagttcaagataaagaggcctgccgcttgggttgatcttatgattgcattcgagtcacggaagagagccgctgcacctgacagaactaatccactcaacataactctgccattcagtttcatcgactattacaagaagtttagggggcacagcgtggagcacgcattgaggaagtccaacgtcgacttcgtcaaatggagctctcaaggcatgctccgtatgagtcccgacgcaatgaacgctctgttcaaacccacaattgatagtatcattgagcacctgcgcgacctgtttcagaaacctgaggtgagcacagtgaagtttcttttcttggtgggcggttttgcggaagccccacttctgcagcaggctgtgcaggctgcattcggagaccaatgcaggatcatcattccgcaagacgtgggcctcacaatcttaaagggggctgtcctgttcggccttgatcctgccgtcattaaggtccgccgaagcccactgacgtacggcgtaggggttctgaatcgttatgtcgaaggcaagcaccctcccgagaagctcttggtaaaggacggtactcggtggtgtaccgacgtcttcgacaagtttattagcgcggatcagagcgtggctctcggggaattggtgaaacgctcctacaccccagcgaagccaagccagctggttatcgtaataaacatttactcttccgagcacgacaacgtgtctttcattactgatcccggtgtgaaaaaatgcggtaccctgcgcctcgacttaaccggaacctctggcacggccgtccctgccaggcgggagattcaaacactaatgcaattcggggacacagagattaaggcaacagctattgacattgcaaccagtaaaagcgtcaaggtagggatagatttccttaattattag

SEQ ID NO: 225725 - DNA, 819 bp, synthetic construct
  misc_feature 1..819: note = Description of Artificial Sequence: Synthetic coding sequence
  source 1..819: mol_type = other DNA
atgagaagcctggacctggcaagtcagctgttgcggaatcagatcgtcaccgacccagacaatctcatggaggatgccgcatgggctaaacactgtgaccaaaatcttgtggcttctgatgccccaggcgaagaaggcactggcattctgaagagcaagagaacccaggccgctgaccatcaacctatcctgaagacagtaaaggcatcagacgaagactgccagctccggatatccgatcggatccgcgagacttcggacttggaagatagctgggacgagtcctccggggctggctgtagtcaagggacacctagttattcatccagtcacagtcttttccgcggagccgtggcaccatgccagtcctctcccatggcaagattgggcgtgtcaggggagccctccccatgcactagcaccaacaggtccacacccggagtggcctctacacctcaaacacccgtgtccagcagcagagcagggtttgtctcaggcggtgaccggccactgacatcggagcctcccccaaggtgggctcgcagaagaaggcgatcagtggccaggacaattgcagccgaactggccgaaaataggaggctggcccgagagctgtcaaaacgggaggaggagaaattggataggttaattgctataggtgaggaggcctctgcccagcaggacaccgctaacgaattaaggagggacgctgtgatcgccgtccggaggctcgcaactgctgtagaggaggccaccggggcttttcaactggggttagagaaactgctgcagcggctgatcagcaatacaaagtcatag

SEQ ID NO: 225726 - DNA, 1530 bp, synthetic construct
  misc_feature 1..1530: note = Description of Artificial Sequence: Synthetic coding sequence
  source 1..1530: mol_type = other DNA
atggcagccattggagtccacttaggctgcacatccgcctgcgtcgccgtttacaaggacggcagggcaggagtggttgctaatgacgctggagacagggttacccctgccgtggtcgcgtattctgagaacgaggaaattgtgggcttggcggcaaagcagtcaaggatccggaacatttcaaacacggtcatgaaagttaagcagattctaggcagatccagctctgacccccaggcccagaaatatatcgcagaatccaaatgtcttgtcatagagaaaaacggaaagttgcgctacgaaattgatacaggggaggaaactaagttcgtgaacccggaagacgtcgctcgcctgatcttctccaagatgaaggaaacagcccacagcgttctaggcagcgatgctaacgatgtggtgattaccgtaccattcgacttcggcgagaagcaaaagaacgcactcggcgaagccgctcgagcggctggatttaatgtgcttaggcttatacatgagccatctgccgcactcctggcgtatggaattggtcaggacagtcctaccggtaaatctaatatcctggtcttcaagctcggaggcacgtctctaagtctctcggttatggaagttaattcaggaatctatagggtcctgtccaccaacacagacgataacatcggaggagcgcactttacggagactctggctcagtatttggcttcagagtttcaacgctccttcaaacatgatgtgagaggcaatgctagagctatgatgaaattgaccaattctgctgaagtggccaagcatagcttgagtaccctcggaagtgctaactgtttccttgacagtctatatgaaggccaagattttgattgtaatgtgtctcgcgctaggttcgaattactgtgctctcctctttttaataagtgcattgaggccataagagggctcctggatcaaaacggattcactgctgacgacataaataaagttgtactctgcggcggaagcagtcgcatcccgaaactgcagcagctaatcaaggacctttttcctgccgttgagctgcttaattctatccccccagacgaggttatacccatcggggcagccattgaagctggaattttaatcgggaaggagaacttgctggtggaggactctttgatgatcgaatgctccgccagggacatacttgtcaagggggttgacgaatccggggcatccagattcaccgtgctctttccatcgggaactcctctgcctgcaaggcggcagcataccctccaggcccctggctccatatcatctgtctgtttagagctctacgagagcgatggcaagaatagtgccaaggaggaaacgaagttcgcccaggttgtcctgcaagacctggacaaaaaggaaaatggacttcgtgatatcttagctgtccttacaatgaaaagagatggatcattgcacgtgacgtgtaccgaccaggagaccgggaagtgtgaggcgatctccattgagatcgcaagttag

SEQ ID NO: 225727 - DNA, 432 bp, synthetic construct
  misc_feature 1..432: note = Description of Artificial Sequence: Synthetic coding sequence
  source 1..432: mol_type = other DNA
atggccgctatcggagttcatctgggttgtacatcagcgtgtgtggccgtctacaaggatggtagagccggtgtggtggcaaacgacgccggagatagagtcactccagccgtggtcgcctacagcgaaaacgaggagatcgtcggcttggcggcaaagcagtctaggatccgaaatatcagcaacacagtcatgaaggtgaagcaaatcctaggccgaagggtcctctccagagatcctcagctgcagcagctacctcagccattccagcggtgcagttgttctctctcggagcaaccacacgggcagactggttgcgtgcggggagcccagccacttcaccaacatcagcctcagcactcctgggggagcctccacactgcagactccagcctccttttcgaaagttggttttgcttctggtggggctag

SEQ ID NO: 225728 - DNA, 387 bp, synthetic construct
  misc_feature 1..387: note = Description of Artificial Sequence: Synthetic coding sequence
  source 1..387: mol_type = other DNA
taggcttgtgtagccgtttataaggatggccgagccggagtggtcgctaatgacgccggagatagagtcacccccgcagtggtcgcctatagtgagaatgaagaaatagtgggtcttgctgctaagcagtctaggatccgtaatattagcaacacagtcatgaaggtgaaacaaattctcggcaggagttcctctgatcctcaagctcagaagtacattgccgaatcgaagtgtctggtgatcgagaagaatggcaaactgcggtacgagatcgatacaggggaagagactaagttcgttaatccagaagacgtcgcacgcttgatattcagtaaaatgaagggagcttattcaccctggagccaatctaactcagaggacggctag

SEQ ID NO: 225729 - DNA, 1926 bp, synthetic construct
  misc_feature 1..1926: note = Description of Artificial Sequence: Synthetic coding sequence
  source 1..1926: mol_type = other DNA
atggcgaaggccgcagctatcggaatcgacctgggcactacctatagttgtgtgggagtctttcagcatgggaaggtcgaaattattgccaatgaccagggaaaccgcacaacaccaagctacgtcgcctttacagatacagagaggctgattggagacgctgccaagaatcaagttgctttgaacccgcagaacaccgtctttgacgccaaacgccttatcggcagaaaattcggtgatccagtcgtgcaaagtgatatgaaacattggcccttccaagtgattaacgatggcgacaagcccaaggtacaagtcagctataagggagagacaaaggcattctaccccgaagagatctcttccatggtgctcaccaagatgaaggaaatcgccgaggcctatctcggttacccagtaacaaacgctgtcatcactgtacccgcatacttcaatgatagccagcgccaggccaccaaggacgctggggtcatagccggtctgaatgtgttgcgtatcattaacgagccgacggctgcagcgatcgcctatggcctggacaggacaggcaagggagaaaggaatgtgctcatattcgatctcggaggcggaactttcgacgtttcaatcctcacaatcgacgacggaatatttgaggttaaagcgaccgccggagatacacatctaggcggtgaggactttgacaaccgtctcgtgaatcatttcgtcgaagaattcaaaagaaagcacaagaaggatatctctcagaataagagagcagtgcggcgtctccgaactgcttgtgagagagcaaaacgcactttgtcttcctcaactcaggcaagtctggaaattgactctttatttgaaggcattgatttctacaccagcattactcgggctcgctttgaggaactttgcagtgacttgtttagatctaccctcgagccggtggaaaaagcgcttcgggatgctaaactcgataaggcccagatccatgatctcgtcctagtggggggttccactaggatccctaaagtacagaaactattgcaggacttcttcaatgggcgagacctcaataaatccatcaaccctgacgaggctgtggcctacggggcagccgtacaagccgcaatcttaatgggtgacaagtctgagaatgtgcaggacttgctcctgttggatgtggccccacttagcctcgggctggagaccgcaggaggcgtgatgactgctctgattaagaggaactctacaattcccacaaaacagacccagatattcactacatactctgacaaccagccaggtgtcctgattcaggtctatgagggagagcgagcaatgacaaaggataataatctgctgggtcgatttgagctctcaggaataccacccgcaccaagaggagtcccgcaaatcgaagtaaccttcgatattgacgcgaatggcattctgaacgtgaccgccaccgataagtccacaggcaaggcgaacaaaatcaccatcactaatgacaaggggcgactgagtaaggaagaaatcgagcggatggttcaagaggccgaaaagtacaaggcagaagacgaggttcagcgggagcgcgtgtcagctaagaatgctttggaaagttacgctttcaacatgaaatctgccgttgaggacgaaggcttaaagggtaagatctcggaggcagacaaaaaaaaggttttggataagtgccaggaagtaatttcttggctcgacgcgaacactctggccgaaaaagacgagtttgagcacaagagaaaggagctcgaacaggtgtgtaaccccatcatcagcgggctttatcaaggagccggaggtcctgggccaggaggcttcggagcccagggaccaaagggcggtagcggaagtggtcccaccatcgaagaggtggactag

SEQ ID NO: 225730 - DNA, 1431 bp, synthetic construct
  misc_feature 1..1431: note = Description of Artificial Sequence: Synthetic coding sequence
  source 1..1431: mol_type = other DNA
atggcaaaggctgccgcaatcggcattgacttggggaccacctattcctgcgttggagtgttccagcacggtaagggcgaacgtaatgtgctgattttcgacctgggaggagggacatttgatgtcagcatactcaccatcgatgatgggatttttgaggtgaaggccaccgccggtgatacccacttgggtggggaagacttcgacaacagactcgtaaaccattttgttgaagagttcaaacggaagcataagaaggacatatctcagaataaaagagcagtgagacgactgcgcacagcctgcgagcgagccaaacgcacactgagttctagcacccaggcatcactcgaaatcgacagcctgttcgaggggatcgatttttatacaagtatcacacgagcaagattcgaagaactctgttcagaccttttcagatccactttggaacctgtcgagaaggccctgcgcgatgcaaagctggataaggcccagatccacgacctggttctcgtcggagggtccactagaattccaaaagtccagaagctgcttcaagatttcttcaacggtagagacctgaataagagcatcaacccggacgaagccgtcgcctacggagcagccgtacaggctgctatcctgatgggagataaaagcgaaaacgtgcaggatttgcttctactggatgtggccccactttccctgggcctggagacagccggtggagtcatgactgccctgatcaagcggaactctacaattccaaccaagcagacacaaatatttacaacctactcggacaaccaaccgggtgtgctgattcaagtttatgagggagaacgggcaatgacaaaagataacaatcttttgggcaggtttgagctgagcggcattccaccggctcctagaggagtcccgcagattgaggtgacctttgacattgacgctaatggaatcctgaatgtgacagctacagacaagtctaccgggaaagctaacaaaataactattaccaatgacaaaggccgactcagcaaagaggagatcgagagaatggtccaggaggccgagaaatacaaagccgaagacgaggtccagagagagcgagtcagcgcaaagaatgcgctcgaaagttacgcattcaatatgaaatctgccgtagaggatgagggactgaaaggcaagattagcgaggctgataagaagaaagtacttgacaaatgccaggaggtgatctcctggctggatgcaaatactctagctgaaaaagatgagtttgaacacaaacggaaggagctggaacaggtgtgcaatccaataattagtggcctataccagggagctggagggcctgggcctggtggattcggcgctcagggcccaaaaggtggatccggctcaggcccaactattgaggaggtggactag

SEQ ID NO: 225731 - DNA, 1431 bp, synthetic construct
  misc_feature 1..1431: note = Description of Artificial Sequence: Synthetic coding sequence
  source 1..1431: mol_type = other DNA
atggctaaggcggcagcaattggcattgacttaggcaccacttacagctgtgtgggcgttttccagcacgggaaaggggaacgaaatgtactgattttcgatcttgggggagggacatttgacgtttccatactcacaattgacgacgggatattcgaagtaaaagcaaccgcgggagacactcacctgggtggtgaagattttgacaacagactggtgaaccattttgttgaggaattcaagcgcaaacacaaaaaagatatcagccagaacaaacgagcggtgcgaagactgaggactgcatgcgaaagagctaaaagaactctgagttcgagcactcaggcatctctggagattgattctctgttcgagggtatcgatttctacacctccatcacccgggctagatttgaggagctttgctccgatctttttaggagtaccttggaaccagtggagaaggctctccgagatgccaaactggataaggcccagattcacgatctagtgctggtgggagggtcaactcggatccctaaagtccaaaagttattgcaggacttctttaatggacgggatttaaacaaaagcatcaatccagacgaagcggtggcatatggcgctgcggtccaggctgcaattctgatgggagacaaatcggagaatgttcaggatttgctcctgctagacgtggccccactgtctctcggtcttgagactgctgggggtgtgatgacagccctgataaagcggaattccaccattccgactaaacagacacaaatttttaccacctattctgacaaccagcccggagtgctgatccaggtgtatgagggagagcgagccatgactaaagacaacaaccttctcgggcgatttgagttgtctggaatacctcccgcacccagaggcgtaccacagattgaggtgacattcgacatcgatgccaatgggatcttgaatgtgactgctacagataaatcaacaggcaaagctaacaagattaccatcactaatgacaaagggagattgtcgaaggaggaaatcgaacggatggtccaggaggcggaaaaatataaggcagaggacgaggtgcagcgcgagcgcgtgagcgcgaagaatgctctcgaaagctacgcattcaacatgaagagcgctgtagaggacgagggcctgaagggcaaaatatccgaggctgataaaaaaaaagtgctggataaatgccaggaggtgatctcctggctcgacgccaacaccctggctgagaaagatgagtttgagcacaagcgcaaagagttggagcaggtttgtaatcccattatcagcgggttataccaaggggctggaggacccggacctgggggattcggcgcacagggacccaagggcggttccgggtctggtccaacaattgaagaagtggactag

SEQ ID NO: 225732 - DNA, 1926 bp, synthetic construct
  misc_feature 1..1926: note = Description of Artificial Sequence: Synthetic coding sequence
  source 1..1926: mol_type = other DNA
atggccaaggcagccgctattggaatcgatctggggacaacttattcttgtgtgggggtcttccaacatggtaaggtggagatcatcgccaacgatcaagggaatcgcactactcccagttacgtggcatttacggacaccgaacggcttatcggcgatgctgccaaaaatcaggttgccctgaacccccagaataccgtgtttgatgctaaaaggctgatcggtcgcaaatttggagatcccgtggttcagtctgatatgaagcactggccatttcaggtgattaacgacggtgacaagccgaaagtccaagtttcttacaagggagacactaaagctttctaccctgaagagatcagttcaatggtgctgaccaagatgaaagagatagcagaagcctatttaggctacccagttactaacgcagtcattaccgtgcctgcctatttcaacgacagccaacgacaggctaccaaggatgctggtgtcatagcaggtctcaacgtcttgagaataatcaatgagccgaccgcggctgccatagcttatggcctggaccggactggtaagggcgagcgcaacgtcttaatatttgacctaggtggtggcacattcgatgtgtctatcctgactattgacgacggtatcttcgaagttaaggccaccgcgggtgatacgcacctcgggggagaggatttcgacaacagacttgtgaatcactttgtggaggagttcaagcgcaaacataagaaggacatcagtcaaaacaagcgggctgtccggagacttcgaaccgcctgtgagagagcaaaaaggaccctgagttcgtccacacaggctagcctagagatagactccctgttcgaggggatcgacttctacacgagtatcaccagggcccgttttgaggaactgtgctctgatctgtttcgcagtacactggaaccagtggagaaggccctaagagacgcaaaattggataaagcacagatccacgacctggtgctggtgggcggttccactaggatccccaaggtccagaaacttctccaggatttttttaacggcagggatttaaacaagagcatcaaccctgatgaggctgtagcctacggagcagcagtgcaggctgctattttgatgggagataaaagcgaaaacgtgcaagacctgctattgcttgacgtggcacctctttcgcttggcctcgagacagccggaggggtgatgacggccctgatcaaacggaatagcaccattccgacaaagcagactcaaatcttcacaacatactccgataatcagccaggggtactgatacaggtgtacgaaggcgaaagggctatgacaaaagataataatttacttggcagattcgagctgagcgggatccctccagcccctcggggtgtgccgcagatagaggtgaccttcgatatagacgccaatggtatcctcaatgtgacagcaactgacaaaagcactggtaaggccaataaaattacgataactaatgacaaggggaggttgagtaaggaagagatcgaaagaatggttcaggaggctgaaaagtacaaggctgaggatgaggtccagcgggaaagagtgtccgctaagaatgctcttgagtcgtatgcatttaacatgaagtcagcagtcgaggacgaaggcttgaagggtaaaatatccgaggccgacaagaaaaaggtgcttgataagtgtcaggaggtgatttcttggcttgatgccaatactctggcggaaaaagatgaatttgaacacaagcgcaaagagctggagcaagtgtgcaatcccataattagcgggttatatcaaggcgctggcggacctggaccaggaggtttcggcgctcagggaccgaaaggcggatctggttcgggacccacaattgaagaggtggattag

SEQ ID NO: 225733 - DNA, 1431 bp, synthetic construct
  misc_feature 1..1431: note = Description of Artificial Sequence: Synthetic coding sequence
  source 1..1431: mol_type = other DNA
atggcaaaggcggctgccatcgggattgacctagggaccacttattcctgcgtgggagtgtttcagcatggcaagggcgaaaggaacgtgctgattttcgatctggggggaggtacttttgatgtctccatcttaactatcgatgatggaatctttgaagttaaagccacagccggagatacccaccttggcggtgaggacttcgacaataggctggtgaaccactttgtggaagagtttaaacgaaagcataagaaggacattagccagaacaagagagcggttcgccgactgcggactgcttgtgagagggccaagaggactctctcttcctccacccaggcctctctcgagattgactctttatttgagggcattgacttctatacaagtatcacccgcgcacgtttcgaggaactgtgttccgatcttttcaggtccaccttagaacccgtggagaaggctctgagggatgccaagttagacaaagcccagattcatgacttggtactagttgggggtagtacgcgcatacccaaggtccagaagcttctacaagatttttttaatggacgagatctgaacaagtccatcaaccccgatgaagccgtggcctacggagctgcagttcaggccgcaatcttaatgggggacaaatctgaaaacgtgcaagacctactgctgctcgatgtggcgcctctttcattgggtctagaaaccgcgggtggtgtcatgacagccctgataaagagaaattctaccatcccgacaaagcaaacccagatttttactacatactccgataaccagccaggggtgcttatccaggtgtacgagggggaaagagccatgacaaaggataacaatctgctgggccgttttgagctaagcggaattccccctgcacctaggggagtgccccaaatcgaagtgacgtttgatatcgatgctaatggcattctaaacgtcactgctaccgacaaaagtacgggtaaggccaataaaatcacaattactaacgacaaagggaggttatctaaggaggaaattgagcggatggtacaggaggccgagaagtacaaggctgaagacgaagtgcagagggagcgtgtttccgccaaaaacgcgttggaaagttatgcattcaacatgaagtcggcagtggaagacgaggggctgaagggcaagatctccgaagccgataaaaagaaagtgctggacaaatgccaggaggtgattagttggttggatgcgaatacactcgcagagaaggatgagttcgagcacaagcggaaggagctcgaacaagtgtgtaatcccatcatctcgggtctgtaccaaggggcaggcggacccggacccggtggattcggggcacagggccctaagggcggatcagggagtggacccacgatcgaagaggtcgactag

SEQ ID NO: 225734 - DNA, 1926 bp, synthetic construct
  misc_feature 1..1926: note = Description of Artificial Sequence: Synthetic coding sequence
  source 1..1926: mol_type = other DNA
atggccaaagccgcagccatcggcattgacttggggacaacttacagctgcgtcggggtgtttcaacacggcaaggtcgagatcatcgccaacgatcagggcaaccgaaccacccccagctacgtggcctttacagacactgaaagactgatcggcgatgctgccaaaaatcaagtggctcttaatccccagaacacagtttttgacgctaaacgcctaatcggaagaaaatttggagaccccgtagtacagagcgatatgaagcattggcctttccaggtcattaatgatggagacaagcctaaagtgcaggtgtcctacaagggtgaaaccaaggccttctatccagaggagattagtagcatggtgctcaccaaaatgaaagagatagcggaggcctacctgggctatccagtgactaatgcagttatcactgtacctgcctattttaacgacagccaacgacaggcgaccaaggacgctggcgtaatagccggacttaatgttttgagaatcattaacgagccaactgccgcagccatcgcttacggactcgacagaactggcaaaggtgagaggaacgtgctgatctttgatctcgggggagggaccttcgacgtgtccatccttactatcgacgatgggatctttgaagtgaaggcaaccgctggtgatacccacctgggtggagaagacttcgacaatagactggtaaaccatttcgttgaagagttcaagcggaaacacaagaaagatatcagtcagaacaagagggctgtcagaaggcttagaactgcctgcgagcgtgccaaaaggacgttaagcagctctacccaggcctcactagagatcgattctctgttcgagggtatcgacttctatacctccattacaagggctcgcttcgaggaattatgttccgacctgttccgctccacactcgaaccagtcgagaaggctctcagagatgccaaattagacaaagcgcagatccacgacctagtgcttgtgggtggaagtactaggatacctaaggtgcagaaattgctccaggattttttcaatggcagagatctcaataagtccataaaccccgacgaggccgtcgcctacggagccgctgtgcaggccgcaattcttatgggagataagtcagagaacgtgcaggacttgctccttctggacgtggcaccgttgtccctgggactggaaaccgctggcggagtgatgacagctctcattaaacgtaactccactattccaaccaagcagacgcagatcttcacaacctatagcgataatcagcccggagtgcttattcaagtttatgagggcgagcgggctatgaccaaagataacaatctgctaggtcgattcgagctcagcggaatacccccagccccaagaggcgtgcctcagatcgaagttaccttcgacatagatgctaacggaattctaaacgtgaccgcaacagacaagtctactggtaaggccaataaaatcaccatcaccaatgataaaggccgtctctccaaagaagaaatagagcgtatggtacaggaagcagaaaaatacaaggccgaggatgaagttcaacgcgagcgagtctcagcaaaaaatgcacttgaaagctatgccttcaacatgaaatccgccgttgaagacgaggggctgaagggcaagatctcggaagccgataagaaaaaggtgttagataagtgtcaggaagtgatatcctggttggatgcaaacacgttggcagaaaaggatgaatttgaacataagcggaaagaattggaacaagtttgtaatccgatcatctccggattgtaccagggagcgggaggcccaggaccaggagggtttggagcccagggcccaaaaggaggctctggcagcggacctactatagaagaggttgactag

SEQ ID NO: 225735 - DNA, 1926 bp, synthetic construct
  misc_feature 1..1926: note = Description of Artificial Sequence: Synthetic coding sequence
  source 1..1926: mol_type = other DNA
atggcaaaagccgctgctatcgggattgatctcgggaccacatattcctgcgtgggagtttttcagcacggtaaagtagaaataatcgctaacgaccaagggaacagaacgacccctagctacgtggctttcactgacacagaacggcttataggggatgcagccaagaaccaggtggcactcaacccacagaacacggtcttcgatgcaaaaagacttattggtagaaagtttggcgatccagtagttcaatccgatatgaaacattggccttttcaggtgattaatgacggagacaaacctaaagtacaggtgtcctataagggcgagacaaaggctttctacccagaggaaatttcttctatggtgctgacgaagatgaaggaaatcgctgaggcttacctggggtacccggtaactaacgctgtgatcaccgtccctgcctactttaacgatagtcagcggcaggctactaaagatgcaggggtgatcgctggactgaatgtgttacggataatcaacgagccaactgcagcagccattgcctatggtctggatcggacgggaaagggggagagaaacgtgctgatttttgatctagggggaggcaccttcgacgtaagtatcctgaccatagatgacggcatttttgaggtaaaggccactgctggtgatacacatctgggcggtgaagactttgataacagactagtgaaccactttgtcgaggaatttaaacgcaaacacaagaaagacatttcccagaacaagcgggctgttcgtcgccttaggactgcatgtgagcgggcaaagagaacgcttagcagttccactcaggcgtctctggaaatcgactctctttttgaggggatagatttctacacgagtatcacgcgggcacggttcgaagaactgtgttcagacctatttcgatctaccctggagccagtggagaaagcgttgagggatgccaagctggataaagctcaaatccacgatctggtgttggtcggtgggagtacacggatccctaaggtgcagaaacttctacaggatttttttaatggaagagacttgaacaaatcgatcaatccagatgaagcggtagcctacggagctgctgtgcaagcagctattcttatgggcgacaaatcagagaacgtccaggatctgcttctgctggacgtggctccgttgtctctaggattagaaacggccggaggcgtgatgaccgcactgataaagaggaacagtaccataccgactaagcagactcagatttttacaacctacagcgacaaccagcccggagtgttaatccaggtgtatgagggggaacgcgcaatgacgaaggataacaacctactgggacgattcgagctgtcaggcattccacctgctcccagaggggtcccacaaattgaggtgacctttgatattgacgccaacggaatcctgaacgtcacagccacagataagtcaaccgggaaagcaaacaaaatcaccatcacgaatgacaaggggaggctgtctaaagaagaaattgagcggatggtgcaggaagccgagaaatacaaagcagaggacgaggtgcagcgagagcgcgtgtcggcaaagaatgctctggaaagttatgctttcaatatgaagtcggccgtagaagacgaaggcttgaagggcaagattagtgaggccgacaagaaaaaggtgcttgataagtgccaggaggttatttcctggctagacgctaataccctcgctgagaaagacgagttcgaacacaagcgtaaggaactggagcaagtctgcaatccaataatcagtggactctaccagggggcaggaggtccgggacctgggggattcggagcccagggtcctaaaggagggtctggttccgggcctactattgaggaagtcgactag

SEQ ID NO: 225736 - DNA, 699 bp, synthetic construct
  misc_feature 1..699: note = Description of Artificial Sequence: Synthetic coding sequence
  source 1..699: mol_type = other DNA
atggcgaaagcagctgcaattggtattgatctgggaaccacatactcttgcgtgggcgtgtttcaacatgggaaggtagaaataattgccaacgatcagggcaataggacaaccccaagttacgttgcgttcaccgacaccgaacgcctcatcggggatgcaggtgtcattgccggtttgaacgttctgaggattatcaacgagccaaccgccgctgccatcgcttatggcctagacaggacaggcaaaggggagcgtaatgtattaatctttgatctgggcggtggcacttttgatgtgtctatcttgaccattgatgacggtatcttcgaggtaaaagcaaccgcgggagatacacacttggggggagaagactttgacaaccgcctggtcaaccatttcgtcgaggaatttaaacggaagcacaagaaagatatctcccagaataagcgtgccgtgcggaggcttcgtacggcgtgcgagagagccaagcggaccctgagcagtagtacccaggcttctttggaaattgattccctgtttgaaggaatcgacttttacacttccatcacaagggctagatttgaagagctttgctccgacctctttagatccacccttgagcctgtggagaaggccccacctgctagtccgaggtgccgctcctgctgtcgcactagttctaccggcgcaacatag

SEQ ID NO: 225737 - DNA, 1926 bp, synthetic construct
  misc_feature 1..1926: note = Description of Artificial Sequence: Synthetic coding sequence
  source 1..1926: mol_type = other DNA
atggcaaaggccgctgcaatcggaattgacctgggaacaacttactcatgcgtgggggtttttcagcatggaaaggtggagattatcgcaaatgaccagggtaatcggacaaccccgagctatgttgctttcacagacaccgagagactcataggggacgccgctaaaaaccaagttgccctgaacccccagaatacagtgtttgatgctaagagacttatcggcagaaaattcggcgaccccgtggttcagagtgatatgaaacactggccttttcaggtgattaatgacggggacaaaccaaaagtgcaagtgtcttataagggggaaaccaaggccttttacccagaagaaatctcttctatggttctcactaagatgaaggaaattgccgaagcctacttgggttatcctgtgactaacgcggttataaccgtacccgcttactttaatgattcacagaggcaggccaccaaggatgccggtgtcatcgccggattaaacgtgcttagaattatcaacgaacccacggccgcagccattgcgtatggtctggacaggacaggcaagggggaaaggaacgttcttatcttcgatcttggagggggtactttcgatgtcagcattttaactatcgacgatggtatctttgaagtaaaggccacggctggcgatacccacctagggggagaagactttgataaccgcctcgtgaatcacttcgtcgaggagttcaaaagaaaacataagaaggatatatctcagaacaaacgtgccgtacgcagactaaggacggcctgtgagagggccaagaggaccctgtcttcctcaacccaagcctctctggaaattgatagtctgtttgaggggatcgatttctacaccagtattacaagggccagattcgaggaactatgcagtgatctatttaggagcactcttgaacccgtggaaaaggcactccgggatgccaagctcgacaaagctcagatccacgacctggtgcttgttggtggatccactcgcatccccaaagtgcagaagttgctccaggacttttttaatggacgtgatttgaacaagtctatcaatcctgatgaggccgtggcatacggcgcagccgtgcaggccgctattctcatgggagacaagagcgagaacgttcaggatcttctgttgctcgatgtcgctcccctcagtctgggactcgaaaccgccggtggggttatgacagcactaatcaaacgaaatagcaccatcccgaccaaacaaacccagatctttacgacttacagtgataatcagccaggcgtgctgattcaggtctatgaaggagagagagccatgactaaagacaataacctgcttgggaggttcgagctgtctggcattccacctgcacctaggggcgtaccccagatcgaggtaacatttgatatcgacgccaatgggatcctaaatgtcaccgctactgataagtccaccggaaaggccaataaaattaccatcactaacgataagggacggctttctaaggaagaaatcgaacggatggttcaggaagccgaaaagtacaaggcggaagatgaggtgcaacgcgagagagtgagtgccaagaacgcccttgaaagctatgcattcaatatgaagtctgctgttgaagacgaggggcttaagggtaagatatccgaggcagataaaaaaaaagtgttggacaagtgtcaagaggtgattagttggctagacgcaaataccctagctgaaaaggacgaattcgaacataaacgcaaagaactggaacaggtgtgtaaccctatcattagcgggctgtatcaaggcgcaggcggaccagggccaggaggatttggagcccaaggccctaagggtgggtctgggtctggtccaacgatagaagaagtggactag

SEQ ID NO: 225738 - DNA, 1431 bp, synthetic construct
  misc_feature 1..1431: note = Description of Artificial Sequence: Synthetic coding sequence
  source 1..1431: mol_type = other DNA
atggcaaaggccgctgccatcgggattgatttgggtactacttatagttgcgttggggtgttccagcacggaaaaggagagaggaacgtgctgatttttgatttaggtggtgggactttcgatgtaagtatcctgaccatcgacgatggtatctttgaggttaaggcaacggccggagatacgcacctcggaggtgaagatttcgataataggcttgttaatcatttcgtcgaggaattcaagcgcaagcacaaaaaagatatttcccagaacaagcgcgcagtgagaagactaaggactgcttgtgagcgagcgaagcggaccctgagctccagtactcaggcaagtctcgaaattgactcgttattcgaaggaatcgacttttataccagtattaccagggctcgcttcgaagaactgtgctccgacctctttagaagtacattggaacctgtagagaaagcactccgagatgcgaagctcgataaagctcaaatccatgacctagtgctcgtgggcggttccacacgcatccctaaggtgcagaaactcctgcaggacttttttaacgggagggacctgaacaaatccatcaaccccgacgaggcagtggcctacggcgctgccgtgcaggcagcaatcctgatgggcgacaaaagcgagaacgtgcaagacctgttgctcctggacgtggccccactcagccttggacttgagacagctggcggagtgatgaccgcactaattaagcggaactctactatcccgactaaacagactcagattttcaccacctatagtgacaaccaaccaggagtgctgattcaagtctacgagggggaacgagccatgactaaggataataatttactaggaaggtttgagctgtcaggcattccccctgcaccccgaggagtgcctcagatcgaagtgaccttcgacattgatgccaatggaatcctgaatgtcacagccaccgacaagtcaacagggaaggccaacaaaatcacaattaccaacgacaaaggccgacttagcaaggaagagatcgaaagaatggtccaagaggctgagaagtacaaggccgaggacgaggtgcagcgagagcgcgtaagcgccaaaaatgccttagaaagctacgctttcaacatgaagtcagccgttgaagatgaaggccttaaaggaaagataagtgaagctgataaaaaaaaggttctggataagtgtcaggaggtgatatcctggctggacgccaatacactcgctgaaaaggacgaattcgagcacaaacgaaaggagctcgagcaggtatgcaaccctatcatctctggcctctatcagggtgctggtgggcctggcccaggcggttttggggctcagggtccaaagggtgggtccggctctggtcctactatagaagaggtagattag

SEQ ID NO: 225739 - DNA, 1431 bp, synthetic construct
  misc_feature 1..1431: note = Description of Artificial Sequence: Synthetic coding sequence
  source 1..1431: mol_type = other DNA
atggcaaaagcagctgctatcggaattgatcttggtaccacatactcttgtgtgggggttttccagcatggtaagggtgaacgcaacgtgctgatttttgacctaggtggaggcacttttgacgtttcaatcctgacaattgacgacgggatctttgaagtcaaggctaccgccggtgatactcatctgggcggagaggactttgataatcgtctggttaaccattttgttgaggagttcaaacgaaagcataagaaggacattagccagaacaagcgcgctgttcggaggttaagaactgcatgtgagcgtgccaagaggacactgagttcctcaacccaggctagtctcgaaatagactctctcttcgagggtatagatttctatacgtcgatcactagagctcgcttcgaggaactctgtagcgatctgtttcgctccacgctggagcctgttgaaaaagcactgcgcgatgcaaagctggacaaagcgcagatccatgatctcgtgctcgtgggcggttccacccggatccctaaggtccagaagctgcttcaggatttttttaatgggagggacttgaacaaaagcattaacccagacgaggcagtcgcgtacggcgcagctgtccaggctgctattctgatgggagataagtcagaaaacgtgcaggatctgcttttgctcgatgtggccccactgtctttgggactagaaaccgccggaggcgtgatgactgctctgatcaagaggaactctaccatcccaacaaagcagacacagatcttcacaacctactctgacaaccaaccgggtgtcctcattcaggtctatgagggcgaaagagccatgaccaaagataacaatttactggggaggtttgagctatcaggcattcctcctgctccaaggggggtcccccagatcgaagtgaccttcgacatagatgcaaacggcattctcaacgtgacagcaaccgacaagagcacagggaaggcgaacaagattaccatcacaaatgataagggcagattgagcaaagaggagattgagcggatggtgcaagaagcagagaaatataaagctgaggacgaggttcaacgggagagagtgtctgccaagaacgccctggaatcttacgcgtttaatatgaagtcagctgtggaggacgaggggctgaagggcaaaatcagtgaagctgacaaaaaaaaggtgctggacaagtgtcaggaagttatctcatggttagacgcgaatacgctagctgaaaaggatgagtttgagcacaagaggaaagaactggaacaggtttgtaatcccattatttccggtctgtaccaaggagctggtgggcctggccctgggggattcggagctcaaggtcctaaggggggaagtggctctgggcctactatagaggaggtcgactag

SEQ ID NO: 225740 - DNA, 1653 bp, synthetic construct
  misc_feature 1..1653: note = Description of Artificial Sequence: Synthetic coding sequence
  source 1..1653: mol_type = other DNA
atggccaaggccgcagctattggcatcgatctgggcacaacctactcctgtgtgggtgtctttcagcacggcaaggtgcagatttcatcgatggtgctgactaagatgaaagaaattgctgaggcatatctgggctatcctgtcacgaacgctgtaattaccgtgcctgcctattttaacgatagccaacggcaagctaccaaagatgctggcgttattgcaggcctcaatgttctcaggattatcaacgagcccaccgcagccgcaatcgcatatggattggatcggaccggcaaaggagaaaggaacgtgttaatcttcgacctgggcggtggtacgtttgatgtaagtatacttacgatagatgacgggatttttgaggtcaaggcgactgccggtgacacccatctcggaggtgaggacttcgataacaggctggttaaccatttcgtcgaggagtttaaacgcaagcataaaaaggatattagccagaacaaaagggccgttaggcgacttaggacagcttgtgagagagccaaaagaaccttatcttcctctactcaggcctctctagagatcgacagtctgttcgaaggcatcgatttttatacaagcattacacgagccaggtttgaagaattatgcagcgatctgttcagatcgacactcgaaccagtagaaaaggctctgagggatgctaagctcgacaaggcccagattcacgaccttgtccttgtaggcggttcaacgcgcattcccaaggttcagaagctgctccaggacttctttaacggcagagatctaaataaaagcatcaatcctgatgaagcagtagcctacggggcagccgtgcaggcagccattttaatgggcgacaaaagtgagaatgtccaggacttgctgctgttagatgttgctccccttagtctcggcctcgagacagccggaggtgtgatgaccgcactgatcaaacgcaattctacaatcccaactaagcagactcagattttcactacctacagcgataaccagccaggcgtgttaattcaggtgtacgaaggagagagagccatgactaaggataataatctgctaggtaggtttgaactgagcggaatccccccagcccctcgcggtgtgcctcaaatcgaagtgacttttgatatcgatgcaaatggcattctgaatgtaaccgccactgacaagagcacagggaaggcaaataagataacaatcaccaatgacaagggacgcctctcgaaagaggagattgaaaggatggtacaggaggccgagaaatataaagccgaagacgaggttcaacgggaaagagtctccgccaaaaacgccctagagtcctacgctttcaatatgaagagcgcagtcgaggacgaggggctgaaagggaaaatctcagaggctgataagaaaaaagtgttggataagtgccaggaagtgatcagctggcttgatgcaaacacacttgcggaaaaggacgagtttgagcacaagcgaaaggaactcgagcaggtctgcaaccctatcatctctggcctctaccagggagccggagggccaggccctggcggattcggtgcacaagggcctaaagggggaagcggttcaggccctacaattgaggaggtagattag

SEQ ID NO: 225741 - DNA, 1872 bp, synthetic construct
  misc_feature 1..1872: note = Description of Artificial Sequence: Synthetic coding sequence
  source 1..1872: mol_type = other DNA
atggccaaagctgccgctattggcatcgaccttggaacgacctatagctgcgttggggtcttccagcatggtaaggtcgaaatcatcgctaatgatcagggaaatcggactaccccatcctacgttgctttcacagacactgagagattgattggcgatgctgctaaaaaccaagtcgccttgaaccccgtggtgcagagcgacatgaagcattggccattccaggttatcaatgatggagacaagcccaaggtccaggtctcatacaaaggcgagaccaaggctttctatcccgaggaaatttcttctatggtgcttactaagatgaaagagatagcggaggcctatctgggttatccagtcacaaacgccgttattaccgtccccgcatattttaacgattcccagaggcaggctactaaggacgccggtgtgattgccggtcttaacgtgctaagaatcataaacgagccaacagccgcagctatagcttacggcctagacaggacggggaaaggcgaaaggaacgtgctgatattcgacctaggcggaggcacctttgatgtcagcatattgacaatcgacgacgggatcttcgaggtaaaggcaacagccggagatacccacttgggtggcgaggactttgacaaccgactggtaaaccattttgttgaggaattcaagagaaaacacaagaaagatatttcccagaataagcgggcagtcagacgcctgcgcacagcctgcgaacgtgcgaaaaggacgttatcctcctcaacccaggcttcacttgagatcgattccctctttgagggtatcgacttctacacatccattacccgcgctaggttcgaagagctttgctcagacttgttccgctccaccctggaaccagtcgaaaaagcacttcgagatgcaaagctagataaggcccagatacacgatttggtactggttggtggatctacccgcatcccaaaggtccagaagctgctgcaggatttcttcaacggtcgcgacttaaataagtcaatcaaccccgatgaagctgttgcctacggggcagctgtgcaggccgcaatcctgatgggcgacaaatcagagaacgtccaagacctgctgctccttgacgtagccccactttctctagggctggaaacagctgggggagtcatgacagccttaattaagaggaattcaacaatcccgacgaagcagacccagatttttactacctactctgacaaccagcccggagtccttatccaagtgtatgagggtgagcgggctatgactaaagataacaacctgctcgggcgtttcgaactttctgggatacctcccgcacctcgaggggtgccccagatcgaggtgacattcgatattgatgcgaatggtattctgaacgtgaccgctacagacaagtctactggcaaggcgaataagatcaccattaccaatgataaaggacgcctctctaaagaggagatcgagcgcatggtgcaagaggccgagaaatacaaggcagaagacgaagtacagagggaaagagtgtctgctaaaaacgctctcgaaagctatgcctttaatatgaagagcgccgtggaggatgaaggcttgaaaggcaaaatcagtgaggcggataagaagaaggtccttgacaagtgccaagaagtgatcagctggctggatgccaatacactggctgaaaaagacgaattcgaacataagcgcaaagaacttgaacaggtgtgcaatcccatcatttccggactatatcagggtgccggtggccctggccctggcggatttggtgctcaggggcctaagggcggaagcggttccggccctacaatcgaggaggtcgactag

SEQ ID NO: 225742 - DNA, 1653 bp, synthetic construct
  misc_feature 1..1653: note = Description of Artificial Sequence: Synthetic coding sequence
  source 1..1653: mol_type = other DNA
atggcaaaggctgcagccatagggattgaccttggtacaacatactcttgtgtgggcgtcttccagcacgggaaagtgcagattagcagcatggttctcactaagatgaaagagattgccgaagcctatctcgggtacccagtgaccaatgcagtgatcacagtgcctgcatattttaatgacagccagcgacaggctacgaaggatgcaggagttatcgcaggactgaacgtcctccgcatcatcaatgagccaaccgcagccgcaatagcatacggcttagaccggaccgggaaaggcgaaagaaacgtccttatttttgatctgggcggaggaacgtttgacgtcagcattctaacaattgacgatggcatttttgaagtcaaagcaactgccggtgacacccatcttggcggagaagacttcgataataggcttgtgaatcactttgtcgaagaatttaaacggaagcataaaaaggatatttctcagaataagagggccgttcgccgtctccgcaccgcatgcgagcgcgcaaagcggaccctgtcctccagtacacaagcctctttagaaatcgatagcctgttcgagggtattgatttttataccagtatcaccagggcaagattcgaagagctgtgtagtgacctgttccgctcgactctagaaccggtcgagaaagccttacgggacgcgaaactcgataaagcacaaatacacgatctcgttctggtgggcggttcaactagaatccccaaggttcagaaattgctgcaggacttcttcaacggcagagacctgaacaagtctatcaatccagatgaggccgtagcctacggcgcagctgtccaggctgctattctgatgggagataaaagcgagaatgtccaggacctcctgctcttagacgtcgctcccctcagcctcggactggagaccgctggaggtgtgatgacagccctcatcaaaaggaattctactatccctaccaagcagactcagatttttacaacctacagcgacaatcagcccggagttctcattcaggtttacgaaggtgagcgcgctatgacgaaagacaacaacctcctgggaaggtttgaactgagtggtatccctccggcacccaggggcgtcccacagatagaagtgacattcgacatagacgctaatgggatacttaatgtgacggccaccgacaagagtactggcaaggccaataaaatcaccatcaccaatgataaggggagactgtcaaaagaggagattgagcgcatggtgcaggaagcagagaaatacaaggccgaagatgaggtccagcgtgagcgcgtgtctgccaagaacgcgctagaaagttatgccttcaatatgaaatcagccgtcgaggatgagggccttaagggtaagatttctgaggcagacaaaaagaaagtgctggacaagtgccaggaggtcatctcttggctggatgcaaatactctcgccgagaaagatgagtttgagcataaaaggaaggaattggagcaggtgtgcaaccccataatatctggcctgtatcagggggcaggcggacccggacccggaggtttcggcgctcaaggccctaaagggggttccggtagcggcccaacaatagaagaggtggattag

SEQ ID NO: 225743 - DNA, 1653 bp, synthetic construct
  misc_feature 1..1653: note = Description of Artificial Sequence: Synthetic coding sequence
  source 1..1653: mol_type = other DNA
atggcaaaggccgcagcgataggaattgacctgggaactacatactcgtgcgtgggcgtattccagcatggcaaagtgcagattagcagcatggtgctgacgaaaatgaaagagatcgctgaagcctatctgggttaccccgtcactaatgccgtcattacagttcctgcttacttcaatgactctcaaaggcaggccacaaaggacgcaggtgtcatagctggcttgaatgtactgcgaatcatcaacgaacctaccgccgctgctattgcctatggactcgaccgcactggcaagggagagagaaacgtgctgatattcgatctgggtggcggaaccttcgacgtgtctatcctgacgatcgatgacggtatcttcgaggtaaaggccaccgccggagatacccacttgggcggtgaggactttgataaccgcctggtgaatcattttgttgaagagttcaaacgtaagcacaaaaaagacatttctcagaacaagcgcgctgtcaggcgcctccgcactgcatgcgaacgggcaaaacgcacactaagttccagtactcaggcctcattggaaatagacagcctcttcgaagggatcgacttttacacttctattacacgcgcacgctttgaggaactctgcagcgatcttttcaggagcactctggaaccagtcgaaaaagcattacgagacgcaaagttggacaaggctcagattcacgatcttgtccttgttggaggtagtacacgcatccccaaagtacaaaagctgctacaagacttcttcaacggcagggatttaaacaagtcgattaatcccgatgaagctgtggcttatggagcagccgtgcaagctgcaatactcatgggagacaaatcagagaatgtacaggacctgctgcttctggatgtagcccctttgtctctgggcctagagacggctggaggtgtaatgaccgcgcttattaagagaaatagtaccatcccaacgaagcaaacgcagatctttacaacttacagtgacaatcagcccggtgtattaatccaagtatatgaaggagagcgcgcaatgacaaaggataacaaccttctgggaaggttcgagctgagcgggatccctccggctccgcgtggggtgcctcagattgaggtgacctttgatatagacgccaacggaatccttaatgtgacagctaccgataaatcaactggcaaagccaataagataaccatcacaaacgacaaaggtagactgagcaaagaggagatcgagcgcatggtgcaagaagcagagaaatacaaggccgaagacgaagtgcaaagagagcgggtatcagcgaagaatgccctggagtcttacgcattcaacatgaagtctgctgttgaggacgaaggcctcaaggggaaaattagcgaagctgataagaagaaagtgctggacaagtgtcaggaagttatttcatggctggacgccaacactctggcagagaaggacgaattcgagcataaaagaaaagagctggaacaggtgtgcaatcccattatttccggtctgtaccaaggcgcaggtggccctgggcctgggggttttggcgctcagggcccaaaaggcggttcggggtccggtccgacaattgaggaggtcgattag

SEQ ID NO: 225744 - DNA, 1653 bp, synthetic construct
  misc_feature 1..1653: note = Description of Artificial Sequence: Synthetic coding sequence
  source 1..1653: mol_type = other DNA
atggcgaaagccgctgccatcggaattgacctgggcacgacttactcttgtgtgggggtattccaacatggcaaggtccaaataagcagtatggtgctgaccaagatgaaggaaatagctgaagcctacctgggctatcctgtgaccaacgctgttatcaccgtacctgcttacttcaatgactcccagagacaagctacgaaggatgccggagtcatagctggactgaacgtgctcaggatcatcaacgagccaactgctgccgctatagcttacggactggaccgaacaggcaaaggagaacgaaacgtgctgatcttcgatctgggcggtgggactttcgatgtgagcatccttactatcgatgacggcattttcgaagttaaggccaccgctggcgacacccacctgggaggggaagacttcgacaaccgcttagtgaaccatttcgtggaggagtttaagcgaaaacacaagaaagatatctctcagaacaaacgtgccgtgcgtcgcctgcgaacggcttgtgagcgcgctaagcggactctttcaagctccactcaggcatcactcgagatcgattccctgttcgaagggattgatttctatactagtataacccgcgcaaggttcgaggaactctgtagtgacttattccgcagtaccctggaaccagtggaaaaggccctccgggatgctaagttagataaagcccaaatccacgacctggtcctagtgggaggctcaacgcggattcccaaagtccagaagttactccaggacttcttcaatgggagggacctcaacaaatccatcaacccagatgaggccgtcgcctacggagcagcagtgcaagcggctatcctcatgggcgataagagcgaaaatgtgcaggacctcttactacttgatgtggctcccctgtcccttgggcttgaaaccgctgggggtgtgatgaccgcgctgattaaacgaaacagtactatcccaaccaagcagacacagatatttactacatatagtgacaatcagcctggtgtactgattcaggtgtatgaaggtgagagggcaatgaccaaggataacaacctgttagggagattcgagttgagcgggatacctccggctccacgcggagttccacagatcgaagtcacgtttgacattgacgccaacgggatccttaatgtcaccgctactgacaaatccactggcaaggcaaacaagatcactattactaatgataaaggcaggctgagtaaagaagagatcgagcgaatggttcaagaagccgagaaatacaaagcagaggacgaggtgcaacgcgaaagagttagtgcaaagaatgctctggagagttacgcttttaacatgaagtccgctgtggaggacgagggactcaagggcaagatttccgaagcagataaaaaaaaggtgctggataaatgtcaagaggtgatttcctggctggacgccaatactttggctgaaaaagacgaatttgaacacaagaggaaggagctggaacaagtgtgcaatcctatcataagcggtttataccaaggcgcagggggaccaggcccaggaggcttcggggcacagggcccaaaaggcggttctggctcaggacccacaattgaggaagtcgactag

SEQ ID NO: 225745 - DNA, 699 bp, synthetic construct
  misc_feature 1..699: note = Description of Artificial Sequence: Synthetic coding sequence
  source 1..699: mol_type = other DNA
atggcaaaagccgcagcaatcggtattgacctggggaccacctattcttgtgttggcgtttttcaacatgggaaagttgagattatcgcaaatgatcaaggaaacagaaccaccccctcttacgtggcctttaccgataccgagagattgattggtgacgccggagtaatcgctggtttgaacgttctgaggattataaatgagcccacagccgcagccatcgcatacggtctggaccggactggtaaaggcgagagaaacgtattaatctttgacttgggcggaggaactttcgatgtgtctattcttacaatcgacgatgggatctttgaggtaaaagccaccgcgggagacactcacctgggtggtgaagatttcgacaacagactcgtcaaccattttgtggaagaattcaaaagaaaacataagaaggacattagccagaataagagggccgttcgacgcctcaggacggcatgtgaacgcgcaaaacggacgctcagttcctcaactcaagcctcactcgagatcgactctctcttcgaagggatagatttctatacatctatcacccgggcaaggttcgaggagctgtgcagcgacctgttccggtctacccttgagccagtagagaaggcaccaccagctagcccgcgatgtaggtcttgttgtcggacatcttccactggagccacatag

SEQ ID NO: 225746 - DNA, 1653 bp, synthetic construct
  misc_feature 1..1653: note = Description of Artificial Sequence: Synthetic coding sequence
  source 1..1653: mol_type = other DNA
atggccaaggcggctgccatagggatagatctgggcacaacatatagctgtgtgggagtgtttcagcacggcaaggtccagataagttctatggtgcttactaaaatgaaagaaatcgccgaagcttatttaggctatcccgtgaccaacgccgtgatcacagtcccagcatacttcaacgactcccaacgccaggctaccaaggacgcaggcgtgattgccggattaaatgtccttagaatcatcaatgagcccacagcagctgcaatagcgtacggcttagaccgcaccggtaagggagagaggaatgtgctcatatttgatttgggcggtggcacgtttgacgtgtctatcctgacaattgacgacggcatctttgaggttaaggctactgccggagacacacacttagggggtgaagatttcgataatcggctggtcaatcacttcgtggaagaattcaagcggaaacacaaaaaagacatctctcagaataagagggccgtgcgccgactgcggactgcatgcgagcgtgcaaagcgaacactgtcttcttctacccaggctagcctagaaatcgactctcttttcgagggcattgatttctatacctctatcacaagggcacgtttcgaggagctgtgtagtgacttgtttcgatccacgttagagcctgttgaaaaagccctgcgcgacgccaagctcgacaaggcacaaattcacgacctcgtcctagtagggggttccacccggataccaaaggtgcagaaactacttcaggacttctttaatggacgcgacctgaacaagtccattaaccccgacgaagctgtcgcctacggggcagcagtccaggctgcgattctgatgggagataagagcgagaacgtgcaagaccttctgctcctggatgtcgctccattgagtctcgggctggaaaccgccggtggagtgatgactgccctcatcaagcggaattcgaccattcctaccaagcagacccagatttttacaacttactctgacaatcagccaggggtcctcatccaggtgtatgagggcgagcgagcaatgacaaaagataacaatctgctcgggaggttcgagctctccggaatcccccctgcgcctcgcggagtccctcaaatcgaggtgacattcgacatcgacgcaaacggcattttgaatgtgactgccacagataaatctaccggtaaggctaacaaaatcactattacgaacgacaaaggtaggctctctaaagaagaaatcgagaggatggtgcaagaggccgaaaagtataaagccgaagacgaggtacagagggagcgcgtgagcgctaaaaacgcacttgagtcctatgcctttaatatgaaaagcgctgtggaagatgagggactaaaggggaagatctccgaagccgacaagaagaaagtccttgataaatgccaggaggtgatatcatggctggatgccaacactcttgctgagaaagatgagttcgagcataaacggaaggagctggagcaggtttgcaatcctataatttcaggcctgtaccaaggcgcagggggacccggacctggcggattcggcgctcaaggaccgaaggggggtagcggtagcggacccacaatcgaggaggtggactag

SEQ ID NO: 225747 - DNA, 699 bp, synthetic construct
  misc_feature 1..699: note = Description of Artificial Sequence: Synthetic coding sequence
  source 1..699: mol_type = other DNA
atggctaaggcggctgccataggcattgacctgggtactacatactcttgcgttggcgtctttcaacacggaaaagtcgaaatcatcgccaatgaccaaggaaaccgcacgactccgtcatacgtcgcttttacagacaccgaacgcctaataggtgacgccggtgtgatagccggactgaacgtattgcggattatcaacgaacccaccgcagccgctattgcctacggcctggatcgcacaggtaaaggggagcggaacgtgcttatttttgatttaggcggaggtaccttcgacgtatcaatactgacaattgacgatggcattttcgaggtgaaagccacagccggagacacacacctgggcggtgaagatttcgataaccgacttgtaaaccattttgtggaagaattcaagcggaagcataaaaaagacatctcacaaaacaagagggcagtccgccgactgcggaccgcatgtgagcgagctaagcgtaccctttcctcctctactcaggcctctctagaaattgattccctctttgaaggcattgacttttacacctcgatcacaagagctcggttcgaggagctgtgctcagatcttttcagaagcaccctcgaaccagtagagaaggctcccccagctagtcctcgctgccggagctgttgccgcacctctagtacaggggctacatag

SEQ ID NO: 225748 - DNA, 699 bp, synthetic construct
  misc_feature 1..699: note = Description of Artificial Sequence: Synthetic coding sequence
  source 1..699: mol_type = other DNA
atggctaaagctgcagctataggaatcgatttaggaactacttattcctgcgttggagtgttccagcatgggaaagtcgaaatcatcgctaacgatcagggaaataggaccaccccttcctatgtggcttttaccgataccgaaagactgatcggagacgcgggtgttatcgccggtcttaacgtgctcaggattatcaacgagccgactgccgcagcaatcgcctacggcctggaccggacaggtaagggggaaagaaacgtgttgatcttcgacctgggcggtggcaccttcgatgtgtccatcttgactattgacgacggcatctttgaggtaaaagctacagccggagacacacatctgggaggcgaggattttgataacagactcgttaaccacttcgtggaagaatttaagcgcaaacataagaaggatatctcccagaacaagcgggctgtacgccgtctgcgtaccgcctgtgagagagctaaacgcaccctgtcctcctccactcaggccagtctagagatcgactcgcttttcgagggaattgacttttatacgagcattacccgggcacgatttgaagagctgtgttcggatctattccgctccacacttgagcccgttgaaaaagcaccacccgcaagtccaagatgccgcagttgttgcaggacctcgtcaaccggcgctacctag

SEQ ID NO: 225749 - DNA, 699 bp, synthetic construct
  misc_feature 1..699: note = Description of Artificial Sequence: Synthetic coding sequence
  source 1..699: mol_type = other DNA
atggccaaagcggctgcgatcggcatcgatctggggaccacatatagttgcgtgggtgtgtttcaacatggaaaggtcgagatcattgcaaacgaccagggaaatagaacaacaccttcctacgttgctttcaccgacactgagcgactaattggagacgccggtgttatagccggactaaacgtgttacggattattaatgagcctacggcagccgcaatcgcctatgggctcgacagaacagggaaaggagagcggaacgtgctgatattcgatctgggcggtggtacatttgatgtgagtatccttactattgatgacggaattttcgaagttaaggctaccgccggagatactcacctgggcggagaggacttcgataacaggctggtgaatcattttgtggaggagtttaaacggaaacataaaaaggacatttcacaaaacaagcgggctgtacgccgtctgaggaccgcctgcgagagagctaagcgcaccctgagctcttctacacaagcttcgctggagatcgattcactgtttgaaggcattgatttttatacatcaatcacgcgcgcacggtttgaggaactctgttccgatttgttccgttccaccttggagcccgtagaaaaggcaccaccagcatctccacgatgtcggtcctgctgccgcacttccagtacaggtgcaacatag

SEQ ID NO: 225750 - DNA, 1926 bp, synthetic construct
  misc_feature 1..1926: note = Description of Artificial Sequence: Synthetic coding sequence
  source 1..1926: mol_type = other DNA
atggcaaaagcagccgctatcgggattgacctcggaacgacatacagctgtgtgggcgtctttcaacacgggaaggtcgaaattattgctaacgaccaaggtaaccgcaccactccctcatatgttgcctttaccgatactgagcgcctcatcggcgacgccgcaaagaaccaggtggccctcaaccctcaaaacaccgtgttcgatgccaagcgcctaatcggaagaaaatttggcgaccccgtcgtgcagtccgatatgaagcattggccatttcaggtaattaacgacggggacaaacctaaggtgcaagtatcatacaagggagaaaccaaggccttttaccctgaagagatttcgtccatggtgctgactaagatgaaggaaatcgcggaagcctacctgggatacccagtgaccaatgctgtaattacagttcccgcatacttcaatgacagccagcgacaggctactaaagacgccggtgtgattgccggactcaacgtgctcaggattattaatgagcccaccgcagcagctattgcctatgggctggataggactggcaagggagaaagaaatgtgctcatatttgatttggggggtggaacgtttgatgtgtccattttaactatagatgacggtatctttgaggttaaggcaaccgcgggtgatactcacctgggaggagaggattttgacaaccgcctcgtaaatcattttgtggaagagttcaagcgcaaacacaagaaggacatttcgcaaaacaaaagagccgtgagacggcttaggaccgcttgcgagcgcgcaaagcggacactttcatctagtacacaagccagcttagaaatcgactctctgtttgagggaattgatttttatacctcaattactcgagctaggtttgaggagctttgtagtgacctgttcaggagcaccttagaacctgtcgaaaaggcactccgcgacgcgaaactagacaaggcacagatccacgatttagtactcgtcggaggatctacccgtatccctaaggtgcaaaaacttctccaggatttttttaatggccgtgacttaaataagtccatcaatcctgatgaagccgttgcctatggggcagctgttcaggccgctatcctgatgggcgacaagagtgagaatgtgcaggatctgctgctgctcgacgttgctccgctcagcctggggctggaaaccgctggaggagtgatgacagcactgattaaaaggaactctaccatcccgaccaagcagacccagatattcacaacatatagtgataaccaacctggcgtgctcatccaggtttatgaaggggagagagcaatgacaaaggataacaacttgctggggcgatttgagttatcagggatcccaccagcacccagaggtgtccctcagatcgaggtaacgtttgatatcgatgccaatgggatacttaacgtgacagccacagataagtccaccggcaaggcgaacaagatcactattactaatgacaagggaaggctctctaaagaagagatcgagagaatggttcaggaggccgagaagtataaggcagaggacgaggttcaaagggagcgggtgtcagccaaaaacgccctggaaagctacgccttcaacatgaagagtgccgtggaggatgaagggctgaagggcaagatctccgaggcagataagaaaaaggttctagacaagtgccaggaggtgataagttggctggacgccaacactctggccgagaaagacgagttcgaacacaagaggaaagagctggaacaggtttgcaaccccattataagcggactgtaccaaggcgcaggcggacccggacctgggggatttggagcgcaagggcctaaaggtggtagtggaagcgggccaaccattgaagaggtggactag

SEQ ID NO: 225751 - DNA, 1926 bp, synthetic construct
  misc_feature 1..1926: note = Description of Artificial Sequence: Synthetic coding sequence
  source 1..1926: mol_type = other DNA
atggccaaagccgctgccataggaatcgacctgggcacaacttactcgtgtgttggagtgtttcaacacggtaaagtggagattatcgccaatgatcaggggaaccgaactacaccctcatacgtggccttcacagacaccgagagactgattggtgacgccgcaaagaatcaggtggccctgaacccccagaatacagtgtttgacgccaaacgtctgatcggacgcaaattcggcgaccccgtggttcagagcgacatgaagcactggccgtttcaggtgatcaacgatggcgacaaacctaaggtccaggtgtcatataaaggggagacaaaagctttctatcctgaagagatttcctccatggtcttgactaaaatgaaagagatcgcagaggcgtacctgggctatcctgtcaccaatgccgtcattacggtgccagcatatttcaacgacagccagcgccaggctactaaggacgccggtgtgattgccggtctgaatgtgctgcgcattatcaatgagcctacagctgccgcaattgcctacggcctggaccggacgggaaaaggcgagcggaatgtgctgattttcgatctcgggggaggaacctttgatgtctctattctcaccatcgatgatggcatcttcgaggtcaaggcgacggcaggcgatacccacttgggcggagaagacttcgacaaccggctggtgaaccactttgtggaggagttcaagcggaagcacaagaaggacatcagccaaaacaagagggcagttcgcagactacgcacagcttgcgagcgagccaaacgcaccctttcaagttcaacgcaggccagtttagagattgacagtcttttcgaggggattgacttctatacctcaattacccgagctcgctttgaggagttgtgctcggacctgttccgcagtactctcgaacccgtcgagaaggcgcttcgcgatgctaagttggacaaagcacagatccatgacctcgtactggttggaggctctacaaggattcctaaggttcaaaaactcttgcaggactttttcaacggacgggacttaaataaatcaattaacccagacgaagccgtcgcctacggcgcagcggtacaggccgcaattcttatgggtgacaagagcgagaacgtccaagatctgctgctgttggatgtggctccactttctcttggcctggagactgccggtggagtaatgaccgctctcataaagcggaactctacgatacctactaaacaaacccagattttcacaacatactcagataaccagccgggagtcttaattcaggtctacgaaggcgagagggccatgacaaaagataacaacctgcttggaagatttgaactcagtggcatcccacccgctcctagaggggtgccccaaatcgaggtgacattcgacattgacgctaacggaattctcaacgttacagccacggacaaaagcacgggaaaagctaataagatcaccattaccaacgacaaaggtcggttatcaaaggaggagatcgagagaatggtgcaggaggccgagaagtacaaggctgaagacgaggtgcagagggaaagggtgtcggctaaaaacgctttagaatcatacgcctttaatatgaaatccgccgtcgaagatgaaggattaaaaggaaagatttcggaggcagataaaaagaaagtgctggataagtgccaggaagttatttcatggttggacgctaacacacttgccgagaaagatgagtttgaacacaaacggaaggaattggagcaggtatgtaatcccatcattagtggcttgtaccagggggctgggggacctggtccaggagggtttggtgcccaggggcctaagggaggatccgggagcggccctaccattgaggaggtggattag

SEQ ID NO: 225752 - DNA, 1926 bp, synthetic construct
  misc_feature 1..1926: note = Description of Artificial Sequence: Synthetic coding sequence
  source 1..1926: mol_type = other DNA
atggctaaggccgcagcaattggtattgatctcggcacaacgtactcatgtgtaggagtttttcagcacggcaaggtagagatcatagctaatgaccaggggaaccgaacgactccctcttatgttgcgttcaccgatacggagagacttatcggggatgccgcaaagaaccaggtggctctcaatcctcaaaatactgttttcgatgcgaaaagactcatcggccgtaagtttggagatcccgtagtccagtctgacatgaaacactggccattccaggtgattaacgacggtgacaaacctaaagtgcaggtgtcgtacaagggcgagactaaggccttctacccagaagagatatcttctatggtactaactaagatgaaagaaattgccgaagcatacctcggctaccccgttaccaacgcggtcattacagttccagcttatttcaacgactctcagagacaagcaactaaggacgcaggtgtaattgcaggcctgaacgtgcttaggatcatcaacgaaccaacagccgcagccatcgcttacggcctcgatagaactggaaagggcgaaagaaacgtgctgatattcgatttggggggtggtacatttgatgtgagcattctgacaatagacgacggaattttcgaggtcaaagctactgcaggggacacccacctgggaggggaagatttcgacaaccgtttggttaaccacttcgtggaggagtttaagagaaagcacaaaaaggatattagtcagaacaaaagggctgtgaggcgattgagaaccgcatgcgaaagggcaaagaggaccctgtctagttctacacaggcttcactagagatcgactctcttttcgagggaatcgacttctataccagcataactagagctcggttcgaagaactatgcagtgatttatttagaagcactctcgagccagtcgagaaggccttacgcgacgccaagctcgataaagcgcagattcacgatctggtgctggtgggcggatccactagaatcccaaaggtgcagaagctgctgcaggatttcttcaatggcagggaccttaacaagtccataaatcccgacgaagcagtcgcctatggcgcagcagtccaggctgccatccttatgggggacaagtcagagaatgtacaggaccttctactgctcgacgtggcgccactgagcctgggtctcgagacggcaggaggcgtgatgactgctctgataaaacgtaattccaccatcccaaccaagcaaactcagatcttcaccacctacagcgacaaccagccgggagtcctgattcaggtctatgaaggagagcgcgcaatgacaaaagacaataacctattaggacggttcgagctgagcgggatccccccagctccaagaggcgtgccacagattgaggtgaccttcgacatcgatgctaacggtatcttaaatgtcactgctacggacaaaagtactggtaaggccaacaagattactattacaaatgataaaggccgtcttagcaaggaagagatagaacgtatggtgcaggaggccgagaagtacaaagcggaggacgaagtacagagggagcgcgtgtccgcgaagaacgctttagagagctacgctttcaacatgaagagcgccgtggaagatgaaggactaaaaggcaagatttctgaggctgacaaaaagaaagtgctggataagtgccaggaggtgatttcctggttggacgctaacaccctggctgagaaggatgagttcgagcataagagaaaagagctggagcaagtgtgcaatcccatcatctctggcttgtaccagggagcgggaggtcctggtcctgggggattcggtgctcaagggccaaaaggagggtccggttctggccctacgattgaggaggtggattag

SEQ ID NO: 225753 - DNA, 699 bp, synthetic construct
  misc_feature 1..699: note = Description of Artificial Sequence: Synthetic coding sequence
  source 1..699: mol_type = other DNA
atggctaaggcggcagctattggcatcgatttgggcactacttattcctgtgtgggagtgtttcagcacggcaaagtggagattatcgcaaacgaccaggggaaccgcaccacaccttcttacgtggcctttaccgacaccgagcggctgattggcgatgcgggagtgattgctggcctgaacgtgctcaggatcatcaacgaaccaactgccgctgcgatcgcttacggactggatcgaaccggaaaaggagaaaggaatgttctaatcttcgatctggggggtggtacctttgatgtctctatactgacaatcgacgatggaatcttcgaggtgaaggctacagctggcgacacccacctgggtggagaggactttgacaaccgactggttaaccactttgtagaggagttcaaacggaagcacaaaaaggacatttctcagaacaaacgggctgttcgcaggctgcggaccgcatgtgaaagagcgaagagaacgctctccagttctacgcaggccagtctggagatcgacagtctgtttgagggaattgatttttatacctctataacacgagctcgcttcgaggagctctgtagcgatctgttccgatccacccttgaacctgtggaaaaggccccaccagcttcaccacgttgccggtcgtgctgcagaacatcttcaactggtgctacctag

SEQ ID NO: 225754 - DNA, 1926 bp, synthetic construct
  misc_feature 1..1926: note = Description of Artificial Sequence: Synthetic coding sequence
  source 1..1926: mol_type = other DNA
atggctaaagctgccgcaatcggtatcgatctggggacaacctattcctgtgtgggcgtttttcagcacggaaaggtggaaataatagctaatgaccagggaaaccgcaccacgccctcttacgtggcttttactgatactgagcgcctcattggggacgctgctaagaaccaagtggccctgaatcctcagaataccgtattcgatgctaaaagactaattggtaggaaatttggtgacccagtggtgcagtcggatatgaaacattggcccttccaagttatcaatgatggcgataagcccaaggtgcaggtgtcctacaagggtgagacaaaggcattttatccggaggagataagctccatggttctgacaaagatgaaggaaatagcggaagcgtatctggggtatcctgtgacaaatgctgtgattacagtgccagcatacttcaatgactcacagaggcaggcaaccaaggacgctggggtcattgctggccttaatgttctgagaatcattaatgagccgaccgctgccgcaatcgcttatggcctagacagaaccggaaagggagagaggaacgttctcatcttcgatctggggggaggcacattcgacgtttctattttgacgattgacgacggcatcttcgaggtcaaggccaccgccggtgatacacacttagggggagaggattttgataacaggctggtgaatcactttgttgaggaatttaaacgcaagcacaaaaaggacatcagccagaataaaagggcagtgcggcgtctgcggactgcctgtgagagggctaagagaactctcagctcaagcacacaagcaagtctagagattgactccctctttgaagggattgacttctatacaagcatcacaagggcacggtttgaagagctgtgctcagatctgtttcgatcaactctcgaaccagtggaaaaggcgctgcgcgatgccaaactggacaaagctcagatacacgatttagttctggtgggaggttcaacccgcattcctaaggtgcaaaagctgctccaggacttcttcaatggcagggatctgaacaagtccatcaatcccgatgaggccgttgcctacggagctgctgtgcaagctgccatcctaatgggcgataagtccgaaaacgttcaagatttgctgctgctcgacgtggccccactgtcactgggtctggagacggcaggtggcgttatgacagccctgatcaaaagaaattccacgatccccacaaagcagactcagatctttaccacctacagtgacaatcagccgggagtgctgatccaagtgtacgagggtgagagagcgatgaccaaggataataacctgttgggcagattcgagttgtcgggaatccctccggcaccaagaggcgtgcctcagatcgaagtcactttcgatatagatgcaaatgggatcttgaatgtcactgccactgacaagtccaccgggaaggccaataagataactattactaacgacaaaggtcgcttgagtaaagaggagatcgagcgaatggtgcaggaagcagagaaatataaggccgaggacgaggtgcagagagaaagagtatccgctaaaaacgcactagagagttacgcctttaatatgaagtccgccgtggaagacgaagggctgaaaggcaagatcagtgaggccgacaagaagaaggtgcttgataaatgtcaagaggtgattagctggctcgatgccaacaccctagccgagaaagatgaatttgagcataagcggaaggaactggagcaggtatgcaaccccattatcagcgggctttatcaaggggcagggggtcctggccctggaggttttggtgctcagggtcccaagggcggatcaggctctggccctactatcgaagaagtggattag

SEQ ID NO: 225755 - DNA, 1926 bp, synthetic construct
  misc_feature 1..1926: note = Description of Artificial Sequence: Synthetic coding sequence
  source 1..1926: mol_type = other DNA
atggctaaggccgcagcgattggcattgacctgggcacaacttactcttgcgtgggcgtgttccaacatggcaaagttgagattatcgctaacgatcagggcaaccgaacgacaccatcctatgtggccttcactgacactgaaagactaatcggggatgccgcaaaaaaccaggtggccctcaatcctcagaacacggtatttgacgccaagcgcttaataggaagaaaatttggtgatcccgtcgtccagtctgacatgaaacattggccatttcaggttataaatgatggcgataagcctaaagtgcaggtttcatataagggggagactaaggctttctatcccgaggagatctctagcatggttttgacaaaaatgaaagaaattgcagaggcatacctgggctaccccgttaccaacgccgtgataaccgtcccagcttatttcaacgacagccagcggcaggcaacaaaggacgccggagttatagcgggactgaatgttcttcgaattatcaacgaacctacggcagctgccattgcctacggcctcgaccgcaccggcaaaggtgagaggaatgtgctcatattcgacctcggtggcggaacctttgacgtgtcgattctgaccatcgacgatgggatttttgaagtcaaggctactgcaggggacacccacctgggaggtgaagatttcgataatagactggttaaccactttgttgaggaatttaaacggaaacacaaaaaagatatctcccagaataaacgagccgtgaggaggttacgcacggcttgtgaacgcgctaagagaacattgagctcaagtacacaagcgtcattagagatagacagcctcttcgaggggattgacttctatacttcgattacacgggcacgattcgaagagctgtgctctgatctgtttcgaagcaccctggaacctgtggaaaaagccctgcgagacgccaagttggataaagctcagatccatgatcttgtcctggtcggagggtccacccgcatccccaaggtgcagaagctgctgcaggatttctttaatggacgcgaccttaacaagtctattaaccctgatgaggccgtggcttacggtgccgcagtccaggcagcaatacttatgggcgataagtcagagaacgtgcaggacttactgttgctggatgtcgctccactgtcactcggtttggagactgccggtggggtaatgactgccctgatcaagcgtaattccaccattcctactaagcagacgcaaatattcaccacctactcagataatcagcccggagtgttgatccaggtttatgagggggagcgggcaatgaccaaggacaacaacttactcggcagatttgaactgtccggcattccccctgctccccgtggggtgccacagatcgaagtgacttttgatatcgatgcaaacggcatactgaacgtgaccgctacagacaagtccacggggaaagccaataagatcaccatcacaaacgacaagggcagattaagcaaagaggaaatagagagaatggtgcaggaagccgaaaagtataaagctgaggacgaagtgcagcgcgaacgagtgtctgccaagaacgcactggagagctatgccttcaacatgaaatccgccgtggaggatgaggggctgaagggcaagatcagcgaggctgataagaagaaggtactggacaagtgtcaagaagtaatatcctggttagatgccaatactctcgccgagaaagacgagttcgaacataagcggaaagagctggaacaggtgtgtaaccctatcatcagtggcctgtatcaaggggctggtggcccaggaccaggagggtttggggctcagggaccaaaaggaggaagtgggtccggccctacgatcgaggaagttgattag

SEQ ID NO: 225756 - DNA, 2127 bp, synthetic construct
  misc_feature 1..2127: note = Description of Artificial Sequence: Synthetic coding sequence
  source 1..2127: mol_type = other DNA
ctgaggtcctgctgtgagggccctctccgcttgagtcgagtgacacccgctgtaccacggctgtctcgggcaaatctgtgcgggtgccggcacagacgggtcgagtttcccgctttccgaaggacggagctcctgagccggataccctcagccgtttcctctccacagtcccagtctggggcacaccggcaggggaccgggatggctaaggcagctgccatcgggatagatttgggaactacgtacagttgtgtgggcgttttccaacacggtaaggttgaaatcattgctaacgaccagggaaataggacaactccctcttatgtcgctttcaccgataccgaacggttaatcggagacgccgctaagaatcaagtggcactgaatccacagaatacagtcttcgacgccaagcgcttaataggaagaaaattcggcgacccggttgtccagtctgacatgaaacattggccgtttcaagtgattaacgacggcgacaagcctaaagtgcaggtttcttacaagggagagaccaaagctttctatccggaggaaattagctctatggtgctgacaaaaatgaaggagattgcagaggcttacctgggctaccctgtcacaaacgctgtaattaccgtgcctgcttacttcaacgactctcaaaggcaggccaccaaagacgctggagtgatcgccggattgaacgtgctgagaatcatcaatgagcctacagccgcagcaatcgcctatggtctcgaccggactggcaaaggcgaaagaaacgttttgatctttgacctgggaggcggaacattcgacgtctccattttaacaatagatgatggcatcttcgaggtgaaggcgaccgccggtgacacccacctggggggtgaagattttgataaccgccttgtcaaccactttgtggaagagttcaagaggaaacacaagaaagatatttcacagaacaagagggctgttaggcgtctcaggacagcttgcgaaagggcaaagagaacactttctagctctacacaagctagtctggaaattgactccctgttcgagggcatcgacttttacacatcaatcacacgagctagatttgaggagctgtgtagcgatctgttccgctctacattggagcccgttgagaaggctctgcgagacgcgaaattggacaaggctcagatacatgaccttgttcttgtgggcggttccacacggattcccaaggtccagaagcttcttcaggacttcttcaacggcagggacctcaataagtccataaacccagacgaagctgtggcttatggagccgcagtccaagcggctattctcatgggagacaagtctgaaaacgtgcaggatttgctcttgctcgacgtcgctcctctttctctaggcttagaaacggcaggaggagtgatgacagccttgattaagagaaactccaccatccccacaaaacagacgcaaatttttacaacctattcagacaaccagcccggtgtgctgattcaggtgtacgagggggagcgtgctatgacaaaagacaataatctactcgggaggtttgagctgtccgggatccctcccgctcccaggggagtacctcaaatcgaagtgacgttcgatatagacgcaaacggaatattgaatgtcaccgccactgataagagcaccggaaaagcaaataagataacaataaccaacgacaaagggaggcttagcaaagaagagatcgagaggatggttcaggaagccgagaaatacaaggctgaagatgaggtacaaagggagcgcgtttccgcgaaaaatgccctggagagttacgcattcaacatgaaatcagccgttgaggatgaagggctgaaaggcaagatctcggaggcggataaaaagaaggtccttgataagtgtcaggaagtaatcagctggctggacgccaacactctggccgaaaaagacgagttcgaacataagcgcaaagagctcgagcaggtttgtaatcccattatcagcggactgtatcagggcgctggcggtcccggaccaggaggctttggtgcgcaaggtcccaagggaggatcaggctctgggcctaccatcgaggaggtggattag

SEQ ID NO: 225757 - DNA, 1653 bp, synthetic construct
  misc_feature 1..1653: note = Description of Artificial Sequence: Synthetic coding sequence
  source 1..1653: mol_type = other DNA
atggccaaagctgctgctatagggattgatttaggtactacttactcttgcgtgggcgtgtttcagcacggtaaggtgcaaattagctccatggtcttgactaaaatgaaggagatcgcggaggcctatctgggataccctgttaccaacgcagtgatcaccgtcccagcatacttcaatgacagtcagagacaggctaccaaagatgctggggtgatcgctgggttgaacgttctgaggattattaacgaacccacagcagcagccatcgcctatggccttgatcgaacagggaagggcgagcgaaatgtgctaatctttgatcttggcggtgggaccttcgacgttagtattttgaccatcgatgatggcattttcgaagtgaaggcaacggccggagatacgcacttagggggagaggattttgataatcggctggtgaaccacttcgtagaggaatttaaacggaagcacaaaaaggacatatcacagaacaagagggccgtgagacgccttcgaacggcgtgtgagagagccaaacgaacactgtcgagctctacacaggcatctctggagatcgacagcctctttgagggaattgatttttataccagcatcaccagagccaggtttgaagagctgtgctcagatctttttcgaagcactctcgagcctgtggagaaggcccttagggatgctaagttagacaaggcacagatccatgacctggtgctggtgggtggtagtacacgcatccccaaagtgcaaaagttattgcaggatttctttaatggaagggatctgaacaaatctataaatcccgacgaggctgtggcatacggcgctgcagtccaggctgccatcctcatgggagacaaaagtgaaaatgttcaggatctgcttctcttggatgttgcaccgctctcactagggctcgaaactgctggaggggtcatgactgccctgattaaacgaaatagtactatccccacaaaacagacgcagatttttacaacctattccgacaaccaacctggcgtacttattcaagtctacgaaggtgagagagccatgacaaaggataataatctgcttggacgtttcgagctatccggtattcctccagctcctcgcggagtaccacagattgaagtcaccttcgacatcgacgccaacggcatcctgaatgtgaccgcaacagataaatccactgggaaggctaacaaaattactattactaacgacaaaggaaggctgtcaaaagaggagatcgaaagaatggtgcaggaggccgagaagtacaaagccgaggatgaggtacagcgagaacgggtttctgccaaaaatgcactggagtcatatgcatttaacatgaaatcagctgtggaggacgagggtctcaaaggtaagatctcagaagccgacaaaaagaaggttctggataaatgtcaagaagtaatcagctggctcgacgctaacacactagccgaaaaggatgagtttgagcacaagcggaaagaattggagcaggtatgtaacccaataatttcaggtctgtatcagggcgcaggaggcccagggcctgggggatttggagctcagggccctaaagggggaagcggctccgggcctacaatcgaggaagtggactag

SEQ ID NO: 225758 - DNA, 1875 bp, synthetic construct
  misc_feature 1..1875: note = Description of Artificial Sequence: Synthetic coding sequence
  source 1..1875: mol_type = other DNA
atggctaaggccgctgcaatcgggatcgatctcggcaccacctacagttgtgtgggtgtgtttcagcacggtaaggtggaaattatcgctaatgatcagggtaacagaactaccccttcctacgtggctttcaccgatacggagaggctcatcggggacgcggcaaaaaaccaagtcgcacttaacccccctgtggtgcagtctgacatgaagcattggccgtttcaggtaataaacgacggggataaacccaaagtccaggtgtcctacaagggagaaactaaagcgttttatccggaagaaatttcttcaatggtcctgaccaagatgaaagaaattgccgaagcttacctcggctatccggtgactaatgctgtaattactgtgccagcttatttcaacgactctcagcggcaggccactaaggacgctggcgtcattgccggactaaacgtcctgcgtatcatcaacgaaccaacggctgctgcaatagcctacggacttgatagaactgggaagggggagcgaaacgtgctgatattcgaccttgggggagggactttcgatgtgagcatcctgaccatcgatgatgggatcttcgaggtaaaggccactgccggtgacacccacctggggggtgaggattttgacaaccggctcgttaatcattttgtggaagaattcaaacggaaacacaagaaggatatctcacaaaataaacgagccgtgcggagactgagaaccgcctgcgagcgcgcaaaacgaacactgagctcttctacccaagccagtctggagatcgatagtctgtttgaagggatcgacttctacacatcaatcaccagggctaggtttgaggaattgtgctccgatctattcaggtcaaccctagagcccgttgaaaaagctctgagggacgccaaattggacaaggcacagattcacgacctcgtgctggtggggggatcaacacggattcctaaggtccaaaagctcctgcaagatttcttcaatgggcgagatctgaacaaatcgatcaaccccgatgaggctgtcgcctacggagctgccgtacaagcagctatacttatgggcgacaaaagcgaaaacgtgcaggatttgctgctgctggatgttgccccattgtcgcttgggctggagacggctggtggcgtcatgacagctctgataaaaagaaatagcacaattccaactaagcaaactcaaattttcactacctatagtgacaaccagcctggcgtgctcattcaggtgtacgagggggaaagagcgatgaccaaagataacaacctgctaggcaggtttgagctttctggaattcctcctgcgccacggggtgtcccacagatcgaggtgacttttgatatcgacgccaacggaatcctcaacgtgaccgctacagacaagtcgacaggcaaagctaataaaatcacaattaccaatgacaagggtcggctgagtaaagaagaaattgagcggatggtgcaggaggcagaaaagtataaggcagaggacgaggtccagcgtgaacgtgtctctgcgaagaacgcccttgagagttatgcttttaacatgaagagcgcagttgaggatgaaggcctgaagggcaagatttccgaggctgacaagaaaaaagtgctcgataaatgccaggaggtgatctcctggctcgatgctaacacactggcagagaaggatgaatttgaacataagcgcaaagagttggagcaggtctgcaatcccatcatttccgggctctaccaaggcgctggagggccaggccctggaggcttcggagcacaggggcctaaaggcggatccgggtcaggccctaccatcgaggaagttgattag

SEQ ID NO: 225759 - DNA, 1857 bp, synthetic construct
  misc_feature 1..1857: note = Description of Artificial Sequence: Synthetic coding sequence
  source 1..1857: mol_type = other DNA
atggcaaaggcagccgcaatcggaatcgatctgggtaccacttattcgtgtgtgggtgtgttccagcacggaaaggtggagattattgccaacgaccagggcaaccgaacaactccctcttacgtagcgttcaccgataccgagagactcataggcgacgcagccaaaaatcaggtcgtgcagagtgacatgaagcactggccttttcaggtgattaacgatggggataaaccaaaagtgcaggtctcatacaaaggggaaaccaaggcattttacccagaggagattagcagtatggtgctcaccaaaatgaaggagatcgccgaagcttatctgggctatcccgtgacaaacgcagtaattaccgtgcccgcttactttaacgattctcagcgtcaggccactaaggatgctggcgtcatcgccggactgaacgtgctccgcataatcaacgaacctactgccgcagcaatagcatatggcctggaccgaaccggtaaaggggagagaaacgtcctgattttcgatctcggcggtgggacattcgacgtctcaatacttaccatcgatgacggtatcttcgaagtgaaggctaccgcgggtgatacccacttgggcggagaggacttcgacaatagattggtgaaccattttgtagaggaatttaagcggaaacacaaaaaagatatctcccagaacaaacgtgccgtgaggagacttcgtactgcctgtgagagggcgaaaagaaccctgtccagctccacgcaggcctcactcgaaattgatagtttattcgaaggcatcgacttctatacatctatcacccgcgctaggttcgaagagctctgcagtgatctgttccggtctaccctcgaacctgtggaaaaggctctgcgagacgccaagttagataaagcacagatccatgatctggtgctggtgggcggaagtactcggatccctaaggtgcaaaagttactgcaagacttttttaacggcagggatttgaacaagagcataaatcctgatgaggctgtcgcctatggcgctgccgtgcaggcggctattctcatgggagataagagtgagaacgtccaggatctgttacttctggacgtcgctccattatcgctgggactcgaaaccgctggaggggtgatgacggcactgattaaacggaacagcacaatcccaactaaacagactcagatttttaccacctactcagataaccagccgggtgtgctaatccaagtgtatgagggtgagagggccatgactaaagacaataacctgcttggacgattcgaactgagtggtattccccctgccccaagaggggtgccccagattgaagtcaccttcgacattgacgccaacggaattctgaacgttacagccacggacaagtcaacaggtaaagctaacaaaatcacgattacgaatgataagggcagactaagcaaagaggagattgaacggatggtccaggaggctgagaaatacaaggcggaagacgaggtccagagagagcgggtcagcgcaaagaacgcactggagtcttatgctttcaacatgaagtcggccgtagaggacgagggtctcaagggcaagatctccgaggccgataagaagaaggttctcgacaagtgtcaggaggtgatttcctggcttgatgccaataccctcgcggagaaggacgagtttgaacataaacgtaaagagcttgagcaggtgtgcaatccgatcatatcgggtctctatcagggggctggaggtcccggaccaggcggttttggtgctcaggggccaaaaggtgggtctggctctggtcccaccattgaggaggtggattag

SEQ ID NO: 225760 - DNA, 1857 bp, synthetic construct
  misc_feature 1..1857: note = Description of Artificial Sequence: Synthetic coding sequence
  source 1..1857: mol_type = other DNA
atggctaaggcggctgctattggcatcgaccttgggactacttatagctgcgtgggggtgtttcagcatggcaaagtcgaaatcattgccaacgaccaggggaacagaactaccccaagttacgtagcgttcaccgacaccgaacggctgattggagatgctgcaaaaaaccaggtagtgcagagcgacatgaaacactggcccttccaggtcattaatgatggagacaagccgaaagtgcaagtttcttataagggcgaaaccaaggctttttacccagaggaaatttcctccatggtgctcaccaagatgaaggagatcgccgaagcttacctggggtacccagtgaccaatgccgtgatcaccgtgcccgcatactttaatgacagccagagacaagcgaccaaagacgccggagtgattgccggtttgaacgtactgcgcattatcaatgagcccactgctgcagctattgcctacggtttggatagaactggcaagggcgaacgaaacgttctgatctttgatctgggtggcggtacgttcgacgtgtccatccttactattgacgatggcattttcgaggtaaaggctacagccggagatacccacctcggcggagaggattttgataataggcttgttaaccactttgtcgaggaattcaaaaggaaacataagaaagatatctcccaaaataagcgggctgtccggaggttgaggacagcatgtgaaagagcaaagcgaacactgtccagttctacccaagctagcttggaaatcgatagcttattcgagggcatcgacttctatacgtcaatcacgcgcgctcgttttgaagagttgtgctcagatctatttaggtccaccttggagcctgtcgagaaagccctccgcgacgctaagctggacaaggcccagattcatgatttagtgcttgtgggcggaagcacacggatccctaaggtgcaaaaattgctccaggacttcttcaacggcagagacttaaacaaatctatcaacccagatgaggcagtcgcttatggagccgctgtccaggccgcaatccttatgggtgataagagtgaaaatgtccaggacctgcttcttctggatgtcgcccctctttcactgggcttggagaccgccggtggggtgatgacagccttgatcaaacgtaacagcacgatccctaccaagcagacccagatttttaccacttatagcgataaccagccaggcgtcctgattcaggtgtacgaaggagaacgggctatgacaaaggataacaaccttctgggcagattcgaactgagcggtattcctcctgctccccgtggcgtcccgcagattgaagtgaccttcgatatcgacgccaatgggatcctgaacgtgactgctaccgacaaaagtaccggcaaggctaacaaaattacaattacaaacgataaagggaggctgtcgaaggaggagatcgagaggatggtgcaggaagccgaaaagtacaaagctgaggatgaggtgcagagagaaagagtctccgccaagaatgcgctggagtcatacgcattcaacatgaagtcagccgtcgaggacgaaggcctgaaggggaagatctcggaggccgataaaaaaaaagttttggacaagtgtcaagaggtgatctcctggctagacgccaatacattggccgagaaggatgagttcgaacacaagcggaaggaacttgagcaggtctgcaaccccattatcagcggcctgtaccagggagccggagggcctggaccaggaggtttcggcgcacagggtcctaagggtggaagcggtagcggtccaaccattgaggaagtggattag

SEQ ID NO: 225761 - DNA, 1653 bp, synthetic construct
  misc_feature 1..1653: note = Description of Artificial Sequence: Synthetic coding sequence
  source 1..1653: mol_type = other DNA
atggctaaggcagcagccataggaattgacttaggcacaacttattcttgcgtcggcgtcttccagcacggaaaggtgcagatttcaagtatggtgcttaccaaaatgaaggagattgctgaagcgtatcttggctatcctgtgacaaatgcagtcatcacagttcccgcatactttaacgattcccaaagacaggccactaaagacgcaggtgtgatagctgggctgaatgtgctacgaatcatcaacgaaccaacagccgctgccattgcctacggtctggaccggaccgggaagggagaaaggaacgtactcatatttgatcttggcggagggacgttcgatgtgtcaattctgaccattgacgatggaatatttgaagttaaggccacggccggtgacacccacctcggtggtgaggacttcgacaacagactagtgaatcactttgttgaggagtttaaaaggaagcacaagaaggatatctctcagaataagagagcagtgaggcgtctcaggactgcctgcgaacgagccaagaggacgctgagctcaagtacccaagcaagccttgaaattgatagcctcttcgaagggattgacttttatacttctataacacgcgctcgctttgaggaactttgctcagatctgttcaggagcacccttgaaccagtggaaaaggcactgcgggacgcaaaactggataaagcacaaatccacgacctggtgctcgtaggtggctcaaccagaataccaaaagttcagaaattgctgcaagattttttcaatggcagagacctcaataaaagcattaacccggacgaagctgtcgcttatggggcagcagtccaagctgccattctgatgggggacaagtctgaaaatgtgcaggatctgctgctgctggacgttgcccctctatcacttggtctggagaccgcagggggagtgatgacggccttaataaaacggaacagtaccataccaactaagcagacacagatctttaccacctattccgataatcaaccaggagtgttaatccaggtgtatgagggagagagggcaatgacgaaggacaataatctcctgggtaggtttgagctgagcggtatccccccagctccacgcggagtgccacagattgaggtaaccttcgacatcgacgcgaacggtattttgaatgtaacagcaaccgataagagtaccggaaaagccaacaaaatcacaattaccaatgataagggaaggctctccaaagaagagatcgagagaatggttcaggaggctgaaaagtacaaggccgaggacgaggtgcagcgcgagcgggtgtcagccaagaatgctctagaatcttacgcttttaatatgaaaagcgcagtcgaagacgaaggtctgaagggaaaaataagcgaagctgataaaaaaaaagttctggataaatgccaggaagtcatctcttggcttgacgcaaatacactggccgagaaagacgagttcgagcataaacggaaagaattggagcaggtgtgtaacccgatcatctctggcctctatcagggagcaggagggccaggccctggcggttttggagcgcagggaccaaaaggcggatctggctctggccctactattgaagaggttgattag

SEQ ID NO: 225762 - DNA, 1857 bp, synthetic construct
  misc_feature 1..1857: note = Description of Artificial Sequence: Synthetic coding sequence
  source 1..1857: mol_type = other DNA
atggcaaaggccgctgctataggtatcgacctgggaacaacctacagctgcgtgggggtgtttcagcatggcaaagtcgaaattatcgcaaacgaccaggggaataggaccacgccttcctatgtggcattcactgatacagagcgcctcataggagatgccgctaaaaaccaggtggttcagagcgacatgaagcactggcccttccaggtaatcaatgacggggacaagcctaaggtccaggtatcgtataagggagagactaaagctttttacccagaggaaattagttccatggtccttaccaaaatgaaggagatagccgaggcctacctggggtaccccgtgaccaacgccgtaattacggtgcctgcctacttcaacgattctcagcgccaggccacaaaggacgctggcgtgatagccggtctgaatgtgcttaggattattaacgagccgactgccgctgcaattgcatacggcctcgatcggaccgggaaaggggagcgcaatgtcttgatctttgatctgggaggcggaacttttgatgtgagtattttgacaatcgacgatggcatcttcgaagtgaaggccacggctggcgacacacatctcggcggagaggatttcgacaacagattggttaatcacttcgtagaggaattcaaacgaaagcataagaaagacataagtcagaacaaacgcgctgttcgccgactgagaacagcctgcgaaagagccaagcggaccctttcctccagcacacaggcctcccttgagattgatagcctgtttgaggggatagatttctatacgtccatcacacgggctagattcgaggaactgtgctccgacctgtttcgtagtacactggaacctgtggaaaaggctttgcgagatgcaaagcttgataaggcccagatccatgatttagttttagtgggcggatccactagaatcccaaaggtgcagaagctgctgcaggattttttcaacggtcgggacttgaacaagagtatcaaccctgacgaagccgtcgcctacggcgctgccgtgcaggctgcaattctgatgggtgacaagtcagagaacgtgcaagacctgctgcttctggacgttgcgcctctgtctctcggacttgaaacagctggcggtgttatgaccgccttaattaagcgaaactctaccatccctactaaacaaacccaaatctttaccacctactctgataaccagcccggagtgctgattcaggtctacgaaggggagcgggcaatgacaaaagataacaacttgctgggtcgctttgaactctctggcattcccccagccccaaggggagtgccccaaattgaggtcacattcgacatcgatgctaatggcatcctgaatgttaccgccacagacaagagtactgggaaggcgaacaaaattaccattacaaatgataaaggccgactgtccaaagaagagatcgagagaatggtccaggaagctgagaagtataaagctgaggatgaggttcagagagagcgggttagcgcaaagaatgcactggaatcctatgcctttaatatgaagtccgcggttgaagatgaaggcttaaaaggtaagatcagcgaggctgataaaaagaaggtcctggataagtgccaggaggtgatttcatggctggatgccaacacgctggccgagaaggatgaatttgaacataagcggaaggaactcgaacaagtctgcaaccccattatttctggattgtaccagggcgctgggggtcctggaccaggcggttttggcgcacagggccctaaagggggttctggctctggaccaacaatcgaagaggttgattag

SEQ ID NO: 225763 - DNA, 1653 bp, synthetic construct
  misc_feature 1..1653: note = Description of Artificial Sequence: Synthetic coding sequence
  source 1..1653: mol_type = other DNA
atggcaaaagccgctgcaattggaattgatcttggaaccacgtactcgtgtgtcggcgtgtttcagcacggtaaggtccagatctcatcaatggtgctcactaaaatgaaggaaatcgccgaagcctatctgggttatccagtcaccaatgctgttatcacagtgccagcctatttcaatgattctcagagacaggcaacaaaggacgctggagtgatcgccggtctgaacgttctcagaataatcaacgagcccacggctgcagctatcgcatatgggctcgataggacaggcaagggtgaacggaacgtgctgatcttcgatctagggggaggaacgttcgatgtgagcattctgaccatcgatgacggcatttttgaagtaaaggctaccgccggtgatacgcacctaggaggcgaggacttcgataaccgcctcgtgaaccatttcgtggaagagttcaaacggaagcacaagaaggatatcagccagaataaaagagcggtgcggcgattaagaacggcatgtgaacgggctaaaagaacactgtcctccagcacccaggcttctttggagatcgactctctgtttgagggcattgacttttacactagtattactagagctagatttgaagaactctgctccgatttgtttcggagcactctggagcctgtcgagaaggcccttcgagatgcaaagttggacaaggcacagatccatgatctggtgctagtcggtggcagtactcgcatcccaaaggtgcaaaagctgctgcaggattttttcaatggcagagacctgaacaaatcgataaacccagatgaagccgtagcctacggtgccgctgtgcaggcagctatactgatgggagataagagcgagaatgttcaagatctcctgctgttagatgtagcgcctctttcacttggcctggagaccgccggtggcgtgatgactgctctgatcaagaggaatagtaccatcccaactaaacagacgcagatctttaccacatactctgataaccaacccggtgttctaattcaggtctacgagggcgaacgagcgatgacaaaagataataaccttctgggcaggtttgagctcagtgggatccccccagcgcctcggggagtcccccagatcgaagtaacttttgatattgatgccaatggtatcctcaacgtgaccgccaccgataaatcaaccggtaaggccaacaaaatcacgatcacaaatgacaaaggaaggctttcaaaggaggaaatcgaaagaatggtgcaggaggctgagaaatataaagcggaagacgaagtacaacgagagcgcgtgtctgcaaagaatgcgttagaatcatatgcctttaacatgaaaagcgctgtggaagacgaaggcttgaaggggaagatcagcgaagctgataagaagaaggtgctagataagtgtcaggaggttatttcctggcttgatgctaacaccttggccgagaaggacgagttcgagcacaagcgaaaagaacttgaacaagtttgcaatccaattatttctggcctataccagggcgctggaggccctggccctggaggattcggcgcacaggggcctaagggcggttcaggtagcgggcctaccattgaggaagtagattag

SEQ ID NO: 225764 - DNA, 1761 bp, synthetic construct
  misc_feature 1..1761: note = Description of Artificial Sequence: Synthetic coding sequence
  source 1..1761: mol_type = other DNA
atggccacggctaagggaatcgccatcggaatagatctgggcactacctatagctgcgttggtgtctttcagcacggtaaagtggagatcatagcgaacgatcagggaaaccgcacgacgccctcctatgtggcttttacggatacagagaggctgattggtgacgctgcaaaaaaccaagtagccatgaacccccagaacaccgttttcgacgccaagagactgatcggacggaagttcaacgatcctgtcgtgcaggcggatatgaagctttggccctttcaggttatcaatgattcccagcgccaggcaaccaaggacgctggcgtgattgccggacttaatgttctccggattatcaacgaaccaaccgctgccgcaatcgcctacgggcttgataaaggaggccagggcgagagacacgtgttaatcttcgacttgggaggtgggaccttcgatgtctcaatcctaactatcgatgatggaatctttgaggtgaaagctacggctggcgatactcatctcggcggtgaggactttgacaaccggctcgttagtcacttcgtggaagaatttaagcgcaagcacaagaaagatatctcccagaataaacgagccgtgagacgccttaggacagcctgcgagcgcgctaagaggacactgagcagctccacccaggctaatcttgagattgactccttgtacgagggcatcgacttctacacctccatcacacgcgctagattcgaggaattgtgcgctgacttattccgaggcacgcttgagccagtcgaaaaagccctaagagacgccaagatggacaaggcgaagattcacgacatcgtgctcgtcgggggaagtacaaggatccctaaagtccaacggctactgcaggattacttcaacggacgagatctaaataagtcgatcaatccagacgaagcagtggcctacggagctgccgtacaggcggctattctaatgggagacaaatcagagaaggttcaagatcttctgcttctcgacgtggcacctctcagtcttggtttggaaacagccggaggggtgatgaccgctcttatcaagcgcaactccactatcccaactaagcagacacaaatttttaccacatatagcgacaatcagcctggggtattaattcaggtttatgaaggagaacgggcaatgacaaaggacaacaacctactggggagatttgacttgaccggcattcccccagctccacgcggagttccacagatcgaggtgacgttcgatatcgatgcaaatggtatccttaacgtgacagctaccgacaaaagcacgggcaaggtgaacaaaatcacaattacgaatgataagggcagattatcgaaggaggagattgaaagaatggtcttagatgcggaaaagtacaaggccgaagacgaggtccagcgggagaaaatcgccgctaagaacgctttggaatcttacgcttttaatatgaagtcagtggttagtgacgaggggttgaagggcaaaatttctgaaagtgacaagaacaagatcctggataagtgtaatgaactactgtcctggctggaggtaaaccagctggctgaaaaagatgaattcgatcacaagaggaaagaattagagcagatgtgcaacccgataatcacaaagctgtatcaggggggttgtaccggcccagcgtgtgggaccggctacgtgccgggacgtcctgccacaggcccaaccattgaggaggtggactag

SEQ ID NO: 225765 - DNA, 1926 bp, synthetic construct
  misc_feature 1..1926: note = Description of Artificial Sequence: Synthetic coding sequence
  source 1..1926: mol_type = other DNA
atggcaacggctaaggggatcgcaattggcatagatctggggaccacctattcctgtgtgggcgtattccagcacggcaaggttgagattattgcgaatgatcaaggcaaccgcaccacgcccagctacgtggcgttcaccgacacggaacgtcttattggagatgctgctaagaatcaggttgctatgaatcctcagaacacggtcttcgatgccaagcggttaatcggccgtaaattcaatgatcccgtggtccaggccgacatgaagctctggcccttccaggtcattaatgagggtgggaagccaaaggtactcgtctcatacaaaggggaaaataaggccttttaccctgaggagatatcctccatggttctgacaaagctgaaggagactgcagaagcttttctgggacatcctgtcacaaacgcagtgataaccgtccctgcgtacttcaacgattcccagcggcaggccaccaaagacgccggagtcatcgcaggcctgaacgtgctgaggatcatcaacgagcctaccgctgcggctatcgcatatgggttggataagggaggccaaggcgagcgccacgtgcttatattcgacttgggaggagggacctttgacgtgagcatcctgaccatcgatgatggcatctttgaagtcaaagctaccgctggggatacacaccttggcggtgaggactttgacaaccgcctggtgtcccatttcgtggaagaattcaaacgcaaacacaagaaagacatttcacagaacaaacgtgcggtccgacgtctgaggacagcgtgtgagcgggctaaaaggacactctctagctccacccaggctaacttggaaatcgactcgctgtacgaagggatagatttctacacttctattaccagagcgaggttcgaggagctctgtgccgacttgttccggggaaccctcgagcctgtagagaaagcactgcgcgacgcgaagatggataaagccaagattcacgatatagtcctggtgggtggctccactcgcattccaaaggtccaaaggctccttcaggactacttcaatggaagagatctcaataagagtatcaaccccgacgaagctgtcgcctacggcgcagccgtgcaagccgctatcctgatgggggataagtccgaaaaagtgcaggacctgttgctcttagatgtggcgccactatccttgggattggaaacggctggcggagtcatgactgccctgatcaaacgcaactcaactatccccactaaacagacacagatcttcaccacctactcggataatcagcccggagtgctcatccaggtctatgagggggaacgcgctatgaccaaagacaataacttgttaggaaggtttgacctgacaggtatcccaccggcacctcgcggtgtgccacagatagaggtgacattcgatatcgatgctaatggaattctaaacgtgacagctacagataagagtactgggaaggtaaacaaaatcaccatcactaatgacaaaggcaggcttagtaaggaggaaattgaacgcatggtcctcgacgctgagaagtataaggcagaggacgaagtgcaaagggagaagattgccgcaaagaatgctcttgaaagttacgccttcaacatgaagagcgtggttagtgacgaggggttaaaaggcaaaatcagtgagagcgataagaataagatcttggataagtgtaatgaacttctaagctggctggaagtaaatcagcttgccgaaaaagatgagttcgatcacaaaaggaaagaactggagcagatgtgcaatccgataatcacgaaactctatcaagggggatgtaccggccctgcttgcgggacgggttacgttcccggtcgcccagccaccgggccaacgatcgaagaggtagactag

SEQ ID NO: 225766 - DNA, 1926 bp, synthetic construct
  misc_feature 1..1926: note = Description of Artificial Sequence: Synthetic coding sequence
  source 1..1926: mol_type = other DNA
atggcaaccgctaaagggatcgcaattggcatcgacttggggaccacttacagctgtgtgggagtgttccagcacggtaaagtggagattatcgccaacgatcagggtaatagaactacccctagctatgtggcatttaccgacaccgagcgcctcatcggagatgccgcaaaaaaccaggtggccatgaatccccagaacaccgtcttcgacgcaaagcggctcattggacggaagttcaacgatcccgtcgtccaggctgatatgaagctgtggccattccaggtcataaatgagggcggaaagcctaaagtactagtgagctacaaaggcgaaaataaggcattctaccccgaagagattagttcgatggtcctgactaaactcaaagagaccgcagaggcctttctcggtcatcccgttacgaacgccgtcataacagtccctgcctatttcaatgattcacagagacaggccactaaggacgcaggggtgatagctgggttgaacgtcttgcgaattataaatgaacccaccgcagccgctatagcatatgggctggacaaagggggacagggagaaagacatgtcctgatttttgatcttggcggaggaacctttgacgtgtccatcctgaccatcgatgacggaatctttgaagtcaaagctacagccggtgatactcacctggggggtgaagatttcgacaatagactcgtttcccattttgtggaggagttcaaaagaaaacacaagaaggacatctcccaaaacaagagggccgtccgacgtttaaggacggcttgtgagcgcgctaaaagaacactgtcttctagtacccaggcgaacctcgagattgatagtctttacgagggcatagatttctacacatccattacccgcgcacgttttgaggaactatgtgctgatctgttccggggtaccctagaacctgtggaaaaggcactgagagatgccaagatggacaaagcaaaaatccatgatatcgtgctagtgggaggctccacccgcatcccaaaagtgcagcgtttgcttcaggattacttcaacgggagggaccttaacaaatctatcaacccagatgaggcagtggcgtacggtgctgccgtacaggccgctatcttaatgggcgataagtccgaaaaagtgcaggacctcctcctccttgatgttgcacccctctctcttggactggaaaccgccggaggggttatgacagctcttatcaagaggaactcaactattcctacaaagcagacccagatctttactacatattccgacaaccagccaggcgttctgatccaggtctatgagggagagagagcaatgaccaaggacaataacctcctgggccgatttgacctaactggcattcctcctgctcctaggggcgtgccacagattgaagttacattcgacatagacgccaatggaattctgaacgtgactgctatggataagagtaccgggaaagtgaacaaaattactattacaaacgataagggcagactgtcaaaggaggagatcgagcgaatggttctggacgcagagaaatacaaagctgaggacgaggtccagcgagaaaaaatcgcagctaagaatgcactcgagagttatgcttttaatatgaagtccgtcgtatcagacgagggcctcaagggcaaaattagcgagagcgataagaataaaatcctcgataagtgcaacgagttgctgtcgtggttggaagtgaaccagcttgcagaaaaggacgagtttgatcacaagaggaaggagttggagcagatgtgcaatccaatcattacgaagctctatcagggcggatgcacgggtcccgcttgcggaactggctacgttcctggtcggcctgccacggggcctaccatagaggaggtggactag

SEQ ID NO: 225767 - DNA, 1926 bp, synthetic construct
  misc_feature 1..1926: note = Description of Artificial Sequence: Synthetic coding sequence
  source 1..1926: mol_type = other DNA
atggctactgctaaaggcatcgccatcggaatcgacttaggtaccacgtattcatgtgtgggcgtgttccagcacggtaaggtagagataattgccaacgatcaggggaacagaactactccaagttacgtggcctttacggatactgagcgcctgatcggggatgctgctaaaaatcaggtcgccatgaacccacagaacacagtttttgatgccaaacgtttgattggcagaaagtttaacgacccggttgtgcaggccgacatgaaactctggccttttcaagtaattaatgagggcggaaaaccaaaggtgctcgtctcatacaagggagaaaataaagcgttctaccccgaggaaatctccagcatggtgctcacaaaattgaaagaaacggccgaagcttttcttgggcaccccgtcacgaatgccgttattacagttccggcttatttcaacgattcccagagacaagctaccaaagatgccggagtaattgccggtctcaatgtcttgagaatcattaatgagcccacagccgctgcaatagcctacggcctggacaaagggggtcagggcgagaggcatgttctcatcttcgacctgggaggcggtacgttcgacgtgagcatcctcactattgacgacggtatctttgaggtcaaggccaccgctggagatacacatcttggaggagaggactttgacaatcgtctggtgtctcacttcgtagaagaatttaaacgcaagcacaaaaaggacatatctcagaataaacgcgcagttcgcagacttaggacagcgtgtgagcgggcaaagcgcacgctcagcagtagtacacaggcaaatttagagattgactcactctatgaaggaatcgacttctatacatcaattacacgggcacggtttgaggagctctgcgctgatctctttcgagggacactggaaccagtcgagaaggcactgcgtgatgcgaagatggacaaggctaagatccatgatatcgttcttgtgggcggatctacacggatcccgaaagtccagagacttcttcaagattatttcaacggtcgagacctgaataagtcgatcaatcccgacgaagccgttgcctatggagccgctgtgcaagctgctatcctgatgggtgataagtcagaaaaagttcaggatttgctattgctcgacgtggctcccctgtctcttgggctggagacggcgggaggggtgatgaccgcgctcattaaacgcaactccactattccaactaagcaaactcagatctttaccacttattcagacaaccagccaggcgtactgatccaggtttacgaaggcgagcgagccatgaccaaagataacaaccttctagggcgattcgatcttaccgggatcccacccgctcccagaggcgtcccgcagattgaagtgacctttgatattgacgccaatggaattctaaatgtgacagcaactgacaagagtaccgggaaagtcaataagataactatcacaaacgacaagggaaggctgtcaaaggaggaaatcgaacgaatggtgttggatgccgagaaatataaggctgaggacgaggtgcagcgcgagaaaatcgcagctaaaaatgccctcgagtcttatgcgtttaacatgaaaagtgtagtgtccgatgagggcctaaagggaaaaattagtgagagcgacaaaaataaaattctggataaatgtaatgagctcctatcttggctcgaagtcaatcagttggcagagaaagacgaatttgaccacaagcggaaggagctcgaacagatgtgtaaccctatcattacaaaattgtaccagggcggatgcaccggtccagcctgtggcaccgggtatgtgcccggaaggcccgcaaccgggcctactatcgaggaagtggattag

SEQ ID NO: 225768 - DNA, 1926 bp, synthetic construct
  misc_feature 1..1926: note = Description of Artificial Sequence: Synthetic coding sequence
  source 1..1926: mol_type = other DNA
atggctacagccaagggcatagctattggaattgacctgggaactacttattcatgcgtgggggtctttcaacatggcaaggtggagatcatcgccaatgaccagggcaatagaacaaccccttcctatgttgcttttacagatacagaaaggctgatcggcgatgctgctaagaaccaagttgccatgaatccacagaacaccgtgttcgacgccaagcgcctaatcggacgcaagttcaacgaccccgtcgtgcaggcagatatgaaactctggccatttcaggtcatcaacgaggggggaaagccaaaggtgctagtttcatacaaaggagaaaataaagctttttatcctgaggaaattagcagtatggttctcacaaagctgaaagagaccgctgaagcgtttctggggcacccagtgacaaatgcagttatcaccgtcccagcatactttaacgatagccagaggcaggctacaaaagacgctggagtgattgcagggctgaacgtactgagaataatcaacgaaccgaccgccgctgccattgcctatgggctcgataaggggggtcaaggggagagacacgtgctgatatttgatttaggtggcggaacgtttgatgtgtctatcctgaccatagatgacgggatattcgaagttaaggcgacggctggcgatacgcatcttgggggagaggactttgacaataggctcgtatcccattttgtcgaggagttcaaacggaagcacaagaaagacataagccagaacaagcgggctgtgcgaaggctaagaaccgcatgcgaacgcgcaaaaagaactctctcgtcaagcacgcaagccaatctggaaatcgactcactttacgagggaattgacttctataccagcattactcgcgcaaggttcgaggagctatgtgccgacctgtttcgcggtacgctggaaccagtggaaaaggccctgcgagacgcgaaaatggacaaagccaagattcacgatatcgtgctggtgggcggaagcacccgaattcctaaagtccagagactgctccaggattatttcaatggaagagatctgaacaaatccatcaatcccgatgaagccgttgcatacggggctgctgtccaggctgccatactgatgggagataagagcgaaaaagtccaagatttgctcttgctggatgtggcacccctttccctgggccttgaaacagctggtggtgtcatgacagcacttatcaagcgcaacagcacgatcccaaccaaacagactcagattttcaccacctattccgacaatcagccgggtgtcctgattcaggtgtacgagggcgagagagctatgactaaagataataaccttctgggccgattcgatctcacaggcatccccccagccccaaggggcgtgccccaaatcgaggtgacctttgacattgatgccaacggcatcctcaatgttaccgccacagataaaagcaccgggaaagtgaataaaattaccatcaccaatgacaaaggcaggctatccaaggaagaaatcgaacgtatggtactggatgcagagaaatataaagccgaggatgaagtccaacgagagaagattgctgctaaaaacgctctagaaagctacgcgttcaatatgaagtctgtcgtttccgacgaaggtctgaaaggtaaaatatccgaatcagacaagaataaaatcctcgacaaatgtaatgaactgctgtcctggctggaggttaatcagctcgctgaaaaggatgagttcgatcacaaacgaaaagagctcgagcagatgtgtaaccccattatcacaaaactgtaccagggcggatgtaccgggcctgcctgcgggaccggatacgtaccagggagacccgcaacaggccctaccatcgaagaggttgattag

SEQ ID NO: 225769 - DNA, 699 bp, synthetic construct
  misc_feature 1..699: note = Description of Artificial Sequence: Synthetic coding sequence
  source 1..699: mol_type = other DNA
gccaaaggcattgcgattgggatcgatttgggaacaacatactcatgcgttggtgtttttcagcacggaaaggtcgagatcattgctaacgatcaaggcaatcgcactacgcccagttacgtggcattcaccgacaccgagaggctcattggcgacgctggggtgatcgccggactgaacgtgctcaggattatcaacgaacctactgctgccgctattgcctatggcttggacaaaggcggacagggcgagagacacgtgctcatcttcgacctcggagggggtacatttgatgtgtccatcttgactatagacgacggaatctttgaggttaaagccactgccggtgatactcatttgggcggtgaggacttcgataatagactggtatcccacttcgtggaagagttcaagcggaaacacaagaaggacatatctcagaacaagcgcgctgtcaggcggttgcggactgcctgcgagcgagccaaaagaaccctgagctcctcaacccaagccaacctggagattgactctctctacgaaggcattgatttctatacgagtatcacaagagctcgattcgaagagctctgtgccgatctgttccgtggcaccctggaaccggtcgagaagggagcccctcctgcaagtcctaggtgcagtggctgcttcagaaccacttcaatggacgtgatctag

SEQ ID NO: 225770 - DNA, 1926 bp, synthetic construct
  misc_feature 1..1926: note = Description of Artificial Sequence: Synthetic coding sequence
  source 1..1926: mol_type = other DNA
atggccacagcgaagggtatcgcaatagggattgatcttggcaccacctactcttgcgtgggcgtctttcaacacggcaaggtggagatcatcgcaaacgaccagggcaacaggaccaccccgtcctatgtagctttcactgacactgagcgactcatcggcgacgccgctaaaaatcaggtagctatgaaccctcaaaatactgtgttcgacgcaaagcggctaataggacgaaaatttaatgaccccgtcgttcaagcagatatgaaattatggcccttccaggtgattaacgagggaggtaaacccaaggtcttggtgtcatataagggagagaataaagcattctatcctgaggaaataagcagtatggttctgaccaagcttaaggaaacagccgaagcttttcttggtcatcccgtcactaatgccgtgatcacagtgccagcatactttaacgactctcagcgacaggccacaaaagatgcaggagttattgcagggcttaacgtgctcagaattattaatgagccaactgcagcagcaatcgcctacgggctagacaagggcggacagggagaacgtcacgtgctcattttcgatcttggcggtggtacttttgacgtttcaattctgaccattgatgacggtatctttgaggtgaaggccacagccggagatactcatttgggaggcgaggattttgataatcgcctggttagtcacttcgtggaggagtttaagcgaaagcataagaaggacatcagtcagaacaagcgtgcagtacgacgcctgcgcaccgcatgcgaacgagctaaacgcaccctgagctcttccacacaggctaatttagagatcgacagcctctacgaaggcatcgacttctacacgagcatcacgagagcacgcttcgaagagctgtgtgccgacctgtttcggggaactcttgaaccagtggagaaggctttaagagacgctaagatggataaggcaaaaatccatgacattgtgttggtgggagggtcaacccgaatacctaaagtgcagcgtctgctgcaggattattttaatggtcgggatctcaataaatccattaacccggatgaggccgtggcgtacggagctgcagtgcaggcagctatcctcatgggcgataagtctgaaaaggtccaggatctgttgctgctggatgtagccccattgtctctcggccttgaaaccgccggtggcgttatgacagccttgattaagcggaattcgactattcccactaaacagactcagatcttcaccacgtacagtgataaccagccaggcgtgctgatccaggtttatgagggtgagagggccatgacaaaagataataacctgctaggtcggttcgatctgacggggataccaccagccccaaggggcgtgcctcagatagaagtcacctttgacattgacgcgaatggcatcctcaacgtgaccgcgatggacaagtccacgggcaaggtgaataagatcactataaccaatgataaaggcagattgagcaaagaagagatcgagcgcatggttttagatgcggaaaaatacaaagcggaagatgaagttcagagagaaaagatcgccgctaagaatgctcttgagagttacgctttcaacatgaaatccgtggtctcggacgaagggctgaagggcaaaatctcagaatctgataagaacaagatacttgacaagtgcaatgaactcttgtcctggcttgaggtgaaccagctagcagagaaggacgagttcgaccacaagcgcaaggaactggaacagatgtgtaaccccatcattacaaaattgtaccaaggtggctgcacaggcccagcgtgcggcaccggatatgtcccgggtcgaccagcgactggccctaccattgaggaggtcgactag

SEQ ID NO: 225771 - DNA, 1599 bp, synthetic construct
  misc_feature 1..1599: note = Description of Artificial Sequence: Synthetic coding sequence
  source 1..1599: mol_type = other DNA
atggccaccgccaagggtatcgctatcggcatcgatctaggtaccacatatagctgtgtaggagtgttccagcacgggaaggtggagattatcgcaaatgaccaaggcaaccgcactaccccatcatacgtcgctttcaccgatactgaacggctcatcggtgacgccgcaaagaatcaagtcgcaatgaatccccagaacactgtgttcgacgctaagcgcctgatcggtcgaaaattcaacgatcctgtggtgcaggctgacatgaagctttggcctttccaggtaatcaatgagggcggaaagcccaaggtgctcgtgagttacaaaggcgaaaataaggccttctatccagaagagatcagctctatggttttaactaaactaaaagaaacggctgaagcatttctgggccaccccgtgacaaatgctgttatcactgttcctgcttacttcaatgactcccagcgccaagcgacaaaggatgccggtgttattgccggtctgaatgtgctcagaatcatcaacgagcctacggccgcagctatcgcatacggcttggacaagggcggacagggcgagaggcacgtgttgatatttgatttgggaggtgggacgtttgatgtatctattctgacaatagacgacggcatctttgaggtgaaggcaactgcaggcgatacacacctaggtggtgaagatttcgacaatcggctggtatctcactttgtcgaagagtttaagaggaaacacaaaaaagacatctctcaaaataagagagcagtacgcagacttcgcaccgcttgcgagcgagctaaaagaactctgagcagtagtacccaggccaacttggaaatcgattcactctatgaagggatcgatttttacacatctattactagagccagatttgaagagctgtgtgcagatttgttcagaggaaccctggaacctgtggaaaaagccctacgagatgcaaaaatggacaaggccaaaattcatgacatagtacttgtgggcggatccactcggatcccaaaggtccagcggctgttacaggactacttcaacggtcgagacctgaacaaaagcatcaatcccgacgaagcggttgcctacggcgcagcagtgcaagctgctatcctcatgggggacaagtcggaaaaggtgcaggatctgctccttcttgatgtcgcgccactgagtctgggactggaaacagctggaggcgttatgaccgctctgatcaagaggaacagtacaattcccactaaacagacccaaatcttcaccacgtacagtgacaaccagccaggcgtgcttatccaggtgtacgaaggcgagcgcgcaatgaccaaggataataatctgctgggtcgtttcgacctgactggcatccctccggctccccgaggagtgcctcagattgaagttacttttgatatcgacgcaaatggcatccttaacgtgactgccatggataagagtacaggcaaggtgaataagatcactataacgaatgataagggacgtctctccaaggaagagattgagcggatggtgctcgatgccgaaaaatataaggctgaagatgtctag

SEQ ID NO: 225772 - DNA, 699 bp, synthetic construct
  misc_feature 1..699: note = Description of Artificial Sequence: Synthetic coding sequence
  source 1..699: mol_type = other DNA
gcaaagggtatcgccattggaatcgatcttggaactacatattcctgcgtgggcgtgtttcagcacggcaaggtggaaatcattgccaatgatcaaggtaaccggacaacaccctcttacgtggcctttactgatacagagagacttatcggcgatgctggcgtcatagccggtctgaatgtgttaagaatcataaacgaacctacagctgcagcgattgcatacggcctggacaagggcggtcagggagaaaggcatgtgctcatatttgatttggggggtggcacctttgatgtttccatcctcacgatcgacgatgggattttcgaagtgaaagctacggcaggggatacacacctcggcggagaggacttcgacaatcggctcgtgagtcactttgtcgaagagtttaaacgaaagcacaagaaagacatatcgcagaataaaagggcggtgagacggcttcgtactgcctgcgagcgagccaagcggacactcagctcctcaacccaggcaaacttggaaattgattccctctatgagggaattgacttttatacttccatcactagagctaggttcgaggaactgtgtgcagacctgttccgaggcacattggaaccagttgaaaaaggtgctcctcctgctagcccccgttgtagcggctgcttccggaccacatctatggacgtcatctag

SEQ ID NO: 225773 - DNA, 1926 bp, synthetic construct
  misc_feature 1..1926: note = Description of Artificial Sequence: Synthetic coding sequence
  source 1..1926: mol_type = other DNA
atggccacagctaaagggatcgcaatagggattgacctcgggacaacctattcttgcgtcggcgtttttcaacacggaaaggttgaaataattgctaatgatcaaggcaaccggactactcccagctatgtggctttcacagacaccgaacggctgattggggacgcagcaaaaaaccaagttgcaatgaatccccagaacactgtcttcgacgccaagcgattgatagggaggaagtttaacgatcctgtggtgcaggccgacatgaagctgtggcccttccaggtgattaatgagggtgggaagccaaaggtgctagtatcctacaaaggggaaaataaggccttctatcctgaggagatctcgtcaatggtgctgacgaaacttaaagagacggctgaggcctttctcggccacccggtcacaaacgcagtcatcacagtgccggcttattttaacgacagtcagaggcaagcaactaaagatgcaggagtcatcgctggcctcaatgtcctacgaatcattaacgaaccgactgccgctgcaatagcttatgggctggacaaaggaggtcagggcgagcgccacgtgctgattttcgaccttgggggtggcaccttcgatgtgtctatcctcacgatcgatgacggcatattcgaggtgaaggccacagccggagatacacacctcggaggggaagacttcgataatcggcttgtgagccatttcgtcgaggaattcaagagaaaacacaaaaaagatatctctcagaacaaacgggcagtgcgaaggttgaggactgcttgcgaaagagcaaaaagaactttatcttcatccacccaagctaacttggagattgattcactatacgagggcatcgatttctacacaagtatcacacgcgcacgcttcgaagagctttgcgcagacctcttccggggaaccctggaaccagtggagaaagcccttagggatgccaagatggacaaagctaaaatacatgatatcgtgcttgttggcggaagtactaggattcccaaagtacagaggcttctgcaggactactttaacggacgcgatctgaacaaaagcatcaaccctgatgaggcagttgcatacggtgccgcagttcaagctgcaatcctcatgggcgataagtctgagaaggtacaggatcttcttttactcgacgttgccccacttagcttggggttagaaacggcagggggagtcatgactgccctgattaaacggaacagtacgattcctaccaaacagacacagattttcacgacttatagcgacaaccagcccggagtgctcattcaagtgtacgaaggcgagagggcgatgacaaaggataataacctgttgggcaggtttgacctcacaggcatcccccctgccccaaggggggtcccacagatcgaggtcacatttgacatcgatgcgaatggaattctgaacgtcactgctaccgacaaatccacaggcaaggtaaacaagatcaccatcaccaatgacaagggtcggctatcaaaggaagagatagagcgaatggtgcttgatgccgaaaagtataaggccgaagatgaggtacagcgcgagaaaatcgccgcaaagaatgccctggagagctacgcctttaatatgaaaagtgtggtgtccgacgagggcctgaagggcaagatcagtgagagcgataaaaataagattttggacaagtgtaatgagttgctcagttggcttgaagtaaaccaacttgcagagaaggacgaattcgaccacaagcgcaaggagctggagcagatgtgtaatcctataattactaagctctaccagggtggctgcaccggccctgcctgtggcacaggctacgtccccggaagacccgctaccggaccgaccattgaggaggtggattag

SEQ ID NO: 225774 - DNA, 1599 bp, synthetic construct
  misc_feature 1..1599: note = Description of Artificial Sequence: Synthetic coding sequence
  source 1..1599: mol_type = other DNA
atggcgaccgcgaagggtattgcgattggcatagacctcgggactacatacagctgtgtgggcgtgtttcagcatggtaaggtcgaaattatagccaatgaccaggggaatcgcaccacgcccagctacgtggcatttacagatacagaacgattgatcggtgacgctgcgaaaaaccaggttgccatgaatccgcagaataccgtctttgacgccaaaaggcttattgggaggaagtttaacgaccccgtggtgcaggctgacatgaagttgtggcctttccaggtgatcaacgagggcggtaagcccaaagttcttgtcagttacaaaggagaaaataaggccttttatccggaggaaatctccagcatggtgctgaccaagctcaaagaaaccgctgaagcctttctcggtcatcccgtgactaatgcagtgatcaccgtgcctgcctattttaacgactcccagaggcaagccactaaagacgccggtgtaattgcgggactaaacgtacttcggatcatcaacgaacctacagcagctgcaattgcctatggactggacaagggaggccagggcgaacggcacgtgctgatctttgaccttggtggcggaacttttgatgtttccattctgacgattgacgacggaatcttcgaggtcaaagctaccgccggtgatactcacctcggtggtgaagatttcgataatagactggtgtcccatttcgtcgaggagtttaagaggaagcacaaaaaggacatctcacagaataaacgggctgtgaggaggctgcgaactgcttgcgaaagggccaagaggaccctgtcatcctccacccaagcaaacctggaaatcgactcactgtacgagggaatcgatttctatactagtattacgagagccagattcgaagaactctgcgcagatctgttccgaggaaccctcgagcccgtcgagaaggccttgcgcgacgccaagatggataaagctaagatccacgacattgtcctggtgggaggcagcaccaggattcctaaagttcagcgcttactgcaagactactttaatgggagagacttaaacaagagcatcaatccagacgaggcagtggcctacggggcagctgttcaggcagctatactcatgggcgacaagtccgagaaagtccaggacctattgttactcgacgtcgctccgctgagcctggggcttgaaaccgcaggtggtgtgatgactgctctgataaaacgaaactccactatacctaccaaacaaacccagatttttacaacatactcagataatcagcctggggtgttgatacaggtgtacgaaggagaaagggctatgaccaaagacaacaacctactgggtaggttcgacttgaccggcattcctccagcccctagaggtgtccctcaaattgaggtgaccttcgatattgatgccaatgggatcctcaatgttacagccatggataagagcaccggtaaagtgaacaaaataacaataactaatgacaaggggcgtctcagcaaggaggagatcgagaggatggttcttgacgctgagaagtacaaggctgaggacgtgtag

SEQ ID NO: 225775 - DNA, 1599 bp, synthetic construct
  misc_feature 1..1599: note = Description of Artificial Sequence: Synthetic coding sequence
  source 1..1599: mol_type = other DNA
atggctacggccaagggcatagccatcggcatcgatctgggaacgacatacagctgcgtgggggtgtttcagcatggtaaggtggaaattatagcaaatgatcaggggaatcggacaaccccctcttacgtggctttcaccgacaccgaacgactgatcggagacgccgctaaaaaccaggtcgccatgaatcctcaaaacactgtgttcgacgccaagcggctaattggtcgcaaattcaacgaccctgttgtgcaggcagacatgaagctgtggccctttcaggttattaacgagggcggaaaaccaaaagtgctggtatcatataagggcgaaaataaggcattctaccctgaggagatttcgagcatggtgctgaccaaattgaaggagacagcagaagccttccttggccaccccgtcacaaatgccgtcattactgtcccagcatacttcaatgattcgcagcggcaggcaacaaaagacgccggtgtgatcgctggtctaaacgtcctgcgcattattaacgagcctacagcagctgccattgcctatgggctcgacaagggagggcagggcgagcggcacgtactgatctttgacttgggtgggggaactttcgatgtgagtatccttacaatcgacgacgggatctttgaagtgaaggctaccgcaggagacacacacctcggcggagaagacttcgataacagacttgttagtcactttgtagaagaatttaagcgcaagcataagaaagatattagccagaataaacgcgcagtgagacggctgcgaaccgcctgtgaacgagccaagcgtaccctgtcaagctcaacacaggccaacttggaaattgattcgctatatgaaggcattgacttctatacctccatcacccgggctcgatttgaggagctctgcgcagatctctttagagggacactggaacccgtggaaaaagcactgcgtgacgcaaaaatggacaaggcgaagatacacgacattgtcctggtggggggtagcactaggattcctaaggttcagagactattacaggactatttcaatggcagagacctcaacaagtcaatcaaccccgacgaggcagtggcctatggcgcagccgtacaagccgctatactgatgggggataaatcagagaaggttcaggatctcctgctgttggacgtggcaccactgagtctgggacttgagaccgctgggggagttatgactgcccttataaagaggaactcgaccatccctactaagcagacacagatttttacaacctacagcgacaaccagccaggcgtccttattcaggtctatgagggtgaacgcgcaatgacaaaagacaataacttgctgggtcggttcgacttaaccgggatccctccggctcccaggggcgtgccacagatagaggtcactttcgatattgacgccaacgggattctgaacgtcaccgcaactgacaagagcaccggcaaggttaataaaatcacgatcacaaatgacaaaggcagactctctaaggaggaaatagagcggatggtgttggacgcagagaaatacaaggctgaagacgtgtag

SEQ ID NO: 225776 - DNA, 1926 bp, synthetic construct
  misc_feature 1..1926: note = Description of Artificial Sequence: Synthetic coding sequence
  source 1..1926: mol_type = other DNA
atggcgacggcgaagggcatcgccattggcattgatcttggcaccacctactcctgcgtcggagtctttcaacacggaaaggtggaaatcattgctaacgatcagggcaacaggactacccctagttatgtcgcatttactgataccgagcgactgatcggagacgcagctaaaaaccaggtggctatgaacccccagaatacggtgtttgacgccaaaaggctgatcggacgcaagttcaatgatcccgtggtccaggcagatatgaaattgtggccatttcaggtaattaatgaggggggaaagcctaaagtcctggtttcatataagggcgaaaataaggcattttatccagaggagatcagttccatggtccttacgaagctgaaggagaccgccgaagcgttcctgggtcatcccgtgaccaatgctgtaattaccgtaccagcctattttaatgatagtcaaaggcaggcaacaaaagatgctggagtgatcgctggccttaacgtgttacggataatcaatgagcctacagcggctgcaattgcttatggcttggacaaaggcggtcagggggaaaggcatgttttaatattcgatctcggcggtggcaccttcgacgtgtccattctgactattgacgatggcatctttgaagtgaaggcgaccgctggcgacacgcacttgggcggagaagactttgataaccgcttggtgtcacacttcgtggaggaatttaaacgcaagcacaagaaggatatcagtcagaacaagcgggcagtacgcaggctgcgcaccgcctgtgagagggctaaacggacattatcgagcagcacccaggcgaatctcgagatcgacagtctgtatgaagggattgacttctacacctccataacacgagcgaggtttgaggagctctgtgcagacttgttccgcggaacgctcgagcctgtggagaaggcccttagggatgccaagatggacaaagccaagatccacgacatcgtgctagtgggcggaagtacccgaatccccaaagttcaacgcctgctgcaagactactttaacgggcgtgatctgaataagagtattaacccggacgaggccgtcgcttacggcgcagccgtccaggccgctatactgatgggcgacaagtcagaaaaggtccaggatctactcctgctggacgtcgcccctttaagtttagggctcgagaccgccggaggggtgatgacagccctgatcaagaggaacagtacaatcccaacaaaacaaacccagatcttcactacctattctgacaatcagcctggagtccttattcaggtctacgaaggagaaagggcgatgactaaggataacaacctgctgggaaggttcgacctgacaggaatacctccagctcctcgcggtgtgccccagattgaggttacctttgatattgatgctaatggtattcttaacgttacggccatggataagagtacagggaaggtgaacaaaataactataaccaacgataagggtcgcctgtctaaggaggaaatcgagcgcatggtccttgatgccgaaaaatataaagcggaggacgaggtgcagagggaaaaaattgcggcaaaaaatgctctggaatcctacgcgtttaacatgaaatcagtcgtatcagacgaaggtctgaaaggaaaaatctccgaatccgataaaaacaagattctagacaagtgcaatgagctgctctcttggttagaagtaaatcagctcgccgaaaaagatgagttcgaccacaagaggaaggagttggaacaaatgtgcaacccaatcattaccaaactctatcaaggaggatgtaccggcccagcttgcggaactggttacgtacccggtcggccagctacagggcctaccatcgaggaggtcgactag

SEQ ID NO: 225777 - DNA, 699 bp, synthetic construct
  misc_feature 1..699: note = Description of Artificial Sequence: Synthetic coding sequence
  source 1..699: mol_type = other DNA
gctaaaggaatcgccattggtatcgatctcggcaccacctactcctgcgtcggcgtgtttcaacatggtaaagtcgagattattgctaacgaccagggcaatcgcacgacaccgtcttacgtggcctttaccgacaccgaacgcctcattggagatgccggagtaatcgccggtctgaacgtgctgagaatcatcaacgaaccgactgcagccgcaatcgcctatgggttggacaagggagggcagggcgagcgccatgttctgatcttcgatttaggaggaggcacctttgacgtttccattttaactatcgatgacgggattttcgaagtgaaggcaaccgccggtgacacccacctcggcggagaggatttcgataatagactagtgtctcacttcgtggaggagtttaaacgaaaacataagaaagatatttcacagaataaacgagccgtccgcaggctgcgcacagcctgcgaacgggctaaaagaaccctcagctcctctacacaggccaacctcgagattgacagtctgtacgaggggatcgacttctacacctccattacacgagcacgcttcgaggagctttgtgccgatctctttagaggaactttggagcccgtggaaaagggagctcctcccgcatcccccagatgctccggatgttttaggaccacgtctatggacgttatttag

SEQ ID NO: 225778 - DNA, 699 bp, synthetic construct
  misc_feature 1..699: note = Description of Artificial Sequence: Synthetic coding sequence
  source 1..699: mol_type = other DNA
gccaaagggatcgctatcggtatcgacctcggaaccacatatagctgtgttggtgttttccagcatggcaaggtggagatcattgctaacgaccaaggtaataggacaacaccctcttatgtggctttcactgatacagagcgtctcataggggacgcgggtgtcatagcagggctgaacgtcctcagaattatcaatgagcccacggcagcggctatagcttatggtcttgataaaggcggacagggcgagaggcacgtgctgatttttgacctggggggaggaacattcgacgtcagtattttgactattgatgatgggattttcgaagtcaaggcgactgcgggagacacccacctgggaggggaagactttgacaatcgcctcgttagtcacttcgtagaggagtttaagcgaaagcacaaaaaagatattagtcagaacaaaagagctgtaaggagactgagaactgcatgtgagcgagctaaaaggactttgtcttcgtcgacacaggcaaatctagagatcgacagcctctacgaagggattgacttctacaccagcatcacaagggcccgttttgaagagctctgcgccgatctgttcagagggacactcgaacctgtggagaaaggggctcctcccgcttctccccgttgctcaggatgtttccgcacaacatccatggacgtgatttag

SEQ ID NO: 225779 - DNA, 1926 bp, synthetic construct
  misc_feature 1..1926: note = Description of Artificial Sequence: Synthetic coding sequence
  source 1..1926: mol_type = other DNA
atggccacagccaagggtatcgccattgggattgatcttgggaccacctacagctgtgtgggagtgtttcaacatggcaaggtagagatcatcgcaaacgaccaaggaaatcgcacaactccttcttacgtggcttttactgatacagagagactcatcggcgacgcagctaagaaccaggtagcgatgaacccgcaaaatacagtgttcgacgctaaaagattgattggccgtaagttcaacgatcccgtcgtgcaagcagatatgaaactctggcctttccaagttattaacgagggcggaaagccaaaagtgctggttagttacaagggcgagaacaaggctttctaccctgaggagatttcttcgatggttttaactaaactgaaggaaaccgcggaagcctttctcggtcaccccgtaaccaacgccgtgattactgtgccagcctacttcaatgactcccaacggcaggctactaaagacgccggtgtgattgccggattgaacgtgctgagaattataaacgagcctactgccgcagccatagcgtatggtctcgataagggaggccagggagagcgacacgttctgattttcgatctgggcggaggtacattcgatgtgtccattttaaccatcgatgacggtatctttgaagtcaaggccacagctggagatacgcatttggggggtgaggatttcgataaccgtctcgtgagccattttgtcgaagagttcaagcggaagcataagaaggacatcagccagaacaagcgcgcagttcgccgtttacgcaccgcttgcgaaagagccaagaggacgctgtcttccagtacacaggcaaacttggagattgactcactctacgaaggcatcgacttctacacaagcataacaagggcccgttttgaagaactttgtgcggatctttttaggggcacactggaacccgttgaaaaagctctgcgggatgccaagatggataaggccaaaattcacgacatcgtgctggttgggggatcaacaagaatacccaaagttcagcgattgcttcaggactactttaacggaagggatctgaataagtccataaatcctgatgaggccgtggcctacggcgcagcagtgcaggccgctatcctgatgggcgacaaatccgagaaggttcaggacctgctactgctcgatgttgctccgctcagtttgggactcgagacagcgggaggcgttatgacagctctgatcaagcgaaattccaccattccaactaaacagactcagatcttcacaacatactccgataaccagccaggcgtgctcatccaggtttacgagggcgaaagagctatgactaaggacaataatttgctcggcagattcgatctcaccggcatcccaccagctccgcgaggggtaccccagatcgaagttacatttgacatcgacgctaacggcatcctgaacgtgaccgctatggacaaatctacagggaaagtgaacaaaataacaatcacaaacgataaaggtagattgtctaaagaagaaatcgagcggatggtgctcgacgcagagaagtacaaagcagaggacgaagttcagagagagaagattgcagcaaagaatgcgctggagagttacgcattcaatatgaagtcagttgtgagtgatgaaggcctcaaggggaagatcagtgagtctgataagaataagatactggacaagtgcaacgagctgctgagctggctggaagtcaaccagctggccgagaaagatgaattcgaccataagagaaaggagctggaacagatgtgcaaccctatcatcacaaagctctatcagggagggtgtactgggccagcatgtgggacaggatacgtccctggcaggcctgccaccggaccaacaattgaggaggtggactag

SEQ ID NO: 225780 - DNA, 1920 bp, synthetic construct
  misc_feature 1..1920: note = Description of Artificial Sequence: Synthetic coding sequence
  source 1..1920: mol_type = other DNA
atgtctgcacgaggcccagcaatcggaattgacttgggtacgacatactcctgcgtaggggtcttccagcatggaaaggtggagattatcgccaatgatcagggcaatagaactaccccctcttacgtcgctttcacagatactgaacgcttgataggagacgccgctaaaaatcaagttgccatgaatcccacaaacaccatatttgatgctaagcgtctgattggccgtaagtttgaagacgccacagttcagagcgacatgaaacattggcctttccgtgtcgtatccgaaggcggaaagcctaaagtgcaggtggaatataagggcgagacaaaaaccttttttcctgaagagatttcgtccatggtccttaccaagatgaaagaaattgccgaggcgtacctgggaggaaaagtacacagcgctgtaattactgttcccgcatactttaacgattcacagagacaagcaactaaggatgcagggactattaccgggctgaatgtgcttcggattatcaatgagcctactgctgcggcaattgcatatggtttggacaagaaaggctgcgcagggggtgagaagaacgttctaatttttgatctggggggtgggacattcgacgtaagcatcttaactatagaagatggtatcttcgaggtgaaatcgacagctggagacacccatttgggaggagaggactttgacaaccgaatggtgagccatctggccgaagagttcaagcgaaaacataagaaggacatcggacctaataagagagccgtgcgtaggctgcggacagcgtgtgagagggcaaaacgcaccctgtccagttcgacacaggctagcatcgagatcgattcactctacgagggcgtggatttttataccagcataactcgagccaggtttgaagagttgaatgccgacctttttcggggaacactcgagcccgtggaaaaagctttacgggatgctaagctggataaaggccagatccaggaaattgtgcttgtgggaggaagcacccggatcccaaagatacagaaactcctccaagactttttcaacggaaaggaacttaataagtccataaatccggacgaagccgttgcctatggcgcagccgtccaggccgctatccttattggcgataaaagtgagaacgtccaggacctattgctcctagacgtgacacctctgagcctcgggattgaaaccgcagggggtgtgatgacccctttgattaagagaaacacgactataccaactaaacaaacacaaactttcaccacgtattccgacaaccagagctctgttttggttcaggtctacgagggcgagcgggctatgaccaaggataacaatctgttaggaaaattcgaccttacagggatacccccagcccctaggggggtgccacagatagaggtaactttcgacatcgatgccaatgggatcctgaatgtgacagccgcagacaagtcaacagggaaggagaataaaattacaattaccaatgacaaagggaggctttcaaaagacgacatcgaccgtatggtacaggaggcagagcgatataagtctgaagacgaggccaatcgagatagggtcgccgctaaaaacgccctggaaagctacacgtataatattaaacaaacagtagaggatgaaaagctgcggggtaaaatatcagagcaagacaagaataagattctggacaagtgccaagaggtgatcaactggctagataggaatcagatggcagagaaggacgagtacgagcacaaacaaaaagagctggagcgagtatgtaacccaatcatctccaaactctatcagggcggacccggtggcggttctgggggtgggggtagtggcgcatccggcggaccgaccattgaagaggtcgactag

SEQ ID NO: 225781 - DNA, 1920 bp, synthetic construct
  misc_feature 1..1920: note = Description of Artificial Sequence: Synthetic coding sequence
  source 1..1920: mol_type = other DNA
atgtctgcaagaggtcccgctatcggtatcgacttgggtacgacatactcgtgcgtgggagtctttcaacatggaaaagtggagatcatcgcaaacgatcagggcaacagaaccaccccatcctacgtcgcatttaccgacaccgaaaggctgatcggagacgccgctaagaatcaggtcgccatgaatcctactaataccattttcgatgctaaaagactaattggtaggaagtttgaggatgccaccgtccagagcgatatgaaacactggcctttccgcgtagtgagtgaagggggaaagcccaaagtgcaagttgagtacaaaggcgaaacaaaaactttttttccagaggaaattagctctatggtcctgacaaagatgaaagaaatcgctgaagcttacctggggggaaaggttcacagtgccgttatcaccgtcccagcttattttaacgatagccagcgacaagctacaaaggacgccggtaccatcacagggcttaacgtactcaggatcataaatgagcccactgccgctgccattgcctacggattggataaaaaaggctgcgccggtggcgaaaaaaacgtgctcatattcgacctcgggggaggcacttttgatgtgtccatcctgaccattgaagatggcatttttgaggtgaaatccactgccggagatacacacctgggcggtgaggatttcgataataggatggtctctcatctggcggaggagtttaagaggaagcataagaaggatataggtcccaacaagcgcgcagtgagacgactgaggactgcctgtgagcgagcaaaacgtactttatcaagttccacccaagcctctattgagatagatagcctgtatgagggcgtggatttctacacttccatcacgagggctaggtttgaagagctgaatgctgatttattcaggggaacactcgagcccgtcgaaaaggctcttagagacgctaaactcgataaaggccagatacaagaaatcgtcctggtgggcggaagcacgaggatccccaaaatacagaaactgctccaagatttctttaatggtaaggagctgaacaagtccatcaaccccgatgaggctgtcgcctacggagccgctgtgcaggcggctatacttattggagataagagcgaaaacgttcaagacctgctgctgctcgacgttactcctcttagcttgggcatcgaaactgctggcggagtgatgacccccctcataaagcgcaacaccactatcccaaccaaacagacacagacctttacaacttatagcgacaaccagtctagcgtactcgtgcaggtatatgaaggagaaagggctatgaccaaggataacaacctgctcggcaaattcgatctcactggtatccctcccgcaccccgtggcgtgccacaaatcgaggtcaccttcgatatcgacgctaacgggatcctcaatgtgacagctgccgacaagtctaccggcaaggagaacaaaatcaccataacgaatgacaaagggcgtctgagcaaggatgacatcgacaggatggtgcaagaagcagagaggtacaaatccgaggatgaggctaatagagaccgtgtcgccgcaaagaatgctttggaatcgtatacatataatattaaacagacggtcgaagacgaaaagttgcgcggaaagatttcagagcaggataaaaataaaatcctagataaatgtcaggaagtgattaattggctcgacagaaaccagatggctgagaaagatgagtatgagcataaacagaaggaactggaacgcgtgtgtaacccgattatatctaagttgtatcaggggggaccgggaggaggatctggtggaggtggaagcggcgcaagtggcggacccacgatcgaggaggtggattag

SEQ ID NO: 225782 - DNA, 1242 bp, synthetic construct
  misc_feature 1..1242: note = Description of Artificial Sequence: Synthetic coding sequence
  source 1..1242: mol_type = other DNA
atgtctgccaggggtcctgctattggaatcgatctgggcaccacttattcctgtgtgggcgtgttccaacacggcaaggtggaaatcattgcaaacgaccagggcaatcgaacaaccccatcttacgtcgccttcactgacactgagagacttatcggagacgctgctaaaaatcaggtggctatgaaccccaccaacacaattttcgacgcaaagaggttgatcggcaggaagttcgaagagctgaacgcagatctgttcaggggaactctggagcccgtggagaaggctctgcgggatgccaagttggacaagggccagatccaggaaattgttctcgtaggcggaagtactagaatccctaaaatccagaaactcctgcaggatttcttcaacggcaaggaactaaacaagtcaatcaatccggatgaagcagtggcatatggggctgcagtccaggccgctattctaatcggagacaagagcgaaaatgtgcaggacctgctgctcctggatgtcacacctttgagcctagggattgaaactgctggcggtgtgatgacgcccctgatcaagagaaacaccaccattccgacaaagcagacccaaactttcactacttattctgataatcagtccagcgtgttggtgcaggtatacgagggcgaacgggctatgacaaaggacaataacctgctcggaaagttcgatttgacagggattcctcctgccccaagaggagtgccacaaattgaagtaaccttcgatatcgatgctaacggcatcttgaacgtaactgcagcagataagtcaacgggcaaggagaacaagattaccataaccaacgataagggcagactttctaaagacgatatcgatcggatggtgcaggaggcagaaagatacaagtcagaagatgaagccaaccgggaccgtgttgcggctaagaatgccttggagtcctatacttataacatcaaacagactgtggaggacgagaagctgagagggaaaatttcggaacaggataagaacaaaattctggacaagtgccaggaggttatcaattggcttgaccggaatcagatggctgagaaagacgaatacgagcacaagcagaaggaacttgagagggtgtgtaatcctataatcagcaagctgtatcagggtgggcctggtggaggatcaggagggggaggatccggcgctagtggcggaccaactatcgaggaagttgattag

SEQ ID NO: 225783 - DNA, 2523 bp, synthetic construct
  misc_feature 1..2523: note = Description of Artificial Sequence: Synthetic coding sequence
  source 1..2523: mol_type = other DNA
atgtctgtggttggcatcgatcttggcttccagagctgctacgtggctgttgccagagccggtggcattgagaccatcgccaatgagtactctgatcggtgcacccccgcatgtatcagtttcggccctaagaatcgaagcatcggtgcggcagccaagagccaagtcatctccaatgccaagaatactgtgcaggggttcaaacggttccacgggagggccttcagtgatccattcgtagaagctgagaagtctaatctggcctacgatatcgtgcagctgcctactggactgacaggcataaaggtcacctacatggaggaagagaggaatttcaccacagagcaagttaccgccatgctcctcagcaaactgaaagagacagcggagagtgtgttgaaaaaacctgtcgtggattgtgtggtcagtgtgccctgtttttacaccgatgcagagcgacgctccgtgatggacgcgactcagatcgctgggctgaattgcctgcgtttgatgaatgagacaacagcagttgccctggcatacggcatctacaagcaagacctccctgcactcgaggaaaaacctcgaaacgtggtttttgtggatatgggtcacagtgcctaccaggtcagcgtttgcgccttcaatcgcggaaaattgaaagtgctagctactgccttcgatactactttggggggtagaaaattcgatgaagtcttggtgaatcatttctgtgaggaatttggaaaaaagtacaagctcgacattaagagcaagataagagcacttttgagactgagtcaagagtgtgaaaagttgaagaaattgatgagcgccaatgcttctgacctgccgctgagcatagagtgttttatgaatgatgtggatgtgagtggtactatgaaccggggtaaatttctcgaaatgtgcaacgatctcctggccagggttgagccacctctccggagtgtgctcgagcaaactaagctcaaaaaggaggacatctacgctgtcgagatcgtgggcggtgcgaccagaatacccgctgtgaaggagaagatcagtaaattcttcgggaaagaattgagtactaccctcaatgctgacgaagccgtgacaagagggtgtgcactgcaatgcgcaatcctcagtcctgccttcaaagtcagggagttctccatcactgatgtggtgccttatcctatctcccttaggtggaactctcccgcagaggaaggatcttctgactgtgaagtattctctaagaaccatgctgccccattctctaaagtgctgaccttttaccgcaaggaacctttcactttggaggcttactatagcagtccccaagatctcccctatcctgaccccgctattgctcagttttctgtgcagaaagtcactccgcagtctgacggctccagtagcaaggtgaaagtgaaggtccgtgtcaatgtacacgggattttctctgtatcctctgcctctctggttgaagtacacaagagtgaagagaacgaagagcctatggagaccgatcaaaacgccaaggaggaagaaaagatgcaggtcgaccaagaagagccccacgtcgaggaacaacagcagcaaactcctgccgaaaataaggccgagagtgaagaaatggaaacaagccaagctgggtccaaggataaaaagatggaccaaccccctcaggccaagaaagccaaggtgaaaacgtcaacggtggacctgccaattgaaaatcaacttctgtggcagatcgacagggaaatgttgaacctgtatatagagaacgagggcaagatgattatgcaggacaaacttgagaaagagagaaatgatgcaaagaacgcagtggaggaatatgtatacgaaatgcgggataagcttagcggggaatatgagaaattcgtgtcagaagacgaccggaattctttcaccctgaaactcgaagacaccgagaattggctgtacgaggatggagaggaccagccaaagcaggtttatgtggacaagctcgcagaattgaaaaacctggggcaaccaatcaaaattagattccaggaatcagaagagcgaccaaagctgtttgaagagctggggaagcagatccagcaatacatgaagattatctcgtctttcaagaacaaagaggatcagtacgatcacctggatgccgctgacatgaccaaggtggagaaatctaccaacgaggccatggaatggatgaacaacaagctcaatctccagaataaacagtccctcaccatggaccctgtcgttaaaagtaaggagatagaagcaaaaattaaggaactgacgtcgacctgcagccccattatttccaaacctaagcctaaggtcgagcccccaaaggaagagcagaagaatgcagagcagaacggtcccgtcgacggccaaggagataacccgggaccccaggctgccgagcaaggaacagatactgctgtccctagtgatagtgataagaaactcccagaaatggatatagattag

SEQ ID NO: 225784 - DNA, 447 bp, synthetic construct
  misc_feature 1..447: note = Description of Artificial Sequence: Synthetic coding sequence
  source 1..447: mol_type = other DNA
atgtcagtagtgggtatagacctcggatttcagtcatgttacgtggctgtcgcaagggccggaggtatagagaccatcgcgaacgagtactccgatcgatgcacacccgcttgcatctcctttggtccgaagaatcggtccattggtgccgcagccaagtctcaggtcatttctaatgccaagaatactgtgcagggattcaaacgtttccacggcagagccttctcggacccttttgtagaggcagagaaatcaaacctagcttatgatatagtccagttgcctacaggcctcaccggcatcaaggttacttacatggaagaagagcagaacggcccagttgatggccagggtgataatccagggcctcaggccgcagaacagggcacagatacggccgtccccagcgattctgataagaaattacctgaaatggacattgattag

SEQ ID NO: 225785 - DNA, 1422 bp, synthetic construct
  misc_feature 1..1422: note = Description of Artificial Sequence: Synthetic coding sequence
  source 1..1422: mol_type = other DNA
atgtcagtggtagggatagacctgggctttcaaagttgctacgtagcagttgcgagggccggaggtatcgagactattgctaatgaatactctgatcgttgcacacctgcctgtatttcattcgggccaaaaaatcgaagcatcggcgcagctgcgaagtcacaagtgatctccaacgctaaaaacaccgtgcagggttttaaacgattccatggtcgggcattttccgatccatttgtggaggcagagaaatccaatttggcttacgacattgtgcagttacctacaggtctgacgggcatcaaggtcacatatatggaggaggaacgcaacttcacaaccgagcaggtcacagctatgttgctatcgaagcttaaagaaaccgccgaatccgttctgaagaaaccagtcgtcgactgcgtcgtctcagtcccttgcttctacactgacgccgaaaggcggtctgtgatggatgccactcaaattgccggattgaattgtttgcggcttatgaatgagaccacggcagtcgctctggcttatggcatctacaagcaagacctccccgctttggaggagaaaccaagaaacgtagtctttgtcgacatgggccacagcgcctaccaggtctctgtgtgtgcattcaatagaggaaaactaaaggtgctggctacggccttcgacactacattaggtggacgcaaatttgacgaagtgctagttaaccatttctgcgaagagttcgggaagaagtacaaactcgatataaagtccaagatacgtgcattgctgagactctctcaggaatgcgaaaagctcaaaaaattaatgagcgccaacgccagcgaccttcctctgtctatagagtgtttcatgaacgacgtcgacgtgagtgggacaatgaacaggggtaagtttctggagatgtgcaatgatctgctagcgagagtcgaaccacctctgcggagcgttttagaacagaccaaactcaagaaggaagatatctacgcagtggaaatcgtcggcggtgccacgagaatcccggcagtgaaggaaaagatatccaagttctttggcaaggagctttccaccaccctgaacgccgatgaggctgtcacgcggggatgtgctctgcagtgcgccattctatccccggctttcaaagttagagaattttccattaccgatgtcgtgccctaccccataagtctacgttggaatagtcctgccgaagagggatcatccgactgtgaagtcttctcaaaaaatcatgccgctcctttttcaaaagtgctgaccttttatcggaaggagccgttcactctcgaagcctactacagctctcccggatttgccctctctaggagctgctattccatcataaagtcacttctgtctctgatggccccagtgcaaaagtag

SEQ ID NO: 225786 - DNA, 1965 bp, synthetic construct
  misc_feature 1..1965: note = Description of Artificial Sequence: Synthetic coding sequence
  source 1..1965: mol_type = other DNA
atgaagctgtccctggtggcagccatgttgctgctgctgtctgccgcaagggccgaagaggaagacaagaaggaggacgtcggcacggtcgttggtatcgatctcgggaccacttatagttgtgtgggggtattcaaaaatggtagagtggagattattgctaatgatcagggaaatcggatcaccccctcttatgtagccttcacaccagagggagagcggctgatcggagatgcggctaagaatcagctgacctccaaccccgaaaatacagtgttcgacgctaagcgcctcatcggcagaacatggaacgatccaagcgtgcagcaggatataaagtttctgcccttcaaggtggtagaaaagaagaccaagccctacatccaagtggacatcgggggtggacaaacaaaaactttcgccccagaggagatatccgctatggtgcttaccaagatgaaggagacagcagaggcctacctgggtaagaaagtcacccatgctgtggtcactgtgcccgcttacttcaatgacgctcagcgacaggctactaaggatgccggaactatcgctgggctgaatgttatgagaattattaatgaacctaccgccgcagctattgcctatggcctggataagcgtgagggtgagaagaacatcctagtgttcgatctcggtgggggtacattcgacgtcagtttgctcacgatagataatggcgtcttcgaggtcgtagccactaacggagatacacatctgggaggcgaggactttgaccaacgcgtcatggaacattttattaagctgtataagaagaagactgggaaagacgtgagaaaggataaccgtgcggtgcagaaactccgtagggaagttgaaaaggcaaagagagccctgagctctcagcaccaggctcgcatcgaaatcgagtctttttatgaaggggaagacttttcagaaacccttactagagcgaagttcgaggagctgaacatggacctttttaggtccaccatgaagccggtacagaaggtcctcgaagattctgatcttaaaaagtcagacattgacgaaattgtgctagtggggggatcaacaaggatcccaaagatacagcagctggtcaaggagtttttcaacggtaaggagccctcccgagggatcaaccccgatgaagccgtggcctacggagccgcagtgcaagctggggtgctgagcggcgaccaggatacgggggacctggtgcttctggacgtgtgcccccttacgctgggcatagagactgtcggcggagtaatgaccaagctcattccaaggaacacagtggtccctactaagaagagccagatctttagtacagcaagtgacaaccagccaaccgtaacaattaaggtgtacgaaggtgaacgcccattgactaaagataaccacttgctcggtacgtttgacctgacagggattccacccgctccaaggggagtgccacagatagaggtgacctttgagatagatgtgaatggcatcctcagggtgaccgccgaggacaagggaaccggaaataagaataagattactatcactaacgatcagaaccgcctcacgccagaagagatcgaaagaatggtcaatgatgccgaaaagttcgcagaggaagataaaaagctgaaggagaggatagatacgcggaacgagcttgagtcctatgcttatagcctcaaaaatcagatcggggacaaggaaaaactcggcggaaaactctccagcgaggataaagagacgatggagaaggcagtagaggaaaaaatagagtggctggagagccaccaggatgccgacatagaggatttcaaggcgaagaagaaagagttggaagagatcgtgcagcctataatatcaaagttatacggcagtgcagggcctcctcctactggggaggaggacactgctgagaaggacgaactgtag

SEQ ID NO: 225787 - DNA, 837 bp, synthetic construct
  misc_feature 1..837: note = Description of Artificial Sequence: Synthetic coding sequence
  source 1..837: mol_type = other DNA
atgaaactgagcctggtagctgcaatgctgctgttgctctctgcagctagagcggaagaagaggacaagaaagaggatgtgggcacagtggtaggaatcgatctcggtacaacttattcttgtgtgggcgtgttcaagaacggtagggtggagattatcgccaatgaccaggggaacaggattactccgagttacgtggcattcaccccagagggggaacgcctcatcggggatgctgctaagaatcagctgacgtccaaccctgaaaacactgtgttcgatgcaaagaggctgatcggacgtacttggaatgacccgagcgtgcagcaggacataaaattcctgccgtttaaggtcgtggagaagaaaacaaaaccttacatccaagtggatataggcggaggccagacaaagaccttcgcgccagaagaaatcagcgcaatggtgttgaccaagatgaaagagaccgctgaagcatatctgggaaagaaggtgacgcatgctgtggttaccgtacccgcatattttaatgatgcccagcggcaggcaaccaaggacgccggaactattgcgggactgaatgttatgcggattatcaacgagccaaccgctgcagccatcgcatacggactcgacaagcgcgagggcgaaaagaatattctggtgtttgatctaggcggagggaccttcgatgtgtctctcctcacaatcgataatggggtgtttgaagtagtggctacgaatggtgacacccacctcggaggcgaggacttcgatcagagagtcatggaacacttcatcaagctatacaagaagaagactttccttagaccatag

SEQ ID NO: 225788 - DNA, 1932 bp, synthetic construct
  misc_feature 1..1932: note = Description of Artificial Sequence: Synthetic coding sequence
  source 1..1932: mol_type = other DNA
atgcaggcccctcgtgaactcgccgtgggaatagacttgggcaccacctactcctgcgtcggcgtgtttcagcagggacgtgttgaaattctggctaacgatcaagggaacaggacgaccccatcttatgtggcctttacagacacagagcggcttgttggggatgctgccaaaagtcaggcggcactcaatccacataacacagtcttcgatgctaaacgcctgatcgggagaaaattcgctgatacgacggtgcagtccgacatgaagcactggcctttcagagtagtgagtgagggtgggaagcccaaggtccgagtttgctatcgaggagaagacaagacattttatcccgaagaaattagctccatggtgctgagcaaaatgaaggagactgcagaagcttaccttggtcaaccagtgaaacatgctgtgatcaccgtccccgcatatttcaacgacagccagcggcaagctacaaaggacgcaggtgctatagctggtctgaacgtgcttaggatcataaatgaacccactgccgcagcaatcgcatacgggctcgaccgtcgtggggctggcgagaggaacgtgttgatctttgatctcggcggaggcacctttgacgtcagcgtgctctccatcgacgctggggtatttgaggtcaaggctactgctggggatacacacctcggaggagaggactttgataaccggctggtaaatcactttatggaagaatttaggaggaagcatggaaaggacctctccggcaataagcgtgctcttcgacgtctacgcaccgcgtgcgaacgagccaagcgtaccctctcatctagcacacaggccactctcgagatagacagtcttttcgagggagttgatttctatacgagcatcaccagggcccgattcgaggaactgtgctcggacctctttcggtccacactcgaaccagtggaaaaggcattgcgggatgccaaattggacaaggcacagattcatgacgttgtcctggtgggcggatcaacacggatacctaaggtccagaagcttctgcaagacttcttcaatggcaaagagctaaacaagtccattaaccccgacgaagcagtcgcctacggagccgcagttcaggccgcagtgctgatgggggacaagtgcgagaaggtgcaggaccttctgcttctcgacgtggcccctctgtcccttggtctggagaccgcagggggagtgatgaccacccttatacaaagaaatgccactatcccaacgaaacagacccagacttttaccacttattcagataaccagcccggtgtattcattcaggtttacgagggagagagagccatgaccaaggacaataacctcctgggcaggttcgagctgtccggcataccgccagcaccaaggggagtgccgcagatcgaggtgacattcgacattgacgccaacgggatcctgtccgttacggcaacagacagatccactggcaaagcaaacaagattaccataacaaacgacaaagggcgacttagtaaggaagaggttgagagaatggtgcacgaggccgagcagtacaaagcagaggacgaagcccagcgcgatagagtagccgcaaaaaattccctggaggcacacgtctttcatgtgaaggggtccctgcaagaagagtcactccgggacaagatcccagaggaagatcgaagaaaaatgcaagacaagtgtcgagaggttttggcttggctggaacataatcaattggcagagaaggaagagtacgaacaccagaaaagagagctcgaacagatatgtcgccctatctttagccgtctgtacgggggtccaggcgtgcccggtggctcatcctgtggcacacaggctagacagggcgacccaagcacaggtccgattatagaagaagttgattag

SEQ ID NO: 225789 - DNA, 1860 bp, synthetic construct
  misc_feature 1..1860: note = Description of Artificial Sequence: Synthetic coding sequence
  source 1..1860: mol_type = other DNA
atgcaggctcccagagagttagcagttgggatcgatctcgggacaacatattcatgcgtggcattcaccgatacagaacggctcgtgggagacgctgccaagagccaggctgcgttaaatccgcataacacagtgttcgatgctaaacgcctaatagggcgtaagttcgctgatacgaccgtgcagtccgatatgaagcattggcctttcagggtagtaagtgaggggggaaagcctaaagtcagggtatgttatcgcggagaggataagaccttttatcccgaggaaatatccagcatggttctctcgaagatgaaagaaaccgctgaagcttacctggggcaacctgttaagcacgcagtgataacagtccccgcttacttcaatgattcacaaagacaggctacaaaagatgccggagcaatcgctggcctcaatgttttacgtatcatcaacgaacccacagccgctgccattgcctacggcttagacaggaggggagctggagagcgaaatgtcctgattttcgacctggggggtggaacgtttgatgtctccgttctgagtattgatgccggagtcttcgaagtaaaggccacagcaggcgatactcacctcggaggggaagatttcgacaataggttggtgaatcactttatggaagagttccgacgcaaacatggcaaggatctgtcaggaaataagcgggcactcagaaggctcaggaccgcttgcgagagggccaaaagaactctgtcgagcagtacacaagccaccctggagatcgacagcctgtttgaaggtgtagatttttacacttccattactagagcgaggtttgaggagctatgcagcgatctgtttaggagcaccctcgaaccagtagagaaagctctccgcgacgccaagctggacaaagcccagatccacgatgtggtcctggtgggcggttcaacccggatccccaaggtccagaaactgctgcaggacttttttaacgggaaggaactcaataagagcattaacccggatgaagccgtggcgtacggggcagcggtgcaggccgcagtgctcatgggtgataagtgtgagaaagttcaagatctacttctgctggacgtggctccactgtccctgggtctagagaccgccggaggcgtcatgaccacactcattcagaggaacgctacgatcccaaccaaacaaacccagactttcaccacctattccgacaatcagcccggtgtgtttatacaggtgtatgaaggagagcgcgctatgaccaaagataataacctgctgggaagattcgaactcagcggcattccgcctgccccacggggtgtcccccagatcgaggtgacgtttgacatagacgcaaatgggattctgagcgtgaccgcaactgacagatccacaggcaaagcgaacaagatcactataacaaacgacaaaggaagattgtccaaggaggaagttgagcgcatggttcacgaagctgagcaatacaaggcggaggacgaggcccaacgtgaccgcgtggctgctaaaaattcactcgaggcacatgttttccacgtgaaaggaagcttgcaggaagagagcttgcgggacaaaatacctgaggaggatcgacggaagatgcaagataagtgcagagaagtgttggcatggctggaacataatcagctggccgaaaaggaagaatacgagcatcagaagagggagctggagcaaatttgtagacccatattttcacgcctatacggtggaccaggcgttcccggagggtcatcctgtggcacccaggctcgtcaaggcgacccttccaccgggccaatcatcgaggaagttgactag

SEQ ID NO: 225790 - DNA, 2337 bp, synthetic construct
  misc_feature 1..2337: note = Description of Artificial Sequence: Synthetic coding sequence
  source 1..2337: mol_type = other DNA
atgagcaagcgcaagctgattccaaaactctccatccaatcccccgtcctgcatacaaacctgaatgtccagtcaacgcatcccccactaaaaaaagaggatcttcatcggatttccaaggacagtctggagtccgattctgagagcttgactcaggagattatgtgccactccgagtttgacgataggatccgcggaaacggaatggagcccgattctttagatgaagaggagagtccccgttggggctctctccacgaaatggaagaggaggcctccgggaaagccgctcagatggcccgtgagcaaaatcatcatacttgggatcaaggagccaataatcgccagcaacccattgaagacaaatactcagatctgagatatgaccccaactggaaaagcaagaaggaggagggtcagctactgagcgtcgaggcacttcccgaatcaaccgactcctctctcgaaaatctgccgctcgcccctctgtaccccagccaggagaccagcatggaactgagtgggggtaaaggtgagcaaaaggaatccccccagtccgctgccagtctgttgggatccgagttcctttccccgaactacgaacacggggctcgcagaagcaagccgtttagtgaactgtccgattctgaccttgaagagaagagctcttccctgagcccttatgtgaagtcctcttcatcacataacgaggtcttcctgcccggaagtcgcggtccccgaaggcgcaagagcaaacagcacttcgtggaaaaaaacaagctgacgctgggacttccgacccccaaaacagacagctacctgcaactccataataaaaaaaggggggagtctcatccagaacaaatctcctaccccgtacgtgtgacggataaaacttcaatccagaatgccaaggaaatggagaacgctgcaatcgaccccgaagataagtggcatcagcgggcacagcaactcaagaattaccaggagcattggtcgcaatacgagtcaacgaaatcaagcaatgtgccacggggtcagcccagtgacatggtgaacgatcaccagccatctcgacgcccagccaagctcaaaatccgaaaacagtgtaagcaccaaaatggactgaagtcgtccacgactgaggaagttacggcctcccaaggaaatcagaataatcctcccagacagcagcaaaaccaaaataagccactggatacctctaccaagccagagtcaatcgtcatcatgcatgcttccaataacgacgtgcaggccagtagagcgctgcggtcacataacctcaaagagaccagtaacacttttgccccaccaaagcaagccttcgacaaggtactgagcaaaaattccactgggtgtgactccggactgaacgtgaacaaggaaagagggcacaaggaccaagaagagaaacgttttagttaccagcagttgcatacgctgtcagatatggatctgaacaacctcaatgagctgtcaaaacgccatgtgctgctaagccagaaaggttctcagttcgtgtaccatattaacactcacggatctaccaaaaacaaaaaacagctgaaacaaccctacacagaaaccaagtatcgcaatctagaaatgctgtggaagtttcactcttcatctgactcgcaaacagtccgggcttcccctgacagctggctgactcagattatggagcagcaccagcaagctctcgtgcagctgactgacgtgcagccctcagagggagctctgagcagtgttaccttgccacccatcttatcgcgggtggaaagcgagagccagcttagttcagagcgctctcaacggaaccaggtgaaaattagccgaagtaactcggaggggtatctatttcagcttgagaaagggaagaaacataaaaaacgatcttcctccaaaaacacaaaactgaagggataccaaaagagagacgtaaaacttggcggacttggaccagatttcgagtctatcagggataaaacccaaaagcttattcaacagaaggagtacgctaagcaggttaaggagtacaatatgaaaaccttgagcatcctctctaagccgcagactgagaaaacacagaaaaaatcggctatcccccgacagaaggctctggaatacgcaaagactataccaaagccaaagccatccaacctaacccaccaggcaagcaaagagcagaagaaccccacctacgccggaaaggaggagtcactccccgagatctctctgttagagatcctccagaatagacatgagagagaaaaacaggccgtggctgctttcaaggtcctgcacatcgtgtag

SEQ ID NO: 225791 - DNA, 1482 bp, synthetic construct
  misc_feature 1..1482: note = Description of Artificial Sequence: Synthetic coding sequence
  source 1..1482: mol_type = other DNA
atgtcaaaaggaccagctgttggcattgacctgggcactacatatagctgtgttggggtgtttcagcacgggaaggtggaaatcatcgcaaacgatcagggcaatcggacgacaccctcatacgttgccttcacagatacagagcgtctgatcggagatgccgcaaaaaaccaagtggctatgaaccctaccaatactgtgttcgatgctaaacgtctcataggaagaagatttgatgacgctgtcgtccagtcagacatgaagcactggcccttcatggtggtcaatgacgccggacggcctaaggttcaggtagagtataagggcgaaacaaagagcttttaccccgaagaagtatccagtatggttctgacaaagatgaaggagattgctgaggcatatctgggcaagacagtgacaaatgcagttgttacagtgccggcttatttcaacgattcccagaggcaggctacaaaggatgcaggaaccatcgcgggactgaacgtgttgcggattatcaacgaacctaccgccgctgccatagcttacgggctagacaagaaagtgggcgcagagcgcaatgtgctaatctttgacctgggtggaggtacatttgacgtgtccatcctaactattgaggacggcattttcgaggtcaagtcaaccgccggagatacccaccttggaggggaagatttcgataaccggatggtgaaccacttcatcgcggagtttaagcgtaaacataaaaaggacatttccgagaataaacgtgcggtgcggagactgagaactgcctgcgagcgcgctaagcgaacgctgagctccagtacccaagcaagtatcgaaatcgactccctgtatgaggggatcgatttctacacatcaatcactagggctcggttcgaagagctgaatgctgacctgtttagggggacacttgatccagtggaaaaagcgttgagggacgccaagctggacaagagtcagatccacgatattgtgcttgtcggaggaagcactcggatcccaaagatacagaaactactacaagactttttcaacggtaaggagctgaacaagagcattaacccagatgaggccgttgcctacggtgcagccgtgcaagctgccattctgtccggcgacaagtctgagaatgtccaagatctcttgctcctcgatgttacaccactgtccctcggcatcgaaacagctggcggagtcatgaccgtgcttattaagcgcaatactacgattccaactaagcagacccagacctttaccacatacagtgacaatcagcccggagtgctcattcaggtatacgagggtgagcgggcaatgaccaaagataacaatctcctaggcaagtttgagctcaccggcatgccaggtggcatgcccggaggcttccccggtgggggagctccaccttcaggcggtgcatcatccggacccactatagaggaggtcgactag

SEQ ID NO: 225792 - DNA, 1884 bp, synthetic construct
  misc_feature 1..1884: note = Description of Artificial Sequence: Synthetic coding sequence
  source 1..1884: mol_type = other DNA
atgtcaaaggggcctgcggttgggattgacctcggaactacatattcgtgcgttggagtattccaacatggcaaagtggaaatcatagccaatgaccagggcaatcgcacaaccccaagctacgtcgcatttacagacacggagaggctgatcggagatgccgctaaaaatcaggtggccatgaaccctactaatactgtgttcgacgcaaaaagactcattggcagacgattcgacgacgccgtggtgcaaagcgatatgaaacactggccattcatggtggtgaacgacgcaggacgcccaaaagtccaagtcgaatacaagggtgagactaagtcgttttatccagaagaagtaagtagtatggtgctgacaaaaatgaaggagattgccgaggcttacctcggtaaagccacaaaggacgccggaacaattgccggtctcaacgtgctcagaatcattaatgagccaactgctgccgctatcgcctatggcctggataaaaaggttggggcagaacggaatgtgctcatcttcgatctggggggaggcacgtttgacgtctccatcctgaccattgaagatggaatcttcgaagtaaagtctaccgcaggagacacccacctgggcggagaggactttgataataggatggtgaatcactttatagcagagttcaaacggaaacacaaaaaggatattagcgagaataagagagctgtgcggagattgcggaccgcctgtgaacgggcaaagagaacgttgtcatcttctactcaggcgtcaattgaaatcgacagtctctacgaaggcattgatttctacacatctattactagagcgagatttgaggagcttaatgccgacctattcaggggcaccctcgatcccgtggagaaggcactaagagacgccaaattggacaaaagccaaatccacgatatcgttctggtgggcggaagtactcggatacccaaaatccagaagctgttgcaggacttcttcaatggcaaggagctcaacaagagcattaacccggatgaagctgtcgcttacggtgctgctgtgcaggccgctatcctctcaggagacaaatccgaaaatgtgcaggatctgctcctcctggacgtgacccctctgagcttagggatcgagaccgcagggggagtgatgaccgttttgatcaagcgtaacacaaccatcccaactaaacaaactcagacttttaccacttacagcgataaccaacccggagttttaatccaggtatatgagggtgagagggccatgactaaagacaacaacctgctgggcaaatttgagctaacggggatcccaccggctccccgtggcgtccctcagatcgaagtgacatttgacatagatgccaatggaatcctgaacgtctcagcagtggacaagtcgactggcaaagaaaataagataacaatcaccaacgataaaggtcgcctgagcaaggaggatatagaacgcatggtccaggaggccgagaagtacaaggccgaggatgaaaaacaacgcgataaagttagctcaaagaattcactcgagagctacgcctttaacatgaaggccactgttgaagacgaaaagctccaaggaaagataaacgatgaggacaagcagaaaattctagataaatgtaatgagataatcaactggctggataagaatcagacagcggagaaagaggaatttgagcaccagcaaaaggagttagaaaaagtgtgcaatcctattattactaagctatatcaatcggcaggtggcatgcctggcggaatgccaggaggattcccaggtggcggagcccctcccagcggaggggcatcgtctggcccaaccatcgaagaagtcgattag

SEQ ID NO: 225793 - DNA, 1941 bp, synthetic construct
  misc_feature 1..1941: note = Description of Artificial Sequence: Synthetic coding sequence
  source 1..1941: mol_type = other DNA
atgtcgaagggaccagctgttgggatcgatctgggcacaacatactcatgcgtcggagtgttccagcatggcaaagtggagattattgctaacgaccaaggtaatcgcaccactccaagctacgttgcctttaccgatactgagcggctaattggcgacgccgctaaaaatcaagtcgcaatgaaccccacaaatacagttttcgacgctaagaggcttataggcaggcgatttgatgacgccgtggtccagagtgatatgaaacactggccgtttatggtcgtcaacgatgcaggccgacccaaggtacaggtcgagtataagggtgagactaaatcattttaccccgaagaggtgagcagcatggtgctgaccaaaatgaaagagatcgccgaggcctatctaggaaaaactgttacaaacgctgtagtgacagtgcccgcttacttcaacgatagccagaggcaagcaacaaaggatgccggaactattgcagggcttaatgttctgcggataattaacgagcctacagccgctgcaattgcctatggcctcgataagaaggtgggcgctgaaaggaacgtactgatcttcgatctgggcggaggaactttcgacgttagcattttaaccatcgaagatggtatcttcgaagtgaagtccacagctggagatactcaccttggtggagaggactttgacaacaggatggtgaatcactttattgccgaattcaagagaaagcataagaaggatatcagcgaaaataagcgcgcagtgaggcggctccgcaccgcttgtgaaagagcgaagaggaccctgtcctccagcacacaggcgagtatcgaaatcgatagcctgtatgagggcattgacttttacacatccataacacgtgctcggtttgaggaacttaacgccgacctgtttagaggcacgctagatcccgtggaaaaggccctcagagacgccaagcttgacaaatcacagatacatgacatagtcctcgttgggggaagcacacggatccctaaaattcaaaagctgttgcaggacttttttaacgggaaggagctgaataaatccattaaccctgatgaggctgttgcatatggcgcagccgttcaggctgcaatcctgagcggcgacaagtcagagaatgtccaggatctgctgctgttagacgtcaccccgctgagtcttggaatagaaacagccggaggtgtgatgaccgtgctgatcaagcggaacactaccatccccaccaagcagacacaaacattcactacatatagcgacaaccagcccggagtgctgattcaggtgtatgagggtgagagagcgatgacaaaggataacaatctactcgggaagtttgaattgactgggataccccctgcccctcggggagtacctcagatcgaggtcacctttgatattgatgctaatggcatcctgaacgtgtctgcagtggacaagtccaccggcaaggagaataaaatcaccattacgaacgataaaggccgtctgtctaaggaagatatcgagcgaatggtccaggaagccgaaaaatacaaagccgaggacgagaagcaaagggataaagtgtccagtaagaactccctggaaagctacgctttcaatatgaaggcaacagtggaagacgagaaactccaggggaagattaacgatgaggataaacagaagatactggataaatgcaatgaaattatcaactggcttgacaagaatcaaaccgccgaaaaagaggagttcgagcaccagcagaaggagttagagaaagtctgtaatcctatcattaccaaactataccagtcggccggaggaatgccaggaggcatgcctggaggatttcctggcggaggagccccaccgagcggaggcgcttctagtgggccaaccatcgaggaggtggattag

SEQ ID NO: 225794 - DNA, 1503 bp, synthetic construct
  misc_feature 1..1503: note = Description of Artificial Sequence: Synthetic coding sequence
  source 1..1503: mol_type = other DNA
atgtccaaggggccagctgtgggcatcgacttgggaaccacatacagttgcgtaggcgttttccaacacggcaaggtcgagatcattgccaatgatcagggcaaccgaacaacaccatcctacgtggctttcaccgacacagaaaggctgatcggggacgcagctaaaaaccaggtcgctatgaaccccaccaataccgtttttgacgccaagcgattgataggcagacggttcgacgacgcagtggtgcagtctgacatgaagcactggcctttcatggtcgtgaacgacgctggaagacctaagcataaaaaagatatttctgaaaataagcgggctgtgagacgtctgcgcactgcgtgtgagagggccaaaaggacactcagctcctctactcaagctagtattgagatcgatagcctgtacgaaggtattgatttttatacatccataacccgcgctagattcgaggagcttaacgctgatctgttccggggaacactcgatcctgttgagaaggccctccgagatgctaagctggataagagccagatacatgacatcgtccttgtggggggtagcacgcggatccccaaaatccagaaactcctacaagacttctttaatggcaaggaactcaacaagtctatcaatcctgacgaagctgtggcctacggagctgccgtgcaggccgctatcttaagtggcgacaaatccgagaacgtgcaggacctgcttctcctggacgtgacccctctgagtctcggaatcgaaaccgccggtggagtgatgaccgtgctgatcaagagaaataccaccattccaaccaagcaaacacagacctttacgacgtattccgacaatcagccgggagtactcatacaggtctatgagggggagcgggcaatgaccaaagacaacaacctgttggggaaattcgaactcacaggtatccctccagctcctcgcggagtgccccaaattgaggtcacatttgatatagatgcaaatggtattcttaacgtgagtgccgtcgacaagagtaccggcaaggagaataagataaccattactaacgataaaggtagattatctaaggaagatatcgaaagaatggtgcaggaagccgagaagtacaaggcagaggatgagaaacagcgagataaggtgtcctccaagaatagtctggaaagctacgcctttaatatgaaggccacggtggaggacgaaaagctgcagggcaagattaacgatgaagacaaacagaagattctggacaagtgcaatgagattatcaattggttagacaagaaccagaccgctgaaaaggaggaatttgagcaccagcagaaagagctcgagaaagtatgtaacccaatcataaccaagctgtatcaaagtgccggaggaatgcccggtggcatgccaggagggttcccaggaggaggagcgccaccatcagggggtgccagcagtggacccaccattgaagaggtggactag

SEQ ID NO: 225795 - DNA, 1233 bp, synthetic construct
  misc_feature 1..1233: note = Description of Artificial Sequence: Synthetic coding sequence
  source 1..1233: mol_type = other DNA
atggttaatcacttcattgcagaatttaaaaggaagcataagaaagacataagcgaaaacaaacgggcagtgagacggttgaggaccgcatgtgagcgtgctaaacgcactctgtcttcttccacacaggcgtccatcgagatcgacagcttgtatgaaggtattgatttctatacctccatcacgagagcaaggtttgaggagctgaatgccgacttgtttagaggcactctcgatccggttgaaaaggctctgcgagacgccaagttggacaaaagccaaatacacgacatcgtgctcgtagggggatctactcgcattccaaaaattcagaaacttcttcaggacttcttcaatgggaaagagctaaacaaatctatcaatccagatgaggcagtcgcgtacggggctgctgtgcaggctgctatcctgagtggagataaatccgagaacgtgcaggacttgctgcttctggacgtgaccccgctgtctttagggattgaaactgccggtggtgtgatgacagtgctgatcaagagaaataccaccatacctacaaaacagacacagactttcacaacctacagcgataatcagcctggcgtattgattcaggtttatgagggggagcgcgcaatgactaaagacaataatttactggggaaattcgagttgactggcattccccctgcacctagaggggtgccccagattgaagtgacatttgatatcgacgccaacggtattctgaacgtgtccgctgtagataagtctaccggaaaggagaataagatcactattaccaacgacaaagggaggctgtctaaagaggacatagagaggatggtgcaggaagccgaaaaatataaagccgaagatgaaaagcaacgcgataaagtctcctcaaagaattctctggagagctatgcttttaacatgaaggccactgttgaggatgaaaaactccagggaaaaattaacgacgaggacaaacaaaagattctagataagtgtaacgaaatcatcaactggctggacaagaaccagacagccgaaaaagaagaatttgagcatcaacagaaagaattagagaaggtgtgcaaccctatcatcaccaaactctatcagagcgccggaggtatgcccggaggcatgccgggtgggtttcccggagggggagctcctccttcaggcggagcttcaagtggcccaactatagaggaggtggactag

SEQ ID NO: 225796 - DNA, 1941 bp, synthetic construct
  misc_feature 1..1941: note = Description of Artificial Sequence: Synthetic coding sequence
  source 1..1941: mol_type = other DNA
atgtctaaaggccctgccgtcggcatcgacctggggactacatacagttgtgtgggggtgttccagcacgggaaggtcgagattatcgctaatgaccaaggcaatcggactaccccatcttatgtcgctttcactgacaccgagcgtctcattggggacgccgcaaagaatcaggttgctatgaatcctactaatacggtgtttgacgcaaagcggctgatcggcagaaggtttgatgacgccgtggtccaatccgatatgaaacattggccattcatggtagtgaacgatgcgggtcgtcctaaggttcaagtcgagtataaaggtgagactaaaagcttctatcctgaggaggtgtccagcatggtcctgacgaaaatgaaggaaatagcggaagcgtacctcggcaaaactgtcaccaatgcagtcgtgaccgtgcctgcctacttcaacgattctcagagacaggccacaaaggacgccggaactattgcaggcctgaacgtcctgaggatcatcaacgagccaacggccgcagcgattgcctatggtttggacaagaaggtcggcgcagagaggaacgtcctgatatttgatctcgggggtggtacgtttgatgtgtccatcttgacgatcgaggacggcatattcgaagtgaagagcacagccggagacactcacctgggaggcgaagacttcgacaatagaatggtgaaccacttcattgcagaatttaagaggaagcacaagaaggatatttctgagaacaaaagagcggtgcgccgacttcgaaccgcctgtgagagggcaaaacgcaccttatcctcatcaactcaggctagcatcgagattgacagtctgtacgaaggaatcgatttttacaccagtatcacccgggctaggtttgaggagttaaatgcggatctgtttagggggaccttagatcctgtggagaaagctctgagggacgccaagctcgataaatcacaaatccacgacatcgtcctggttggaggctcaactcgcatccccaagatccaaaaattactccaggacttctttaatggtaaggagctgaacaaaagcatcaatccagacgaggccgtcgcctatggggctgccgtgcaggccgctatcctgagtggcgacaaatcggaaaatgttcaggacctgctgcttctggatgtgacacctctaagcctcggcattgaaaccgccggaggcgtgatgacggttcttataaagagaaacaccaccatccccacaaaacaaactcagactttcaccacatacagcgataaccagcccggtgtgctcatccaggtgtacgaaggggagcgtgccatgacaaaggacaacaatttgctaggcaagttcgaactcactggcatcccgccagctccaagaggggttcctcagatagaggtgactttcgatatcgatgccaatgggattctcaatgtatcggccgtcgacaaatccaccgggaaagagaataagatcactataactaatgataagggaaggctgtctaaggaagatattgaacgtatggtgcaggaggctgagaaatacaaagctgaggacgaaaagcagcgggacaaagtttcaagcaaaaacagtcttgaatcatacgcctttaacatgaaagcgactgttgaagacgagaaactccaggggaaaataaacgatgaggataaacaaaagatcctggataaatgcaacgagattattaactggctggataagaatcagaccgccgaaaaagaagagtttgaacaccaacagaaggagttggagaaagtgtgcaaccctataatcactaaactgtaccagtccgccggaggaatgcccggtggaatgcccggaggattccctggtggaggtgctccaccatccggcggagcgagttcggggccaaccatcgaagaggtggattag

SEQ ID NO: 225797 - DNA, 2040 bp, synthetic construct
  misc_feature 1..2040: note = Description of Artificial Sequence: Synthetic coding sequence
  source 1..2040: mol_type = other DNA
atgatttctgcaagtcgggcagctgctgcaaggctcgtgggagccgctgcctctcggggacccaccgctgccagacatcaagatagctggaacggcctcagccacgaagcattccgcttggtttctaggcgtgactacgccagcgaagccataaaaggagcggtagtgggtatagaccttggaaccaccaactcgtgtgtggccgtgatggagggcaagcaggccaaggtgcttgaaaatgcagaaggagctcggactactccatccgtggttgcgttcaccgcagacggcgagaggctggtcgggatgcccgctaaacggcaggccgttactaacccaaacaacaccttctacgcgaccaagcgacttattggcagaagatacgacgatcccgaggtccaaaaggacatcaagaacgttcctttcaaaatcgtgcgcgcatctaacggagacgcgtgggtggaagcacacgggaaactgtattccccatcacaaatcggcgcattcgtgctgatgaaaatgaaagaaactgccgagaattatctcggccacactgctaaaaatgccgtgatcaccgttcccgcatatttcaacgattcgcagcggcaggcaacaaaggacgccggacaaatctccggattgaacgtacttcgcgtaatcaacgagcctacagccgcagcactggcttatggattggataagagcgaagacaaagtgattgcagtgtatgatctggggggaggaacctttgatatatctattttggaaattcaaaagggagtgttcgaagtcaagtccactaatggtgatactttcctgggcggtgaagatttcgatcaggccctgcttcgccatatagtcaaggagtttaaaagagaaacgggcgtggatctaaccaaggacaacatggcattacagcgagttagagaggccgcagaaaaagcaaagtgcgaactcagctctagtgtgcagaccgatatcaacctgccatatttaactatggattcatctgggcctaagcacctgaatatgaagctgacacgcgctcaattcgaagggatcgtgacagatcttattcgacggaccatcgcgccatgccagaaagcaatgcaggacgccgaagtgagcaaatcagacattggggaggttatccttgtgggaggcatgacaaggatgcccaaggttcagcagactgttcaggacctgttcggtagagctccctccaaggccgtgaacccagacgaagcggtcgctattggggctgccattcagggaggtgtgctcgccggagatgttaccgacgtgcttctgctagatgtaacccccctaagtctgggtatcgagactttggggggagtctttacaaaattgattaaccgcaacaccacaatacctacgaagaagtcgcaagttttcagtacagccgcagatggacaaactcaagtggagatcaaggtgtgccagggagagagggagatggcaggcgacaataaactgttagggcagttcacgctaattggcattcccccagctcctaggggcgtgccacaaatcgaggtcacttttgacattgacgctaacggaatagtccatgtgtcagctaaagataaaggcaccggtcgcgagcagcagatagtgattcagtccagcggcggtctctccaaagatgatatcgaaaatatggttaagaatgcggaaaagtacgctgaagaagaccgaaggaagaaagaacgtgtggaagccgtaaacatggctgagggaattatccacgataccgagacgaaaatggaggagttcaaagatcagcttccggctgatgaatgcaacaaacttaaagaggagatctcgaagatgcgtgagctgcttgcaagaaaggacagcgagaccggggaaaacattcggcaggctgcctcgtccctgcagcaggcttccctgaaactcttcgaaatggcctataagaagatggcatcagaaagagagggctcagggtccagcggcactggggagcagaaagaagaccagaaggaagagaagcagtag

SEQ ID NO: 225798 - DNA, 1998 bp, synthetic construct
  misc_feature 1..1998: note = Description of Artificial Sequence: Synthetic coding sequence
  source 1..1998: mol_type = other DNA
atgatctccgctagtcgcgcagcagcagctagacaccaggactcgtggaatggtctgtcccacgaagcattccggcttgtgagccggagagactacgccagcgaagcaattaaaggagccgtggtgggaatcgatttgggcaccaccaatagctgtgttgctgtgatggagggtaaacaggccaaggttttagaaaacgcagagggggcacgtaccaccccaagtgtggtggccttcaccgcagacggagagcgcttggttggaatgcctgctaagaggcaggcagtaacaaaccctaacaacactttctacgctaccaaacgtcttataggccgacgttatgacgatccggaagttcagaaggatataaagaacgttcccttcaaaatagttcgcgcttcaaacggggacgcatgggtggaagcgcacgggaaattatactccccatcacagataggggcattcgttctcatgaagatgaaagagacggccgagaactatttaggccatactgccaaaaatgctgtaatcaccgtgcctgcgtacttcaacgacagccagcgtcaggcgaccaaggatgctgggcagatctctggtctgaacgtgctgagagtgattaatgaacccacggctgccgctctggcctacggtcttgacaagtcagaggacaaagtaatagcagtatacgatctcggcggaggcacatttgacatcagcattctggagatacagaaaggcgtttttgaggtgaagagtacgaatggcgacaccttcctggggggagaagacttcgatcaagcacttctgcggcatatcgtaaaagaatttaagcgggagacgggcgtcgacctgaccaaggataatatggcactacaaagggtccgagaagcagcagaaaaggccaagtgcgagctcagtagctccgtgcagacggacatcaacctgccatatctcaccatggactcaagcggcccaaagcacctaaatatgaagttgacgcgggctcagtttgaggggattgtgactgatctgattaggcggactattgcaccatgtcagaaggcaatgcaggacgcagaagtgtccaagagcgacattggagaggtcattctggttggcggaatgacccgcatgcctaaagtgcaacagaccgtgcaggacctgttcggacgcgctcctagtaaggcagtgaaccccgacgaggctgttgccattggggcagccatccaaggcggagtgctcgccggagacgtaaccgacgtgttgctgcttgacgtgacccccctctccctgggaatcgagacactcggcggagtattcaccaagcttatcaaccgcaacactaccatccctacaaaaaagagtcaggtcttttctactgctgccgacgggcagacacaggtggagattaaggtgtgtcagggcgaaagagagatggccggagataacaagctgctgggccagttcactctcattggaatccccccagctccccgtggggtcccacagattgaggtcacctttgacatcgacgctaacgggattgttcacgtatccgccaaggacaagggcacagggagggagcagcagatcgtgatccagtcttcgggcggtctcagcaaagacgacattgagaacatggtgaaaaatgccgagaaatacgccgaggaggatcgccgtaaaaaagagcgcgtcgaggctgttaacatggctgaaggtatcatccacgatacagaaaccaaaatggaggagtttaaggaccagttgcccgctgacgagtgtaacaaactgaaggaggagatctctaagatgagggagctgctggcccgtaaagattcagagacaggagagaatatcaggcaggctgctagcagccttcagcaagcttcactgaaactgttcgagatggcctataagaagatggccagcgaacgggaaggatccggcagcagcggcaccggagaacaaaaggaggaccaaaaggaagaaaaacagtag

SEQ ID NO: 225799 - DNA, 1899 bp, synthetic construct
  misc_feature 1..1899: note = Description of Artificial Sequence: Synthetic coding sequence
  source 1..1899: mol_type = other DNA
atggcattggttatgaggcttctggacttgttccaggggggtataatgcaccagaagcagagtagagaacaactgcttgtgttgatctgggtgctgccaacccctgcctggcagctttggaaggtgaacaaacagcgttgctggagaatgcctaaagtacccgagcccccactccagctttggccactgcaacagatggtgtcagatctgttggaatgcaggcctagcgaccggctgtccccgacccaaacgattcacttcatgctgccctctgttagcctggctggggatatgatgattttgaagtataggaagaccctcaagatgtttcccctgaaactatcagtcccaccaatggtaatgccagtccttatgaagatgaaagaaaccgcagagaactacctggggcacaccgctaagaatgccgttatcacagtccctgcctattttaatgattcccaacgccaggcgacgaaagatgcaggacagatatctggcttgaacgtgttacgggtaataaacgagcctactgctgccgcactggcatacggattagataagtctgaagacaaggtcatcgccgtgtacgatctgggaggcggtacattcgacatttccatcctggaaatacagaaaggtgtgtttgaggtcaagtctaccaacggggataccttcctggggggtgaggattttgatcaggcgctccttcgtcatatcgtgaaggaattcaagcgcgagaccggggtggatctgaccaaagacaacatggctctgcagagagttagggaggccgctgagaaggcaaaatgtgagctaagctccagcgtgcaaaccgatatcaatttgccttaccttactatggatagttccggacccaagcacctgaacatgaaattgacacgagcccagtttgaagggatcgtcacggacctaattcggaggactatcgctccctgccagaaagctatgcaggacgcggaagtgagcaaaagcgacatcggggaagtgatcctggtgggcggaatgacaagaatgcctaaagttcagcaaaccgtgcaagatctctttggtcgcgcaccgtccaaagccgtaaacccagatgaggcagtggctattggagccgctattcagggaggcgtgctggccggtgacgtgactgacgtgctgctactagacgtcacaccactcagcctggggattgaaacacttggtggggtctttactaagctcattaatcgaaatacgacgatcccgaccaaaaaatcccaggtattctccacagcagctgacggccagacccaagttgagatcaaggtgtgccagggagaaagggagatggcgggtgataataaactcttggggcagtttactctcatcgggatccccccagcaccaaggggcgttccgcagattgaggtaaccttcgacatcgacgccaatgggattgttcacgtgagcgccaaagataaggggactggccgtgaacaacagatagtgatccagagctcgggaggattgtccaaggatgatatcgagaatatggtaaaaaacgccgagaaatacgctgaagaggatagacggaagaaggaacgagtggaggcagtaaatatggcagaaggtatcatccacgacactgagaccaagatggaggaattcaaagatcagttgccagctgacgaatgcaataaactcaaggaagaaatttctaagatgagggagctcctggcgaggaaagactcagaaaccggcgaaaacatacggcaggccgcaagctcactgcagcaagctagcctgaagctcttcgaaatggcatataagaagatggcgagcgaaagagagggttctggcagctccggcacaggagagcagaaagaggaccagaaagaggaaaagcaatag

SEQ ID NO: 225800 - DNA, 2175 bp, synthetic construct
  misc_feature 1..2175: note = Description of Artificial Sequence: Synthetic coding sequence
  source 1..2175: mol_type = other DNA
atgccagaggaggttcaccatggcgaagaggaggtagaaacgtttgccttccaggccgaaattgcccaactcatgtctctgattattaacacattttactcaaataaagagatctttctcagagagttgatttccaacgcgtcagacgccctggataaaatccgctacgaatctctgaccgacccttcaaaactggacagcggtaaagagctgaaaatagacataattccgaatccacaggaaagaacgctgacactggtggatacagggatcggcatgactaaggctgatctgataaacaatctcggcaccatcgctaaatctggtaccaaggccttcatggaagcactccaggccggagcggacatcagcatgatcggccaatttggcgttgggttctactctgcatacctggtggccgaaaaggtagtggtaattaccaagcacaatgatgatgaacagtacgcctgggagagctccgcgggaggcagtttcaccgttcgagcggaccacggggagccaattggacgtggtaccaaggtgatcctgcacctaaaggaggaccagacggagtacttagaggagagacgagttaaggaggttgtcaaaaagcattctcaattcattgggtatccaattacactctacctggaaaaagaaagagagaaggagataagcgacgacgaggccgaagaggagaagggggaaaaggaagaggaggataaagacgatgaggagaagccgaagattgaagatgtcgggtcggacgaggaggacgactccgggaaggataaaaagaaaaagaccaagaaaatcaaggaaaaatatattgaccaggaagaactcaacaagaccaagccgatttggacccggaatcccgatgatataacgcaagaggagtacggtgagttctataaatcgctgactaacgactgggaggaccaccttgccgtcaagcacttctccgttgagggccaacttgaatttagagccctgctgttcataccgaggagggcaccattcgacctattcgagaacaaaaaaaaaaaaaataacattaagttatatgtgaggcgagttttcatcatggattcatgtgacgaactcatacctgagtacctgaacttcatccgcggagttgtcgatagcgaggacttgcccctaaacatctctcgcgaaatgctgcagcagtctaagatccttaaggtgatccgaaagaatatcgttaagaagtgtcttgagctgttttctgaactggccgaagataaggagaattataaaaagttctatgaagcgttctctaagaatcttaagctgggcatccacgaggactccacgaacaggcgcaggttgtctgagcttctgcgctaccacacctctcagtccggagacgagatgacatccctgagtgaatacgtgtcacgcatgaaagagacccaaaagtcaatttactacattacaggagagtccaaggaacaggtcgcaaattcagccttcgtggagcgggtcaggaagaggggcttcgaagttgtttacatgaccgagccaatagacgagtattgtgttcaacagcttaaagagtttgacgggaaatcccttgtgagcgtcactaaggagggcctggagctacccgaggacgaggaggagaaaaagaaaatggaggagtcaaaggccaagttcgagaacctgtgtaagctgatgaaagagatactggataagaaagtggaaaaggtgacaatcagtaataggctggtcagctccccgtgctgcattgtaaccagcacatacgggtggaccgcaaatatggagcgtattatgaaagctcaagccctcagagacaattcaactatggggtacatgatggcaaagaaacatctggaaattaaccccgaccatcctatcgtcgaaaccctccgacaaaaggcagaggccgacaagaatgataaggccgtaaaagacctcgtggttctgctctttgaaactgcgctgctgtcttcgggatttagtctcgaagatcctcagacgcatagcaatcgcatctaccgcatgattaaactcgggttggggattgacgaagacgaagtcgccgcagaggaaccgaatgccgctgtgcctgacgagattcctcccctggaaggagacgaagatgcgagcaggatggaggaagtggactag

SEQ ID NO: 225801 - DNA, 2175 bp, synthetic construct
  misc_feature 1..2175: note = Description of Artificial Sequence: Synthetic coding sequence
  source 1..2175: mol_type = other DNA
atgcctgaagaagtacatcacggggaggaggaagtggaaacattcgcctttcaggctgaaattgctcagcttatgtctctgatcatcaatactttctacagtaataaggaaatcttcctacgcgagctcatttctaatgcgagcgacgcgctcgataaaattagatatgagagtttgacagaccctagcaagttggatagtggcaaagagctgaaaattgatatcattccgaatcctcaggaaaggactcttactctcgtcgacacaggtatcggcatgaccaaggccgatctcattaacaacctcgggaccatcgcaaagagtggaactaaggccttcatggaagctttgcaggccggtgccgatatttccatgatcgggcagtttggagttggcttctattctgcttatctggtcgccgaaaaggtggtggttatcaccaagcataatgatgacgaacagtatgcctgggaatcttcagccggagggagcttcaccgttagagcagaccacggggaacccataggcagggggacgaaggtgatacttcatctgaaggaagatcaaactgagtacctggaagagagacgtgtcaaagaggttgtgaaaaagcatagccagtttattggataccctatcaccctgtacctggaaaaggagcgggagaaggagatcagcgatgatgaggctgaagaagagaaaggggaaaaggaggaggaggataaagatgatgaggagaagccgaagatcgaagacgtgggcagtgatgaggaggatgacagcgggaaagacaagaaaaagaaaaccaagaagataaaggaaaagtacatcgaccaagaggagctgaataagacgaagcccatttggacgcgtaatcccgacgatatcacacaagaagagtacggggaattttacaaaagtcttactaacgattgggaagatcatctggcagtcaaacacttctccgtggagggccagcttgagttccgggctttgctgttcatacccagacgagccccatttgatttgttcgagaataagaaaaagaaaaataatatcaagctgtacgtgaggagggtgttcattatggatagctgcgatgagctgattcctgagtacctgaatttcatcaggggcgtcgtggattccgaggacttgccgcttaatattagcagagaaatgctccagcagtctaaaatactcaaggttatcagaaaaaacatcgttaaaaaatgcctagaactgttttctgaattggcggaggacaaagaaaactacaaaaagttctatgaggccttctctaaaaaccttaaactgggaattcatgaagactccacaaacagacgcagactgtcggagttgctccgttaccacaccagccagtccggcgacgagatgactagcctttcggagtatgtgtctagaatgaaggagacccaaaaaagcatttactatataactggagaaagtaaagagcaggtggccaattctgccttcgtcgaaagagtgaggaaacgcggattcgaggtggtatacatgactgagccgattgacgagtactgcgtacagcaactgaaagagttcgacgggaagtccctggtttcagtgactaaggaaggactggaacttcccgaggatgaagaggaaaagaagaaaatggaggagagtaaggctaaatttgaaaatctctgtaagctgatgaaggagatactcgataagaaagtggagaaagtgacaatttcaaaccgtctagttagctctccctgctgcatagtgactagcacatacgggtggacagctaacatggaacgcataatgaaggctcaggcgctgcgcgacaatagcaccatgggctatatgatggccaaaaaacatctggagataaatcctgaccatcccattgtggagacgctgaggcagaaagcagaggctgataaaaatgacaaggcagtaaaggacctggtggtactgctattcgagacagcattactgagcagcggtttctcactggaggatccacaaacccactctaaccggatatatcgcatgattaagctggggctgggcatcgacgaagatgaagtggccgctgaggaaccaaatgctgcggtccccgatgaaatcccaccccttgagggagacgaggacgcatcgcgcatggaggaggtggactag

SEQ ID NO: 225802 - DNA, 465 bp, synthetic construct
  misc_feature 1..465: note = Description of Artificial Sequence: Synthetic coding sequence
  source 1..465: mol_type = other DNA
atggacagctgcgatgagctgatacccgaatatctgaactttatccgcggtgtggtggatagcgaggacctgccgctgaacatcagccgtgagatgctgcagcagtctaagattttgaaagtcatcaggaagaacattgtgaagaagtgccttgaactcttctccgagctcgcggaagacaaagagaattacaagaagttttatgaagccttctcaaagaacctgaagctgggaatccacgaagacagtaccaaccgaagaagactgagcgagctcctgagataccacacatctcaatccggagacgagatgactagtctcagtgagtacgtgagtagaatgaaggagacccagaagagtatttattatattactggcgaaagcaaggaacaggtgtgcccatgtcctacttggctccctctcctcgtgtcttccgtgttcttccccctgcttagcctgtgctag

SEQ ID NO: 225803 - DNA, 489 bp, synthetic construct
  misc_feature 1..489: note = Description of Artificial Sequence: Synthetic coding sequence
  source 1..489: mol_type = other DNA
atggatagttgtgacgagctgatcccagaatacctgaatttcattagaggagtggtagactcggaggatctgccactgaatatatctcgggagatgctgcagcagtccaaaatcttgaaggtgatccgcaagaacatcgtgaagaagtgtctggaactgttcagcgagctagcagaggacaaggagaattacaaaaaattctacgaggcattcagtaagaatctgaagctcggaattcacgaggactcgaccaatcggcgtcgtttgtcagagctgcttaggtatcatacctctcagtcaggggacgagatgacgtccttgtccgaatatgtttctcgtatgaaagaaacgcagaagagcatctattacatcacaggtgagtccaaagagcaagtcgccaactccgcttttgtggagcgatgcccctgccccacatggctgcctctgctggtgtcctcagtctttttccctcttttatctctctgctag

SEQ ID NO: 225804 - DNA, 552 bp, synthetic construct
  misc_feature 1..552: note = Description of Artificial Sequence: Synthetic coding sequence
  source 1..552: mol_type = other DNA
atggacagctgcgacgagctcattcccgaatacctcaattttatcaggggcgtggtagattcagaggatctgccacttaacatcagccgagagatgctgcagcaatccaagatcctgaaagtgatcaggaagaatattgtgaagaaatgtctggaactcttctcagaactggcagaggataaggagaactataagaaattttatgaagcatttagtaaaaatctgaaattgggaattcacgaagacagtacaaacagacgcaggctgtccgagctgcttagatatcacacttctcagagcggcgacgagatgacatcgctgtctgaatacgtctctagaatgaaggagacccagaagtcaatatactatatcacggggagcccatgctggtgtctcgtgtttttctccttgtcatgcccttgcgtagaggggtccaagttacgagtcagcagccctatccccagcctgctgttgaccgccggattggacgtcgtctactgcgggcttttctacttcttgcattttgtgctgaaattgaagtatgcgaagtag

SEQ ID NO: 225805 - DNA, 2175 bp, synthetic construct
  misc_feature 1..2175: note = Description of Artificial Sequence: Synthetic coding sequence
  source 1..2175: mol_type = other DNA
atgcctgaagaggtccatcatggtgaagaagaagtcgagacattcgcgttccaggctgagatcgcccagctcatgtccctgataatcaataccttctactccaataaagaaattttcctgagggagctcattagtaatgcatcagacgcccttgataagattaggtacgaaagtctaactgatccgtctaaactggatagtggaaaggagttgaagattgacattatcccaaacccacaggaacgaacacttacacttgtggataccggcattggcatgacgaaggctgatctgattaataacctcggtactattgctaagtccggtacaaaagcgttcatggaggcccttcaggctggagctgacatctctatgattgggcagtttggagtggggttttactcggcttacctcgtcgctgaaaaggtggtggtcattaccaaacacaacgacgacgagcagtatgcatgggaaagctcagccggaggcagctttactgtcagagccgatcatggtgaaccgattggtcgaggaacgaaagttatactgcatctcaaggaggaccagacggagtacctagaagagagacgtgttaaggaggtggtgaaaaagcattcccagtttattggctaccctattaccctctacctcgaaaaagagagagaaaaagagatctctgacgacgaggcggaagaagagaagggcgagaaagaagaggaagataaagacgatgaggaaaagcctaagatcgaagatgtgggctcggacgaagaggacgactctgggaaggataaaaaaaagaaaaccaagaaaataaaagaaaaatacattgatcaggaagagctgaacaaaaccaaacctatctggaccagaaatcccgatgacatcacccaggaagagtatggcgaattttacaaatctctcaccaacgactgggaggatcacttggctgtcaagcacttctctgtcgagggccagttggagtttcgcgcactgttgttcatccctcggcgagcacccttcgacctgttcgagaataagaagaagaagaacaacattaaactgtatgtacgtcgggtcttcattatggattcttgtgacgagctgataccagagtacttaaacttcattaggggtgtcgtggatagcgaggatcttccccttaacatatctcgggagatgctgcagcaaagcaagattctgaaagtgattagaaaaaacatcgtcaagaaatgcctggaattgttcagcgaactggccgaagataaagagaactataagaaattctatgaagccttcagcaagaacttgaagctggggatccacgaagactcaacaaaccgtcgacgcctgagcgaactgcttagatatcatacgtcccagtctggtgatgagatgacatctcttagtgagtacgtgtcacgtatgaaggagactcagaagtcaatttactacatcacaggggaatcaaaggagcaggtcgctaacagcgcgtttgtggagcgagtgaggaaacgaggtttcgaagttgtatatatgaccgagcctattgatgagtactgtgttcagcagctaaaggaatttgacggtaagagtctggtctctgtgacaaaagaggggctggagctcccagaggatgaggaggagaaaaaaaaaatggaagagtctaaagccaaattcgaaaacctatgcaagctaatgaaggaaatcctggacaagaaggtggagaaggtcactatttcaaaccgcctggtctcctcaccctgttgtatcgttaccagtacctacgggtggactgctaacatggaaaggatcatgaaagctcaggctctgcgtgataattctacaatgggttatatgatggcgaaaaagcacctggaaataaacccagaccaccctattgtggagaccctccgccagaaggctgaagcagacaagaatgacaaagcagtgaaggatcttgtcgttcttctgtttgagacggcactccttagcagcggattctctctggaagacccacagacacacagtaatcgcatctatcgcatgattaaacttgggctgggtattgacgaggacgaggttgccgcagaggaacccaacgcggctgtgcccgatgagatccccccactggagggggacgaagacgcaagcaggatggaagaagtggattag

SEQ ID NO: 225806 - DNA, 429 bp, synthetic construct
  misc_feature 1..429: note = Description of Artificial Sequence: Synthetic coding sequence
  source 1..429: mol_type = other DNA
taatttattaggggcgtggtggattccgaggatctgccacttaatatctctcgtgaaatgctccagcagtcaaagattctgaaagttatacgcaaaaatattgtgaaaaaatgcctcgagttgttctctgagttggccgaggacaaagagaactacaaaaagttctacgaggcattctctaaaaacctgaaactgggcatccacgaagacagtaccaataggcgccgactgtctgagctgctgcgatatcacacaagccagagcggcgatgaaatgacctccctttctgagtacgtttcccggatgaaagagacccaaaagagcatttactatataaccggagagtccaaggagcaggtatgcccctgccctacttggctgccccttctcgtgagctccgttttctttccgctcttgtcactctgttag

SEQ ID NO: 225807 - DNA, 453 bp, synthetic construct
  misc_feature 1..453: note = Description of Artificial Sequence: Synthetic coding sequence
  source 1..453: mol_type = other DNA
tgattcatcagaggagtggtggacagtgaagatctgcctttaaacatttcccgcgaaatgctgcaacagtctaagattttgaaagtgatcaggaagaatattgttaaaaagtgcctggaactgtttagcgagctagccgaagacaaagaaaactataaaaaattctatgaagcctttagcaagaatctgaaactaggcatacacgaggactccaccaataggagacgccttagcgagctgttgcgctaccacacgagtcagtcaggagatgagatgacatcactcagtgagtatgttagtcgtatgaaggaaacccaaaagtctatctattacattactggggagagtaaggaacaagtcgccaacagcgccttcgtcgaacggtgtccatgccctacatggctgcccctgctagtgtcttcagtctttttccccctcctttctttgtgttag

SEQ ID NO: 225808 - DNA, 516 bp, synthetic construct
  misc_feature 1..516: note = Description of Artificial Sequence: Synthetic coding sequence
  source 1..516: mol_type = other DNA
taatttattagaggtgttgtcgacagtgaggatctcccgctgaatattagtcgagagatgcttcaacagtccaagattctcaaggtgattcggaagaatatcgtgaagaagtgtcttgaactcttttcagaactggctgaggataaggaaaattataagaagttctacgaagcgttcagcaaaaaccttaagttaggtatccacgaggacagcacgaacagaaggagactgtccgaattgctccgttatcatacctcccagtcaggtgatgaaatgacctctctgagcgagtatgtgtctcgtatgaaggaaacccaaaaaagtatctattatatcaccggctctccctgctggtgccttgtgtttttttctttaagctgtccttgcgtggagggaagcaagttgagggtgagctcccccatcccttcacttctgttgacagccggtctggatgtggtctattgcggtttgttttatttcctccactttgtgctgaaactcaagtatgcaaagtag

SEQ ID NO: 225809 - DNA, 507 bp, synthetic construct
  misc_feature 1..507: note = Description of Artificial Sequence: Synthetic coding sequence
  source 1..507: mol_type = other DNA
atgcctgaggaagtgcaccatggcgaagaagaagtggagacttttgcattccaggccgagattgcccagttaatgagcctcatcatcaacactttctactcaaacaaagagatttttctgcgggaattgattagcaacgcatcagacgccctggacaaaattagatatgagtcattgacagacccatctaaactggattccggcaaggaattgaaaatcgatatctctatgatcggccagtttggtgtaggcttctacagcgcatacttagtggcagaaaaagtcgtggtgattactaagcacaacgatgatgagcagtacgcctgggaaagttctgccggaggatcgttcacagtccgggctgatcacggtgagccaatcgggcgagggacgaaggtgattctgcacctgaaggaggatcagactgaatatttagaagagagaagagtgaaggaggtggtgaagaagcactctcagttcattggataccccattactctgtattag

SEQ ID NO: 225810 - DNA, 483 bp, synthetic construct
  misc_feature 1..483: note = Description of Artificial Sequence: Synthetic coding sequence
  source 1..483: mol_type = other DNA
atggaaatcccggttccagtgcaaccttcatggttacggcgagcctcggctcccctgccaggactgagcgccccaggaagattgtttgatcagagattcggagagggcttactggaggcggagctcgcagctttgtgtccaacgacgttggccccatattatctccgcgctccttccgtcgctctgcccgtcgcccaggttcccacagacccaggacacttcagcgttcttctggacgtgaaacacttcagtccggaggagattgcagtcaaagtggtcggcgagcacgtggaggtgcacgccagacatgaggaaagacccgacgagcatggcttcgttgccagggagttccaccgccgttacagactcccaccgggtgtggaccccgctgctgtgactagtgcactctctcccgaaggggtgttgagtattcaggccgcacccgcaagcgcacaagcccctccaccagccgctgccaaatag

SEQ ID NO: 225811 - DNA, 483 bp, synthetic construct
  misc_feature 1..483: note = Description of Artificial Sequence: Synthetic coding sequence
  source 1..483: mol_type = other DNA
atggaaatccctgtccccgtccagccctcttggcttcgccgtgcgtcagctcccctaccaggcctgtccgcacccggacgcctctttgaccagcgcttcggcgagggactgctggaagcagagctggcagccctttgccccacaacactcgcgccatattatctgcgggctccctcagtcgctttgccagtcgcccaggtccctacggatccaggccatttctccgttctgctggatgttaaacacttttccccggaggaaattgccgttaaggtggtcggagaacacgtcgaagtccacgcaagacatgaggaacggcctgacgaacacgggttcgttgctagggaatttcataggcggtatagattaccccctggggtcgacccagctgcggtcacaagcgctttatcaccggagggtgtgctaagtatacaggctgcaccagcgtccgcacaggcaccccctccggctgctgccaagtag

SEQ ID NO: 225812 - DNA, 591 bp, synthetic construct
  misc_feature 1..591: note = Description of Artificial Sequence: Synthetic coding sequence
  source 1..591: mol_type = other DNA
atggaaatccccgtcccagttcagcctagctggctgaggagggcttctgctccattgcccggactgagcgcccctggcaggctctttgaccagcgctttggcgaaggactccttgaggcggaactcgccgcattatgcccgacaacgctggcaccatattatttgagggcccctagcgttgctctgcctgtagcccaagtccctactgatccaggacatttttcagtactcctggacgtcaagcatttcagtcccgaggagatcgccgtaaaggtggtgggggaacacgtggaggtgcatgccaggcacgaggaacggccagacgaacacggatttgttgccagggaattccaccgtcgataccggcttcctccaggagtggatcctgctgccgttacgagtgccctgtcacctgagggtgtactgtccatccaggccgcaccagctccacgggaaccacctcaggccccttctatcaaagccgatcttaccccaccaagccagatgtcccgcgttcgacaaggtctctcatcacatcccctgctggactccgccctgacgagcatcctggacacagccctcatcacctag

SEQ ID NO: 225813 - DNA, 1590 bp, synthetic construct
  misc_feature 1..1590: note = Description of Artificial Sequence: Synthetic coding sequence
  source 1..1590: mol_type = other DNA
atggacttgccggtgggacccggagcagctgggccaagcaacgtaccagctttcctgacaaagctatggaccttggtttctgaccccgacactgatgcactgatctgttggagccctagcggcaatagttttcatgttttcgatcagggccaattcgccaaagaggtcctgcccaaatacttcaagcataataatatggcctccttcgtgaggcagctcaatatgtacggatttcgcaaggtggtccacatcgagcaaggtggactcgtcaagccggagcgagacgacacagagtttcagcacccatgcttcctcagaggacaagagcagctgctggagaacataaagcgcaaggtaacctccgtgagcaccttgaagtccgaggacataaaaatccggcaggattctgtcaccaaactactcactgacgtgcagttaatgaaagggaaacaggagtgcatggattctaagttattagccatgaagcacgaaaacgaggccctgtggagagaagttgcatcgctccgacagaagcatgcccaacagcagaaagtcgtaaacaaacttattcaattcctgatttccctagtgcaatccaatagaatcctgggtgtgaagcgcaaaatccctctgatgctaaatgactcaggaagcgcacacagtatgcccaagtactcgcgtcagttttccctggaacatgttcatggttccggcccatattccgccccatcgccagcttacagctcttcttctctttacgcacccgatgcggtggccagcagcggcccaattatctctgatatcacggagctagcccctgcctcgcccatggccagcccgggaggtagcatcgacgaacggccactatcctcctctccattggtacgggtaaaagaggaaccacctagccctccccaaagccctagggtggaggaggcaagtcccggacggccatcttcagtcgatactttgctctcccctactgccttgattgactccatcctccgagagtcagagcccgctcccgcttcagtgacggcccttaccgatgccagaggacacaccgacactgagggcaggcccccatctccgccaccaacctcaacccccgaaaaatgcctttccgtggcctgtctggacaagaacgaactcagcgaccatttggacgctatggactccaacctagacaacttgcagactatgctctcttcgcatggcttcagcgtggacacgtccgcccttctggacttattttcacccagtgtgacagtccccgatatgtctctgcctgatctcgatagtagcttggcttccatccaggagctgctgagccctcaagagcccccacggccacctgaggccgagaatagcagtcctgatagtggtaaacagctagttcattacacagctcagcccctattcctgctcgaccctggcagcgtggatacgggtagcaatgacctccctgtcctattcgaattaggtgagggtagttatttctccgaaggtgatggatttgctgaggacccaaccattagcctccttaccgggtccgagcccccaaaggccaaggacccaaccgtatcctag

SEQ ID NO: 225814 - DNA, 1611 bp, synthetic construct
  misc_feature 1..1611: note = Description of Artificial Sequence: Synthetic coding sequence
  source 1..1611: mol_type = other DNA
atgaaacaaagcagcaatgtgcctgctttcctttctaaactttggactttggtggaggagacgcacacgaatgagtttatcacctggtctcagaatggacaaagcttcctcgtgctggatgagcaaaggttcgcaaaggaaatcctgcccaagtattttaaacataataatatggctagcttcgtgagacaactgaatatgtatggattccgcaaagtggtccacattgactcaggtatagtcaagcaggagagagacggccctgtggagttccagcacccctacttcaaacaaggacaggacgacctgctggaaaacatcaaacgaaaggtgagttcctcaaaacccgaagagaacaaaattcgacaggaagatctgactaagattatttcgtctgcccagaaggtacagatcaaacaagagaccatcgagagcaggttatctgagttgaaaagtgaaaatgaatctctgtggaaagaggtgagtgagctgcgtgcaaaacacgctcagcagcagcaggtgatcagaaaaatagtgcaattcatcgtcacactcgtacagaataaccagttggtgtctctgaaacggaagcgccctcttctactcaatacgaacggcgctcagaaaaaaaatcttttccaacacatcgtaaaagagcccactgataatcatcaccataaagtcccccacagccgcaccgaaggcctcaagccacgggaaaggatcagcgacgacatcattatttatgacgtaaccgacgacaacgccgacgaggagaatattcccgttattccagagaccaatgaggacgtgatatccgatcccagtaactgctctcagtatcctgacatcgttatagtggaagatgataatgaggatgagtatgccccagtcatacagtccggagaacagaacgagcccgctagggaatccctttcctccggaagtgacggtagctcgcccctaatgtctagcgctgtccagctaaatggctcatcaagtctcacctctgaggaccctgtgacaatgatggactccatcctgaatgacaatatcaatctcctcggcaaggttgaactgctggactaccttgatagcatagactgcagtctggaggactttcaagcgatgctgagcggccgacagttctctatcgacccggatctgctcgtcgacttgtttacaagcagcgtccaaatgaaccctaccgattacataaataatacgaaatccgagaacaaaggactggagacaacgaaaaacaacgtggtacagcctgtcagtgaagaagggcgtaagtcaaaatccaaacctgataagcagctgatccagtacactgcatttcctcttctggcctttctcgacgggaatcctgccagtagtgtggaacaggcatctaccactgcatcgagcgaggtcctgtccagtgtggataagcccattgaagttgatgagttgctcgatagttcccttgatcctgaaccaacacaaagtaagctggtacgcttggaaccactcaccgaagctgaagcaagtgaagccacgctgttctatctttgcgagctggcacccgcacccctggattccgacatgcctcttcttgacagctag

SEQ ID NO: 225815 - DNA, 1557 bp, synthetic construct
  misc_feature 1..1557: note = Description of Artificial Sequence: Synthetic coding sequence
  source 1..1557: mol_type = other DNA
atgaaacaaagttcgaacgtgcccgcattccttagcaaactctggactctggttgaagagactcatactaatgagtttattacatggtctcaaaatggacaatcctttcttgtgctggacgaacagcggtttgcaaaggagattctccctaagtactttaaacataacaacatggcaagcttcgttcgacagctcaacatgtatggcttccgtaaggttgttcatatcgactccggaattgttaagcaggaaagggatggccctgtagaatttcagcacccctattttaagcagggccaggacgacttactcgaaaacatcaagagaaaagtgtcctcctcaaagcctgaggagaataaaattagacaagaggatctcactaagatcatttcttccgcccagaaagtccagattaagcaggagactattgaatcccggttgagtgaactgaagtcagagaacgaaagtttgtggaaggaggtgagtgaactgcgcgctaaacatgcccagcagcagcaagttatcagaaagatagtccagttcatcgtgacactagtgcagaacaaccagcttgtcagcctgaagcggaaaagaccccttctcctaaatacaaatggtgcccagaagaagaacctgtttcagcacattgtgaaagagcctaccgacaatcaccaccacaaggtgccccactcccggacagaaggactgaaaccacgggagcgtattagtgacgacataatcatctatgacgtgactgatgataatgccgatgaggagaacattcctgtgataccggagaccaacgaggacgtgattagcgacccgagtaattgcagtcagtatccggatatagtgattgttgaggatgacaatgaagacgagtacgcccctgtcatccaatctggggagcagaacgagcctgcccgagagtctcttagcagcgggtcagacggatcttcacccctgatgtcatctgcagtacagttgaatgggagcagcagcctgacaagcgaagatccagtcacgatgatggacagtattttaaacgacaatatcaaccttctgggcaaggtggaactgctcgactatttagatagcattgactgctctctagaggacttccaagctatgctctccggcagacagttttcaatagatcctgatctgttggtggactcagagaataaggggcttgagaccactaagaacaatgttgtgcaacccgtgtcggaggaggggagaaaaagtaagtccaagccagacaaacaactcattcagtataccgcttttcctctcctggctttccttgacggcaatccagccagttccgtggaacaggcttctacgactgcgagcagcgaagttctgagcagtgtcgataagccaatagaggtcgacgagcttctggattctagcctggaccccgaacccacccagtcgaaactggttcggctcgagcctctcacagaggcggaggccagcgaagcaactctgttttacctgtgcgaactcgccccagcacctctagactctgacatgcccctactggactcctag

SEQ ID NO: 225816 - DNA, 1005 bp, synthetic construct
  misc_feature 1..1005: note = Description of Artificial Sequence: Synthetic coding sequence
  source 1..1005: mol_type = other DNA
atgggggaggccggtgcagcagaggaggcctgtagacacatggggacgaaggaggagtttgtgaaagtgcggaagaaagacttggaaaggctgacaactgaggtcatgcaaatccgcgattttttgcccagaattctcaacggcgaagtgctcgagtcattccagaagctgaagatcgtggagaaaaaccttgagaggaaggaacaggagttagaacaactaaaaatggactgcgagcattttaaagctcgcctcgaaacggttcaagccgataatattcgagaaaaaaaggaaaagttggctctcagacagcagctcaatgaagcaaagcagcagttgctgcagcaggctgaatactgcacagaaatgggggcagctgcctgcaccctgctctggggggtctctagcagtgaggaagtggtcaaagccatccttggaggcgataaagcactgaaattttttagcattaccgggcaaacaatggagagtttcgtgaagagcctcgacggcgacgtgcaggagctggatagcgatgagagtcagtttgtctttgccttggctggcatcgtcacaaatgtggcggctatcgcctgcggcagggaattcctggtcaattcatcccgagttctattggacacaattctgcagctcctgggggatttgaagcccggacagtgtacgaagctgaaggtgctaatgcttatgtctctgtacaatgtcagtatcaatcttaagggcctcaagtacatctcagagtcgccagggttcattcctctgctgtggtggctactgagtgacccagacgcagaagtctgcttgcacgtattgaggctggtccagtccgtggtgctggagcccgaagttttcagcaaatccgcaagtgagtttcgaagtagtctgcctctgcagcggattttggctatgagcaaatcccgtaacccgcgtcttcagacagcagcgcaggaactgctggaggatctgcgcacccttgagcataacgtgtag

SEQ ID NO: 225817 - DNA, 780 bp, synthetic construct
  misc_feature 1..780: note = Description of Artificial Sequence: Synthetic coding sequence
  source 1..780: mol_type = other DNA
atggactgcgaacactttaaggctcggcttgaaactgtgcaagccgataatatcagagaaaagaaagagaaacttgcgctgcgacaacaacttaacgaggcaaaacaacagttgctgcaacaggctgaatattgcaccgaaatgggggctgctgcatgtacactgctctggggggtgagctcttcggaagaagtcgtgaaggccatactcgggggagataaggctctgaagtttttcagcataaccggacagaccatggaatcttttgtcaaatcgctggatggcgacgtacaggagctggacagcgacgagtctcagtttgtctttgccctggcaggtatcgtgactaatgtagccgctattgcctgcggccgagaatttttggtgaattcatcccgcgtcctgctagataccattctgcagcttttaggggacctaaagcccggacaatgcacaaaattgaaggtcctaatgttaatgtccttgtacaacgtgtcgattaatttgaagggcctcaagtatatcagcgagtctcccggtttcattcccctgctgtggtggttgctgtccgacccggacgccgaggtttgcctgcatgttctcagactagtgcagagtgtggtgctggaacccgaagtcttcagcaagtccgccagcgagttccgcagctcccttcctctccagcgcatcttggccatgtccaaatctagaaatcccaggctgcagacagccgcacaggaacttttggaggacctaagaacactcgagcataatgtttag

SEQ ID NO: 225818 - DNA, 1479 bp, synthetic construct
  misc_feature 1..1479: note = Description of Artificial Sequence: Synthetic coding sequence
  source 1..1479: mol_type = other DNA
atgcaggaggcaccagctgccctgcctaccgaacccggacctagccccgtacccgcattcctggggaaactgtgggccctggtgggtgatcccggaacagaccacctaatccggtggtccccatccgggacatcctttttagtctcagaccagtctcgcttcgcaaaagaagttctcccccagtacttcaagcactccaatatggctagcttcgtgagacaactgaacatgtacggctttcgaaaggtcgtctccatcgaacagggaggcctgcttagaccggaacgcgaccatgtcgagtttcaacacccatcttttgtccggggtcgggagcagttactcgaacgggtacgcagaaaagttccagctctgcgcggagacgatgggaggtggcgtccagaggacctaggccgtctcctgggggaagtccaggctctccggggagtgcaggagtccactgaagcgaggctccgggagctcaggcagcaaaatgagattctgtggcgggaagtggtgacccttcgacagagccacggccaacagcacagggtgattgggaagctgatccagtgcctctttggaccactccaggcaggaccttctaacgctggcggaaaacgaaagttaagtcttatgctcgacgaagggagttcctgtcccacccccgctaagttcaacacatgccctctgccgggtgcccttctgcaggatccttactttattcaatcccctctgcctgaaacgaatctcggcctgagcccccatagagcaagggggccaatcattagtgacatccccgaagacagcccgagcccggaagggacgcggctctccccatccagcgacgggcgtcgggagaagggccttgccctgctgaaggaggaacccgcatcccccggtggagacggggaagcaggtctcgctctggccccaaacgaatgtgatttctgtgtgactgcccctcctccgctcccagtggcagtcgtccaggccattctggaaggaaagggatcgtttagtcctgaaggaccgcgaaacgcccagcagccagaacccggagatccccgagagatccctgaccgaggacccttgggcctcgaatctggcgatagatctccagagtccttactgcccccaatgctgctccagcccccacaggagtccgtagagcccgctggacctctggatgttctgggccctagtcttcagggcagggagtggaccctcatggacctggatatggaactgtctctgatgcagccactagtgcctgagcgtggagaacctgagctggcagttaaaggccttaatagtcccagtcctggcaaagatccaacactgggtgctccgttgttattggacgtgcaggctgctctgggagggccagccctgggcttgccaggggcactgaccatatattctactcctgaatcccgcaccgcttcctacctgggcccagaggcctctcccagtccgtag

SEQ ID NO: 225819 - DNA, 1389 bp, synthetic construct
  misc_feature 1..1389: note = Description of Artificial Sequence: Synthetic coding sequence
  source 1..1389: mol_type = other DNA
atgcaggaggcccctgcagctctcccgaccgaacccggaccatcccctgtgcctgctttcctcggcaaactatgggccctggtgggagacccagggaccgaccacctcatccggtggagcccctctggtaccagctttctggtgtctgaccaatctaggttcgcaaaggaagtacttccccagtacttcaaacactccaacatggccagcttcgtgagacagttgaacatgtacggattcaggaaagtggtttcaatagagcagggaggccttctgcgccctgaaagagatcatgtagaatttcaacatccgtcgtttgtacgcggacgcgaacagctgctggagagagttagacggaaggtccctgctctgagaggtgatgacggacgctggcgccctgaggatctcggacgcctcctgggagaggttcaggcgttgcggggagtccaggaaagtaccgaagccaggctgagagaactgcgtcaacagaatgaaatcctgtggagagaggttgttacattgcgtcaatcccacggtcaacagcaccgagttatcggcaagttaattcaatgtctctttggaccccttcaggccggtccctccaatgcaggcggaaagagaaagctatctcttatgctagacgagggttcgagttgccccaccccagctaaatttaacacgtgtccgctgcctggggctctgttgcaagatccttattttattcagtcaccttctacctattctctgtcccagaggcaaatttgggctttagcccttacgggccctggggcacccagtagtctcacaagccagaaaaccctccaccccttacggggacccggatttctgccacctgtaatggctggggctcccccaccgttgcctgtcgctgttgttcaggcgatcctggaggggaagggcagcttctcccctgaaggcccaagaaacgcgcagcagccagaacctggcgatcccagagagatcccagataggggcccattaggcctggagagtggggacagatctccagagagcctgctgccacctatgttactgcagccaccgcaggagtcagtggaacccgctggtccgctcgacgtcctgggaccttcattacagggccgtgaatggactctaatggatctggacatggagcttagtctgatgcagcccctggtacctgaacggggagagccggaactggctgttaagggcctgaattcaccctcaccaggtaaagatccaacccttggggcacctctgcttcttgacgttcaagctgctctgggcggaccagcactcggcctgcccggtgcgctgactatctattctaccccagaaagcagaacagccagctacctgggacccgaggccagtcctagcccttag

SEQ ID NO: 225820 - DNA, 1251 bp, synthetic construct
  misc_feature 1..1251: note = Description of Artificial Sequence: Synthetic coding sequence
  source 1..1251: mol_type = other DNA
atgcaggaggctcctgctgctttaccaacggagcccggaccaagtcccgtgcccgcttttctcggcaagttatgggctctggtgggcgacccaggtaccgaccacctaatccggtggagcccatccgggacatcctttctggtttccgaccaatcgcggttcgctaaggaggtgctgccccagtatttcaagcattcaaatatggcgtcctttgtccgccagctgaatatgtatggatttagaaaagtagtgtccatcgagcagggcggactgttaagaccagagcgcgaccacgtggaattccagcacccttcctttgtccgaggacgggagcagctcctggaacgtgtgcgaagaaaggtgcctgccctccgcggagacgacggcagatggagacccgaagacctcggacgcctgctgggtgaggtgcaagcgctgcgcggtgtccaggagtctacggaggcaagactgagggaattgcggcagcagaatgagatcctctggcgcgaagtggtcactctgaggcagtcccatggccagcagcatagggtgataggcaagctcattcaatgtctcttcggacccttacaggcaggacctagtaacgcaggcggaaaaaggaagctgtctctaatgctggatgaaggatcttcctgtcctacccctgctaagtttaacacctgtccacttccaggtgcccttctccaggatccatattttattcagtccccactgcccgagaccaatctaggccttagtccacacagggcccgaggaccaatcattagcgatattcctgaggatagtcccagtcctgagggcactcgcctgagcccgtcatccgacgggaggcggggacccctcgggctggagagcggggacagaagcccggaatccctgctcccccctatgctgctgcaacccccacaggaatcagttgaacccgctggccctttggacgtcctgggacccagccttcaaggtcgggaatggacattgatggaccttgacatggaactttccctgatgcagccgctcgtcccagaacggggagagcccgaactggccgtgaaggggctcaacagcccttctcccggtaaagatccaactttaggtgctcctctgctgttagacgttcaagctgctcttggagggcctgctctgggcctgcctggggcactgaccatatattccaccccagagtctaggaccgcgagctatctgggacccgaagctagtcctagtccttag

SEQ ID NO: 225821 - DNA, 1479 bp, synthetic construct
  misc_feature 1..1479: note = Description of Artificial Sequence: Synthetic coding sequence
  source 1..1479: mol_type = other DNA
atgcaggaagctcccgcagctctccccaccgagcctggacctagtccggtgccagctttcctgggaaaactgtgggccttggtcggcgatcccggaactgatcatctgatcagatggagtccgtcaggcacctcctttttggtttcagaccagtccagatttgccaaggaggtcctgccacagtattttaagcatagtaatatggcatcattcgttagacaactgaacatgtatggtttccgcaaggtcgtcagcattgaacagggaggtttactgcggccagagcgcgaccacgttgagtttcagcacccctctttcgttagaggacgtgagcagctgttagagcgagtccgcaggaaggtgccggcactgcgcggagatgatggaagatggcgacccgaggatttgggtcggctgctgggtgaggtccaagccctacgcggagtccaggaaagcacagaagcacgactgcgggagctgcgacagcagaacgaaatcctgtggagggaagtcgtgaccctgcgccagtcacacggacaacagcaccgcgtgataggcaagctgattcagtgtcttttcggcccattgcaggccggaccctccaatgctggcggtaagaggaaactgagccttatgctcgatgaaggaagtagctgtcctactcctgctaaatttaatacatgtccattaccaggagcgctgctgcaggacccttactttatacagtcaccacttccagagaccaatttgggactgagtcctcaccgggctagaggcccaataatcagtgatatccccgaggattctccaagccccgaaggaactcgcctttctcccagcagtgacgggcgaagagagaagggcctggccctgctgaaggaggagcccgctagtccaggtggcgacggtgaagccggactggccttggccccaaacgagtgtgacttctgcgtgaccgccccaccacctctgccagtcgccgtggttcaagcaatcctggaaggaaaagggagcttttcacctgaaggacctaggaatgctcagcagccagagccaggagaccccagagaaattccagacaggggacctctgggcctcgaatccggagaccgttcacccgagtctctgctgcccccaatgcttttacagccacctcaagaaagcgtggagccagctggtccgttagacgtgctggggccttcactgcagggacgggagtggaccctaatggaccttgatatggaactctctttgatgcagcctctggtcccagagaggggagagcctgaactcgccgtaaaaggtttgaatagtcctagccccggaaaagaccccacactgggggcacccctgcttctcgacgtacaggctgccttgggtggacccgctctaggattgccaggagcactgactatatattctactccagagagtcgcaccgcctcataccttggaccagaagcttccccaagcccttag

SEQ ID NO: 225822 - skipped

SEQ ID NO: 225823 - DNA, 414 bp, synthetic construct
  misc_feature 1..414: note = Description of Artificial Sequence: Synthetic coding sequence
  source 1..414: mol_type = other DNA
atgtcctcactcattaggagggtgatctcaactgcgaaggctcctggggcaataggtccatactcccaggctgtccttgtcgatcgaacaatttacatctccggccagatcgggatggatccctcgagcggccagcttgtgagtggcggagtcgcagaagaggctaagcaagcactgaaaaacatgggggaaattttgaaagccgctggatgtgactttactaatgtggtgaagacaacagtcctgctggcagacatcaacgattttaatacggttaatgaaatctacaaacagtatttcaagtcgaacttcccggctcgcgcagcttaccaggttgccgcattgccaaagggaagcaggattgagattgaggcggtagcgatccaggggcctctgaccacggcctctctttag

SEQ ID NO: 225824 - DNA, 14505 bp, synthetic construct
  misc_feature 1..14505: note = Description of Artificial Sequence: Synthetic coding sequence
  source 1..14505: mol_type = other DNA
atgccatctgaaagcttctgtctggccgcacaagcaaggttagactctaaatggcttaaaacagatatccagctggcttttaccagagacggcctttgcggcctttggaatgaaatggttaaggacggcgagatagtgtatactgggacagagtccacccagaacggcgaactccccccacgcaaggatgattccgtagagccttccggcacaaagaaagaagacttgaatgacaaggaaaaaaaagacgaagaggagactccagctccaatttatagagccaagagtattctggatagctgggtgtggggtaagcagcccgacgttaacgaacttaaggaatgtttgtcagtgctggttaaagagcagcaggctctggccgtgcagagcgccacgacaacactgagtgctctccgacttaaacagcgcctggttatcttggaacggtatttcatcgcgcttaaccggacggtcttccaggaaaatgtgaaggtcaagtggaagtcctccggtatctccttaccacctgtggacaagaagtcatccaggcctgccggtaagggggtggaggggctggcaagagttggctcccgagcggcattatcgttcgctttcgcatttttaaggagagcctggcgctcaggcgaggacgccgacctgtgtagtgaacttctccaggagtctctggatgcattgcgggctctgccagaggcgagcctgtttgatgaatctacagtctcatctgtgtggttggaagtggtcgagcgggctacacgttttctgcgcagtgttgtgacgggggacgtgcacggcacacccgctactaagggaccgggaagcatccctttacaggatcagcacctcgccctagctatcctgcttgagctcgcagttcaacgcggtaccctgtcccaaatgttatcagccatcctgctgcttctgcagttatgggactccggtgcccaagaaactgacaacgagcggtctgcccagggcacgagtgccccattgcttccactactccagcgcttccagagcatcatctgccgtaaggatgctccacactcagaaggggatatgcacctcctgagcggacccctaagtcccaatgaatccttcctccgatatctgactctgccgcaggacaatgaattggccatcgaccttaggcaaacagcagtcgttgtaatggctcatctcgatcgcttggctacaccttgtatgccccctctctgctcgagtccaacatcccataaaggaagtttgcaagaggtgatcggctggggcctcatcggatggaagtactacgctaacgtgatcggcccaatacagtgcgagggcctcgcaaatttaggcgttacgcagatagcctgtgccgaaaagagattcctgatcctgagtcgcaatggacgagtctacacgcaggcctataactcggatactttggctccccagttagtccagggtctggcaagccgcaacatcgtcaaaattgcggctcattccgacggacaccactacctggccctggcggctacaggcgaagtgtactcctggggctgtggggacggaggcagactgggacacggtgacactgtccccttagaggagccgaaagtgatttctgctttctcaggaaaacaggccggtaaacatgtagtgcacattgcatgtggcagtacatactcagcagcaattaccgctgagggagagctgtatacatggggccgtggcaattacggcaggctggggcatgggtccagtgaagacgaggctatcccaatgttggtcgccggactaaaagggctaaaggttatagacgtagcgtgcgggagcggagatgcccagacactggcggtcaccgaaaacggacaagtgtggtcttggggcgacggggattatggcaaactgggccgtggcggatccgatgggtgcaagacccccaagctcatagaaaagctccaggatttggatgtcgtgaaagttagatgcggttctcagttctccatcgctctgactaaagacggccaggtttatagttggggcaaaggagacaaccagcgccttggccatggcacagaggaacacgtccgttatcctaagctgctcgagggactgcagggaaaaaaagtgatcgatgtggcagccggttccactcattgtctggccctgacagaggattcagaggttcattcctggggctctaatgatcaatgtcagcatttcgacacccttagggtgaccaagcccgaacccgcagctctccctggattagatactaagcatattgttggtatcgcgtgtgggcctgctcagagttttgcatggtcgtcttgcagcgagtggagcatcggcctgcgtgtgcccttcgtcgttgacatctgctccatgacatttgagcagctggacctcctgctgcggcaggtgtcagaagggatggacggtagcgcggactggcctcccccacaagaaaaggagtgcgttgcagtggccactctgaatctgctgaggctgcaacttcatgcggctatcagccatcaggtcgacccggagtttttgggtctgggactaggtagtatcctgctgaattcgctgaagcagacagtggtgaccctcgcctccagcgccggtgtgctcagcactgtccagagcgccgctcaggccgttttgcagagcgggtggtccgtgttgctgcctaccgccgaggagagggcgagagccctgtccgcactactcccctgtgcagtgagcggtaatgaggtaaatatctcaccaggacggaggtttatgatcgatctgctggtcggatctttgatggcagacgggggactggagagcgctctgcacgccgctatcaccgctgaaattcaagacatcgaagctaaaaaggaagcccaaaaagaaaaggagatcgatgagcaagaggcaaacgcaagtacctttcacagatcaagaactccactggacaaagatttgattaacactggaatctgcgagtcctcaggcaagcagtgtctgcctctcgtgcaactaatccaacagctattacggaacatcgcttcgcagacagtggcacggcttaaggacgtggcgagaagaatttcttcatgcctggactttgagcaacactctcgggaacggtctgcctctctggacctcttgttgaggttccagagactgctaatcagcaagctgtaccctggggaaagcataggccagaccagtgacatatcttctccggagctgatgggggtgggctccttgctgaagaagtataccgctctcctatgtacgcacattggggacatactgcctgtggccgcttctattgcctcaactagttggaggcattttgccgaggtagcctatatagtggaaggtgactttaccggggttctgctgccagaactggtggtttccatcgtgctactgttatctaaaaacgcaggattgatgcaggaagcaggggcagtgccattactgggagggctgctggagcacttggatagatttaatcatctggcccctggcaaagaacgagacgatcacgaggaacttgcatggccaggaataatggagagcttctttacgggccagaattgccgaaataatgaagaagttacactgattaggaaggccgatttagagaatcacaataaggatgggggattttggacggtcattgacggtaaggtttacgatatcaaggactttcagacacagtccctcaccggcaatagcatacttgcccaattcgccggtgaagatcccgtcgttgcacttgaggctgcactccaattcgaagacacaagggaatccatgcacgcattctgtgtggggcagtatctggaacccgatcaggaaattgtgaccatccccgatctaggttctctaagcagcccgttgattgacactgagcgcaatctggggttgctgctgggtctacatgccagttacctggctatgtcaacgccactgtcacccgtagagattgagtgcgctaaatggctgcagtccagtatattttctggcggactgcaaacctcacaaattcactattcatacaacgaggagaaagacgaagatcactgttcctcaccaggtggcacacccgcatcgaagagccgcctctgttcccatagacgcgcactcggagaccatagtcaggcgtttctgcaggcaatcgctgataataacatccaggaccacaacgtgaaagattttctctgtcaaatagagcgttactgccgccagtgccacttgacaaccccaattatgtttcctcctgaacacccagtggaagaagtgggacgcctgcttctttgctgtctcctgaaacacgaggacctgggtcacgtggctctgtccctcgtgcatgcaggtgccttgggcatagaacaagtaaagcacaggaccttgccaaagtccgtcgtcgatgtctgcagggtcgtataccaagcaaagtgtagcttgatcaaaactcatcaggagcagggtcgatcctacaaggaggtatgtgcaccggttattgaaagactccggttcctcttcaacgagctgagaccggctgtctgtaatgacctatccatcatgtccaaattcaaactgttgtcttcactaccccgttggaggcgcatcgcccagaaaatcatcagggagcgacgcaaaaaaagggtacctaagaaacctgaatccacagatgacgaagaaaaaattggaaatgaagaaagcgacctcgaggaggcttgcatactcccccatagccctatcaacgtggacaagaggcccatcgcgattaagtctcctaaggacaaatggcaacctctcctgagtacagtgaccggcgtacataagtataaatggttgaagcagaatgtgcagggactgtacccccagtcgccccttttgtccactatcgcagaatttgccctcaaagaagaacctgttgatgtggagaagatgaggaaatgcctactgaagcaattggaacgagccgaggtgcggctggagggaattgatacgatcctgaagcttgcaagcaaaaatttccttctgcctagtgttcagtacgccatgttttgtggatggcagcggctcataccagagggtatcgacattggtgagccacttacagattgcctcaaggacgtcgacctgattccacccttcaaccggatgctacttgaagtgacatttggtaagctgtacgcatgggccgttcagaacatcaggaacgtcctcatggatgcttctgccaagtttaaggagcttggcatccagccagtgccactgcagaccatcaccaacgagaatccctccggccctagcctcggcacaattccccaggcgcgatttctcctagttatgctctcaatgctgaccttgcaacatggcgcaaataaccttgatctccttttgaattcaggcatgctggcactgacccagaccgctctgcgtttgatagggccttcttgcgacaacgtggaagaggatatgaatgcctccgcccagggggcatcagccaccgtgttagaggagactagaaaggagacagcaccagtccagttacccgtgtcgggcccagagctcgcagccatgatgaagattggcacacgtgtgatgagaggggtcgactggaagtggggggatcaggacggcccaccaccaggacttggtagggttatcggggaactgggagaagatggctggataagagtgcagtgggacaccggtagcaccaattcttataggatgggaaaagaaggcaagtacgaccttaaactggccgagctaccagcggctgcacagcccagtgcagaggacagcgatactgaggatgactcagaggccgagcagaccgagcggaatatccatcctactgcaatgatgtttacttctaccatcaatctgctccagacactgtgcctgagtgctggcgttcacgctgagatcatgcagtccgaagccacaaagacgctttgcggtctactgcgaatgctggttgaaagcggcactactgacaaaaccagctctcccaaccggcttgtttaccgggagcagcacagaagctggtgtactctgggttttgtgcggagcatcgcactgaccccacaggtatgtggcgctctatcaagtccccagtggattacgctcctgatgaaggttgttgagggacacgcgccatttacggcaaccagtttgcagcgccagattctagctgtgcatctgctacaagccgttctgccgagctgggacaaaaccgagcgtgccagggacatgaaatgcctggtggaaaagctcttcgacttccttggtagcctcctgaccacatgctccagtgatgtgccgctgctgagagaaagcaccctaagacgtaggagagtcaggccccaggctagcctgacagcgacccactccagtacgctagctgaagaggttgtggcattgcttcgaaccctccattctcttacccagtggaatggtcttatcaataagtacattaattcacagctgcgcagcatcacacactcgtttgtcggaagaccctccgagggggcacagctggaggactatttcccagactccgaaaatccagaagtaggaggcctcatggccgtactggctgtgattggaggtatcgatgggagattaaggcttggaggacaggtgatgcacgatgaattcggcgagggcaccgttacgcgcattacaccgaaaggaaagataaccgtgcaattttccgatatgcgcacatgcagagtgtgtccgctgaaccagctgaaacccctgccagccgtggcttttaacgtgaacaacctgccattcacagagcccatgttgagtgtgtgggctcagctggtcaatctggcgggatccaagctggaaaagcataaaatcaaaaagagcaccaaacaagccttcgccggacaggtggaccttgatctgctcaggtgtcagcaacttaaactgtatatcctgaaggcagggagggcactgctcagccatcaggataagctgcggcaaatcctcagccagcctgctgtgcaagaaacaggaaccgtccatacggacgacggcgcagtggttagtcccgatctcggcgacatgagcccagagggccctcagcctcccatgattctgttgcaacagcttctggcctcagccacccagcctagtcctgtcaaagctatcttcgataagcaagagctcgaagccgcagccctggctgtatgtcagtgtcttgctgtggagtcaacccacccaagtagtcccggatttgaagactgctccagctccgaagctacaactccagtcgctgtccagcacattcgtccagccagagtgaagagacgaaagcagtcccccgtgcctgcactgccgatcgtggtacagctgatggagatggggttcagtcggagaaacattgaattcgccctgaagagcctcaccggtgcttccggcaatgccagcagcttgccaggggtcgaggccctcgttggttggttgttggatcactccgatatacaagtgacagagctgtcagacgccgacacagtgagcgatgagtattcagatgaggaagtcgtggaagatgtggacgacgccgcatactccatgtcaacgggtgccgtggtcaccgaatctcagacttataagaagcgcgctgatttcctgtcaaatgacgactacgccgtgtatgtgagagagaacattcaggtcggaatgatggtccgctgctgcagggcgtatgaggaagtctgcgagggagacgtgggtaaggtgattaagctggatagagacggcttgcatgacttgaatgtgcagtgcgactggcagcagaagggaggaacctactgggtcagatacattcacgtcgaactgatcgggtatcccccaccgtctagcagcagtcatatcaagattggtgataaagtgagagtaaaagcctctgtgacaacacctaaatataaatggggaagtgtgacgcaccagtcagttggcgtcgtgaaagccttcagcgcaaatggtaaggacattatcgtcgatttccctcagcagagtcattggaccggtctcctgtctgaaatggagctggtgccttccatccacccaggggtcacctgcgatggttgccagatgtttcctattaatgggtccagatttaagtgcaggaattgtgatgactttgacttctgtgagacctgtttcaaaaccaagaaacacaatacccggcatacattcgggaggatcaacgagcctggacagagcgccgtattttgtggtcggtctggaaaacagctcaagcggtgccactctagccagccgggtatgcttctcgatagctggtctcggatggtgaagtcactgaacgtgtcctcttcggttaatcaggcctcccggctgatcgatggctccgagccatgttggcagtctagcggctcccaaggcaagcactggatacgcctcgagatttttccagatgtcctcgtccaccgtctgaagatgatcgtggatcctgccgactcttcttatatgccgtctctggtggtcgtctccggaggcaacagtcttaataacctcatcgagttgaagactatcaatatcaaccccagcgacacaacggtccccctgctgaatgattgcaccgagtatcacagatatattgagatcgctataaagcagtgtcgttcatctggaattgattgtaagatccacggccttatcttattggggagaatcagagccgaagaagaagatctggcggctgttcccttcttagcctcagataatgaggaggaggaagatgagaaaggtaactctggctccttgatcaggaaaaaggcagcaggtctcgagtccgccgctactatcagaaccaaggtgttcgtatggggtctgaatgacaaagatcaactgggaggcttgaaaggaagcaagataaaagttccaagtttttcagagaccctgagcgctttaaacgtcgttcaggtggctggaggtagtaaatcactcttcgctgtcaccgttgaggggaaggtatatgcctgcggtgaagccactaacgggagattgggcttaggcattagcagcggaacagtgcctataccccgacagatcacggctctaagcagttatgtggtaaagaaagtcgcagtacattctgggggaagacatgctaccgctctgacagtcgatggcaaagttttctcctggggggagggcgatgatggcaagctgggccacttctcccgcatgaattgcgacaagccacgcctgatcgaagcactgaagactaaacgcattagagatatcgcatgtggctcttcccacagtgccgctctcacgtccagcggggagctgtacacatggggtctgggcgaatacggcaggctcggtcacggcgacaatactacacagctaaaaccgaagatggttaaagtactgctcggccacagagtcatccaagtggcctgtggatctcgggacgcgcaaaccttagctcttacggacgagggcctagtcttcagctggggtgacggcgactttgggaagttaggtcgaggagggagcgaaggttgcaacattcctcagaacattgagcgtctgaatggccagggcgtttgccagatcgaatgtggggctcaatttagcctcgccttaacgaagagtggggttgtgtggacctggggaaagggggactactttagactgggacatggatcggacgttcatgtgcgcaagccacaggtggtggagggcctgcgaggaaaaaaaatcgtgcacgtggctgtgggagcactgcactgcctggcagtgaccgattctggacaggtctacgcatggggtgacaatgatcatggccagcagggcaatgggacaaccactgtaaatcgtaagcccacattggtacaggggctggagggccagaaaatcaccagggtcgcgtgtggttcgtcccattctgtcgcttggacgacagtagatgtggccaccccttctgtccacgagcctgttctgtttcagactgctcgagacccgctgggcgctagctatctgggggtaccctctgacgccgatagcagcgcagcttcaaacaagattagcggggcaagcaacagtaagccaaataggccctctttggccaaaattctgctcagtttggatggaaacctggccaagcagcaggcgctctctcacattctgactgcactacagattatgtatgcgagagacgctgtggtgggcgcactcatgcctgccgctatgatagctccagtggaatgcccctctttctcatctgccgcaccttccgacgcgtccgccatggcatccccaatgaatggggaggagtgtatgctcgccgtcgacatcgaggaccgcctctctccgaatccttggcaggagaaaagggaaatagtgtcatccgaagatgccgttaccccttccgcggtgaccccatctgcaccttccgcttccgccagacctttcatacctgtcacagacgacctgggtgctgcttccattatagcggaaacgatgacaaagactaaggaggacgtggagtcacagaataaagccgcaggacccgagccgcaggcgctggatgagttcacctccctcttgattgccgacgatacccgggtggtcgtcgaccttctgaagctgtccgtgtgttcacgggctggagaccgcggacgagacgtcctgagtgctgtcctgtctggaatgggcaccgcttatccacaggtagccgacatgctgctggagctctgcgtgaccgaactggaagacgtcgcaactgattcccaaagcggccgtctttcctcccagcccgtcgttgtagaatccagtcatccctacacagacgatacatccacaagcggcacggtcaagatccccggagccgaaggcctccgcgtggagttcgatcggcaatgctccaccgagcgccgtcacgatcctctgacggttatggacggtgtcaaccggatcgtttctgttaggagcggcagggagtggagtgattggtcttccgagctcagaattccaggcgatgagcttaaatggaaattcatctcagatggctctgttaacggctggggatggaggttcacagtctacccgataatgcctgcagcaggacccaaagaactgctgtcagatcgctgcgtcttgtcctgtcccagcatggatttggtgacatgcctcctagattttagactgaacctggcctctaaccggtcaattgtccctagattggctgcttccctggctgcctgcgcgcagctctctgctcttgccgcatctcatcggatgtgggcactccagagattgcgcaaactgctcactactgagttcgggcagagcataaacattaacaggcttctgggcgagaatgacggcgagactagagctctctcctttaccgggtccgcactcgccgcattggtgaaaggactgcccgaagccctgcaacgtcaattcgaatacgaggatccaatcgtgagggggggaaagcagctgctacactccccatttttcaaggtgctggtcgcactagcgtgcgacctggagctggatacactgccctgttgcgcagaaacgcacaaatgggcttggttccggcgatactgcatggcgagtagagttgctgtggctttagataagcggacacctctgccgaggctgttcttagatgaagtagcaaaaaaaattagggagcttatggctgattccgagaatatggacgtcctacacgagtcccacgatatttttaagcgcgagcaggatgagcagctggtgcagtggatgaatcgccgtcccgatgattggactctctcagccggagggtcaggcacgatctacggatgggggcacaatcatcgaggccaacttggcggtatcgagggcgcaaaggtgaaggtgcccactccctgcgaggcgctggcaaccctccgtcctgtccagctcatcgggggagaacagactcttttcgccgtcaccgcagacgggaaattgtacgctaccgggtatggagcagggggtcgtctagggatcggtggcaccgagagcgtctccaccccaactctacttgagtccatacagcacgtgttcatcaaaaaggttgccgtaaatagtggtggcaaacactgtctggcactgtccagcgagggcgaagtttactcatggggcgaagcagaagacggaaaattggggcacgggaatcggagtccttgtgatcgacctcgagttatcgaaagcctgagaggcatagaggtcgttgacgtcgccgctgggggagctcatagcgcatgtgtgacagccgctggcgatttatacacctggggtaagggcaggtacggtagactcggccacagcgatagcgaggaccagctgaagcccaaactcgtggaggcccttcagggacaccgagtggttgacatcgcctgcggatctggcgatgcccagacactgtgccttacagacgacgatacagtgtggagctggggagatggagattacgggaagctcggccgtggtggaagtgacggctgtaaggtccccatgaaaatcgacagcctgaccggcctcggggttgtgaaggttgagtgcggctctcagttctcagttgctctcacaaaaagtggcgcagtatatacttggggcaagggcgactaccatcggcttgggcatgggagcgacgaccatgtgagacggccaagacaggtgcagggactgcagggcaagaaagtcatcgctattgcaacaggcagtctgcattgcgtgtgctgcaccgaggacggagaggtttatacttggggcgataatgacgaaggccagttaggtgatgggacaacgaacgctatccagaggcctcggcttgttgctgccctgcagggtaaaaaggtgaacagagtcgcatgtggcagcgcccacacactcgcctggtcaacctcgaagcctgcgtcggccggaaagctaccagcgcaagtgcctatggaatataaccatttacaggagatccccatcattgccctgcgcaatcgcctcctgcttctacaccatctctccgaactattttgtccatgcatccccatgttcgatctggaagggtccctcgacgaaaccgggctagggccaagtgtggggttcgacacacttcgcggtatcctgatcagccagggaaaggaggcggcattcaggaaagtggtgcaggccaccatggtcagggaccgccagcatggaccagtggtagagttgaaccgcatacaggtgaagcgctcacgttcaaagggaggcctggctggaccggatggaaccaagtcggtctttggccagatgtgcgcaaaaatgtcttcattcggtcccgactccctactgctccctcacagggtctggaaagtcaagtttgtgggtgagtctgtagacgactgtgggggagggtactccgagtctatcgctgagatatgtgaagagctgcagaatggtctgactccactgctgatcgtgacgccaaacggacgcgatgaaagtggtgccaatcgggattgctatttgttgagtcccgctgccagagctcccgttcattccagcatgttccgcttcctgggtgtgcttttgggcatcgccatccgcacagggtctcctctgtctctaaatctggcagagcctgtgtggaaacaactagcaggtatgagcctcacaatcgctgacctgtctgaggtggataaggactttattccgggacttatgtacattagagacaacgaggcaacttcagaggagtttgaggctatgtctctcccattcacggtgccatcagcgagcggtcaggacatccagctatctagcaagcacacccacataacactggacaatcgggctgagtacgttcggttggccataaactaccggctgcatgaattcgacgagcaggtcgcagcagtgcgcgaaggcatggctagagtcgtacctgtgcccctactgagcctctttactggatatgaattggaaactatggtgtgcggatctcccgatattcccctccacctactcaagtccgttgcaacctacaaggggatcgagccatctgcttctctcatacagtggttctgggaggtcatggagtcctttagcaacaccgagaggtccctcttcctccgcttcgtctggggcagaacacgtctgcccaggacgatcgccgactttcgaggacgggattttgtcattcaggtattggacaagtacaatcctccagaccactttctgccagagtcctacacctgcttttttctgctgaagttgcccagatatagctgtaagcaagtgctggaagagaagctgaagtacgcaattcacttctgcaagagcattgatacagacgactatgcacggatcgctctgacaggagagcccgctgccgatgatagttctgatgactccgacaacgaggacgttgactcattcgcatcagattcaacccaggattacctcaccggccattat

SEQ ID NO: 225825 - DNA, 3075 bp, synthetic construct
  misc_feature 1..3075: note = Description of Artificial Sequence: Synthetic coding sequence
  source 1..3075: mol_type = other DNA
atggagaggcgctctaggcgtaagtccagaaggaacggaagatccaccgcaggcaaggctgctgccactcagcccgcaaaatctcccggagctcagctgtggctttttccgagtgctgccggactgcatcgtgccctgctgcgccgagtggaagtgaccagacagctgtgttgctccccaggtcgactggccgttctggagcggggtggggcaggcgtccaggtacatcagctcttggcaggaagcggcggagcgcgtacgcccaaatgtattaaattgggcaagaatatgaagatccactccgtggaccagggcgctgagcacatgctgatcttgtctagtgacggcaaaccatttgagtatgacaactattcaatgaagcatctgcgcttcgagtctattctgcaggagaagaaaatcatccaaataacgtgcggcgattatcatagcctggcgctgtccaaaggcggagaactattcgcttgggggcagaaccttcacggtcagctaggtgtgggcaggaaatttccgagcaccaccacacctcaaattgtggagcatcttgccggtgtccccctggcacagatcagtgcaggcgaagcccactctatggccctgtcgatgtccgggaatatttattcatggggtaaaaacgaatgcggtcagctgggcctgggtcacacagagtctaaagatgatccttctctgattgaaggactcgataatcagaaagtggagttcgtggcatgcgggggatctcacagcgctctcttgactcaggacgggctgctgtttacttttggcgcaggaaagcatggacagttgggccacaacagtacccagaacgagctccgtccgtgcctagtggccgagttagttggatatcgtgtgacccagatcgcttgcgggagatggcacacacttgcctacgtttccgatctgggaaaagtgtttagtttcggcagcgggaaagatgggcagctgggaaatgggggaacaagagaccagcttatgcccttgcccgtaaaagtgtccagtagtgaagaactgaagcttgagtcccacacaagcgagaaagagctgatcatgatcgccggtggtaatcagagcatcctcctgtggattaagaaagaaaactcatatgtgaacctcaagcgtactattcctactttgaacgagggtaccgtgaagagatggatcgcagacgtcgagaccaagagatggcaatcaacaaagcgggagatccaggagatcttctcttctccagcttgcctaacaggttcattcctgaggaaacgccgtacaacagagatgatgcctgtctatctggatctaaataaggccaggaacattttcaaagaattgacacagaaggattggatcaccaacatgattactacttgtttaaaggataacctgctgaaacgtctgccgttccactctcctccccaggaggcacttgaaatattttttctgctgccggaatgtccaatgatgcacatcagtaataattgggaatctctggtcgtgccattcgcaaaggtggtatgcaaaatgagtgatcagtcctccctcgtcctggaggaatactgggccactctgcaggagtctacgttcagtaaacttgtacaaatgttcaagactgcggttatctgccagttggattactgggacgagtccgctgaggagaatggcaacgtgcaggcgcttctcgaaatgctgaagaaactccacagggtcaatcaggttaaatgccagttgcccgaatcaatctttcaggtggatgagctgctgcaccggctcaatttctttgtagaagtatgtcgacgatacctttggaagatgaccgtggatgcctctgagaatgttcaatgctgcgtaatattttctcacttccctttcatcttcaacaatctcagcaaaataaagctgcttcatactgacacactgttgaaaatcgaatctaaaaagcacaaagcttacctaagatcagccgcaatcgaagaagagagggaatctgaattcgccttgagaccgaccttcgatctgaccgtgagacgaaatcatcttatcgaagacgtgctgaatcagctctcccaatttgagaatgaagatctgcgcaaagagctctgggttagcttctctggggagatcggctatgatttagggggtgtgaaaaaggaattcttttattgtctgtttgcagaaatgatccagcccgagtacggaatgttcatgtatccggagggcgcttcctgtatgtggtttcctgtgaagcccaagttcgaaaagaaaaggtattttttctttggcgtcctgtgtgggctgtccctgtttaactgcaacgtagctaacctccctttcccactcgctttgttcaaaaagctgctggatcaaatgccatcactcgaagatttaaaggagttgagcccggacctcggcaagaacttgcagacccttttagacgacgagggcgataattttgaggaggtgttctacattcacttcaacgtgcactgggatagaaatgataccaatctcatccctaatggcagcagtattacagtaaaccagaccaacaaacgggactacgtatcaaagtacatcaactatattttcaacgactctgttaaagcggtgtacgaggagttccgcaggggattctacaagatgtgtgacgaggacatcatcaaactgtttcatcccgaggagctgaaagatgtgattgtcgggaatacagactatgattggaaaacgtttgagaagaacgctcggtacgagccgggatataatagctcacatcctactatcgtgatgttctggaaggctttccataagctgacgctcgaagaaaaaaagaagttcttggttttcctaactggcacagatagattgcagatgaaggatctgaataatatgaaaatcactttctgttgtccggaaagttggaatgaacgggaccccattcgggctctcacctgcttttctgtgctgttcctcccgaagtacagcaccatggaaaccgtcgaagaagcactacaggaagcaataaacaacaacagggggttcggatag

SEQ ID NO: 225826 - DNA, 1854 bp, synthetic construct
  misc_feature 1..1854: note = Description of Artificial Sequence: Synthetic coding sequence
  source 1..1854: mol_type = other DNA
atgggacctacactggctgttccgacaccctacgggtgcattggctgcaagctgcctcagccagagtacccacccgctttgatcatcttcatgttctgcgccatggtgattacaatcgtggtcgatctcattggcaactcaatggtgatccttgccgttacgaaaaacaagaaattaaggaacagcggtaacatctttgtcgtgtctctcagcgtggccgatatgctggttgcaatttacccctaccctctgatgctgcatgcaatgtccattggcggatgggacctcagtcagctgcagtgtcaaatggttggattcatcactgggctttccgtcgtgggaagcattttcaatattgtagctatcgcaatcaacaggtactgctatatctgccacagtctacagtacgaaaggatcttttctgtgaggaacacctgcatctacttagtgataacatggatcatgacagtcctcgccgtgttacctaacatgtatataggaacaatcgaatatgatccgaggacctatacctgcatcttcaactaccttaataatcctgtcttcacagttactatcgtttgtattcatttcgtcttacccttgctgattgtcggcttctgttacgtgcgcatctggaccaaagtactggccgctcgtgatcctgcaggacaaaaccctgacaaccagttagccgaggttcggaacttcttaactatgtttgtgatttttctgctattcgcggtgtgctggtgtcccatcaatgtcctgaccgtcctcgttgccgtgtctcctaaggaaatggccggaaaaatccctaactggttatacttagccgcttacttcatcgcctacttcaacagttgtttgaatgccgtcatctacggtctccttaatgaaaactttcgacgcgagtactggactattttccacgctatgcggcaccccattatcttttttagtgggcttatctccgatattcgcgagatgcaggaggccagaacacttgctagggctagggctcacgcacgcgatcaggccagggaacaggacagggcacatgcctgtcccgcagttgaggaaacaccaatgaacgttaggaatgtccccctcccaggcgacgccgctgcaggccacccagaccgcgcatccggacatcccaaaccacatagtaggagcagctcagcatataggaagtccgcctcgacacaccacaaaagtgtgttctcccactcaaaggctgcctcggggcatctaaaaccagtgtccggacatagtaaacctgcaagtggccaccctaagtctgccaccgtgtaccctaaaccagcctctgtccattttaaggcggactccgttcattttaagggggactccgtgcattttaaacctgattcggtccattttaagccggctagttcaaaccccaagccaatcacagggcaccacgtatctgccggatctcatagtaagagcgcattttccgctgccaccagccacccaaagcccactaccggccacatcaagcccgcaactagtcacgctgagccaacaaccgcagattatccgaaacctgctaccaccagccacccaaaaccaactgcggctgacaacccagagctcagtgcttcccactgccccgaaattccagccatcgcccaccccgtttcagacgactccgacctccccgagtccgcgtcatcacctgcagctggacccacaaaacccgcagccagccaactggagagcgatactatcgcagacctgcccgatccaacagttgtgaccacatcaactaatgactaccacgacgtagtggttattgatgtagaggacgatcctgacgagatggctgtgtag

SEQ ID NO: 225827 - DNA, 13125 bp, synthetic construct
  misc_feature 1..13125: note = Description of Artificial Sequence: Synthetic coding sequence
  source 1..13125: mol_type = other DNA
atgaaggtagacagaaccaaacttaagaagactccaactgaggcacccgcagattgcagggcgctgatagataaattaaaagtgtgtaacgatgaacagctactcctagagctccagcagattaagacttggaacatcggaaaatgcgaactctatcactgggtggatctcctcgacagatttgatgggattctggcagatgcagggcagactgtggagaatatgtcttggatgttagtatgtgatcggcctgagagggaacagctgaagatgcttcttttggcggtgctgaatttcacggcccttcttatcgagtacagctttagtagacatctttactcatctatcgaacacctgaccacgctcctggccagcagcgacatgcaagtagtgctggccgtattgaacctgctttatgtgtttagtaagcgatctaactatattacacgcttggggtccgataagcgcaccccactgctgacacggctgcagcacctggcggagagctggggcggaaaggagaacggatttgggttggccgaatgttgcagggatttgcacatgatgaaatatccaccatccgctaccacactccattttgaattctatgcagaccccggagctgaggtcaaaatcgaaaagaggactacaagcaatactctgcattatatacatattgagcagttggataaaattagcgagagcccgagtgagattatggagtccctgactaagatgtacagcattcctaaggacaaacaaatgctactctttacacacatccgcctggcccacgggttttcaaatcacaggaagcgtctccaggcagtacaggccagattacacgccattagtatactcgtgtatagtaatgccctgcaagaatccgcaaattcaatcctgtacaatggcttgatcgaggagctagtcgacgttttgcagattacagacaaacagctgatggaaatcaaggccgctagtctccggacactcaccagcattgtccaccttgagcggacacctaagctgagtagcatcattgactgtacagggactgcttcctatcacggattcctgccagtattggtgcgcaattgtatccaggccatgattgatccaagcatggacccgtatccacaccagttcgcaaccgctctgtttagctttctataccacctcgcttcctatgacgctgggggagaagcccttgtaagttgcggaatgatggaggctcttctgaaggtgataaagttcttgggggacgaacaggatcagataacttttgtgacgcgcgcagtgcgtgtagttgacctgatcaccaatctggatatggcagcctttcagagccattccggactgtcaatatttatctatcggctagagcatgaagtggatttatgcagaaaagaatgtccatttgtgattaagcctaagatacaaaggccgaacactacgcaagagggggaggagatggagaccgatatggacggagtccagtgcattcctcagagggcagccctgctaaaatctatgctcaactttctcaagaaagcaatacaggatcccgctttcagtgatgggattcgccacgttatggatggctccttaccaacctcattgaaacatataatatcaaatgccgaatattatggaccctccctattcttgctggccactgaggtcgtgaccgtattcgtatttcaagaaccctcactgctttcctccctgcaggacaacggccttactgatgttatgcttcacgcgctgctgatcaaggacgtgccagccacaagagaggtacttggatcactgcctaatgtgtttagtgcactctgtctgaacgcaaggggtctgcagtccttcgtgcagtgtcagccattcgagagactctttaaagtgctgctgtcacccgattaccttcctgctatgcggagaagacgctctagcgaccccctgggggacaccgcaagcaacctgggatcagccgtcgacgagttgatgcggcaccagcctacactgaaaaccgatgcgacaaccgctattattaagctgttggaggaaatttgtaacctcgggagggatccaaaatacatttgtcagaaacctagcatccagaaggccgatggcaccgcgacagcacctccccctcggagtaaccacgccgctgaagaagctagtagcgaggacgaggaagaggaagaggtgcaggcaatgcagtcttttaatagtacccagcagaacgagaccgaaccgaatcagcaggttgtcggcaccgaggaaagaattcccattcccttgatggattatatccttaatgtcatgaaattcgtagagtctattttaagtaataatactacagacgaccattgccaggagttcgtcaaccagaagggtctcctccctctcgtgacaatcctcggcttaccgaacctgcccatagacttccccactagtgccgcatgccaagccgtggccggtgtgtgcaagtcgatcctgaccctctcccacgagccaaaggtactacaggagggactgttgcaattggactccattctaagctctctggagcccctccatcgacctatcgagtcccccggaggtagtgtactgctccgagaactcgcctgcgctgggaatgttgccgacgctaccctttccgcccaggctacgccactgcttcacgccctgacggccgcacatgcctacatcatgatgttcgtgcatacatgccgcgtcgggcaatccgaaattcgttctatatctgtgaatcagtggggctcccaattgggcctttcagtcctgagcaagctctcccagctgtactgcagcctggtctgggagagcacagtgttgctctcgctgtgcacacccaatagtcttccttcaggctgcgaattcggacaagccgacatgcagaaactggtccctaaggatgagaaggccggaacaactcaggggggaaagaggtcagacggcgaacaggacggcgcagcagggtcaatggatgcaagtacccagggcctgctggaaggcattggactggatggggacaccctggccccaatggaaaccgacgaaccaacagctagtgattctaaaggtaaaagtaagatcacaccagccatggcggcaagaattaagcagatcaagcctctgctgtccgcctcctccagactgggacgggcactcgccgaactcttcggtttattagtgaagctgtgtgttggcagtccagtccggcagcgtaggagccatcacgcagctagcactactacagcacctactcccgctgccagaagtaccgcttctgccctgaccaagcttcttaccaaaggattgagttggcaacctccgccttacactccaacaccccgttttcggctcacattctttatctgttcagtgggatttacgagccctatgcttttcgatgagcggaaatacccctaccatctgatgctgcaaaagtttctgtgtagcggcggacacaacgctttgttcgagactttcaactgggcactttccatgggcggaaaggtgcctgtgtctgagggcctggaacattccgatttgccagacggtacaggcgagttcctggatgcctggctgatgctggttgaaaagatggttaaccctaccacagttctggagtctccacacagtctgccagctaagctgccgggaggcgtccagaattttcctcagttttccgcgcttcgattcctggtggtcacacagaaggctgcctttacatgtatcaagaacctttggaacagaaagcccctgaaggtctatggaggtcgcatggccgagtctatgctcgcgatcctatgccatatactgaggggcgagcctgttattcgggagcgactgagtaaagaaaaagaaggttcaagaggtgaagaagacaccgggcaggaagaaggaggcagcaggcgcgagcctcaggtgaaccagcaacagttgcaacaactcatggacatggggtttactcgggagcatgctatggaagctctgctcaataccagtactatggaacaggcgacagaatatttgctcacacatcctcctcctataatgggaggtgttgtgcgtgacctctcaatgtccgaggaggatcagatgatgcgggcaatagccatgagcctagggcaggatattccaatggaccaaagggccgagtcacctgaagaagtggcctgccggaaggaagaggaggaaagaaaagccagggagaagcaggaagaagaagaggctaagtgtcttgagaagttccaagacgctgatccgctggagcaggatgagctgcacactttcacagacactatgcttcccggatgcttccacttgctggatgagcttcccgacactgtgtatcgggtctgcgacctaattatgaccgccattaaacgcaacggcgctgactacagagacatgatcctaaaacaggtcgtcaatcaggtgtgggaagctgccgacgttctgataaaagctgctctgccactgactacctctgacaccaaaacggttagtgagtggattagtcagatggctactttaccccaggcctccaacctggctacacggatactgttgctcacactccttttcgaagagctgaaactgccatgtgcatgggtagtggagtccagcgggatcctcaatgtcctgatcaagttactggaagtcgttcagccctgcttgcaggctgctaaagaacagaaggaggttcaaaccccaaaatggatcactcccgtcctgttgttaatcgatttctacgagaagaccgccatttcttccaagaggcgtgcccagatgaccaagtatctgcagtccaattctaacaactggaggtggtttgacgacaggtccggccgttggtgcagctactctgcctcaaacaacagcactatcgactcagcttggaagtctggcgagaccagcgtacgatttactgccggtaggaggcggtatacagtgcagtttaccacaatggtgcaagtgaatgaggaaaccggcaatagacggcctgttatgttgactctgttgcgagtgcctcgcctgaacaagaattcaaaaaattccaatggccaagaactcgagaaaacactcgaggagtccaaggagatggatataaaacgaaaggaaaataaagggaatgatacacctctcgcgctggaaagtacgaataccgaaaaagaaacgagcttagaggaaactaagataggcgagatcctaatacagggactgacagaggatatggtcaccgtgctaatcagagcttgcgtgagtatgttaggggttcccgtggacccagatactttgcacgccaccctcaggctgtgtcttagactgactagggaccataaatatgccatgatgtttgcagaacttaaatcaacccggatgatactgaacctcacccagtcatctgggttcaatgggttcacccctctggtcactctgttactacgccacattattgaggatccttgtacactcaggcacacaatggaaaaggttgtgcgctctgccgcaacaagcggggctgggtccaccacaagtggagtggtttcagggagcttgggctcaagggaaatcaactacatcctccgtgtgcttgggccagccgcatgtcggaaccccgatatcttcacagaagttgccaattgttgtattcgtattgctcttcctgcccctcggggatccgggaccgcgtccgatgatgaatttgaaaacttgaggatcaaaggccctaacgccgtgcaactagtgaagacgaccccactcaagccgtctccattgcccgtgattcccgacaccatcaaagaagtcatttatgatatgctgaatgctctggcagcttaccacgccccagaggaggcagacaaatcagaccccaaaccaggagtaatgacccaggaggtgggacaactactgcaagatatgggagacgatgtgtatcagcagtatcggtccctgacccgccagtcaagtgatttcgacactcaatctggattctctatcaattcacaggtgttcgcagccgacggggctagcaccgaaaccagcgcttcaggaaccagtcagggagaagcttcgactcctgaggaatcccgggacgggaagaaagacaaggagggggacagagcctcggaagagggaaaacagaaaggcaaaggtagtaagccgctgatgcctacgagcactatcctgcgactgctggctgagttagtgcgctcctacgtcggcattgctaccttgatcgctaattatagttacactgttggacaatctgagctcataaaggaggactgctcagtgttggccttcgtgctcgaccacctgttgccgcacacccagaatgctgaagataaggatacaccagccctcgctaggctgtttttggcctctctcgccgctgccggatcaggtactgacgcccaggttgcactggtgaatgaagttaaggcagcgctagggagagcactcgcgatggccgagtcgactgagaaacacgcccgactgcaggccgttatgtgcattatttcaacaatcatggaatcttgcccatccacttcatcgttttactcgagcgccacagccaagacccagcataacggaatgaataacatcatccgcctcttcctaaaaaaaggattagtcaatgacctggccagagttccgcactctttagacctgtcttcccccaatatggccaacaccgtgaacgccgctctgaagcctctggaaacactctcccggatcgtaaaccaaccaagctccctgttcggcagcaagtccgcctccagcaagaataagtccgagcaggacgcccaaggggcatcccaggattcttctagcaaccaacaggacccaggagagcccggagaggctgaagtgcaggaagaagaccatgatgtcacacagactgaggtggccgacggcgacatcatggatggcgaagccgaaactgactcagtggtcatcgccggtcagcccgaggtcttgagttctcaggagatgcaggtagaaaatgagctggaagaccttatagatgagctactggaacgcgatgggggttccggcaacagcaccattatcgtaagccgctcaggcgaagacgaaagccaggaggatgtactgatggatgaagccccatccaatctttctcaggcatctaccctccaggctaatagggaggactcgatgaatatcctcgacccagaagacgaagaggaacacactcaggaggaggattctagtgggagcaatgaagacgaagatgactcccaggatgaggaggaggaggaggaagaggacgaggaggatgaccaggaggatgatgaaggcgaagaaggtgacgaggacgacgacgacgacgggtccgagatggagctcgacgaggactatcccgacatgaacgcaagccctttggtcagattcgaacgcttcgatcgggaggacgatctcattatagagttcgacaacatgttctcaagtgcgactgatatccccccatctcccggaaatattcctacaactcacccacttatggtccggcatgcagatcactcttccctcacgctaggaagcggctcaagcacgactagactcacgcaaggaatcgggagaagccagaggacactccggcagctcaccgcaaatactggtcatactatccatgttcattatccaggcaacaggcagcccaacccgccactgatccttcaaagattattaggcccttctgccgcagctgacatactccagctgagtagtagtttacccttgcagtctcggggacgggcacggctgctggtagggaacgatgatgtccatatcattgcacgttccgatgacgagctgctggacgactttttccatgatcagagcactgccacctctcaagcagggaccttatccagtattccaacggctttgacgcgctggacggaggaatgcaaagtgctagacgcggagagcatgcacgattgcgtgagcgtcgtcaaggttagcatcgtgaaccatcttgagttccttagagacgaggaattagaggagagacgcgagaagagaagaaagcagctcgcggaagaggaaaccaagatcacggataaggggaaggaggataaagagaaccgtgaccagagcgcccagtgcacagcatcaaaatcaaatgactccactgagcagaatcttagtgacggaaccccgatgcctgattcctaccccacaactccatcttcgacggatgccgcaacctctgagagtaaagagactctgggaacccttcagagctcacaacagcagcccaccctccccactccacccgctttgggagaagtgccacaagagctgcaaagcccggctggtgaagggggttcttctacccaacttctcatgcccgtggagccagaggagttaggacccacccggccatctggcgaggcggaaaccacccaaatggagttgtctcctgcccctaccatcaccagcctcagcccagaacgggctgaagactccgacgccctgaccgctgtaagcagccagctggagggaagtcctatggataccagtagtcttgccagctgcacccttgaggaggcagtcggcgacacatctgcagcagggagctcagagcagcccagagcagggtcatcgacaccaggcgacgcgcctcccgctgtggctgaggtgcagggaagatctgacggctccggggagagcgcgcaacctcctgaagatagtagtccccctgcttcctctgagtcaagttcaacccgcgattcagctgtagccatcagcggagccgacagcagagggatattggaggaaccccttccttcaaccagcagtgaggaagaagaccccctagccggtattagtctccccgaaggagtggaccccagcttcctggcggcactccctgacgacattcggagagaagttctccagaatcaattgggaattaggccacccacacggaccgccccttctaccaattcgagcgccccagccgtggtcgggaatcccggagtcacggaggtgtcacccgagtttctggccgctcttcctccggctatccaggaggaagttttggcccagcagagagctgaacagcagcgacgcgagctggcccagaacgcttcctccgacacccctatggaccctgtgactttcatacagacgttaccgtcagacttacgcaggtccgtcctagaggacatggaagattctgtactagcggtcatgcctcctgacatagcggcagaggctcaggctctacgcagagagcaagaagctagacagcgccaactcatgcacgaaagactctttgggcattcctccacaagtgcgctgtccgctatactgcggtcaccagcattcacaagcagacttagtggaaatcggggtgtgcagtatacaaggttggcggttcagcgtggtgggacatttcaaatggggggatccagctcccacaacaggccgagcggatctaatgtggacacactcttacgactgcggggaaggctcctgctggaccatgaagctttatcctgtttgcttgtgctgctgtttgttgacgaaccgaaactgaatacgagtaggctgcatagggtgttgagaaacttgtgctaccacgctcaaacccggcattgggtaattcgttccctgctctcgatcctgcagaggtccagtgagtcggagctgtgcatcgaaacaccaaagctcacaactagcgaagaaaagggtaagaagtcctctaaatcctgtggaagcagtagccacgagaacaggcccttggatctccttcacaaaatggaatccaagtcgagcaatcagcttagttggctgtccgtgtccatggacgcggctctcggatgtcgaacaaacatctttcagattcaacggtccgggggaagaaagcacacagagaagcacgcttccgggggtagcaccgtgcatattcacccccaggctgccccagtggtgtgtaggcatgtgctcgacaccctgatacagctggcaaaagtcttcccctcccacttcacacagcagagaaccaaggaaaccaactgcgagagcgatagagagagggggaacaaggcatgcagtccttgttcttctcagagcagcagctctggcatctgcacagatttttgggatctactagtaaaactcgacaacatgaatgtgagtaggaaaggaaagaatagcgtgaagagcgtgccggtctctgccggtggagaaggcgagacttccccgtactctctggaggcttctccactgggccaactgatgaatatgttgtcacacccagtgatccgcaggtcctccttgctcaccgagaaattgcttagactcctgtctctcatttcgatagctttaccagaaaataaagtttccgaggcacaggcaaattcaggatccggagcatctagcacaacaacagcaacttctaccacctccacaactacgaccaccgccgcatccacaactccaacgcccccaacggcgccaacccccgtgacctccgctcccgcactggtggcagctaccgcaatatcgaccattgtggtggcagcgtccaccactgtgacaacacctaccaccgctacgacgactgtcagcataagcccaaccactaagggttcgaagagtcccgctaaagtgagcgatggcggttccagttctactgatttcaaaatggtgagcagcggtctgaccgaaaatcaactgcagctcagcgtcgaagtgctgaccagccacagctgcagtgaagaaggccttgaagacgctgcaaatgtactcctgcaactttcacgtggcgattccggtacgcgcgataccgtgcttaagctcctcctgaatggcgctaggcatcttggctatacactgtgtaaacaaattggaacactcctagcagagttacgggaatacaacctggagcagcagaggagagcacaatgcgaaacactgtctccagacggactgcccgaagaacaacctcagaccaccaagctcaaaggaaagatgcagtccagattcgacatggcagaaaatgtggtaattgtggctagccagaagcggccactggggggtagagaattgcagctcccatccatgtccatgttaacctccaagacttccacacaaaaattctttctcagagtgctgcaagtgatcattcagttgcgcgatgatactcgacgcgcaaacaaaaaagcaaaacagaccgggcgattaggcagctctggactgggttcagcctcttccatccaggccgcagttaggcagttggaagcagaggcagatgctattatccagatggtccgggaaggccagcgcgctaggaggcaacaacaagctgccacctccgagagttcccagtcagaagccagtgtaagaagagaggaaagccctatggatgtcgatcagccctcaccttcggctcaggacacacagtcaattgcgagcgatggcacccctcaaggagagaaagaaaaggaagaacggccacctgagttacccctgctcagtgaacagctttcattggatgaattatgggatatgctgggcgaatgtttgaaggagctggaggagtcccatgatcagcatgccgtgctggtactgcagccagcagtggaggccttctttttagtgcatgccaccgagagagagagcaagccacccgttcgagatacacgggaatcacagctagcccatatcaaagacgaacccccacctctgtcgcccgcacctctgacccctgcaacacctagcagcctggacccgttcttcagtagggaaccctcctcaatgcatatctcctctagcctgcccccagatacgcagaagtttctaagatttgctgagacacacagaaccgttctgaaccagatccttaggcagagtaccacacacctcgccgatggacccttcgccgtgctggtggattacatacgcgtccttgatttcgacgttaaacgaaagtatttccgtcaggagctggagagactcgacgagggcctgcgaaaagaagatatggccgtgcacgtgcgcagggatcacgtgtttgaagattcttaccgggaacttcatcgaaaaagtcccgaagagatgaagaaccgcttgtatatcgtgtttgaaggggaggagggacaagatgcgggaggattactgagggagtggtatatgatcattagccgggagatgtttaaccccatgtacgctctcttcaggacctcgcctggcgatcgggtgacttacacaataaacccaagtagccattgcaatccgaatcacttgtcttacttcaagttcgtcggcaggatagtggctaaggcggtctatgacaatagactgctcgagtgttattttacaagaagcttttacaagcatatcctgggcaagagcgtaaggtatacagacatggaatccgaagactatcatttctatcaggggctggtgtatctgctcgagaacgatgtgtctacacttggctacgacctaacttttagcacggaggtgcaggaatttggggtttgcgaggtgagagatctgaaaccaaacggcgctaatatactggttactgaggagaataagaaggaatacgtccatctggtctgtcaaatgcggatgacaggagcaatccgcaaacagctagccgcttttctggagggcttctacgagattatcccaaagcggctgatttcaatttttacggagcaggaattggagcttctcattagcggccttccgacgattgatattgatgacttgaaaagcaacaccgagtatcacaaatatcagagtaactccatacagatccagtggttttggagggcactccgttcatttgaccaagccgaccgagctaagtttctgcagtttgtgacgggaaccagcaaggttccgttgcaagggttcgcagccctcgaggggatgaatggcatacagaagttccagatccatcgggacgaccgaagcacggaccggctcccatccgcccacacatgttttaatcaactcgatttacctgcctatgaaagctttgagaagcttcgccatatgctgctccttgctatccaggaatgctcagaaggcttcgggctggcctag

SEQ ID NO: 225828 - DNA, 13125 bp, synthetic construct
  misc_feature 1..13125: note = Description of Artificial Sequence: Synthetic coding sequence
  source 1..13125: mol_type = other DNA
atgaaagtcgataggactaagctcaagaaaacaccgacggaggcacccgctgactgcagagctttgatagataaattgaaggtgtgtaacgacgaacagctgctcctggagttacagcagatcaaaacctggaacattgggaagtgtgaactttaccattgggtggatttgcttgaccgatttgacgggatcctggcggatgctggacagactgtcgagaatatgagctggatgcttgtctgcgatcgccctgagcgagagcaactcaagatgcttctcctggctgttctgaacttcactgcactcctcatcgagtatagctttagcagacacctgtatagcagcatagagcacctgacaacgttgctcgcgagcagtgatatgcaggtggtactggccgtattgaacttgctgtacgtattcagcaaacgcagtaattacattaccagactcggctccgataagagaacgccgcttctgactagactccaacaccttgcagaatcatggggaggcaaggagaacggtttcgggcttgctgagtgctgtagggatctacatatgatgaagtatccccctagcgccacaaccctgcacttcgaattctatgccgatcccggagcagaagtgaaaatcgagaaacgcacgacttctaacactctccattacatccacatcgagcagctcgacaagatttccgaatctccctctgaaattatggagtcgctcacgaagatgtattccatcccaaaggataagcaaatgctcctttttacgcacatcagactcgcccatggattcagcaaccaccggaaacgcctgcaagctgtccaagctcggttgcatgccattagtattcttgtttactcaaacgcactccaggaatccgctaacagcatcttgtataatggcctgattgaggagttggtggacgtcctgcagattaccgataagcagctgatggaaatcaaggccgctagtttgcgaacccttacaagtatagtgcacctcgagcgcaccccaaagctgagctccatcatcgattgcacaggaactgcatcatatcatggattccttccagttcttgtccgaaattgcatacaagccatgattgacccaagtatggacccatatcctcaccaattcgcgaccgctttgttctcattcttgtaccacctggcctcttacgacgccggtggcgaagccctggtctcatgcggtatgatggaggccctgttaaaagtgataaaattcctgggagatgagcaggaccagatcacattcgtgaccagagctgtgagagtagtcgacctcattaccaacttggatatggcagctttccagtcgcatagcgggctgtctattttcatttatcgactggagcacgaggtcgacctgtgccggaaggagtgcccctttgtcattaaacctaagatccagaggcccaataccactcaggagggagaggaaatggaaacagatatggacggggtgcagtgcataccgcagcgggctgccctgctgaagtccatgctcaattttctaaaaaaagcaatccaggatcctgcatttagcgatgggattcgacatgttatggatgggtccctgcctaccagtttgaagcatatcatctcaaacgccgagtactatggaccaagtctgttcttgctggccaccgaagtcgtcaccgtgtttgtgttccaggagccctcccttctgtcaagcctacaggataatggactgacagatgttatgctgcatgcactgctcatcaaggatgtgcccgcaacccgggaggtgctgggcagtctgcccaatgttttcagtgccctctgtcttaatgccaggggcctgcaaagctttgttcaatgtcagccattcgagagactctttaaagtgttgctgtcaccggactacctgccagcaatgcgccgtagaagatcttccgaccccctgggtgatacagccagtaacctcggatcagcggtagacgagttaatgcgccatcaacctactttaaaaactgacgctaccaccgccatcattaagttgttggaagaaatatgcaatctcggcagagacccaaagtatatctgccagaagccaagtattcagaaagctgatggcactgccacagcccctccgccaagatctaatcacgctgccgaagaggcaagtagcgaggacgaggaggaggaagaagtgcaggcaatgcagtcctttaattctacacagcagaacgaaacagaacccaaccagcaggtagtaggcacagaggaacgaatacccatacctctgatggattatatacttaatgtcatgaaattcgtggaatccattctaagcaacaacactacagacgatcactgccaggagtttgtgaatcaaaaaggcttgttacccttagtgacgatattgggattacctaacctcccaatcgatttccctacttccgccgcatgccaggccgtggctggggtttgtaagagcattcttaccctttcccatgaacccaaggtgttacaggagggccttctgcaacttgacagcattctgagctccctcgaaccgctccatcggccaatagaatcacctggaggatcagtgttgctgagggagctggcctgcgcaggcaatgtcgccgacgcgacactgtccgcgcaagcaactccactgctgcacgcacttaccgctgctcacgcctacataatgatgtttgttcacacgtgtagggtggggcagtcggagatacgaagtataagcgtcaaccagtggggcagtcaactcggcctctccgtgctttcaaaactctcacaactttattgttcattggtttgggaaagcactgtgctgctaagtctgtgtacgccaaattctctgccctccggctgcgagttcgggcaggcagatatgcaaaagcttgtcccaaaggacgagaaagcaggtacgacacaagggggaaaacggtccgatggggaacaggatggagctgctggatctatggatgcatccacacagggacttctggaggggatcgggctcgacggcgacaccctcgcacccatggagactgatgagccaaccgcttccgacagcaagggtaagtctaagatcacgcctgctatggccgctagaataaaacagattaagcctcttctctcagcatcctccagacttggaagggcactcgcagagctctttggactgctggtcaaactgtgtgtcggcagtccggtgaggcagaggcgttctcatcacgccgcttctacaacaaccgccccaactccggcagctagatccaccgctagtgctcttactaaattgcttaccaaagggctcagctggcaacccccaccctatactcctacgccacgttttaggctgaccttttttatttgttcagtcgggtttacctcgcctatgcttttcgacgaaagaaagtacccttatcacctgatgttacaaaagttcctgtgctccggcggacacaacgccctcttcgagaccttcaattgggccttgtcgatggggggtaaggttcctgtatctgagggcctcgagcatagtgatttaccagatggcaccggtgaattcctcgatgcttggctgatgttagtggagaagatggtcaaccccaccacggtgctggaatcaccacactctctccccgcaaagcttcctgggggagtccagaatttccctcagttctccgctctaagatttctagttgttacacaaaaagcagcattcacgtgcattaaaaatctttggaatcgcaagccactgaaggtttatggaggccgaatggcggaatctatgctggctatcctgtgccatattttgcgcggtgagccggtgattcgcgaacggctgtccaaggagaaagagggttcacgcggagaggaggacaccggtcaggaggagggcggaagcaggcgagaaccccaagtgaatcagcagcagctgcagcaactaatggacatggggttcacacgcgagcatgccatggaagctctgttaaatacgtccactatggagcaagccaccgagtatctgctcacccacccaccccctatcatggggggagtcgtgcgcgatctgagcatgagcgaggaagatcagatgatgagagctattgctatgtctctggggcaagacatcccaatggatcaacgtgccgagtcccccgaggaagtcgcatgtcggaaagaggaggaggagaggaaggctagggagaaacaggaggaggaggaggccaaatgtctcgaaaaattccaggatgctgatcctctagaacaggacgagctgcacacctttaccgacaccatgctgccagggtgtttccacctattagatgaattgcccgatactgtttacagagtgtgtgacctgatcatgacagccattaagcgaaatggcgctgactacagggatatgatcctgaagcaggtcgttaaccaggtgtgggaagccgcagacgtgcttatcaaagctgctctgcccttaacaacctcagacacaaagacggtctcggaatggatctcacagatggctactctcccccaggcttctaatctggccaccaggattctgttgctgacgctactcttcgaggaactgaaactgccttgcgcttgggttgtggagtccagtggcatccttaacgtcttaataaagctcttggaagtggtccagccctgcttacaggctgctaaggaacaaaaggaagtgcaaacccccaaatggatcacgcccgttctgctgcttatagatttttacgagaagactgctattagctctaagcgcagagcccagatgactaaatacctgcagtctaactcaaataactggcgttggttcgatgatagatcagggagatggtgctcttattccgcttccaataatagcaccatcgactcagcttggaaatccggcgagacttcggttcgattcacggctgggcgtcgtcggtacacggtgcaattcactacgatggtgcaggtcaatgaggaaactggcaatcgccgtcctgtgatgctgaccctgcttagagtcccacggctcaacaaaaattccaaaaatagcaatggccaggagctcgaaaagacccttgaggaaagtaaggagatggacataaagaggaaggagaataagggaaacgatactcccctggccctcgagagtaccaacacagagaaggagacctcgctagaggagaccaaaattggggaaattctgatacaggggttaacggaagacatggtgactgtcctcattcgtgcatgcgttagcatgctcggtgtccccgtagaccccgataccctacacgctacattgagactgtgcctccggctcaccagggatcataaatacgcaatgatgttcgcggaattgaaatctacgcgcatgatcctaaatcttacacaatccagtggatttaatggatttacacccctcgttacgttgctgctccggcacataattgaagacccatgcacattgcggcacaccatggagaaggtggtgcggagtgcggcaaccagcggcgctggcagcactacaagcggtgtggtttcaggatctctcggctcccgggagatcaactacatattgcgcgtcttgggacccgctgcttgcagaaacccagacatctttacagaggtggcaaactgctgcataagaattgcccttccagccccaagaggttcaggtacggctagcgatgacgagtttgagaatttgcgcattaaaggaccaaatgctgtgcagctcgtgaagaccacgccacttaagcctagtccactccccgtgatccctgacactatcaaggaagtgatttatgatatgttaaatgcattggcggcttatcatgcaccagaggaggctgataagtctgatcccaaacctggcgtgatgacccaagaagtaggccagctgttgcaggacatgggcgatgacgtctaccaacagtatcgctctctgacgaggcagtccagtgattttgacacacagtctgggttctccatcaatagccaggtgttcgctgcggacggcgcttccacggagacctcagcatccgggacctcacagggggaggccagtacaccagaagagagtcgggatgggaaaaaagataaagagggtgaccgggctagcgaggagggcaagcagaaaggcaaggggagtaaacccctcatgcctacttctactatccttcggttactcgcagaactggtccgctcctatgtaggaatcgccactctgatcgctaattacagttacaccgtcggtcagagcgaactcataaaggaggactgctccgtgctggcttttgtgctggatcatctccttccccatacccagaacgcagaggacaaggacactccggcattagctcggctgtttctcgcaagcctcgctgccgctgggtcggggactgacgctcaagtggctctggtgaatgaggtcaaggccgctctcggcagagccctggccatggctgagagtacggagaaacatgctaggctacaggccgtcatgtgcataattagtacgattatggagtcctgtccatcaacttcatccttctacagttccgccaccgcgaagacgcaacacaacggaatgaacaatattattcggctgttcctgaagaaggggctggtcaacgacctcgcccgagtgcctcactcactggacttgtcttctcctaacatggcgaataccgtaaacgcagccctaaagcctttggaaacactcagccggattgtaaatcagccgtccagcttattcggcagtaagagcgctagctccaagaataagagcgaacaggatgctcaaggggcaagccaggatagctctagtaaccagcaggacccaggtgagcccggtgaggccgaggtgcaggaagaggatcatgatgtgacacaaaccgaggtcgccgacggcgatatcatggatggagaagctgagaccgattccgtggttatcgcgggtcagcccgaggtgctctcttcacaggaaatgcaggtagaaaatgaactggaggacctcatcgatgagctgctcgaacgggacggtggctctggaaatagcacgattatcgtgtctcgatccggggaagacgagagccaggaagatgtgctcatggacgaagcaccctccaatctatcacaagcctccactctacaggctaatcgcgaggacagtatgaatatcttagaccccgaggatgaggaggaacacacccaggaggaagactctagtggttccaatgaagacgaggacgactcacaagacgaggaggaggaggaagaagaggacgaagaagacgatcaggaggacgacgagggggaagagggagatgaggatgatgacgacgacggcagcgaaatggaactggatgaggattacccagacatgaatgctagtcccttagtccgctttgaaagatttgatcgagaggacgatcttataattgaatttgacaacatgttcagtagcgccacagacatcccccctagtcctgggaacatcccaacaactcaccctctgatggtgcgacatgccgatcatagcagcctcaccctgggaagcggtagctctacaactaggctgacgcaggggattggtcggagtcaaaggaccctccgacagttgacggccaacactggccataccattcacgttcattatcccggtaataggcagcccaacccacctttgattcttcagcgcctattaggaccatctgccgctgctgacattctccaactgagtagctccctgccactacagtcccgagggagagccaggctgctggtgggcaacgatgatgtgcacatcattgcgaggagtgacgacgagctgttagatgactttttccatgaccaatcaacagctacgtctcaagcagggacactaagctccattccgaccgcacttacaaggtggaccgaagaatgtaaggtgctggacgcagagagtatgcacgattgcgttagcgttgtgaaagtttccattgtgaatcatctggagttcttaagagatgaagaactggaggagaggcgagagaagcgaagaaaacagctagcggaggaagagaccaagatcacagataaaggcaaagaagacaaagagaatagagatcagtccgcccagtgcacagcttcgaaatcaaatgatagcaccgagcagaatctgtccgacggtacccctatgcccgacagttaccccactacaccgtctagtaccgatgccgctacctctgagtcaaaggagaccctaggaaccctccagtcctcacagcaacagccaaccctaccaacaccccctgccctaggcgaagtgcctcaagaactgcagagtccagcaggggaaggtggtagcagcacccagctactgatgcctgtcgaaccggaggagctcggcccaacaaggccctctggcgaagcggagaccactcagatggagctgagtccggctcccacgatcacaagtctctctccagaaagggccgaggactcggacgctcttactgccgtcagcagccagctggagggctcacctatggatacctcaagtctagcctcgtgcacgctggaagaagctgtgggggacacgtcagccgctggatcaagcgagcagcctagagcgggtagctctacccctggggacgcaccccctgccgtggcagaagtccaagggagatctgacggatcaggagagtctgctcagccccctgaagactccagccctccagcatctagcgaaagctcctccactcgtgacagcgcagtggccatttccggcgcagatagtcgagggattctggaggagccgctgcctagcacttccagcgaagaagaggaccctctcgccggaatcagtctgcccgagggtgtcgacccaagctttcttgcagcactgcccgatgatatccggagggaggtcttgcaaaatcagctggggataaggccccctacccggaccgcgccatccacaaactcatctgccccagctgtcgtgggaaatcctggggtaacagaagtgtctcccgagttcctggccgctctgcccccagcaattcaagaggaggtgctggcccagcagcgtgctgaacagcagcggagagaactggcgcaaaatgccagttctgacacaccaatggaccctgtgacatttatacagactctgcccagcgatttaagaaggtccgtgttagaggatatggaagattccgtattagccgtcatgccccctgatatcgccgcagaggctcaggcgcttcgacgggagcaggaagcccgacagcggcagcttatgcatgagcgtctgttcggccactctagcactagcgcactgagcgccattctacgctctccagccttcacaagtcgtttgagcggcaataggggggtgcaatatacacgccttgcagttcagagaggtggcacattccagatgggaggctcttcctctcataaccgacctagcgggagcaacgtcgacacactgctcaggctcagaggaagactcctgttagatcatgaggcactctcgtgcctgctggtgttgctcttcgtggatgagccgaagctgaacacctcaaggcttcatagggtccttcggaacctctgttaccacgcccaaacgcggcattgggtcatccgttctttgttgtctatcttgcagcgctctagtgaaagcgaactttgtatagagaccccaaagttaacaaccagcgaagagaaaggaaagaaatcgtcaaagagctgcggaagctcaagccatgaaaatagaccccttgatctacttcataagatggaaagcaaaagtagcaatcaactcagttggctatctgtttctatggatgctgcgcttggctgccgaactaatatcttccaaatacaacggtctggcggacggaagcacactgaaaagcacgcctcaggaggtagtacagtgcacattcacccacaggccgcacccgtcgtgtgtaggcacgtgttggatacactgattcagctggcaaaagtatttccatcccattttacacaacagaggacaaaagaaactaactgcgagtccgaccgagagcgaggcaataaagcctgcagcccttgcagctctcaatctagttcctccggcatttgcactgatttctgggatctactcgtgaagctcgataacatgaacgtttcccggaaggggaagaatagcgtgaaatccgtgcccgtgtcagctggcggagagggagaaacttccccctacagtttggaagctagcccccttgggcagctgatgaatatgctgtcgcacccagtgataaggcgttcctctttactgacagagaaactgctacgtcttctgagtctcatttccatcgcattgcccgaaaacaaggtgagtgaagctcaagccaattctggctctggggcatcctccacgactactgccactagcacgacatctaccaccactacaactgccgcttcgaccacaccaactcctcccaccgcccctacccccgtcaccagcgcccctgcactcgtagccgctactgccatcagcaccattgtagtagcagcgtctacaaccgtgacaacccccactacagctaccaccacagtgtccattagtcccactacgaaaggaagtaagtctcccgcaaaagtttccgacggtgggtcgagctccacagacttcaaaatggtgtcatccgggctaaccgagaatcaattgcagctttctgtggaggtcctaacatcgcactcatgctcggaggagggtctggaggacgcagcaaacgtcttattgcagctgtcccggggagactctgggacacgcgataccgtgctcaagctgttattgaacggtgctcggcaccttgggtatactctgtgcaagcaaataggcaccttgctagctgagctgagggagtataatttggaacaacagagaagagcccaatgtgaaacgctgtcgccagacggcctgcctgaggagcagcctcagacaaccaagttaaagggaaagatgcaatcccgattcgacatggccgagaatgtagttatcgtcgcgagccagaagcgccctttgggaggaagggaactgcagctgcccagtatgagtatgcttacaagcaagactagtacccaaaagttttttctacgcgtcctccaggtgataatccagctccgtgatgacacgcggagagcgaataagaaagccaaacagactgggcgtctcgggagcagcgggttgggctcggcatcctccatacaagccgcagtgcggcagctagaggcagaggccgacgcaattattcagatggtcagggaggggcagagggcccgacggcagcagcaggctgccacatctgagtccagtcaaagcgaagctagcgtgcggagagaggagtcacccatggacgtagatcagccatctccctctgcgcaggacacgcagtccatcgctagcgatgggaccccccagggcgagaaggaaaaagaagagcggcctccagagctccccctccttagtgagcagttgagcttggacgagctgtgggacatgctgggagagtgccttaaggagctggaggaatcccacgaccaacacgcagtgctggtcctccagcctgctgttgaagctttttttctggtgcatgctaccgagcgggagagcaaacctcccgtgcgcgacacccgcgaatctcagctggctcacatcaaagacgagccccctccgctctccccagcaccacttacacctgctacgccttcaagcctggatcccttctttagtcgtgagcccagtagcatgcacatctcttctagtttgcctccggacactcagaaatttctccgatttgctgagacccaccgcacagtcttaaaccagatcctgagacaatcgaccacgcacctagccgacggtccgttcgcagttctggtagattatataagggttctggacttcgacgtgaagcgcaaatactttcgccaagaattggaacggcttgacgaaggactgcgaaaggaagatatggccgtgcacgtgagacgcgaccacgtgtttgaggactcctaccgcgaactacataggaagagtcccgaagagatgaaaaaccgactttatatcgtttttgagggagaagagggccaagatgctggcggactcctccgcgagtggtacatgatcatttctcgcgaaatgttcaaccctatgtacgctctattcagaaccagccctggggacagggttacgtacaccattaacccaagcagtcactgcaacccaaaccatctgtcctactttaagttcgtcggcagaatcgtcgctaaggccgtctatgataatcggcttctggagtgctactttacaaggtccttctacaaacacattcttgggaaaagtgtgagatacaccgacatggagtctgaggactatcacttctatcaggggcttgtgtaccttcttgagaacgacgtatcaaccttaggttacgacctgacttttagcactgaagtgcaagaattcggcgtgtgtgaggtgcgcgatctgaagccaaatggggctaatatcttggttactgaggaaaataaaaaagaatacgtgcacctggtgtgtcagatgcgcatgacaggtgccattcgtaaacagctggctgcctttctggaggggttctatgaaatcatccccaagaggctgatcagcatcttcactgaacaggaactggaactcctaatcagcggtctgcctactatcgatatcgacgacctgaaatccaataccgaatatcataaatatcagagtaactccatccagatacagtggttctggagagcactgcggtcatttgatcaagctgacagagcgaaattcctacagtttgtcacgggcacctccaaagtgccactccagggatttgccgctttggaggggatgaacggtatacagaagtttcagatccaccgggatgataggtccacggaccgattaccgagtgcacatacttgcttcaaccagcttgacctgcctgcctacgagagtttcgagaaactacgccacatgctactcttggccattcaggaatgttcagagggctttggcctcgcatat

SEQ ID NO: 225829 - DNA, 771 bp, synthetic construct
  misc_feature 1..771: note = Description of Artificial Sequence: Synthetic coding sequence
  source 1..771: mol_type = other DNA
atggatccttaccctcaccagttcgctacagctctcttttcttttctatatcacctggccagttacgatgcaggtggcgaggcacttgtctcatgcggcatgatggaagccctactcaaggttatcaagtttctgggggacgagcaggaccagatcaccttcgttactcgcgctgtacgggtggtcgacttgatcactaacttggatatggccgcttttcaatcccactctggcctgagcatatttatctaccgcctagagcacgaggtcgacctttgcaggaaagagtgtcctttcgtgataaagcctaaaatccagcgaccgaatacaacacaggagggcgaggagatggagacggacatggacgtggcagacgtcgccatggaatcgtcacccggatctagcatctccatggaacaccggttagatgtggaactaagagccagcggatcttcgtcatcaaccaacatcagttctggcccttcgcccggaccatcacctggtaccggccctggtccaggccctggacctgggcctggacccggacccggacctggccctggtccaggacccggtcctggtccaggccctggtcccggtccaagaccgggagtgcagtgtatccctcagcgggcagcactcctgaagtcaatgctgaacttcctcaaaaaggcaatacaggatccagcctttagtgacgggataagacatgtgatggacggtagcttaccaacatctctgaaacacatcatctcaaacgctgagtactag

SEQ ID NO: 225830 - DNA, 687 bp, synthetic construct
  misc_feature 1..687: note = Description of Artificial Sequence: Synthetic coding sequence
  source 1..687: mol_type = other DNA
tgagttagttgcgggatgatggaggccctactgaaagttattaagttcctgggggatgagcaagatcagatcacctttgtgactagggccgtcagagttgtagatctcatcacaaatctcgatatggccgctttccagtcacactctggcctttcaatttttatctacagactcgagcacgaagtcgacctctgtcggaaggaatgcccctttgttatcaaaccaaaaattcagcgccctaatactacacaggagggagaggagatggagactgacatggacgtggcagacgtggctatggaaagcagtcctggcagctcaatctccatggaacaccgccttgatgttgagctgagggcatcagggagttctagctcaaccaatatcagctccggcccatccccaggaccctctcctggcacgggacccggtccgggaccaggaccgggtcccggtccgggacctggccctggtccaggccctgggccaggtccaggcccaggcccagggcctggaccccgtcctggagtgcaatgtattcctcagcgggctgccctccttaaaagcatgcttaacttccttaagaaggccatccaggatcccgctttttccgacggcatcagacatgtcatggacggcagtctccccacttctctgaaacatatcattagtaacgccgagtattag

SEQ ID NO: 225831 - DNA, 3594 bp, synthetic construct
  misc_feature 1..3594: note = Description of Artificial Sequence: Synthetic coding sequence
  source 1..3594: mol_type = other DNA
taacctagcggatcgaatgttgacacactcttaaggctgcgcggacgtctgttgctggaccatgaggcactctcttgccttctggtgttattatttgttgacgaaccgaagctgaacacttctcgactgcacagggtccttcggaatttgtgctatcacgcgcaaacccggcactgggtgatccgtagtttgctgtctatactgcagaggtcctctgaaagcgagctgtgtattgagactccaaaactgacaacctccgaggagaaaggcaagaagagctctaagtcttgcgggtcgtcttcccacgagaacagaccgttggatctcttacacaagatggagtccaagtcatctaaccagctgtcgtggctgtcagtgagcatggacgctgcgctgggatgccgcaccaacatttttcagattcagcgatccggcggaagaaaacataccgaaaagcacgcctcaggcggaagcaccgtccatattcacccccaggcggctcccgtggtgtgcagacacgtgcttgataccctgatccagctggcaaaggtgttcccctcacactttacacaacagagaacaaaagagaccaattgtgaatccgatagggaaagaggaaacaaggcctgttccccatgttcttcacaaagttcctccagcgggatttgtactgacttttgggaccttctggtaaagcttgacaatatgaacgtgtctaggaagggcaaaaactccgtgaagtccgtccccgtatcggcaggcggagaaggggagacatccccttactcactcgaagcatctccacttggccagcttatgaatatgttatcccatcctgtgatcagacggagttctttgctgaccgaaaagttattacgccttttaagcctgatctcgatcgctctgccagaaaataaggtttcagaggcccaggccaattccggcagtggggctagcagtacaacaacagccacgtccaccaccagtacaactaccaccacagctgcctcaacgacaccaacaccgcctacggccccaactcctgtgacctcagcacccgctctggtggccgcaacagctataagtaccatagtagttgctgcttctactacagttaccacccctactaccgcaacgaccaccgtgagcatctcccctaccaccaaaggcagtaaatcccccgctaaggtgtctgatggaggctctagcagcaccgacttcaaaatggtgtcttctgggctgactgagaaccagctgcaactgtccgtggaggtgctgacgagccactcctgttccgaggaagggctggaggacgctgccaacgtcctgttacagttgagccgcggtgactccggaacccgcgataccgtgctgaagttactgctcaacggagctcgccacctcgggtataccctttgcaaacagattggcacactactcgcagaactcagggaatacaatctggagcagcagcgacgagcccagtgtgaaaccttgtctcctgacgggctccccgaggaacagcctcagaccaccaagttgaaagggaagatgcagtctagatttgacatggccgagaatgtagttatagttgcttcccagaaacgtccattaggaggcagggagttgcagttaccgtcaatgtcaatgttgacttctaaaacaagcactcagaagttctttctccgtgtattgcaagtaattatccagctgagggatgatacccggagagcaaataaaaaggctaagcagacgggccgtctcggaagttctggcctagggtctgcctcgagcattcaggccgctgttcggcagctggaagctgaagctgatgcaatcatacagatgagcgagtccagccagagcgaggcctccgtgaggagagaggagtcccctatggatgttgatcagcctagcccgtcagcccaggacacacagagtatcgcatcagatggcacgccccagggagagaaggagaaagaggaacgtccaccggaactgcccctgctgtctgagcagctctccttggatgagctgtgggatatgctgggggaatgtctgaaagagctagaagaatcccacgaccaacacgccgttctcgttcttcaacccgcagtcgaggctttttttttggtccacgccactgaaagggagtcaaagcctccagttcgagacacacgcgagtctcagcttgcacacataaaggatgaaccccctcccctttcaccagcccctctcacacccgctacaccctccagcctggacccatttttcagtagggagccatcttccatgcacatttcctcttcactgcccccagatacacagaaattcctccggttcgccgagacccatcggactgtgctgaaccagatattacgccagagtacaactcaccttgcagacggacccttcgccgttcttgtcgactacattcgagtcttggacttcgatgtgaaacgcaaatattttcgccaggagctggagaggctggacgaaggcttgcgcaaggaagatatggccgtacacgtaagaagggatcacgtgtttgaagactcttatcgagaactccatcgcaagtctccggaagaaatgaaaaatcggctgtatattgtcttcgaaggcgaagaaggacaagacgcgggaggactgctgagagagtggtatatgatcattagcagagagatgtttaatcctatgtacgcactgttcaggacttcccctggagacagagtcacctacactatcaacccttcatcacactgcaaccctaaccatctgagctacttcaagttcgtcggtagaatcgtggccaaagctgtctacgacaatcgcttacttgaatgttactttacccgtagtttttacaagcacattctgggaaagtccgtgcgttataccgatatggagagcgaagactatcacttctatcaggggctcgtatatctcctggagaatgatgtcagcaccttaggctatgacctgactttctccaccgaggtgcaggagttcggagtctgtgaagtcagggacttaaaacccaatggcgctaacatcctcgttactgaagagaacaaaaaagaatacgtgcatctggtatgccaaatgaggatgaccggcgctatccgaaagcagctggctgcctttctcgagggcttttacgagatcattcccaaacggttgatctcgatctttacagagcaagaactggagctgctcatctcgggcttacccaccatcgatattgacgaccttaagagcaataccgagtaccacaaataccagtccaacagtatacaaatccagtggttttggagagccttgagatcttttgaccaggccgatcgcgctaagttcctgcaatttgttactggaaccagtaaggtccctttgcaagggttcgctgcgctcgaagggatgaacggtatccagaagttccagatccatagagatgatagatcaactgaccgcctgcctagcgcccacacatgcttcaaccagttggacttgcccgcttacgaatcttttgaaaaactgagacacatgctgctgttggccatccaggaatgtagcgagggtttcgggctcgcttag

SEQ ID NO: 225832 - DNA, 10226 bp, synthetic construct
  misc_feature 1..10226: note = Description of Artificial Sequence: Synthetic coding sequence
  source 1..10226: mol_type = other DNA
taatcccttccgtccggatgtgagttcggacaggctgatatgcagaaattggtaccgaaagacgaaaaagcagacggtgaacaagacggggctgccggttcaatggacgcatctacacaaggcttgctcgaggggatcggcctcgatggagacacactggccccaatggaaacggacgagccaacagcctccgactcgaaggggaaatccaaaatcactcccgcaatggccgctaggatcaagcagatcaaacccctcctaagcgccagttctagactgggtcgagcactcgccgaactttttggcctgctggttaagctgtgtgtcggatcacccgtgcgccaacggcgttctcaccatgctgcttcgacgaccactgcccctacgcccgctgcccgaagtacagctagcgctctcacaaaactgctgaccaaggggctgtcttggcagcctcccccttacaccccgactccccgtttcagattaaccttcttcatctgtagcgtaggctttaccagtccaatgctcttcgatgaacggaagtacccgtatcacctgatgctgcagaagttcctgtgcagcggtggccataatgcacttttcgaaacttttaattgggccttgagcatgggcggaaaagtcccagtgtcagaggggctcgagcactctgatttacccgacggcaccggcgaattcttagatgcttggctcatgctggtcgaaaaaatggttaacccaacaactgtactggaaagccctcactcactgcccgctaaactccctggcggtgtccaaaatttccctcagttttcagcactgagattcctggtggtaacacagaaagcagccttcacttgcataaagaatctctggaacaggaagccactcaaggtgtacggagggcgaatggcagaatccatgctcgctatcctttgccatattttaagaggggagcctgtaatccgagagaggctgtctaaagaaaaagaaggatccaggggggaagaagacacaggtcaggaagaaggaggttcgcggagagagccccaggttaatcagcagcagctccagcagttaatggacatggggtttacacgtgagcatgctatggaggctcttctcaacacatctactatggagcaggcgacagaatacctgctgacgcaccctccgccaatcatgggcggagttgttagggatctaagtatgagtgaggaagaccagatgatgcgggctattgctatgtccttgggtcaggatatccctatggatcagagagccgaatcacctgaggaagtagcatgccgaaaggaggaagaggaaagaaaggctcgcgagaagcaggaagaggaggaggctaaatgcctggaaaagtttcaggatgccgatcccttggaacaggacgagctgcatacttttaccgacaccatgctccctggatgtttccatctgcttgacgaactcccagacaccgtgtatcgtgtttgcgaccttatcatgaccgctatcaagcgaaacggcgctgattatagagatatgatcctgaaacaagttgttaaccaagtgtgggaagctgctgatgttttgatcaaagccgctctgccactgactacttccgataccaagacggtgagtgagtggattagtcagatggccaccttgcctcaggcctccaatctggcaactagaatcctcctacttaccctcttattcgaggagttgaagttaccctgcgcttgggtggtcgagtcttcagggattttgaatgtcctgataaaactcctggaagtggtgcaaccctgcctgcaggctgccaaggaacagaaagaggtgcaaacaccaaagtggatcacacctgtgctgctactgattgatttctacgaaaaaactgccatctcgtctaagcggagggcccagatgacaaagtacctgcagtccaacagcaacaactggcggtggttcgacgacaggagtggtcggtggtgttcttattcggcttcaaacaactccacaattgacagcgcctggaagtctggagaaacgtccgtcaggttcacagccggtcgcagacgatataccgtacagtttacgacaatggttcaggtaaatgaagagaccggcaacagaaggcccgtgatgctcaccctgttgagagtgcctcgactgaacaaaaattcaaaaaactctaacggacaggagctggaaaaaaccctcgaggagtccaaggaaatggacatcaagaggaaagagaataagggtaatgatactcccctggcgctggaatccaccaacaccgaaaaagaaacaagcttagaagaaactaaaatcggggagatcttgatacaggggttaaccgaggacatggttactgtcctgattcgggcttgcgtcagtatgttaggcgttcctgtggatcctgatactctgcatgcaaccctccggctctgcctgcgactgacgagagaccacaaatacgctatgatgtttgccgagctcaaatctacccggatgatcctgaacttaacacagtcttccggattcaatgggtttacccctctagtgactctgctgcttaggcacataatagaggacccatgtaccctgagacatacaatggagaaagtcgtccgttccgccgctacatccggcgcaggcagtacgacgagcggcgtggtgtctggcagtctcggatcccgagagatcaactatatcctgcgcgtgctgggtcctgctgcttgtagaaaccccgatatttttacagaagtggccaactgctgtatacggattgcattaccagcccctagagggtctggtaccgcgtcagacgacgaattcgaaaacttgaggatcaaggggccaaatgccgtgcaattagttaaaactacaccccttaaaccctcaccattgccggtaatccctgatactattaaggaggtgatctatgatatgctgaatgccctggctgcctaccacgccccagaggaggcagacaagagcgatcccaagcccggagtgatgacgcaggaagtcggccagctgctccaggacatgggcgatgatgtctaccagcaatatcggtctctgactcgccagagtagcgactttgacacacaaagtgggttctcaatcaattcccaggtgttcgctgctgatggcgcaagtaccgagacctcggcctcgggaactagtcagggcgaggctagcacaccagaagaatccagggacgggaagaaggacaaggagggtgatagggcctccgaagaggggaagcaaaaaggcaaagggtctaagcccttgatgcctaccagtacgatcctgaggttactggcagagctggtgagatcatatgtgggcatcgctacgctgatagccaattacagctacacggtcgggcagtccgaactgattaaagaggactgctctgtactcgcatttgtcttagatcacctcctgcctcacacccaaaatgccgaggacaaggacacgcctgccctggctcggttgttccttgcttcactggcagcggctggctccggcaccgacgcacaagttgccctggtcaacgaagtaaaggccgcattaggtcgggcactggcaatggctgagtctaccgaaaaacatgcacgtctccaggccgtgatgtgcattattagcacgattatggagagttgcccgagcacctcatccttttattcctccgcaaccgcgaagacccagcacaacggcatgaacaatatcatcaggctgtttctgaagaaggggttggtcaatgatttagcgagagtcccccattcgctggacctgtcctcccccaacatggccaacaccgtcaatgccgcactaaagccactggaaaccctgtcaaggattgttaatcagccttccagcctcttcggctcaaagtccgcctccagcaagaacaaaagtgaacaggatgcccagggagcaagtcaggacagcagttctaatcagcaagatccaggagaaccaggagaagccgaggtacaggaggaggaccacgatgtcactcagacagaagtagccgacggcgacattatggatggagaggctgaaaccgatagcgtggtgatcgccggacagccggaggtcttgagttcccaggaaatgcaagtagaaaacgagctggaggatctgattgacgaactcctggagcgcgacggcggatctggaaactccactatcattgtgagcaggagtggagaagacgagtctcaggaggatgtgctgatggatgaggctccatcaaatctcagccaggcctctaccctgcaggccaatagagaagattctatgaatattctcgatcctgaggacgaggaagaacacactcaagaggaggattcctctggctcgaacgaggacgaggacgattcacaagatgaagaagaggaggaggaagaagacgaggaggacgatcaagaggacgacgagggggaagaaggcgacgaggacgatgacgatgatggatctgagatggaattagacgaggactatcccgacatgaatgccagcccgctggtgcgttttgaacgctttgaccgcgaggatgacctaattattgagtttgacaatatgttttcatccgcgacagacatacctccaagcccagggaatattcctacaacacacccgctaatggtgaggcacgctgaccattcatccctgacgctgggctccgggtcgtccacaacacgcctcacccaaggcatcggcaggtctcagcggacactgagacagcttactgctaatacaggtcataccatacacgtgcattatccaggaaaccgtcaacctaatcctcccctgattcttcagaggctcctcggaccatcagccgctgcagacatcttgcagcttagcagttctctaccgctccagtccaggggcagagccaggctcctggtcgggaatgacgacgttcacataatagcgagaagtgacgatgagctactggacgacttcttccatgaccaaagcacagctactagccaggctggtaccctcagcagcattccaacagccctgacacggtggacggaggaatgtaaagtgcttgacgcagaatctatgcacgactgcgtgtcagtcgtcaaagtttccatcgtgaatcacttggagttccttcgggatgaagaactcgaggagagacgagagaagaggaggaaacagctcgcggaagaagagacaaaaatcacagataaagggaaggaagataaagagaaccgagaccagagcgcccagtgtacagcctcaaaatcaaacgacagcaccgagcagaacctcagtgacgggacccctatgccggattcatatcctacgacacctagttctaccgacgccgctacatcagagtcaaaggaaacgcttgggaccctccagtccagtcagcagcagcctacgctgccaacccccccagcgctgggggaagtgcctcaggagctgcagtcccctgccggagaagggggatcgagtacccagctgctaatgcctgtggagccagaggagttgggtcctacccggccttcaggcgaggccgagaccactcaaatggaactttccccagcaccgactataacctctctgtcccctgagagggcggaggattctgacgccttgactgcggtgtcctcccagctggaggggtcaccaatggacacctcttcactcgcctcttgcactctcgaggaggctgtgggggatacctctgctgccggaagcagcgaacaaccccgtgcaggatcctctacgcccggagacgccccacccgcagtggccgaagtacagggtcggtcggatggaagtggagaaagtgcgcagcctccagaagactcaagcccacccgctagctccgaaagttcttctacgagggattcagccgtcgccatttccggggcagacagccgcggtatccttgaggaacccttgccgtcaacatcctcagaggaggaggacccgctggctggaatctccctaccagagggagtggatccttcctttctcgcagccctccctgatgatatcagacgcgaagtcctgcagaaccagctcggtatcaggcctccaacaaggaccgccccttccacaaactcttccgccccagcagtcgtaggaaacccaggcgtcacagaggtctcccccgagtttcttgcagccttgcccccagctatccaggaggaggtcctggcccagcagcgtgcagagcagcaaagacgcgagctggctcagaacgcctctagtgatacccccatggatcccgtgacattcatacaaaccttgccctcagacctgcgcaggtcagtgctggaggatatggaggattctgttttggctgtgatgcccccagacatcgcagcagaggctcaggccctgcggagagagcaggaggctcgccagcgccagttaatgcatgagcgtttgtttggtcactcatctaccagcgcactgagcgccatactccgaagcccagctttcacgagtcggctgtctggaaacaggggggtccagtacactcgactagcggtgcagcgagggggaacttttcagatgggaggtagttccagccacaatcgcccaagcggtagcaatgttgacacactactgcggcttagaggacggcttttactggatcacgaggccctttcatgtctactggttttgctgttcgtggatgaaccgaaacttaacacgagccggctgcaccgcgtgcttcgaaacctgtgctaccatgctcagactaggcattgggtcatccggtcattgctcagtattctgcagagatcttctgaatccgagctctgcatcgagacacccaagttgaccacatccgaggaaaaaggcaaaaaatcgagcaagagctgcggcagcagtagccacgaaaataggccactggacctcctgcataagatggagtcaaaatcgagtaaccagctgtcctggctgtccgtctctatggatgctgccctaggctgcagaacaaacatattccagattcagaggagcggtggacgcaaacacactgaaaagcatgcttccgggggaagcacggttcacatccatccgcaggctgcaccagtggtctgcagacatgtgttggataccctcatccagttggccaaggtgttcccctctcattttacccagcaaagaacaaaagagacaaattgcgaatctgatcgcgaacgcggtaataaagcctgttcaccctgctccagtcaatcaagctcaagcggaatctgtacagacttctgggatttgctcgtgaagctcgataacatgaatgtcagtcgaaagggaaaaaattcggtgaaaagcgtgccggtgtcggcgggaggcgagggagagactagtccatacagcttagaagcgagcccgctggggcagctgatgaatatgttgagccacccagttattcgtcgcagctccctgttaactgaaaagctgctgagactgctttctctgatttcgatcgcactgcctgagaataaggtttcagaggcgcaggctaacagtggatccggtgcctcctctactacaaccgccaccagcacaacctcaactaccacgacgactgccgcatcaactacgcccacccctcctacagcccctacccctgtcacgtcagcccctgccctggtagcggcaaccgctatatctacaattgtcgttgcggcatctaccactgtgacgactcccactaccgctacaaccaccgtttccatttccccgactacaaagggctccaagagcccagccaaggtatctgacgggggtagtagctctacggacttcaaaatggtgagtagcggattgactgaaaatcagctgcagctgagcgtggaagttctgaccagtcacagctgttctgaagaggggctggaggacgccgctaacgtgctactgcagctgagtcgcggagactccggaacacgcgatacagtattgaaattgctcctgaacggagcacggcatctgggctataccctctgcaaacagattgggacactgctggccgagctgcgggagtacaacctggaacagcaaagacgggctcagtgcgagaccttaagtcctgatggcttaccagaagaacagccacaaacaaccaaactgaagggaaagatgcagagccgctttgatatggcggagaatgtggtgatagtagctagtcaaaagcgtcctctgggcggtcgtgagctccagctgccctccatgagcatgctgacaagcaagacatccactcagaaattctttctcagggtactccaggttataatccagctgcgtgatgacacccgccgagcaaacaaaaaggcgaagcagactgggcgattaggctcttcgggcctgggctccgcaagctccatccaggccgctgtgcggcaactagaagctgaggccgacgcaatcattcagatggttagagagggacagcgcgcaaggcgccagcagcaggcggctacctccgagtcctcacagagcgaggcctcagtgagacgcgaggagtctcctatggatgtcgatcagcccagcccaagtgcccaggatactcagtccatcgcctctgacggcacaccacagggtgaaaaagagaaagaggagcggcctcccgaactgcctctcctctcagaacagctcagcctggacgaactgtgggacatgcttggagagtgcctgaaagagctcgaagaaagtcacgaccagcacgccgtgttggtattgcagcctgctgtcgaagcttttttcctcgtgcacgctaccgagagggagagtaaacctccggtgcgtgacactagggagtctcagctggctcatatcaaagatgagccgccacctctgagccctgccccactcacaccagccacccccagtagcctggatccctttttctcacgggagccttcctctatgcacatcagctcgagccttcctcctgatactcagaaatttctgaggttcgctgagacccatcggaccgtgctaaatcagatactgcgccagagcaccacccacctcgccgatggcccatttgccgtgctcgtagattatatcagggtgctggattttgacgtcaagaggaagtatttccggcaagagctcgagcggctcgatgaagggctccggaaggaagatatggctgtacatgtacgtcgagaccacgtcttcgaagacagctatagagagctacaccgtaagagccctgaagaaatgaaaaatcgactgtatatagtgtttgagggagaggagggacaggatgcaggcggtctccttcgggaatggtacatgattatatctcgcgagatgtttaaccctatgtacgctctctttcggacttcaccaggggatagggttacctatactatcaacccaagcagccattgcaacccaaatcacctcagctacttcaaattcgttgggcgtattgtcgccaaagccgtgtacgataatagactgctggaatgctacttcacaagatctttctataagcacattttgggaaaatctgtgcgatatactgacatggagtctgaagattaccatttttatcagggcttggtatatctcctggagaatgatgtcagcactctggggtacgacctgaccttctccactgaggtgcaggagtttggagtctgcgaagttagagacctgaaacccaacggagccaacatcctggtcactgaagagaataagaaggaatacgtgcacttggtttgtcagatgagaatgactggcgctatccggaaacaactggccgcatttctcgagggtttctatgaaattattcctaagcgcctgatttccattttcacagagcaggagctggaactactgatcagcggtctgcccactatcgatatagacgatctcaaatcaaacacagagtaccacaaataccaaagtaactctattcagatccagtggttctggcgcgctctgcgctcatttgaccaagcagatcgggcaaagttcctgcagtttgtcacaggcacaagtaaggtgcctctccaggggttcgccgctctagaggggatgaatggcatccagaagttccagatacacagagatgacaggtcaactgaccgattgccaagcgcacatacctgcttcaatcaactggacctgccagcatacgagagcttcgagaaactgaggcacatgctgctgttggctattcaggagtgctccgaaggctttggactggccta

SEQ ID NO: 225833 - DNA, 651 bp, synthetic construct
  misc_feature 1..651: note = Description of Artificial Sequence: Synthetic coding sequence
  source 1..651: mol_type = other DNA
atgaaagtggatcgcacgaagctgaaaaagactccaaccgaggcaccagccgattgccgggcactcatagataaactaaaggtgtgcaacgacgagcagctgctgcttgagctgcagcaaatcaaaacatggaacataggaaagtgtgaactctaccactgggtcgacctgctggataggtttgatggcatcctcgcggatgcagggcaaactgtggagaacatgtcctggatgctggtctgcgacaggccagagcgggaacagctgaagatgttactgctggccgtgttgaacttcaccgccctacttattgaatactctttctccagacacctgtactctagcatcgagcacttgaccacgctgttagcgagtagcgatatgcaggtagtgcttgccgtgcttaacctactgtacgtcttttctaaacgatccaactacataacacggctcggcagtgacaaaaggacacccctgctgaccaggctgcagcatctcgccgagtcctgggggggaaaagaaaacggctttggcctcgctgaatgctgccgcgatctccacatgatgaaatacccaccttcagctacaaccttgcatttcgagttctacgccgatcctggcgcagaagttaaaatcgagaaacgcaaatag

SEQ ID NO: 225834 - DNA, 282 bp, synthetic construct
  misc_feature 1..282: note = Description of Artificial Sequence: Synthetic coding sequence
  source 1..282: mol_type = other DNA
atgaaagtcgaccgcaccaagctcaaaaaaacaccaaccgaagccccagccgactgccgggctttgatcgataaactgaaggtctgcaatgacgaacagttgcttctcgaactgcagcagattaagacctggaacatcggaaagtgcgaactgtatcattgggtagatttacttgatcggtttgacggaatcctggccgatgctggccagaccgtcgagaatatgagctggatgctggtttgcgatcggccagaaagagagcagctgaagatgttgttatag

SEQ ID NO: 225835 - DNA, 1482 bp, synthetic construct
  misc_feature 1..1482: note = Description of Artificial Sequence: Synthetic coding sequence
  source 1..1482: mol_type = other DNA
atgctgccgagatgggaattagctctgtatcttttagcatctctaggattccacttctactctttctatgaagtctacaaggtgtcacgagaacatgaggaggaactcgatcaggagttcgaactggaaaccgacaccttatttggaggattaaaaaaagatgccactgattttgaatggagcttctggatggagtggggaaaacaatggctggtttggctactgctcggtcatatggtcgtgagccagatggccacgcttttggctagaaaacatcggccatggatccttatgctgtatgggatgtgggcctgctggtgcgtgttaggcactccgggagtcgccatggtcctgctgcataccacgattagtttctgcgtcgcccagtttcgctcccaactgcttacttggctttgcagcctgctgctactgagtaccctccggctccagggagtcgaggaggtaaaacggaggtggtacaagacagagaacgaatactatctgttgcaattcaccctcacagtgcggtgtctgtactatacctctttttcgcttgaactctgttggcagcaattaccagcggcatcgaccagttattcttttccttggatgttagcgtatgtgttctactatcccgtcctccacaacggacccatcctgtctttctcagagttcatcaagcagatgcaacagcaggaacacgattccctgaaggccagtctgtgtgtcttagcactgggccttggacggctgctctgttggtggtggctggcagagctgatggctcacttaatgtacatgcatgctatttactcttctattcctctgcttgaaaccgtgtcctgttggacattaggtggactggctctggcacaggtgctatttttctatgtgaagtaccttgtcctatttggggtacccgctttgctcatgaggcttgatggcctgacaccgccagccctgcctcgttgcgtatctactatgttttcattcactggcatgtggcgatacttcgacgtgggattgcataactttttgatccgctatgtctatattccggttggtgggtcccagcatggtcttctcgggacacttttcagtactgccatgaccttcgcattcgtgtcttattggcatggtggatatgattacctgtggtgctgggctgcgctgaactggctgggcgtcaccgtggagaacggcgtgagacgtctggtagaaacaccatgcattcaggacagccttgccaggtatttcagtccccaagcaagacggaggttccacgcagcattggcttcctgttctacatcaatgctcatcctatctaacctcgtctttttgggtggcaatgaggttggaaagacctattggaatcgtatttttatccagggatggccatgggtcaccctgtctgtgttgggatttctctattgctacagccatgtcggcatcgcatgggcccagacatatgccaccgattag

SEQ ID NO: 225836 - DNA, 1347 bp, synthetic construct
  misc_feature 1..1347: note = Description of Artificial Sequence: Synthetic coding sequence
  source 1..1347: mol_type = other DNA
atgaagtttacaaaatcacccgaggatgccactgacttcgaatggagcttttggatggagtggggtaagcagtggttggtgtggctgctcttgggtcacatggttgtctcccaaatggccacactgctggctagaaagcaccgcccttggattctgatgctgtacggtatgtgggcgtgttggtgcgtgctcgggacgccaggtgtcgcaatggtgctgttgcatactacaatttccttctgtgtggctcagttccgttcccagctgctgacttggttgtgttccctcctgttgctttccacgcttagactgcaaggcgtggaggaggtcaagaggcgatggtacaagacggaaaacgaatactatctccttcagttcactctgaccgttcggtgcctttattatacttcgttttccctagaactgtgctggcagcagcttcccgctgcatctacctcttatagttttccatggatgctagcctatgtattctactatccagtactgcacaacggcccaatactgtctttctctgagttcataaagcagatgcagcagcaggaacacgactctctcaaagcaagcctctgtgtgttggcattagggttggggcgactgctgtgctggtggtggctggccgaattgatggcacacctcatgtacatgcacgctatatactccagtataccactgctggaaactgtatcatgctggaccctgggcggtctggcgctggcccaagtcttatttttttatgtcaagtacttggttctcttcggagttccagctcttctgatgaggctggatgggctcacacccccagcgctgccgaggtgcgtatcaacaatgttctctttcacagggatgtggcgctatttcgacgtgggtctgcacaactttctgattcggtatgtgtacattcccgtaggaggcagccagcatggactgctgggcacgctgttctctacagccatgactttcgcctttgtgtcctactggcatggcggatatgactatctctggtgttgggcagccctgaactggcttggggtcacggttgaaaacggggtccggcgactggtcgagaccccgtgcatacaagattcactcgcacggtatttttcaccgcaagctcgaaggagatttcatgccgcattggcgagctgcagcactagtatgctgattttaagcaatctcgtcttcttgggagggaatgaggttggtaaaacatattggaacaggatctttatacagggttggccctgggttactctctctgtgctggggttcctgtactgctactctcatgtggggatcgcttgggcacagacctacgcgactgactag

SEQ ID NO: 225837 - DNA, 552 bp, synthetic construct
  misc_feature 1..552: note = Description of Artificial Sequence: Synthetic coding sequence
  source 1..552: mol_type = other DNA
atgaggctcgacggattaaccccaccagcactcccacggtgcgtgtcaaccatgttttctttcaccggcatgtggaggtacttcgacgtaggacttcataactttctgatcaggtacgtctatattcccgtcggagggtcccaacacggcctccttggaaccctgttctcgactgctatgacatttgccttcgttagctattggcacggcggatacgattatctgtggtgctgggctgccctgaactggctgggggtgacagtcgaaaacggcgtgcggaggctggtagaaacaccttgcatccaggactctctagccaggtacttttcaccccaggctagaaggagattccacgctgctttggccagctgttcaacatcaatgcttatcctgagcaacctcgtattcctcgggggaaacgaagtggggaagacctactggaataggatctttattcagggctggccttgggtaactctctctgtgctcggtttcctctactgttatagccatgtaggcattgcttgggctcagacttacgctacagactag

SEQ ID NO: 225838 - DNA, 1482 bp, synthetic construct
  misc_feature 1..1482: note = Description of Artificial Sequence: Synthetic coding sequence
  source 1..1482: mol_type = other DNA
atgctgcctcgttgggagttagcactctacctgctggcatccttggggttccacttttacagtttctatgaagtttacaaggtgtctagggagcatgaggaggaattggatcaggaatttgaattggagactgatactctgttcggcggattgaaaaaggatgctacagatttcgagtggtccttttggatggagtgggggaagcaatggctggtttggctgctgttgggccacatggtggtgtcccagatggccacacttctggccagaaagcaccgcccatggatcctgatgctttacggaatgtgggcgtgctggtgcgttcttggcacccctggggttgctatggttttactgcacactacgatcagtttctgtgttgcccagtttcgcagtcagcttttaacatggctgtgctcgttgcttctcctgtctaccttgcggctgcagggagtcgaggaggtgaaacggcgatggtataaaactgagaacgaatactatcttctgcagtttactctgactgtgcgctgtctgtactacacgtccttttccttggagctctgctggcaacaactgcctgctgcctccacaagctacagcttcccatggatgctagcttacgtgttctactacccggttctacataatggcccaatcctcagcttttccgagttcatcaagcagatgcagcagcaggaacatgattccttaaaggcttcactctgtgtcctggcattgggccttggcagactgttgtgctggtggtggctggcagaactgatggcacatctcatgtacatgcatgccatctactcttcgatccctctgctggaaaccgtgagctgctggacgctggggggactcgcccttgctcaagtactttttttctatgttaaataccttgtcctgttcggagtccctgccctgctcatgcgccttgacggacttacaccccctgctcttcccagatgcgtctccaccatgttttccttcacagggatgtggcgatactttgacgttggactgcacaattttttgatccgttacgtctacatacccgtcggcggttcccagcacggtttgttgggaacattgttctccacagccatgacatttgccttcgtttcctattggcacgggggatatgactacctgtggtgttgggcagctctgaattggctgggagttacagtagaaaacggcgtacgtcggctggtggagacgccttgtatacaggattctctggcccgttacttttctccccaggcccgaagacggttccacgctgcactggcttcctgttccacttcaatgctgatactgtcgaacctggtcttcttaggtggcaacgaggtcggcaagacttactggaatagaatctttatccagggatggccttgggtgacactcagcgtattgggatttctttactgctacagtcatgtaggaattgcatgggcacagacctacgccaccgattag

SEQ ID NO: 225839 - DNA, 1557 bp, synthetic construct
  misc_feature 1..1557: note = Description of Artificial Sequence: Synthetic coding sequence
  source 1..1557: mol_type = other DNA
atgcttccacgttgggaattagcactttacctgctcgcgtcgctgggctttcatttctattcattctacgaagtgtacaaggtgtccagagagcatgaagaagaactggatcaggagttcgagctggagacagatactctgttcggcggattaaagaaggatgctactgattttgaatggtctttttggatggagtggggcaaacagtggctcgtctggctgctgttgggtcacatggtcgtgtcccaaatggccacccttctggctcggaaacacagaccgtggattctgatgctgtatgggatgtgggcctgctggtgcgttttaggcacccccggtgtcgccatggttctccttcacactacgatatcattctgcgtagcacaattccgcagtcagcttctcacatggctctgttccctgctgctcctctctactctgcgactgcaaggtgtggaagaggtgaagaggcgctggtacaaaacagaaaacgagtactatttgttgcagtttacactgacggtgaggtgtctctactacacctccttctcacttgaactctgctggcagcagctcccagccgcttctacaagctactcattcccctggatgctggcctatgtgttttactatccggttctgcataacgggccaatcctgagttttagtgagttcatcaagcagatgcagcaacaagagcacgattctctgaaagcctctctgtgtgttctggcgctcggactgggccgtctgctctgttggtggtggctggcagaacttatggcccacttgatgtatatgcacgcaatttacagcagcatcccactgctggagaccgtttcctgttggactctcggagggctggccctggcccaggttttgttcttttacgtaaagtacctggtgctctttggcgtgccagcactcctaatgaggctggatgggctgacccctcctgccctcccccgttgtgtatcaactatgtttagcttcaccggcatgtggcggtattttgatgtaggactccacaacttcctcatccggtacgtttacatccctgtggggggatcccagcatggcctgctgggaaccctcttcagtacggcgatgacattcgcattcgttagctattggcatgggggttatgactacctatggtgctgggccgctctgaattggctgggagtgaccgtggagaacggggtccggagactcgtcgaaaccccctgtattcaggactccctggcccgttacttctccccccaggcaaggcgtcgatttcacgccgctctcgcttcctgcagcaccagcatgctgatcttgtccaacctcgtcttcctgggcggaaatgaggtggggaagacctattggaaccgaatctttatccagggtggcttatttctgtttttccttctcaacccatgctgggaaacagcatttcaaggattcccagtgtttcttcatttcctccagaccgaggtgctcgcaacatttgtcccaaactacttctcctggaacatctgcatagagaacacaagcgagctaagctcatactag

SEQ ID NO: 225840 - DNA, 1482 bp, synthetic construct
  misc_feature 1..1482: note = Description of Artificial Sequence: Synthetic coding sequence
  source 1..1482: mol_type = other DNA
atgttgccaaggtgggagctggctctgtatctcctggcgtctctcggatttcatttttatagcttttacgaggtctataaagtcagcagggaacatgaggaggagctggatcaagagttcgaactagagactgacacattatttggcggtctgaaaaaagacgccaccgatttcgaatggagcttttggatggaatggggaaagcagtggctcgtctggctgctcctcggtcatatggttgtgagccagatggcaacattgcttgcaaggaagcacagaccatggatcttgatgctctacggcatgtgggcttgctggtgcgtattggggacaccaggagtggctatggtacttctgcacacaactattagcttctgcgtggcccaatttcgttctcagttgctgacatggctctgtagtctgcttctgctcagtacacttcgcctgcagggcgtagaggaagttaagcgaagatggtacaagacagaaaatgagtattatctcctacagtttaccctcactgtacggtgcctctactacacttccttcagcctggagctgtgttggcagcaactgcctgctgctagcaccagttattcttttccttggatgctagcctacgtattttactatccagtcctccacaatggtcccatactctcgttctccgagtttattaagcagatgcagcagcaggaacacgattccctgaaggcctccttgtgcgtcctcgccctcggcctcgggaggctcctgtgttggtggtggctggccgagctgatggcacacctcatgtatatgcacgctatctattctagcatccccctacttgaaactgtgtcttgctggaccctcggcggactagcgctcgcccaagtcttgttcttttacgttaagtacctagtactgtttggagtgccagcccttctgatgaggctggacggactcaccccgccagctctgcccagatgtgtgtccaccatgttcagttttacagggatgtggaggtactttgatgtaggtctgcataacttcctgattaggtacgtgtacatacctgtggggggtagccaacatggcttgcttgggaccctgttttctactgcgatgacttttgcattcgtgtcttactggcacgggggatatgattatttgtggtgttgggcggctttaaattggcttggtgtgaccgtcgaaaacggagtgcgtagactggtggaaacaccctgcatccaggactctctggcacgatacttcagcccccaggccagaagaaggtttcatgcagcactggcctcgtgcagcaccagtatgctgatcctgtcaaaccttgtgtttctgggtggaaacgaagtgggcaagacttactggaacagaatcttcatacagggttggccatgggtcactctgtccgttctcgggttcttatattgttattcccacgtcggaattgcatgggctcaaacctacgcaacggactag

SEQ ID NO: 225841 - DNA, 624 bp, synthetic construct
  misc_feature 1..624: note = Description of Artificial Sequence: Synthetic coding sequence
  source 1..624: mol_type = other DNA
atggaatggggtaagcagtggcttgtatggctgctattagggcacatggtggtgtcacaaatggccactctgctcgccagaaaacgcaggtggtacaaaacagagaatgagtattatctgcttcagtttacactgaccgtgcgatgtctgtactacactagcttctccctggagctatgctggcagcagctgcccgctgcgtccacaagctactcctttccctggatgttggcatatgttttctattacccagttcttcacaacggccctatcctgtcatttagtgaatttattaagcaaatgcaacagcaagagcacgattcactcaaagcctccctgtgcgtgctggctctgggcctcggtcgactgctctgttggtggtggctggctgagctgatggcacacctcatgtacatgcatgctatttattcatctatccctttgcttgagactgtgtcatgctggactctcggaggcctggctttggctcaggtgctgttcttttatgtgaaatatttagtgctatttggagtgcctgcattacttatgcgcctggacgggctgaccccgcctgccttgcccaggtgcgtgtcaaccatgttcagcttcactggcatgtggtag

SEQ ID NO: 225842 - DNA, 1287 bp, synthetic construct
  misc_feature 1..1287: note = Description of Artificial Sequence: Synthetic coding sequence
  source 1..1287: mol_type = other DNA
atgttgcctcgctgggaacttgccctctatttgttggccagtttgggatttcatttctacagtttctacgaagtgtacaaagtttcgcgagaacacgaagaggaactggaccaggagttcgaacttgagaccgatacgcttttcgggggactgaagaaggatgcgaccgacttcgagtggtctttttggatggaatgggggaaacagtggttggtctggctgcttctcggccacatggtcgtgagtcagatggctacacttctcgccagaaaacggagatggtacaaaaccgagaatgaatactaccttttacagttcaccctgacggttcgctgcctgtattatacatcattcagccttgagttgtgctggcagcagcttccagcggcatctacttcttactcattcccgtggatgcttgcctatgtgttctactacccagtcctgcataatggtcctattctctcattctccgaatttatcaagcagatgcagcagcaggagcacgactcattgaaagcctcactatgcgtcctggccctgggcttgggtagactgctgtgctggtggtggcttgctgaactcatggctcacttaatgtacatgcatgctatctactcttcaattcctctgttagagacggtatcttgctggactctcgggggtctggctctcgcacaggtcttatttttctatgtgaaatatctagttctctttggcgtcccagcgctactgatgagattagacgggctgacccctcccgctcttcccaggtgcgtatcaaccatgttcagctttacgggaatgtggaggtactttgacgttggcctgcataactttctgattcgatacgtctatattcctgtcggcggatcgcagcatggccttctcgggaccctgttcagcactgcaatgacatttgccttcgtgtcctactggcatggtggctacgactacctttggtgctgggcagccctgaactggttaggcgtgacagttgaaaacggagtgaggagactcgtggaaaccccgtgcatccaggactctttggcccgttattttagcccccaggccaggcgtaggttccatgccgctctagccagctgctcaacttccatgttgatactgtctaaccttgtcttcctggggggaaatgaggtgggaaaaacatattggaaccgtatcttcatccagggttggccttgggtcacattgagcgtgcttggattcctttactgctactcccacgtgggtattgcttgggcccagacatatgctacggactag

SEQ ID NO: 225843 - DNA, 1071 bp, synthetic construct
  misc_feature 1..1071: note = Description of Artificial Sequence: Synthetic coding sequence
  source 1..1071: mol_type = other DNA
atgctaccaagatgggaactggccctgtatctgctggcttcactgggcttccatttttattctttttacgaggtatacaaagtgagtagagaacatgaggaggaattggaccaggagtttgagctcgagaccgacacactgttcggcggactcaaaaaagatgccactgacttcgagtggtccttctggatggaatggggaaaacaatggttggtatggctgctcctcggtcacatggtcgtgagtcagatggctacactgctggcccgaaagatgcagcagcaggagcacgattcactgaaagcttccctgtgtgtgttggcccttgggcttggcaggcttctgtgctggtggtggctggcagaactgatggcccacctcatgtatatgcatgccatctacagcagcatccctttgctggagactgtatcctgctggaccctgggaggactggccctggcgcaggtcttgttcttctacgtgaaatatttggtactgtttggcgttcccgctctgcttatgcgcctagacggtttaaccccccctgccttacccaggtgcgtcagcaccatgttctcttttactgggatgtggcgatattttgacgtcggcctccacaattttctaatacgctatgtctacatcccggtggggggttctcaacacggacttctcggaacactgttcagtacggctatgaccttcgcctttgtttcctactggcatggaggctacgactacctgtggtgctgggctgccctgaactggctgggagtaaccgtggaaaatggagtaagaaggttagttgaaacgccttgcatccaggactcactcgctcgctacttcagccctcaggcacgtcgcagatttcatgctgcactggcgtcttgttcaacatctatgctcatattgagtaacctagtctttctgggcggaaacgaagtagggaagacatattggaatcgaatcttcatacaggggtggccttgggttaccttatcggtactgggctttctttattgctactcccacgtcggaatcgcatgggcccagacctacgcaacggattag

SEQ ID NO: 225844 - DNA, 1485 bp, synthetic construct
  misc_feature 1..1485: note = Description of Artificial Sequence: Synthetic coding sequence
  source 1..1485: mol_type = other DNA
atgagcctgggcctgggatcagctgagcggggagtactgggaactaggggcgctcgcgaaaggtgtcggcgtcgcagacccggacagccgggagaacacgaggaagaactggatcaggagtttgagttagaaactgatacattgtttgggggtttgaaaaaagacgcgaccgactttgagtggagtttttggatggaatgggggaagcagtggctggtgtggttattacttggacacatggtagtcagccagatggccactctcctagctagaaaacacagaccatggatcctgatgctctacggcatgtgggcctgctggtgcgtcctcggtaccccaggagtggcgatggtgttactccacacgactattagcttttgcgtggcccagtttcggtctcaactgctgacatggctgtgctcactgttactgctctcaaccctcaggctgcaaggtgtcgaagaagttaaaaggaggtggtataaaactgaaaacgagtattatctgctacaattcactctgaccgttaggtgtctttattacacgtctttttcactggaattatgttggcagcagctacctgccgcatccaccagctattcattcccatggatgcttgcctacgttttctattatcctgtcttgcataacgggcctattctgagtttctcagaattcatcaaacagatgcagcagcaggaacacgattccttgaaagcaagcctatgcgtgttggcgctcgggttaggcaggctgctatgttggtggtggctggctgagttgatggctcacctgatgtatatgcacgctatctattcttccatcccactgctggagaccgtgtcttgttggacactgggaggattggcactggctcaggtgctcttcttttacgtcaaatacctcgttctgttcggggtgcccgcacttctcatgagattggacggactgaccccgcctgctcttccccgttgtgtgtccaccatgttctcatttactggcatgtggagatactttgacgttggccttcataactttttgattcggtatgtgtatatcccagtcgggggatcccagcatggtctgctcgggacactattctctactgcaatgactttcgccttcgtttcttattggcacggagggtacgattatctatggtgctgggccgcactgaactggctgggcgttaccgtggaaaatggggtgcgtaggctagtggaaactccctgtatccaggattctttggctagatacttctcgccacaggcacgtcgccgattccatgctgctctcgcttcctgttccacatctatgctgatattgtcaaatctagtgtttctgggaggcaatgaagtaggcaagacgtactggaacagaatttttatccaggggtggccctgggtgactttatctgttttagggttcctgtattgttactcacatgtgggaatcgcttgggcacaaacatatgcaacggattag

SEQ ID NO: 225845 - DNA, 1293 bp, synthetic construct
  misc_feature 1..1293: note = Description of Artificial Sequence: Synthetic coding sequence
  source 1..1293: mol_type = other DNA
atggaatggggcaaacagtggctcgtgtggctgttattaggccacatggttgtgagtcagatggccacgcttctggctcgcaaacatcgtccctggattctgatgctgtacggcatgtgggcctgttggtgcgtgctggggactcccggagtggccatggtactgttgcatacaaccattagcttctgtgtagctcagttcaggtcccagctgctaacctggctctgctccttacttctgctgagtacccttcgcctacagggcgttgaagaagtgaagcgccgatggtataagaccgaaaacgagtattatctgcttcagtttacgctgactgtaaggtgtctatactacactagctttagcttagagctgtgctggcaacagttacccgcagcttctacttcatacagcttcccttggatgctggcttacgttttctattatccagttctgcacaacggacctatcctgtctttctccgaattcattaaacaaatgcagcagcaggagcacgattcgctcaaggcttccctttgcgtgctggctttggggctcggcagactcctgtgttggtggtggttagcggagttaatggcgcaccttatgtacatgcacgccatttactctagtataccactgctggagaccgtgtcatgctggaccttaggaggcctggctctggcccaggtgctcttcttttacgtcaagtacctggttctgttcggtgtgcccgcattactgatgagactggacggacttaccccccctgccctccctcggtgtgttagtaccatgttttcattcacagggatgtggaggtattttgatgttggcttgcacaatttcctaattagatatgtttacattccagtagggggatcacagcacggtttgttgggaacccttttctccaccgcaatgaccttcgcctttgtgagctactggcacggcggatacgattacctgtggtgttgggctgctctaaactggctgggcgttacagttgaaaacggcgtgcggaggctggtcgagaccccatgcatccaggattcactggccaggtacttttctccgcaggctcgaaggaggttccacgccgcactagcttcatgctcaacttctatgctgatcctgagcaacctcgtttttctgggaggtaatgaggtggggaaaacttattggaaccgcatctttatccagggctggccatgggtgacactttctgttctcggcttcctctactgctactcacacgtgggaatcgcatgggcccagacgtacgcaacagattag

SEQ ID NO: 225846 - DNA, 2103 bp, synthetic construct
  misc_feature 1..2103: note = Description of Artificial Sequence: Synthetic coding sequence
  source 1..2103: mol_type = other DNA
atgctcaagatgcttagctttaaacttctcctcctggccgtggccctgggttttttcgagggtgatgccaaattcggagaacggaacgagggatcaggagcccgtaggcggagatgcctcaatggcaacccgccaaagaggctgaagaggcgcgataggaggatgatgtcccagttagaactgttgtccgggggagagatgctgtgcgggggtttctaccctcgactgtcctgttgcctccggtccgattccccaggactgggacgtctggagaacaagatcttcagcgtgaccaataacacagaatgtggcaaactcctggaggaaatcaaatgtgctttgtgtagcccccatagccagtcgctgttccattccccagagcgagaagttctggaaagagaccttgtactgccccttctttgcaaagactattgtaaagagtttttctacacttgtcgcggacacattcccggatttctccaaactactgctgatgaattttgcttctactacgctcgcaaggacggcggactctgtttcccagattttcctagaaaacaggtgcggggtccagcgtccaactacctcgaccagatggaggaatacgacaaagtcgaagagatctcccggaaacacaagcacaattgcttttgcattcaggaagttgtgtcgggactgcgacaacccgtcggcgctctgcactcaggagacggctctcagcgcctattcattctggagaaggaaggttacgtgaagattctcacccccgaaggtgagatttttaaagaaccctaccttgacattcataagcttgtgcagtccggcatcaaaggcggtgacgagaggggcttattgagcctcgcctttcaccctaactataaaaagaatggaaagttgtacgtatcatatacaacaaaccaagagcggtgggctattggtccacatgatcatatacttcgggtggtggagtacactgtcagtcggaaaaatccacaccaggtggatctgaggactgccagagtctttctcgaggtagcagagctgcatagaaagcacttgggaggacagctcctgtttggccctgacggattcctgtacattatacttggtgatggcatgatcacactggatgatatggaggagatggacggcctgagcgattttacagggtcagtgctacggctggacgttgacaccgacatgtgtaacgtgccctacagcattcctcggtctaacccccactttaatagcaccaatcagcccccagaagtcttcgcccacggcttgcatgaccctggtaggtgtgccgttgaccggcaccctaccgatattaacatcaatcttactatcctgtgcagcgacagtaacggcaagaaccggtcaagtgcccgaatcttgcagataataaagggtaaagactatgagagcgaaccaagtctcctggagttcaaacccttctcaaacggaccattggtcggaggatttgtgtaccgtgggtgccagagcgagaggctctacggatcttacgttttcggcgaccgcaatggaaatttcctgaccctgcaacagtcccctgtgaccaagcagtggcaagagaagccactgtgcttgggaacatcaggatcatgtagaggatatttttccggccatattttgggcttcggtgaagacgagttaggggaagtgtacattctgtccagctccaaatcaatgacccagacacataatggcaagctgtacaagatcgtggaccctaagcggccactgatgccagaagagtgtagggcaactgtacagccggcacagactcttacatctgagtgttcccggttgtgccggaacgggtattgtactcccactggcaagtgttgctgtagcccaggctgggagggggatttctgtcgcacagccaagtgtgaacccgcttgtcggcatgggggagtctgcgttcgccctaataaatgcctgtgcaagaagggctacttgggaccccagtgcgaacaggtagaccggaatatccgcagggttacacgggctggcatcttagaccagatcatagacatgacatcttaccttctggacttgacaagctacattgtgtag

SEQ ID NO: 225847 - DNA, 963 bp, synthetic construct
  misc_feature 1..963: note = Description of Artificial Sequence: Synthetic coding sequence
  source 1..963: mol_type = other DNA
atgctgaagatgctcagcttcaaactgttgctcttggctgtggcactgggattcttcgaaggggatgcaaaattcggcgaaaggaatgagggttcgggagcaagaagaagaagatgcttaaacggaaatccacccaaaaggctcaagcgccgtgacagaaggatgatgagtcagctggagctgctgtccggtggtgaaatgctgtgcggcggattctaccctaggttatcttgctgtcttaggtccgacagtcccggacttggcaggctggagaataaaattttctcggtgaccaataatacagagtgtggcaagttacttgaagaaatcaaatgtgccctgtgcagcccccactcgcagtcccttttccacagcccagaacgtgaagttctggaaagagatctagtcttgccattgttatgtaaagactattgtaaggagtttttctacacatgtcgcggacacatccccggtttcctgcaaaccacggcagatgagttctgcttctattacgcacgtaaggatggaggactgtgttttccagactttccaagaaagcaggtgcgcggacctgcaagtaactaccttgaccaaatggaggaatatgacaaggttgaggagatcagcagaaaacataagcataattgtttttgtattcaagaagtggtctcgggcctccgtcagcctgtcggtgcactgcactccggggatgggtctcagaggctgttcatcctcgagaaagaaggttatgttaaaattctgacaccagaaggtgaaatttttaaggagccgtacctggatatacacaaactggtgcagtctgggatcaaagtaggctttctgaactttatctatttctgcgcgggatacgtgaacttcattttagtcctccctagttccctgaaagtgttcctatgcaacaaaaggaaaaatctggcaggcgaaaataagggcgcaacttag

SEQ ID NO: 225848 - DNA, 4146 bp, synthetic construct
  misc_feature 1..4146: note = Description of Artificial Sequence: Synthetic coding sequence
  source 1..4146: mol_type = other DNA
atggcttctccccgtgcttcacgctggcctcccccactgctcctactgttgctgcctcttctgcttctcccgcctgctgcaccgggtacccgcgacccccctccttctcctgccaggcgcgctttatccctggccccactcgccggtgcaggtctcgagctccagctggagcgtcgccctgaaagagagccacctcctacccccccaagagagaggcgcggtcccgctaccccaggcccttcgtaccgagcccctgaacccggtgcggcaacccagcggggacccagcggtagggccccacgcggtggaagcgcggacgccgcatggaagcactggcctgagagtaacacagaggcacatgtagagaacatcacattctatcagaaccaggaggacttcagtaccgtctcgtctaaagagggggtaatggtgcagacgagtgggaaaagccatgcggcatccgatgcgcctgagaatttaacactcctggccgagaccgccgatgccaggggaagatcgggaagctcatctcggactaattttacaattctgccagtaggttactctctagaaatcgccactgctttgacatcccagtctggcaatcttgccagcgagagccttcacctgccgtcatcaagctcagagttcgacgaaaggattgcagcttttcagaccaagtctggcaccgcctcggagatgggcaccgagagggcgatgggactaagtgaagagtggaccgtgcacagccaagaagccacaacttccgcttggtccccctcttttttacccgcactagagatgggggaacttaccacaccatccaggaaacgcaattcgtccggtcccgatctgagctggctgcacttctatcggaccgctgcgtctagccctcttctggacctctccagcagcagcgagtctacggagaagctcaacaattcaaccggactccagtctagtagcgtttcacagacaaagaccatgcacgtggctaccgtctttaccgacgggggacctcgaactttgcggtcattgactgtctccctcggacctgtgtccaaaacagagggattccccaaagactccaggattgcaacaaccagctcttccgtgctccttagccccagcgccgtggaaagccgcaggaacagtcgagttaccgggaaccctggcgacgaagagtttatagagccaagcacagaaaacgaatttggactcacatcgctccggtggcagaacgactctcccacttttggagaacaccaactggcgtcatcctctgaggtccagaacggcagccccatgtcacagactgaaaccgtcagtaggagcgtggctcccatgcgtggtggcgaaatcacggcccattggctgctgacaaatagcacaacatcagctgatgtgaccggaagttcagcctcctaccccgagggggtgaatgcgagcgtcctcacccaattttcagactcaacagtgcagtcaggtgggtctcacacagcactgggcgatcgatcatacagtgaatctagctccacctcctcctcggaaagtctcaacagttccgccccacggggagagagaagcatcgccggaatcagttacggccaggtgcggggtactgcaatagagcagcggaccagctctgaccacaccgaccacacatacttgtcctcgaccttcaccaagggagagagggctctcctctcaattacggacaattcatcgtctagtgacatagtagagtcctcgacttcttatattaagatttccaattccagccactccgagtattcttcgtttttccatgcgcagactgaacgatcaaacattagctcttatgatggggagtacgctcaacccagcaccgagtcacctgtgctccatactagcaacctcccatcatatactccaaccataaacatgccaaatacatcagtggttttggacacagatgctgagttcgtgtctgactcctcatcctcttcgtcaagttcgtcctccagttcaagcagcggaccccctctccccctgcccagtgtgtcccagtctcaccacctgttctctagtattcttccttccactcgggcttcggttcacctgttgaagagcacctcagacgcttctaccccctggtcaagtagtccatccccgctgccagtgagcttgactactagtacatctgcgccactctccgtatcccaaacaaccctgccacaaagttcatccactccagttctgcctcgggctagggagaccccagtgacttctttccagaccagtacgatgacctcctttatgaccatgctgcacagcagccaaactgccgacctgaagagccagagcaccccccaccaggaaaaagttattacggaatccaagagtcccagcttagtttcactgcccacggaatccacaaaagcagtcactaccaacagtcccctacctccctcgctgaccgagagctccaccgaacagactttgcccgctacttctaccaacctggcccagatgtcaccgacttttactacaaccattctgaagacctctcagccactgatgaccacgcccggaactctctcttcaaccgccagtttggtgactggcccaatcgctgtgcagacaacagcaggtaagcagctctccctcacccacccggagatcctcgtcccacaaatctctacagagggcggtatcagtacagaaagaaacagagtgatagttgatgcaactacgggattgattcccttgacttccgtgcccacatcagctaaggagatgacaaccaaacttggcgtcacagccgagtacagccctgcaagccggtcactaggcacatccccgagcccacaaacaactgtggtgtccaccgccgaggacctggctcctaagtctgccacatttgccgtccagagttctacccaaagtcctacaactgtctccagctctgcttcagttaattcctgcgctgtcaacccttgtctccataacggtgagtgcgtggctgataatacctctagagggtatcactgcaggtgtccgcctagctggcaaggggacgactgcagtgtggatgtgaacgagtgtctgtctaacccttgtccgagcaccgccatgtgcaacaacacccagggctccttcatttgcaagtgtcccgtgggctaccagctcgaaaaaggcatttgcaatctcgtgcgcacctttgtcaccgagttcaaactgaagcggacttttctgaacacaaccgtggagaagcattctgatctacaagaggtggagaatgaaatcactaagacattgaatatgtgcttctccgcgcttcctagttacattcggtctaccgtgcatgcctcgcgggaatccaacgccgtggtgatctcactgcagacaacattctcactcgcatctaatgtgaccctgttcgacttggcggacagaatgcagaaatgtgttaacagctgcaagagcagtgctgaggtgtgccagctattgggatctcagaggaggattttcagggcaggaagtctgtgcaaaagaaaaagcccagaatgtgacaaggatacatccatttgcacggatttagacggcgtcgcactttgccagtgcaaatcaggatatttccagttcaataaaatggaccacagttgtcgcgcttgcgaagacgggtacagactagagaacgaaacttgcatgtcctgcccgtttggcttagggggactgaactgtgggaatccctatcagctaattacagtcgttattgctgcggctggcggaggcctgctcttaatcctcggcatcgctctaattgtgacatgctgtaggaaaaacaagaatgacatttccaagctgattttcaagagtggagacttccagatgtctccctacgctgaatatcctaaaaaccctcgcagccaggaatgggggcgagaggccattgaaatgcacgagaacggcagcaccaaaaatctgcttcagatgaccgacgtgtactattcacctactagcgttcgcaatccggagcttgagaggaacgggctgtacccggcttataccggtttgcctggatcaaggcactcttgcatctttccaggtcaatacaatccgagcttcatttccgatgagtccaggagacgggactatttctag

SEQ ID NO: 225849 - DNA, 5828 bp, synthetic construct
  misc_feature 1..5828: note = Description of Artificial Sequence: Synthetic coding sequence
  source 1..5828: mol_type = other DNA
atggaagaccggagggcagaaaagagctgtgagcaagcgtgcgaaagcttgaaaagacaggactacgagatggctctgaagcattgcaccgaggccctgctgtctctcggccagtattccatggctgacttcactggaccctgccctctggagattgagagaatcaaaattgaatctttgttgtatcggatcgcttcatttcttcaactgaaaaactatgttcaagcagacgaggactgccgacatgttctcggggaagggctagccaagggagaagacgctttccgcgctgtgctttgctgtatgcagctgaaagggaagctgcaaccggtgagcacaattctcgctaagagtctgaccggggagtcactcaacgggatggtcacaaaggacttgacgaggctaaagacattgctgagcgaaactgagacagccactagcaacgcactcagcggttaccacgtggaggacctcgatgagggttcatgtaacggatggcactttagacccccaccgaggggcatcacaagctccgaagaatacaccctgtgcaagcgcttcctggagcaggggatttgtcggtatggagcacagtgcacctctgctcactcccaggaggaactggccgaatggcaaaagcgatacgcaagccgcctaattaagctgaagcaacagaatgaaaacaaacagctgagtgggtcttacatggaaaccctgattgaaaagtggatgaacagtttatccccggagaaagtgttaagcgaatgtatcgaaggagtcaaggtcgaacataatcccgacctgagcgtgaccgtaagtactaaaaagtcccaccagacctggaccttcgcactgacttgtaaacctgccaggatgctgtaccgtgttgctcttttgtatgacgcgcatcggcctcacttctccataatagcgatctccgctggagattccaccacccaagttagtcaagaggtgccagagaattgccaggaatggatcggcggaaagatggctcagaatggtctggaccattatgtgtataaagtgggcattgctttcaacaccgagatttttggaacattccgccagactatcgtgtttgatttcggtctggagcctgtcctcatgcagagagtgatgatcgatgcagccagtacagaggacctggagtacttgatgcatgccaagcagcagttagtgacaaccgcgaagaggtgggatagctcttccaagactatcatcgacttcgagcctaatgaaacaactgatctcgagaagagtctgctaatccgttaccagattccactttccgctgaccagctcttcacgcagtcagtgcttgacaagagtttgactaagtctaactatcaaagcaggctccacgatttattatacatcgaggaaattgcacagtataaggaaatttctaagttcaatctgaaagtgcagctccagatactcgcctcattcatgcttacaggcgtgtctggaggagccaaatatgctcagaacggacaattgttcgggaggtttaagctgacagaaaccttatccgaggacaccctggctgggagactcgtgatgactaaggtcaatgctgtttatttgctccctgtgccaaaacagaagctcgtgcaaacccaggggacaaaagagaaggtgtacgaggccacaatcgaagaaaaaacgaaagagtacatattcctgcgattgagcagggagtgctgtgaagagctgaaccttcgacctgactgcgacacccaagtagaattgcaatttcagctgaacaggttgcccctgtgcgagatgcactacgcgctggacagaattaaggataacggcgttctatttcccgacataagcatgacaccaaccatcccctggagccctaaccggcagtgggatgaacagcttgacccccgactgaatgctaaacaaaaggaagctgttcttgccattaccacgccgctcgccattcagttgcctcccgtgctgatcatcgggccttacggcacaggcaagacctttacgcttgcacaagccgtgaagcacatcctccagcagcaggagacaaggatactaatctgcactcactcaaattctgccgctgacctgtatataaaggattacctgcacccctatgtcgaggccggaaacccacaggccagaccactgagagtgtattttagaaatcgttgggttaagaccgtgcaccccgtggtccatcaatactgtttgatttctagcgctcatagcacgtttcagatgccgcagaaagaggatattctgaagcatcgggtggttgttgtcactctgaacacaagtcaatatctgtgtcaactggatcttgaacctgggtttttcacacatatcctgctggatgaggccgctcaggctatggaatgcgaaaccattatgcctctggcattggcaacacagaacactaggatcgtgcttgctggtgatcatatgcagttaagcccattcgtgtactccgaatttgccagggagcgcaacctgcatgtatctctgcttgaccgtttatacgagcattaccctgctgagtttccttgtcgcattctgttatgcgagaactatcggtcccacgaggcaattatcaattacacaagcgagctcttctacgagggtaaacttatggcttctggcaagcagcctgcacacaaggacttctaccccctgacattctttaccgcccgtggggaagatgttcaggagaaaaacagcaccgctttctacaataatgcagaagtctttgaagtggttgaaagagtcgaggaattgcggcgaaagtggcctgtggcttggggaaagctggacgatggcagcattggggtcgtgacaccatacgccgaccaggtatttcgcattagagccgagctgcgtaagaagaggctctccgacgtgaacgttgagcgggtgctgaatgtgcagggtaagcagttcagagtgctgtttctttccacagtccgtacgcgccatacgtgtaagcacaagcaaaccccaatcaaaaagaaagagcagttgctggaggacagcaccgaggatctggactatggcttcctaagcaactacaaacttctgaacactgccatcactagagcccaaagtctcgtagcagttgttggcgatcctatcgccctgtgcagtatcgggcgatgcagaaagttctgggaaagattcattgcactgtgccatgaaaatagtagtctgcacggtatcacatttgagcagattaaggcccagttggaggccctggaacttaagaaaacctacgtcctcaatcctctggccccagaattcatccccagggcgctgcgactgcagcactctggctccaccaacaagcagcagcagtcacccccaaagggcaaatcactgcaccacacccagaatgatcacttccagaacgacggcattgtccagccaaatcctagtgtcttaatcggcaatcccatccgggcttacacacctccaccacctctgggaccccatcctaacctcggcaaatccccatcacccgtgcaaaggatagatccccatacaggaactagcatcctgtacgtgcctgccgtatacggaggcaatgttgtgatgtctgtgcccctccctgtaccctggacggggtatcagggcagattcgcagttgacccaagaatcatcacccatcaagccgcaatggcatacaatatgaacttgctgcagacgcacggacgcggatcccccatcccctatggcctgggacatcacccacctgtgacgattggccagccacagaatcagcatcaagaaaaggatcagcacgaacagaacagaaatggaaagtcagatacaaataactctggtcccgagattaataaaatacggacaccagagaagaaacctacagaacccaagcaggtggacctggagagtaatcctcagaatcgcagccctgagtccagaccaagcgtggtgtaccccagcacgaagttccctcgcaaagacaatctgaatcccagacacatcaacctacctctccccgcaccacatgcccaatacgcaatccccaatcgacacttccatcctctgccccagcttccgagaccacccttcccaattccacagcagcataccctcctgaaccagcaacagaacaatctaccagaacaacctaaccagatccctccacagcctaatcaagtggtccagcagcagtctcaattaaatcagcaacctcaacagccgcctccccagctgtcccccgcatatcaggcaggacccaacaacgccttctttaactccgcggtcgcccacaggccccagagcccaccggcagaggcagtcattcctgaacagcagccaccaccaatgctacaggaaggacacagcccgctcagggccatagcgcaacctggcccaatcttacctagccatcttaatagctttatcgatgaaaatccctctggtctacccataggggaggctctagaccggattcacggcagcgtagctcttgagaccctcagacagcagcaggcacggtttcaacagtggtcagagcatcacgcctttctatcccaaggctcggccccatatccccaccaccatcatcctcacctgcagcatcttcctcagcctccactcggtttgcatcagccccctgtccgcgctgactggaagcttacttcgagcgcggaggatgaagttgaaaccacttactctcgtttccaggacctgattcgtgagctcagtcaccgcgaccagtcggaaacaagagaactcgccgaaatgccccctcctcagagtcgtcttctccaataccggcaggttcaatcaaggagtcctcccgcagttccctcaccccctagttcaacagatcatagttcccacttttcaaacttcaacgataacagcagggatatcgaggtggcctctaaccctgcttttccccagaggctccctccacagatatttaacagtccattctccctgccctccgaacatctcgcccctcctcccctgaaatatctcgcacccgacggggcttggacctttgccaacctgcaacagaaccacttaatgggacccggatttccttacggacttccaccccttccccatcggcctccacagaacccctttgtgcagattcagaaccatcagcatgccatcgggcaggagccctttcacccgctgtcctcccggaccgtcagttcctcctccttacccagtctggaagagtacgagccacgcggtcccggacggccactgtaccagcgccgaatttccagctcatcagtgcagccttgttccgaggaggtttcaactcctcaggattctctggcgcaatgcaaagaactgcaggaccatagcaatcaaagttcgttcaacttctctagtcctgagtcttgggttaatactaccagctctacgccctaccagaatattccctgcaacgggtcatctagaacagcacagcctcgggagctcatcgcgccacccaagaccgtgaaacctcccgaggaccaactcaaatcagagaacctggaggtgtccagcagcttcaattactctgtgctgcaacacctcggccaatttccacccctcatgccaaacaagcagattgccgagtcggcgaactcatcatctccccagagcagcgcaggaggaaagcccgcaatgtcttatgcctccgcgctcagagcgccacccaagcctcgacctcccccagaacaagcgaagaagtccagcgacccactgagccttttccaagagttgtctctgggctcgtcttctggctcgaacggcttctactcttacttcaagta

SEQ ID NO: 225850 - DNA, 1365 bp, synthetic construct
  misc_feature 1..1365: note = Description of Artificial Sequence: Synthetic coding sequence
  source 1..1365: mol_type = other DNA
atggaggacaggcgggctgagaaaagttgtgagcaggcctgcgaaagccttaaacgccaggattacgagatggctcttaagcattgcaccgaagccctgctgagcctcggtcaatatagtatggccgatttcacaggcccttgccccctggagatcgagagaataaaaatcgagtccctcctgtatcgtatcgcgagcttcctgcagctgaaaaattatgtgcaggccgacgaggactgtcgccatgtactgggggagggattggccaaaggggaggatgcgtttagagcggtgctttgctgcatgcagctaaaggggaagttgcagcccgtgtctacgatcctggcaaaatcgcttacgggcgagagcctgaatggcatggtcaccaaggacttgacacggctgaagactttgctgtctgagacggaaactgcaacatcaaatgctctgagcggataccacgtggaagatctggacgagggaagttgcaatggttggcacttcaggccccctcctaggggaatcacctctagcgaggagtacaccctctgcaagcgcttcttggagcaggggatttgtcgctatggggctcaatgcactagcgcgcattctcaggaagagctggccgagtggcagaaaagatatgcatctcggttgatcaagctgaagcagcagaacgaaaacaaacaactcagcggcagctatatggagacgctcattgagaagtggatgaattctctgtcaccagaaaaagttctgtctgagtgcattgaaggcgtgaaagttgaacacaatccggatctttccgtcaccgtctctacaaagaagagtcaccagacatggaccttcgccctgacatgtaagcccgctcggatgttgtatagagttgcgctgttgtacgatgctcacagacctcatttctccatcatagctatctcagcgggtgactccaccacgcaggtctctcaggaagtgcctgaaaattgccaggagtggattggcggtaagatggcccaaaacggtttggaccactatgtctacaaagtaggcatagcattcaacaccgagatcttcggcacctttcggcagactatcgttttcgatttcggcctggagcccgtgctgatgcaacgagtgatgatagacgcggctagtacagaagacctcgaatacctaatgcacgccaagcagcagcttgtgaccactgcgaagagatgggattcaagcagtaagactattatcgatttcgagccaaatgagacaaccgatctagagaagtctctcctcatccggtatcagatcccactctcggaaaagaagaaaaagaagaagaagaaaaagaagaagaagaaaaagaaaaagtag

SEQ ID NO: 225851 - DNA, 294 bp, synthetic construct
  misc_feature 1..294: note = Description of Artificial Sequence: Synthetic coding sequence
  source 1..294: mol_type = other DNA
atgccagcagaaagaccagctggcagtggcggatcagaagccccagcaatggtggaacagttggacaccgccgtcatcaccccggcaatgctagaggaagaagaacagctcgaagcagctggtctggagcgtgagagaaaaatgctcgaaaaggccagaatgtcatgggatagagaaagtaccgagattaggtacaggagattacagcatcttctggaaaagtcgaacatttactccaagttccttctgacaaaaatggaacagcagcagcttgaaacagtaatgaaaatttag

SEQ ID NO: 225852 - DNA, 2517 bp, synthetic construct
  misc_feature 1..2517: note = Description of Artificial Sequence: Synthetic coding sequence
  source 1..2517: mol_type = other DNA
atgcctgccgagcgtccagctgggtctggcggaagcgaggcccctgcgatggtcgagcagctggataccgccgtcatcacacctgctatgttggaagaagaggaacaattggaggcagctgggctcgagagagaacgcaaaatgctggagaaggcacgcatgagctgggatagagagagcacagagattagatacagacggctccagcatcttctggaaaaatccaatatttactccaagtttttattgaccaagatggagcagcagcagctggaggagcagaagaagaaggaaaagctcgagcgaaagaaagagagcctgaaggtgaagaagggaaagaacagtattgatgctagcgaagaaaaacctgtcatgcgcaaaaaacggggacgagaggacgagtcttacaacatcagcgaagtgatgagcaaggaagagatcctgagcgtcgccaagaaaaataaaaaggagaacgaggacgagaattcgtctagtaccaatttgtgcgttgaggaccttcagaaaaataaggactccaattccatcattaaggacagactatccgagaccgtgagacagaataccaagttttttttcgacccggtgcgcaagtgtaacgggcagcccgtccctttccagcagcccaagcatttcacaggaggggtgatgcgctggtatcaagtggagggaatggaatggctgaggatgctctgggagaacggcattaacggtatcctcgccgacgagatgggattggggaagacggtgcagtgtattgccactattgctctcatgattcagagaggagtaccagggcctttcctggtgtgtggacccctgagtacgctgcctaactggatggccgagttcaagcggttcacacctgacatccctactatgctgtaccacggaacacaggaagaaaggcagaaattggtgcgaaacatttacaaacgcaaggggacgttgcagatccatcctgtggtcattacgagcttcgaaatcgcgatgagggatcggaacgctctgcagcactgttactggaagtatctaatcgtcgacgaaggacatagaatcaaaaacatgaagtgcagactgattagagagttgaaaagatttaatgccgataacaagctcctgctgacaggaaccccgttgcaaaacaatttgtccgaattgtggtcccttctcaatttcctgttacctgacgtttttgatgatctcaaaagcttcgaatcttggttcgatatcacatccctgagcgaaactgctgaagatattatcgcgaaggagcgtgagcaaaacgtgctgcacatgctccatcagattttgacaccctttttactaaggcgtctcaaatcagacgttgcattggaagttcccccaaaacgcgaagtggtggtctacgcacccctcagcaagaaacaggagattttttacaccgccatcgtcaataggactattgccaatatgtttgggtctagtgaaaaagaaactatcgagctgtcaccaactggacgcccaaagagacgaacgcggaaaagtatcaattactcaaaaattgacgacttccctaatgaactggagaaactcatcagccagattcagccagaagtggatcgcgagagagcagttgtagaggtcaacatccctgtggaaagcgaagttaatctgaaattgcagaacattatgatgttgctccgcaaatgctgtaaccacccatacctgatcgaatatcccatagatcctgtcacacaggaattcaagattgacgaggagctcgtgacgaacagcggaaagtttctgattcttgacagaatgctgccagagctcaagaaacgcggacacaaagttctcctcttctcacaaatgactagtatgttagacatattaatggactactgccatctccgcgattttaattttagtcgtctagatggcagcatgagctattcagaaagagaaaagaatatgcactccttcaacaccgaccccgaggtgttcatattcttggttagcacccgcgcaggtggattaggcatcaatctcacggccgctgatacggtcatcatctacgactcagactggaatcctcagtccgatctccaggctcaggatcggtgccataggatcggtcagaccaagcccgtcgtcgtgtaccggttagtgaccgctaacactattgaccaaaagattgtggagcgcgctgccgcaaaacgtaagctcgagaagctaatcatccacaaaaaccactttaagggaggacaatctggcctgaacttgtcgaagaattttctggatccaaaggaacttatggagctactgaagtcccgagactatgaacgcgagataaaaggaagcagagaaaaggtgatctccgacaaagacctcgagctcctcttagaccggtccgaccttattgaccaaatgaatgcttccggaccaatcaaggaaaagatggggattttcaagattctagagaactccgaggactcctctcctgaatgccttttttag

SEQ ID NO: 225853 - DNA, 2655 bp, synthetic construct
  misc_feature 1..2655: note = Description of Artificial Sequence: Synthetic coding sequence
  source 1..2655: mol_type = other DNA
atgccggctgaaaggccagccggatccggcggtagcgaggctccagccatggtggagcaattagatactgctgttatcacacctgcaatgcttgaagaggaagaacagctcgaggccgctggtttggagcgcgagcggaaaatgttggaaaaggctcggatgagttgggacagggagtctaccgaaatccgatacaggcggctgcagcacctgttggaaaaatcaaatatttacagtaagttcctactgaccaagatggagcagcagcagctggaggaacagaaaaaaaaggagaaacttgagcgcaagaaggaaagcctgaaggtcaagaaagggaagaattccatcgatgcctcggaagagaagcctgtaatgcgcaagaagcggggacgggaggacgagagttacaacatcagtgaagtgatgtctaaggaggagatcctctcagtcgctaagaaaaataaaaaagagaacgaggatgagaactccagctctaccaatctgtgtgtcgaggatctccaaaaaaacaaagatagtaatagcattattaaagaccgcctgtccgaaacggtaaggcagaacactaagtttttcttcgaccctgtgcgaaagtgtaacggtcagcctgtgccgttccagcagccaaaacactttaccggaggggtgatgaggtggtaccaagtcgagggaatggagtggctgagaatgctgtgggagaacgggataaatggaatcctggctgacgagatgggactcggaaagaccgtgcagtgcatcgctacgatcgcacttatgatacaacggggtgtgccagggccttttctcgtttgtggaccactgagcaccttaccaaattggatggccgagtttaagaggttcacacctgacataccgaccatgctgtatcatggcacacaagaggagcgacagaagctcgtcagaaacatttacaagagaaaaggcaccctgcaaatacatcctgtagtcattacgagctttgagatagcaatgagagacaggaacgcattgcagcattgttactggaaataccttattgtggacgaaggacaccgcattaaaaacatgaaatgtaggctcattagggagctgaaacgttttaatgcggataacaagctcctcctgacagggaccccactccagaacaatttgtctgagctgtggagcctgctcaatttcctgctgcctgatgtctttgatgatctgaagtcctttgagtcctggttcgacatcacatctctgagcgaaactgccgaagacattattgccaaggaaagagaacagaatgtgctgcatatgctccatcaggagcgaatccctcggatgtacgtgtccgagttcactgatgaaggattctttgaggggaagttaccatcccggaaagatctgtatgatattcgtccttatgaaaatacatatctcctgaagctccacaccaacttcgagatcctcactccctttctgctgaggcgactgaaaagcgacgtcgctctagaggtcccccctaaacgagaggtcgtcgtttatgccccactctccaagaagcaggagattttttatactgctatcgtgaacagaaccatcgccaatatgttcggaagttcagaaaaggagaccattgagctgtcaccaactggccgacctaagcgtcgcacgagaaagtccattaactacagcaagattgatgattttcccaatgagctggagaagctgatatcgcagatccagcccgaggtggaccgagagagggccgtggtggaagtaaacatacccgtggagtctgaggttaatctgaagctgcagaatattatgatgctcctgagaaagtgctgtaatcacccgtatctaatcgagtatcccatcgaccccgtcacccaggaattcaagatcgatgaggagctcgtgacaaactctggtaagttcctcatcctggatcgaatgctccctgaactgaagaagcggggacacaaggtcttgctcttctcacagatgacatcaatgctggatatactgatggactactgccatctgcgcgattttaacttttcaaggctggacggctcgatgtcctactccgagagagagaagaacatgcacagctttaacacagatcctgaagtgttcatctttctggtgtcgacacgagccggagggctgggcatcaacctcaccgcagccgacacagttattatttacgattctgattggaacccacaaagcgacttacaggctcaagaccgctgtcacagaataggccagacgaagcccgtggttgtttatcgcctcgtgactgcaaatacaatagatcagaaaatagttgagcgcgctgctgctaaaaggaaactcgaaaagctgataattcataaaaatcactttaaaggtgggcagtccggcctcaacctgagcaagaattttctggaccctaaggaacttatggaactgttgaagtctcgagattacgagcgtgagatcaagggctcgcgggaaaaagtcataagtgacaaggatctcgagctgctgctggaccgaagtgacctgattgaccagatgaatgccagcggccctattaaggaaaaaatgggcatttttaaaatcctagagaactcagaggattctagccctgaatgcctcttctag

SEQ ID NO: 225854 - DNA, 390 bp, synthetic construct
  misc_feature 1..390: note = Description of Artificial Sequence: Synthetic coding sequence
  source 1..390: mol_type = other DNA
atgcccgctgagagaccagccggaagcgggggtagcgaggcgccagctatggtggaacagctggataccgcagtgatcacccccgctatgctcgaagaggaggagcagttagaagccgcaggcctcgagagggaacgcaaaatgttggaaaaggcccgtatgtcctgggatcgggaatccacggaaatcagataccgcaggcttcagcacttgctggagaagtccaatatttatagcaagtttctgctgactaagatggagcagcaacagctcgaagagcagaagaaaaaggaaaaactcgaacggaagaaagaaagcctaaaagtaaagaagggtaagaactctatcgacgcttcagaagagaaacctggaaatttcgtctgtggatag

SEQ ID NO: 225855 - DNA, 948 bp, synthetic construct
  misc_feature 1..948: note = Description of Artificial Sequence: Synthetic coding sequence
  source 1..948: mol_type = other DNA
atgcccgctgagcgccctgctggcagcggtgggagtgaggcccctgctatggtggagcaactagacactgccgtcattacaccagcaatgctggaggaggaggaacagctggaagcagcaggcttagagagggagcgtaaaatgctggaaaaagccaggatgagttgggacagggaatccacagagatccgatataggcggctgcagcatctgctcgagaagagcaatatttacagtaaattcctcctgacaaaaatggagcaacaacagctcgaggaacagaaaaagaaggaaaagctagagcgtaagaaagaatccctgaaagtgaagaagggcaagaacagcatagatgcaagcgaagaaaaacccgtgatgaggaagaagcggggtcgcgaggacgagagttataacatctcggaggtcatgtcaaaggaagagatcttgagtgtggccaaaaaaaataagaaagaaaacgaagatgaaaacagctcgtcaactaacctctgtgtggaagacctccagaagaacaaggactcgaacagcattatcaaagataggctgtcagaaacagtgagacagaacaccaagttcttctttgatcctgtgaggaagtgtaacggtcagcctgtgccattccagcaacctaagcacttcacagggggagtcatgcgatggtatcaggtagaaggtatggagtggctgcgaatgctgtgggaaaatgggatcaacgggatcctggcagacgagatgggcctgggtaagacagtgcagtgtatcgcgactattgccctaatgatacaacgaggggttccagggccattcttagtgtgcggcccattgtcaacactccctaattggatggcagagttcaaacgattcacaccggacattccaacaatgctgtaccacggcacacaggaggagcgccaaaagctcatctacctgtag

SEQ ID NO: 225856 - DNA, 2223 bp, synthetic construct
  misc_feature 1..2223: note = Description of Artificial Sequence: Synthetic coding sequence
  source 1..2223: mol_type = other DNA
atgccagccgagaggccagccggttccggcggatcagaggcccctgccatggtggaacagctagataccgctgtcataacacccgctatgctggaggaggaggagcagcttgaagcagcaggcctcgaaagagagcgcaaaatgctagagaaggccagaatgtcgtgggaccgagagtccacggagatccgatacaggcgtcttcaacatctgctggagaaatccaacatatattccaaatttctgctgacgaagatggagcagcagcaactggaggagcagaaaaaaaaggaaaaattggagaggaaaaaggagtctctaaaagtcaaaaaaggcaagaattctattgacgcttccgaggaaaagcccgtcatgcggaagaaaaggggaagagaagacgagtcatataacatctccgaggtgatgtcgaaagaagagatcttatcagtcgcaaaaaaaaataagaaggaaaacgaggacgagaacagcagtagtactaacttgtgcgtggaggatctccagaagaataaggacagcaatagcataattaaggaccgcctctcagagaccgtacggcagaatacaaagtttttctttgatcctgtccgcaagtgcaatgggcaacctgtgcctttccagcagccaaagcattttacgggcggagtgatgcgatggtatcaagtggaaggaatggaatggctgcgcatgctgtgggagaacggaattaacggcatcctcgccgatgaaatgggcttagggaagacagtacagtgtattgccacaatcgctctgatgattcagagaggagtaccaggccctttcctggtatgtgggccactgagtacactcccaaattggatggccgaatttaaacggttcacccccgacatcccaactatgctgtatcacggaacccaggaggagcgtcagaaactcgtgaggaacatttacaaacggaaaggcaccctgcagatccaccctgtggtcataacttctttcgaaatcgcaatgcgggatcgtaacgcacttcagattctgacaccatttctgctaaggcgactgaagtcagatgtggcacttgaagttccacctaagcgggaagtcgtggtctacgctcctcttagtaagaagcaggagatcttctacactgcaatagtgaacaggaccattgctaatatgttcggaagcagcgaaaaggaaacaattgagctatccccaactgggaggcctaagcgcaggaccaggaagtcgatcaattatagcaaaatagatgattttcctaacgaattggagaaattgatctcccagatccagccagaggtggacagggaaagggctgtggtggaggtgaatattccggtggagtccgaggtcaacctgaagctacagaatattatgatgctattgcgtaaatgctgtaatcatccgtatctgatcgagtacccaatcgacccagtgacccaggaatttaagattgatgaggaactcgtcaccaatagtggtaagtttctaatccttgaccgaatgttgccagagcttaagaagaggggccataaggtccttctgttcagtcagatgactagcatgcttgacattctaatggattactgccatctgcgcgatttcaatttctcgagactcgatggaagcatgtcctacagtgagagagaaaaaaatatgcatagctttaacactgaccctgaggttttcatattcctcgtgtccacccgcgcaggtggtctcggtatcaacctgacagccgcagacacagtgatcatctatgactccgattggaatccgcagtccgatctacaggcccaggacaggtgtcaccgcatcggccagactaagccagttgtcgtttaccggctggttacagcgaacaccattgatcagaagattgtagaacgagctgccgcaaaaagaaagctggagaagctcatcatccacaaaaatcacttcaagggcggacaaagtggactgaatctctctaagaatttcctcgacccaaaggagctgatggaactgctaaaatcccgagattatgagcgagaaatcaaaggcagcagggaaaaagtgatttcggataaagacctggaattgcttttagatcgcagcgacctaatcgatcagatgaacgccagcggccctattaaggagaaaatgggaatatttaagatcctggaaaatagtgaggattcctcacctgagtgtttattttag

SEQ ID NO: 225857 - DNA, 579 bp, synthetic construct
  misc_feature 1..579: note = Description of Artificial Sequence: Synthetic coding sequence
  source 1..579: mol_type = other DNA
atggtggaacaactagatacggccgtcatcacacctgccatgttagaggaggaggagcaattagaggcagcgggtttggagagggaacgaaaaatgctggagaaggcaaggatgagctgggatcgagaatctacagagatccgttaccgcagacttcagcacctattagagaagagtaacatttactccaagtttctgttaactaagatggagcagcagcagctagaggaacagaaaaagaaggagaagctggaacggaaaaaggagtctctgaaggtcaaaaagggtaaaaatagtatcgacgcgagcgaggagaaacccgtgatgcgaaaaaaaagaggtagagaagacgaaagttacaatatttccgaggtgatgtccaaagaagagattctctctgtagccaagaagaacaaaaaggaaaacgaggatgaaaactcatcctccacaaacctatgcgttgaagatttacaaaagaacaaggattcgaactcgatcattaaagatcgcttatcggaaactgtcagacagaacacaaagtttttcttcgaccctgtacggaagtgcaatggccaatag

SEQ ID NO: 225858 - DNA, 1461 bp, synthetic construct
  misc_feature 1..1461: note = Description of Artificial Sequence: Synthetic coding sequence
  source 1..1461: mol_type = other DNA
atgtggaaatctgtcgttgggcatgacgtgtcagtctctgttgaaactcagggtgacgactgggacacagatccggacttcgttaacgatatttcagaaaaggagcaaaggtggggggctaagaccatcgaagggagtgggcgaaccgagcacattaacatccaccagttgaggaacaaggtgtccgaagagcatgacgtgctgcggaagaaggaaatggagagcgggcctaaggcttcgcatggatatggaggtaggttcggcgtggaaagagataggatggacaagtccgctgtgggccacgagtatgttgccgaggtcgagaagcatagcagtcagacagatgcagcaaaaggctttgggggtaagtacggcgttgagagagatcgcgctgacaaatctgcagtaggattcgattataaaggagaggtggaaaagcacacaagccagaaagactacagtagaggattcgggggaagatacggagtcgagaaagacaagtgggataaagcggcacttggttatgattataaaggcgagacggaaaaacacgaatctcagagagactacgccaaagggttcggcggacagtacggcattcagaaagaccgagtggataaatccgcggttgggtttaatgaaatggaggctccaactaccgcatacaagaagacgactcccatagaagcagcttcctctggaacaagaggtctgaaagccaagtttgaaagtatggcagaggagaagaggaaacgggaggaggaggagaaggcacaacaggtggccaggcggcagcaggaacgtaaagcagttaccaagcgtagtccagaagctcctcagcccgtgatcgcaatggaggagccagccgtgccggctccactgcctaagaagattagctctgaagcctggccccctgtcggcaccccccctagctccgagtccgagccagtgcgcacatcgcgggaacaccccgtgccactgctgcctatacggcaaaccctgcctgaagataacgaggaacctcctgccctgcctccgagaacgctcgagggtttacaggtggaggaggaacctgtatacgaagctgaacctgaacccgagccagagccggagcctgaacctgagaacgactatgaggacgtggaagagatggataggcacgaacaggaggacgaacctgaaggcgattacgaagaggttctggaaccggaagactcctcattctcctcagcattggctggatccagtggctgtcccgctggagccggtgccggtgccgttgctctggggataagcgctgtggccgtgtacgattatcagggagagggatccgatgagctgtcttttgacccagacgacgtgattactgacattgagatggtggatgagggatggtggagaggaaggtgccatggacattttggcctgttcccagccaactatgtgaagctgctagagtag

SEQ ID NO: 225859 - DNA, 600 bp, synthetic construct
  misc_feature 1..600: note = Description of Artificial Sequence: Synthetic coding sequence
  source 1..600: mol_type = other DNA
atgcctaactataagctgacctactttaacatgagaggaagagccgagatcatccggtacatttttgcctatcttgacatccaatacgaagatcaccgcattgaacaggccgattggcctgaaataaagtccactctgcctttcgggaagattcccattttagaggtggacggactgacactgcaccagtctttggccatagcacgctaccttactaaaaacactgacttggctgggaacactgaaatggagcaatgccatgtcgatgccattgtggacaccctcgatgattttatgagctgcttcccttgggctgagaaaaagcaggatgtgaaagagcaaatgttcaatgaactcctcacttacaatgcccctcaccttatgcaggatctggatacataccttgggggtagagagtggcttattgggaattcagttacatgggcagacttttactgggagatctgtagcacaaccctgctcgtattcaaaccagacttgctggataatcatccgaggttagtcactcttaggaagaaggtccaagctattcctgctgtggcgaactggatcaagcgacgtccccaaacaaaactctag

SEQ ID NO: 225860 - DNA, 813 bp, synthetic construct
  misc_feature 1..813: note = Description of Artificial Sequence: Synthetic coding sequence
  source 1..813: mol_type = other DNA
atgcagtacccccacccagggccagcagctggagcagtgggggttcccctctacgcaccaacccctcttctgcaaccagcccaccccacgcccttttacatagaagacatcctgggaaggggtcccgctgctcccacacccgctccaactctcccatcccccaatagctcattcacttctcttgtttcaccatacaggacccccgtgtatgagcctacccctattcaccccgctttcagccatcacagtgcggctgcattagccgctgcctatggtcctggcggatttgggggtcccctttacccttttcctcggacagtgaatgactacacgcacgccctgctgagacatgatcccctcggaaagccattgctgtggtctccatttctccagaggcctcttcataagcggaagggcggtcaggttagattctccaatgatcagacaattgagctagagaaaaaatttgagactcagaaatacctgtcccccccagagagaaagcgactggctaaaatgctccaactatcagagcgacaggtgaagacttggtttcagaatcgacgcgctaagtggcgccgactcaagcaggagaacccccagtccaataaaaaggaggaattagagagcctggattcttcttgtgaccaacgacaagatctgcctagcgaacagaacaagggcgcttccctggactccagccaatgcagtccaagccctgcaagccaggaggatctggagtccgaaatcagcgaagatagtgatcaggaggtggacatcgaaggggacaagtcgtactttaacgctgggtag

SEQ ID NO: 225861 - DNA, 570 bp, synthetic construct
  misc_feature 1..570: note = Description of Artificial Sequence: Synthetic coding sequence
  source 1..570: mol_type = other DNA
atgctggggatgatcaagaacagtctcttcggatccgtggagacgtggccatggcaggtcctgtctaagggcgataaagaggaggttgcctatgaagaacgagcatgcgagggcggaaagttcgcaacagtggaagtcacagataaaccggtggacgaagctcttcgggaggcaatgccgaaagtggccaagtacgctggcggtactaatgataaaggaattgggatgggaatgaccgtaccaatatctttcgccgtgtttcctaatgaggacggtagtttgcagaaaaaacttaaggtctggtttagaatacctaaccagtttcaatccgatccgccagccccatcggataagtccgttaaaatcgaggagcgggaaggcattaccgtgtacagcatgcagtttgggggatacgcaaaagaagcagactatgtcgcacaagctacacgtctcagagcggcactcgaagggacagccacctaccgcggagatatctacttttgtacaggctacgatccgcctatgaagccttacggccgaaggaatgagatctggctgctgaaaacatag

SEQ ID NO: 225862 - DNA, 4059 bp, synthetic construct
  misc_feature 1..4059: note = Description of Artificial Sequence: Synthetic coding sequence
  source 1..4059: mol_type = other DNA
atgagcaaagtgactgccccaggaagtggtcctccagcggcagcatctggtaaggagaagagaagcttcagtaaaaggttattccggagcgggagagcagggggtggaggcgcaggcggacctggcgctagcggacctgctgccccatcttccccgtcttcgccgagttcggctagatccgtggggtctttcatgtccagggtgcttaagaccttgagcactctatctcacctgagtagtgaaggagccgctcctgatcgagggggattgaggagttgtttcccacccggtccggcagccgctcccactccacctccatgtccgccaccaccagcatccccagcccctcccgcatgtgcagctgaacccgtgcctggagtagctggtttacggaaccacggcaacacgtgtttcatgaatgcaacactgcagtgtctgtcaaacaccgaactgttcgctgagtacctcgccctaggtcaataccgtgcgggtcgaccggagccaagtcctgaccccgagcagcccgctggcaggggagcacaaggacagggcgaagtgacagagcagctagcccaccttgttcgtgccctgtggacccttgagtacacaccgcagcacagtcgcgattttaagactatcgtttctaagaatgccctgcagtaccgcggtaattcacaacacgatgcacaggagttcctgctctggttgttggatcgcgtgcacgaggacctgaaccattccgtcaaacagtccgggcaaccacccctgaaacctccctcagaaacagatatgatgcccgaaggaccgagcttccctgtctgtagcactttcgttcaggagcttttccaagcacaataccgatctagcctgacttgtccccactgtcaaaaacagtccaatacctttgacccttttctatgtataagtttacctatcccgctgccacacacaagacccctgtatgtgactgttgtgtaccaggggaagtgtagccattgtatgcgaataggagtagccgtccccctatccgggaccgtggccaggctgagagaagctgtatctatggaaacaaagatcccgaccgaccaaatcgtcctgaccgagatgtactatgacggattccatcggagcttctgtgatacggatgatctggaaaccgtccacgagtctgactgtatctttgctttcgagacacccgagatctttcgtccagaggggatcctgagccagcgcggaatccatctgaacaacaaccttaaccatcttaagttcggattggattatcatcgcttgtccagcccaacccagacagccgcaaaacaaggcaaaatggattcgcccacttctagggctggctccgacaagatagtcctgctggtttgcaatcgggcatgcaccggccagcagggcaaaagatttgggctaccgtttgtgctgcatctggagaaaaccatcgcctgggatttattgcagaaggagattctggagaagatgaagtactttctccgccctacagtgtgcatccaagtgtgtcctttctccctgcgggtggtgtcagtggtgggcattacctacttacttccccaggaggagcaacccttatgtcaccctatcgtggaaagagcactgaaatcttgcggacctggtggcaccgcccacgtgaaattagtggtcgagtgggataaggaaacccgggattttctctttgtaaacaccgaggatgagtacattcccgatgccgagtccgtgcgacttcagagggagcgccatcatcaaccacagacatgtaccttgagtcaatgctttcagctttacactaaagaagagcggctggcacctgatgatgcttggagatgtccgcactgtaagcaattgcagcagggatctattactctctccctgtggacgctacctgacgttttgatcatccatctaaagaggtttaggcaagagggagaccggcgaatgaaactgcagaacatggtcaagtttccactcacaggcctggatatgacaccccatgtagtaaaaaggtcccagagtagctggagtcttccttcgcattggtcaccctggaggcgaccatacgggttgggacgggaccccgaggattatatctacgacctgtatgcagtgtgtaaccatcacggtactatgcagggcggacactacactgcttattgcaaaaactccgttgatgggttgtggtattgctttgatgacagcgatgtgcagcagctgagtgaagacgaggtgtgcacacaaaccgcgtacattctattttaccagaggagaacagccatcccaagttggtccgcaaactcttcagtggccggaagtacatcgtcttcactgtgtgagcattgggtcagccggttgcctggcagcaagccggctagcgttacctccgccgcttctagccggaggacgtcactcgcttcactcagtgaaagcgtagaaatgacaggggaaagaagtgaggatgatgggggattctccacacgcccttttgtgcggagtgtgcagcgtcaaagtctcagcagccgcagctccgtgacgtcgcccttggccgtcaatgagaactgcatgcggcctagctggtcacttagtgccaagttacagatgcgtagcaactcgccatctcgcttctccggcgattctcctatacactccagtgctagcacactggagaagataggcgaggctgccgacgataaagtgtctatctcttgcttcggttctcttcggaacctgagctcgagttaccaggaacctagcgatagccactctcgccgagagcataaggccgtaggcagggccccactggcggtcatggagggcgtttttaaagatgagagtgacacccgtcgcctcaattccagcgtagtggacacccagagtaagcacagtgctcagggcgatagactacccccacttagtgggccttttgataacaataaccagattgcttacgtcgatcagagcgattctgtggatagcagtcccgttaaggaggtaaaggccccatctcatcccggaagcctggctaaaaaacctgagagtaccaccaaaaggtcaccttcaagcaagggcacaagtgagccagagaagtctctgaggaagggcaggccggcattggcgagtcaagaatcgtccctctcctccacgagcccctcatccccgctgccggtgaaggtgagcttgaagccaagtcggtcccgcagcaaagcagactcttcgtccaggggttcagggagacactcaagtccagcacccgctcagcccaaaaaagaaagctcacccaagagccaggattccgtgagtagcccctcccctcaaaagcagaaatcagcctccgcgctcacatacactgccagctcaacctccgccaaaaaagctagtggtccagcaaccagaagtcctttccctcccggtaagtccaggactagtgatcactcactgtcgcgcgaaggcagtcgccagagcctgggaagtgaccgagccagtgctacctctacttctaagccgaactcacccagggtcagtcaggccagagcgggagaaggacggggtgccggtaagcacgtgcgcagcagctctatggctagtctgcgatccccctccacctcgattaagtctggactaaagcgcgattcaaagtcagaagataaagggctcagcttcttcaagagcgctctgagacagaaggaaaccagaaggagcacagaccttggcaaaacagccttgttaagtaagaaggctggcggatctagcgtgaaatcagtgtgtaaaaatacaggagacgacgaagctgagagaggacaccaacctccagcctctcagcagcccaacgccaacaccactggcaaagaacagctggtcactaaagatcccgcaagcgcgaagcatagcctccttagcgcaagaaagtcaaagagcagccaactggactccggagtcccatcaagtccagggggacgccagtcggctgagaaatcctctaaaaaattgtctagctcaatgcaaacttcagccaggccaagtcagaaaccacagtag

SEQ ID NO: 225863 - DNA, 951 bp, synthetic construct
  misc_feature 1..951: note = Description of Artificial Sequence: Synthetic coding sequence
  source 1..951: mol_type = other DNA
atgagtgccgaggtggaaacttcggagggcgtggatgaatccgaaaagaagaactccggcgcactggagaaagagaaccagatgaggatggcagacctgtccgagttgttaaaggaaggcacaaaggaggcccatgaccgcgctgaaaacacccagttcgttaaggacttcctaaaggggaacatcaaaaaggaactttttaagttggccacaactgctttgtactttacatactctgcactggaggaggaaatggagaggaacaaggaccatcctgcatttgcccctctgtacttcccaatggaactccacagaaaggaagctcttactaaagatatggagtatttcttcggagaaaactgggaggaacaggtccaatgtccaaaagcagcccagaagtatgttgaaagaatacattacattgggcaaaatgaaccagagctacttgtagcgcatgcttacacacgttacatgggggatctttctgggggtcaggtcctgaaaaaggtcgcccagcgggctctaaaactgccgagtacaggagaggggacccagttttatctgttcgagaacgtggataacgctcaacagtttaagcagttatacagggccaggatgaacgccctcgatctaaacatgaaaaccaaggaacgaatcgtcgaggaagctaataaggccttcgaatacaatatgcagattttcaatgaattagaccaggcaggcagtacccttgcgagagagactctcgaggacggctttccagtccacgatgggaaaggtgacatgcgaaaatgcccattctacgcagctgaacaggacaagggggctctcgaaggatcctcttgcccttttcgtacagctatggcagtgctacgcaagccttccttacagttcattctggctgccggagtagctcttgcagctgggcttttagcttggtactacatgtag

SEQ ID NO: 225864 - DNA, 951 bp, synthetic construct
  misc_feature 1..951: note = Description of Artificial Sequence: Synthetic coding sequence
  source 1..951: mol_type = other DNA
atgtcggccgaagtggaaacatccgagggcgttgacgaaagtgagaagaagaacagcggagccctggagaaagagaatcagatgcggatggcagacctgagcgagttactgaaagaaggcacaaaggaggcccatgatcgagccgaaaacactcagttcgttaaagattttctcaagggtaatatcaagaaggagctttttaagctggcgacaacggccctgtatttcacctactcggcgctggaagaagagatggaaagaaataaagaccaccccgcttttgccccattgtactttcctatggaacttcacagaaaagaagcactcactaaggatatggagtactttttcggcgagaattgggaggaacaggtccaatgccccaaggccgctcagaagtacgttgagcgtattcactacattggtcagaatgaaccagagctgctagtggcacacgcgtataccagatacatgggtgatctgtcaggaggacaggtgttgaaaaaagtggcacaaagagccttgaaactgccttccacaggggaaggcacacagttctacttatttgagaacgtggataacgctcaacagtttaagcaactgtacagggctaggatgaacgccctggaccttaatatgaaaaccaaggagaggattgttgaggaggccaataaagcctttgagtataatatgcaaattttcaatgaactggatcaggcaggaagcacactagccagagaaaccttggaagatgggtttccagtccatgatggcaagggcgatatgcgtaaatgccctttctatgccgcagagcaagataagggagcattggagggttccagctgcccgttcagaaccgctatggctgtacttcgcaagccaagcctgcaattcattttagccgcaggagtagccttggccgctggcttactggcctggtattatatgtag

SEQ ID NO: 225865 - DNA, 951 bp, synthetic construct
  misc_feature 1..951: note = Description of Artificial Sequence: Synthetic coding sequence
  source 1..951: mol_type = other DNA
atgtccgcagaggtagaaaccagcgaaggagtggatgaaagtgaaaagaaaaactctggtgcccttgagaaggagaatcaaatgagaatggcggacttgagcgaactacttaaagagggaactaaggaggcccacgaccgggcagagaacacacagttcgtgaaagatttcctgaaaggaaacatcaaaaaagagttatttaagttggccacaactgcactgtattttacttactcggccctagaggaggagatggagcgcaacaaagatcatcccgcattcgcaccgctctatttcccaatggagctgcacagaaaagaggccttgaccaaagacatggaatacttttttggagaaaactgggaggaacaggtgcagtgccctaaggcagcccagaaatacgtggagcggattcactatattggacagaatgagccggagttgttggtagcccacgcctatactcggtacatgggtgacctgtccggcggtcaggtgctgaaaaaagttgcgcagcgggctctgaaactgccatcaacaggtgagggcactcaattctatttattcgaaaatgtggataacgcccagcagttcaagcagctataccgcgctcgcatgaacgctctggatctaaatatgaaaacaaaagaacgtatagtcgaggaggcaaacaaggccttcgaatacaacatgcagatctttaacgagcttgatcaggcaggctccactttggcaagagaaacgctcgaagatggctttcctgtgcacgacgggaaaggtgacatgcggaaatgccctttttatgctgctgaacaggataagggcgcactggaagggagcagctgtccctttagaactgccatggccgtcctccgcaagcctagtctgcagtttattctcgcggcaggcgtcgcgttggcagctgggctgcttgcatggtactatatgtag

SEQ ID NO: 225866 - DNA, 951 bp, synthetic construct
  misc_feature 1..951: note = Description of Artificial Sequence: Synthetic coding sequence
  source 1..951: mol_type = other DNA
atgagcgccgaggtcgaaacctcagagggtgtggatgaatccgagaaaaaaaacagcggcgcactagagaaggagaaccagatgagaatggccgacctgagcgagctgctgaaggagggaaccaaggaggcacacgaccgagccgagaacacacagtttgtgaaagactttctaaaaggcaacattaagaaggagttgttcaaactggcgactacagcactgtacttcacttactctgcattggaggaagagatggagagaaataaagatcacccggcttttgccccactgtacttccctatggagcttcataggaaagaagccttaaccaaggacatggagtacttttttggtgagaattgggaggagcaggtgcagtgtccaaaggctgcccagaagtacgtagagcgaatacactatatcggccaaaatgagcccgaattgctggtggcgcatgcatatacccgatatatgggggacctgagcggcggtcaggtcttaaagaaagtggcccaaagagcgctaaagctcccatcaacaggcgaaggcactcagttttacttgtttgagaatgttgataatgctcaacagttcaaacagttgtatagagcccgtatgaacgcccttgatttaaacatgaagacaaaggagcgcatcgtggaagaggccaataaggctttcgagtacaacatgcaaatcttcaatgaactcgaccaggccggttccactctcgccagggagaccctcgaggacgggttccctgtccacgatgggaagggcgatatgaggaagtgccctttttatgctgccgagcaagataaaggtgcacttgagggcagctcctgtcccttcaggaccgcgatggccgtgctgagaaagccttctctacagtttattctggccgctggagtcgctcttgcggcaggactgttagcttggtactatatgtag

SEQ ID NO: 225867 - DNA, 951 bp, synthetic construct
  misc_feature 1..951: note = Description of Artificial Sequence: Synthetic coding sequence
  source 1..951: mol_type = other DNA
atgtccgcagaagtggaaacctctgagggcgtagacgagtctgaaaagaagaactcaggcgctctcgagaaagagaaccagatgcggatggccgacctgagcgagctactgaaggagggaaccaaggaagcccatgacagggcggagaacacacagtttgtgaaagactttctgaaaggtaacatcaagaaagagctattcaagctggcaaccacggccttatacttcacatacagcgctttggaggaggaaatggaaagaaacaaagaccacccagccttcgctcccctctatttcccaatggagttacatcgcaaggaagctctgactaaagatatggagtactttttcggcgaaaactgggaagagcaggtgcagtgtcctaaagcagcccaaaaatatgtagaaagaattcattacattggccaaaacgagccggagttacttgtggctcacgcctatacccgctacatgggcgacctgtccggaggacaggtcctgaagaaggttgctcagcgagcactcaagctccccagtaccggtgaggggacacaattctatttatttgagaatgtggacaacgctcagcagtttaagcagctgtacagagctcggatgaatgctttggaccttaatatgaagacaaaggagcgcatcgtcgaagaagccaacaaggctttcgaatataatatgcagatattcaacgagctggatcaagctggcagcacgctcgctcgagagactctggaggacgggtttccggtgcatgatggaaagggcgacatgaggaaatgtcccttttacgccgcagaacaggataagggcgctcttgagggtagctcgtgtcctttccgcaccgccatggccgtgctccgcaaacccagtctccagtttattttggccgcaggggtggcgctagccgctggcttgctcgcttggtactacatgtag

SEQ ID NO: 225868 - DNA, 16907 bp, synthetic construct
  misc_feature 1..16907: note = Description of Artificial Sequence: Synthetic coding sequence
  source 1..16907: mol_type = other DNA
atgatcagttgggaggtagtgcacaccgtgtttctgtttgccctcctgtactcttccttggcccaagatgcttcaccacaatcagaaatccgtgccgaagaaatccctgaaggagcctccacgttagcttttgtgtttgatgttacggggtccatgtatgatgaccttgtgcaagtcatcgaaggagcctcaaagattcttgaaacctctctgaagagacccaagagaccacttttcaactttgccctcgtgccttttcacgacccggaaattgggccagtgactataaccaccgatccaaaaaagttccagtatgagctccgggaactttacgttcagggcggtggagattgtcctgaaatgagcatcggcgctatcaagatcgccctcgagataagccttcccggtagtttcatttacgttttcactgatgcaagatcaaaagattacaggcttacacatgaggtccttcagctgatacagcagaagcagagtcaagtggtctttgtgctaacaggcgactgtgatgatagaacacacatcggctacaaagtctacgaggaaatcgcatccacaagtagtggccaggtgttccacttagacaaaaagcaggttaacgaagtattgaagtgggttgaggaggccgtacaagccagcaaagttcacctcctcagtacggaccacctggagcaagccgtgaacacttggcggattccatttgaccccagcctgaaggaagtcacagttagcctttcagggccttctccaatgatcgagatccgtaaccctctgggaaagctcattaaaaaaggttttgggcttcacgagctcctgaacatccataacagtgccaaggtggtcaacgtgaaggagcctgaggcgggaatgtggaccgtgaaaaccagctcatctggccgtcacagcgtgagaatcactggtctgtctaccattgatttccgcgcaggtttcagtcggaaacccacattggacttcaaaaagacggtatcaaggccggtacaaggcattccaacatacgtactgctgaacacaagcgggatttctacacccgctcggatcgaccttctggagctgctaagcatctcagggtctagcttaaagacaatccctgtgaaatactatccacatagaaaaccatacggaatctggaacataagtgacttcgtgcccccaaacgaagcgttttttctcaaggtcacgggttatgacaaggatgattatctgttccagagggtaagtagcgtatccttttccagtatcgtcccagacgctccaaaggttacaatgcctgagaagactccaggatattaccttcagcccggacagattccttgctccgtggactccctccttcctttcacattatccttcgtacggaacggcgtcacgctcggcgttgaccagtatctcaaagagtccgccagcgtgaatctcgacatcgcaaaggtgactctgtcggacgagggcttctacgagtgcatcgccgtatcctcagccggtacgggtagggctcagacattttttgacgttagcgagccccctcccgtaattcaagtccctaacaatgtgacggtaaccccaggggagagagccgtgctcacttgtcttatcatctcagctgtggactataatctcacttggcagcgtaatgaccgagatgttaggcttgccgagcctgccaggattcggaccctggccaacctgagcctggagctcaaaagcgtgaagttcaatgatgccggtgaataccactgtatggtttccagtgaaggcggttccagcgcagctagcgtgtttttgacggttcaagaaccgcctaaagtaaccgtgatgcccaaaaatcaatcctttacaggaggttccgaggtctccatcatgtgctctgcaaccgggtaccccaaacctaagattgcgtggaccgtaaatgacatgttcatcgtgggctctcatcgatacagaatgacgtcagacggtacgctgtttattaagaacgccgctccaaaggatgcagggatctacggctgtctcgcttcaaactcggccggaacagacaaacagaacagcacactacgatacatagaagctcccaagctcatggtggtccagtcagagctgctcgttgccctgggagacataactgtgatggaatgcaaaacttctggcatccccccaccacaagtaaaatggtttaagggcgacctggagttgagaccaagcacctttttgatcatcgaccctcttcttgggctgttaaagatccaggaaactcaggatctggatgcaggtgactacacgtgtgttgccataaatgaggccggtagggccacaggaaaaataacgcttgatgtgggctcacctcccgtctttattcaggaacccgcagatgtatcaatggaaattgggtctaacgtcacactgccctgctacgtgcaggggtaccccgaacccaccatcaaatggcgtagactcgataacatgcctatatttagtaggccattctccgtgtctagcatctctcagttaagaactggagcactgtttatcttgaatctatgggcttctgacaagggaacctatatttgcgaagctgagaatcagttcggaaaaatccagtctgaaaccactgtcacggtgacgggactggtcgctccacttatcggtatcagcccttccgtagcgaatgtgattgagggtcagcagctcacccttccatgcactctactcgctggaaacccaattcctgagcgacgatggattaagaatagtgccatgctgctgcagaatccctacatcacagtcagatcggacggaagtctgcatattgaacgggtgcaactgcaagatggaggcgaatatacctgtgtggcatctaacgtggctggaacaaataataaaactacctccgtggtggtgcatgtgctgcccacaatccagcacggacagcaaatcttgagcactatcgaggggatacccgtgacattgccctgcaaagcgtccgggaatccaaaaccaagtgtcatctggagcaagaaaggagagctcatttccacatcctctgcaaagttctcagctggtgcagatggctccctttacgttgtgtcgcctggcggagaagaatcaggggagtatgtctgtacagctaccaacacagcgggatacgctaagcgaaaagtccagttaaccgtttacgtgcggcctagggtgttcggcgatcagagaggtctgtcacaggacaagccggtagagatctccgtgctggccggtgaggaggtgactttgccttgcgaggtcaagagcctccctccacctatcattacttgggctaaagagacacagcttatctcccccttttccccccgtcatacattcctgccttccggctccatgaaaatcaccgaaacgaggacatctgactcagggatgtatctttgtgtcgcaaccaacatcgccggaaatgtcacccaggcagtgaagcttaacgtccacgttcctccaaagatacagcgtggcccaaaacacttgaaggtccaggtggggcaaagggtggacataccctgcaacgctcagggaactcctctccctgtcatcacgtggtcaaagggtggctcaacgatgctagtagacggtgaacatcatgtatctaatccagacggcaccctgtccatagaccaggctacgccgtctgatgctggcatttacacatgtgtggctactaatatcgcgggaactgacgagactgaaattacccttcatgtgcaggagcccccaaccgtagaggacctggaacctccgtataatacaacctttcaagaaagagtggcaaaccagcgcattgaattcccctgtcccgctaaaggtacccctaaacccaccataaaatggctgcacaatggcagggagctgaccggacgagagcctggaatctccattctcgaagatggtacactccttgtgatcgcctctgttacaccgtatgacaacggcgaatacatctgtgtcgccgtcaacgaggctgggacgacagaacggaagtataacctgaaggtgcacgtgccccctgtgattaaggacaaagagcaggtgaccaatgtcagtgtcctgctaaatcaactgacaaacctgttctgtgaagtagaaggaaccccttccccgatcatcatgtggtataaggacaatgtgcaggttactgaaagctcaactatccagacagttaacaatggaaaaattctgaaactatttcgcgcaacgccagaggacgcgggtagatactcctgtaaggccattaacatagccggtacatcacagaagtattttaacattgatgtactcgtcccgccaactataatcgggaccaactttcctaacgaggttagcgtggtccttaaccgggacgtggcgctggaatgtcaggtgaagggcacaccatttccagacatacattggttcaaagatggtaaacccctttttctgggagatccgaacgttgaattgttggaccgtggacaggtgctgcacctgaagaacgctaggcggaacgataagggcaggtatcagtgcactgtgtccaacgccgctgggaaacaggctaaggacattaagctgaccatctacattccccctagcatcaagggaggaaacgtaaccacagacatctcagtccttatcaattctcttattaagctcgagtgtgaaacgagggggctgcccatgcccgctataacttggtacaaggatggacagcctataatgagcagtagccaagccctttatatcgacaagggccagtatctgcatatccccagggcccaagtctcggattcagccacatacacctgtcacgtggccaatgttgcagggacagcagaaaagagttttcatgtcgacgtatatgtgcctcctatgattgaggggaatctggctactcccctgaataaacaggtggtgatagcacactccctaacactcgaatgtaaggccgctggcaacccttctccaatcctcacctggcttaaagacggcgtccccgtgaaggcaaatgacaacatcaggatcgaagcagggggtaagaagctggagatcatgtctgcccaagagattgaccgtggccagtacatatgcgttgctacaagtgtggctggcgaaaaagaaatcaagtatgaagtggacgtgttggtgccacccgctatcgaggggggtgatgagacttcctatttcatagttatggttaataatctcttggagctcgactgtcatgtgacaggcagccctcctcctacaataatgtggcttaaagacggccagctgatagacgagcgtgacggattcaaaatactacttaatgggcgtaagcttgtcatagcacaagctcaagtgtccaacacagggctgtacaggtgcatggccgctaataccgccggtgatcacaaaaaagaatttgaggttactgttcacgtgccccctacaatcaaaagctctggtctatccgagagagttgtcgtgaaatacaaacctgtggcgctgcagtgcattgctaatgggatccccaatccaagcattacatggctgaaagacgaccaacccgtgaacactgctcagggaaacctcaaaattcagtcgagcggacgagtccttcagattgccaaaactctgctggaggacgcaggtaggtacacttgcgtggctactaatgccgcaggtgaaacccagcaacacatccagctacatgtgcatgaacctccaagcctcgaggacgcaggtaagatgctaaatgaaactgtgcttgtgagcaaccccgtccagctggagtgtaaagcagcagggaatcccgtgccggttatcacgtggtataaggataatcgactccttagcggctctacctcgatgactttcctgaatcgcggtcagattattgatatcgaaagtgctcagattagtgatgccggtatttacaagtgcgttgccatcaattccgcaggggcaaccgagctgttctactccttgcaggtccacgtcgctcctagcatttcagggtccaacaacatggtggccgtggtcgtaaacaaccctgtacgattggaatgtgaagcacgcggtatccccgctccctcacttacctggcttaaggacgggtcaccagtgagttccttttccaacggtctccaagtgttatccggcggacgaatactggctctgaccagcgcacagatttcagatacaggccgatatacatgcgtggccgtgaatgcagcaggcgagaaacaacgcgacatagacttgagggtttacgtgccaccaaacattatgggcgaggaacaaaacgttagcgtgctgatcagtcaggccgttgaactgctttgtcagtcagacgcgattcctccccctacacttacttggttgaaagatgggcacccactgctgaaaaagccaggtttaagcattagcgaaaacaggtcggtcctcaaaatcgaagatgcgcaggtgcaggataccggtagatacacgtgtgaagctaccaatgtagcgggaaagactgaaaagaactataatgtgaatatctgggttccaccaaatatcggtggaagcgatgagctgacacagctcacagtgatagaaggaaaccttatttctctgctttgtgagtcatccggaataccccctccaaatttgatttggaaaaaaaagggaagtcccgtgttgactgatagcatgggcagggttagaatcctgtcgggcggaagacagttgcagatcagcatcgctgagaagtctgacgcggctctgtattcctgtgtggcctccaacgtggcagggactgcaaagaaagagtacaacctccaggtatatatccggccaaccatcaccaactcaggatcgcaccccaccgagataattgtgacccggggtaagtcaattagcctggagtgcgaggtgcaggggatcccgcctccaaccgtgacgtggatgaaagacgggcatcctctaattaaagctaaaggcgtggagattctggatgaaggccacatccttcagctgaaaaacatccatgtaagtgacacaggtcggtatgtttgtgttgcggttaacgtcgcgggaatgacagataagaagtatgacttgtctgtccacgctccacctagtatcattgggaaccacagaagtcccgaaaatatctcggtggtggaaaagaactctgtctccctgacctgtgaggccagcgggattccgctgccctctattacttggtttaaagacggatggcctgtttccttgagcaattcagtgcgaattctgtccggcggaaggatgcttcgtcttatgcagaccacaatggaggacgcaggtcagtatacatgtgtcgtgaggaatgcggcaggcgaggagcgcaagatttttggcttgtcggtactcgtgcccccacatatcgtcggagaaaatacattagaggatgtcaaagtgaaggagaaacagtcggtcacactaacttgcgaagtgacaggaaacccagtgcccgagatcacgtggcacaaagacgggcaacctctgcaggaggacgaagcccatcacattataagcggaggacggtttctgcagataacaaatgtacaagtgccacacactggacggtacacatgcctcgcttccagcccggcagggcataaatcgcgcagcttcagtcttaacgtgtttgtgagccccaccatcgccggagttggatcagatggcaaccctgaggatgtgacagtcattcttaactcaccgaccagcctagtatgtgaggcatactcctaccctccggcaaccatcacatggtttaaggatggaacaccattggagagtaaccggaacattaggatactgcctggcggtaggactctgcagatcctgaatgctcaggaggacaatgcgggaaggtactcatgtgtggctactaacgaggcgggagagatgattaagcattacgaggtcaaagtgtacattccacccattataaataagggcgacctatgggggcctggcttatctcccaaggaggttaagataaaggttaataatactctaacccttgagtgcgaggcttacgccataccgagcgctagcctgtcctggtacaaggatggccagcctctcaagtctgatgaccatgtaaatatcgctgccaatggacatactctccaaatcaaggaggctcagattagcgacaccggacgctatacctgtgtagcttcaaacattgccggtgaggacgagcttgatttcgatgtgaacattcaggtgccaccgtcatttcagaaattatgggagattggcaacatgcttgacaccgggcgtaacggcgaggctaaagatgtgataatcaataatccaatttcgctgtattgcgagactaacgccgctccccctcccacgttgacatggtataaggacggccaccctttgactagttcagacaaggtgttgattctgcccggtggccgtgtgttacagatccccagggctaaggtggaagacgcaggcaggtacacgtgcgtggcagtcaatgaggccggtgaagacagcttgcaatatgatgttcgagtgctcgtccctccgattattaagggcgctaacagcgatctgccggaggaagtcaccgtcctagtcaacaagtctgcgctcattgagtgtctttcctcaggatctcctgccccaagaaactcctggcaaaaggacggccagcctctactggaagacgaccaccataagttcctcagcaatgggcgtatcctacagattctgaacacacaaattaccgatattggcagatatgtgtgtgtggccgaaaacacggcaggtagtgccaagaaatatttcaacctgaatgtccacgtgcccccttccgtgatcggacctaagagcgaaaacctgacggtggtcgtaaataactttatatcccttacgtgtgaggtctcggggtttccacccccagacctgtcttggctcaagaatgaacaacccatcaaactgaacaccaataccttgatcgtcccgggaggtaggactctccaaatcatacgtgccaaggtgtctgatggtggtgagtatacatgcatagctataaatcaggccggagagagcaaaaaaaaattttccctgacggtctacgtgccaccgtccataaaggaccacgacagcgaatcactaagcgtggtcaatgtcagggaagggacatctgtgtcattggaatgcgaatctaacgctgttccgcctccagtgatcacatggtataagaatgggcgtatgataacggagagcacccatgtggaaatcctggccgacggccagatgctacacatcaagaaagctgaggtgagcgatacaggtcagtacgtttgccgggctatcaatgttgccggacgggacgataaaaacttccacctcaacgtgtacgtgccacctagtatcgaagggcctgaaagagaggttatagtcgagactattagtaacccagttacactcacatgtgatgctacaggaattcctccacccaccatcgcctggcttaagaaccataaacgtatcgaaaactccgactcactcgaagtgcgcatcctcagtggtgggtctaaactgcagatagccaggtcccaacacagcgatagcggcaactacacatgtatagccagcaatatggagggtaaggcccagaagtactattttctgtcaatacaggtgcccccttctgttgccggagctgagatcccctcagacgtgagcgtcttactgggcgagaacgtggagttagtgtgtaacgctaatgggatacccaccccactcatccagtggcttaaagacggtaaaccgattgcatcaggggaaacagagaggattcgtgtctctgcgaatgggagtacactgaatatttatggcgctctaacatcggacacaggaaagtacacctgtgttgctacgaacccggctggcgaagaagaccgaatcttcaatctaaatgtttacgtaactccgactatcagaggcaacaaagacgaagcagagaagctcatgacactggtggacactagcatcaatatcgaatgcagagcgaccggaacacctcctccacagattaactggctgaaaaacggactgccgttacccctcagttcccacattaggctgctggccgcaggtcaggtgatccggattgtgcgggctcaagtgagcgacgtggccgtgtatacctgcgtggcctccaacagagctggagttgacaataaacattacaatcttcaggtctttgctccccctaatatggacaatagtatgggcacagaggagattaccgtgctgaaggggtcctctacctccatggcatgcatcactgacggcacccctgcgcctagtatggcatggcttcgagatgggcagcccctcgggctggatgcccacctgacagtgagcacgcacgggatggtcctgcagctcttaaaggccgagacagaggatagcggcaagtatacatgtatagcaagtaatgaagcaggagaggtgtccaaacatttcattctgaaagtgctggagcccccacatatcaatggctccgaagaacacgaagaaataagcgtgattgtcaacaatcccttggaactgacctgcatcgcttccggaatccccgcacctaagatgacatggatgaaggacggcagacctctgccccaaaccgaccaggtgcaaaccttggggggtggagaggtgttgcgaatttccactgctcaggtggaggacacaggaaggtacacctgcctagcctcctcgcccgctggagacgacgataaagagtacctggtgcgggtccacgtacccccaaatatcgccggaaccgatgaaccccgagacatcacagtactgcggaatagacaagtgaccctggaatgcaagtccgacgccgtgcctccccctgtgatcacatggctgcgaaacggggagagactgcaggccacaccccgagtgaggatcctgagcggcggaaggtacttgcagatcaataatgccgacctgggagatactgccaactacacctgtgtagcgtctaacatagcgggtaagacgacacgcgagttcattctgaccgtgaacgtgccaccaaatattaaaggaggacctcagtcgctagtcatacttctgaacaaatccaccgtccttgaatgcatcgctgaaggagttccaacgcccaggattacatggcggaaagacggcgcagtgttagccggtaatcacgctagatacagcatcttggagaatgggttcttgcacatacaaagcgcacacgtgacagatacagggaggtacctatgtatggcaacgaacgcagcgggaaccgatcgcagacggattgacttgcaggtgcatgtgcccccatcaattgctccgggaccaaccaacatgaccgtgattgttaatgtgcaaaccaccctcgcatgcgaagcaacaggcattccaaagcccagcattaactggaggaaaaacggccacttgctcaacgtggaccaaaatcaaaattcctaccgtctcctctccagtgggagcctggtgatcatttcaccatccgtagatgacaccgccacttacgagtgcacagtaaccaacggagccggtgacgacaagcgcaccgttgatctcacagtccaggtacctccgtccattgcagatgaacccacagatttcctggtcactaaacatgcacccgcagttattacctgtacggcttctggcgttccttttccgtctatccactggacaaagaacggtatcagactgctgccgagaggggacggttaccggattctttcatctggagctatcgagatcttagcaacccagctcaatcacgcgggtagatatacttgtgttgctaggaacgccgcaggtagcgcgcaccgccatgtgactctccacgttcacgagccccctgtgatccaaccgcaaccaagcgagctgcacgtcatcctgaataatccaattctgctgccttgtgaagccacaggcacaccaagtccattcatcacttggcagaaagagggcattaacgtaaacacatctggacggaatcatgcagtactgccatccggtgggctccagattagcagagctgtgagagaggatgccggaacatacatgtgtgtcgcccagaaccccgcaggcacggctttagggaagatcaaattaaacgtccaggtaccacccgtgatctcgccccacctgaaggagtatgtgatcgcagtggataagcccattacactgtcctgtgaggcagatggcctgccaccacccgatattacttggcacaaggacgggcgtgcgattgtcgaaagcataaggcagcgggtgttgagtagcggcagtttgcagatagcatttgttcagcctggggacgctggacactatacatgcatggccgctaacgtggcaggctcctctagtactagcaccaaacttacggtgcacgtccctccacgcatccggtccactgaaggccattacacagtgaatgagaacagccaggcaatacttccttgtgtagctgacggcatccccacacctgcaatcaactggaaaaaggacaacgtgttgttggccaatctgctggggaagtacacagctgagccatacggagaactcatactggagaacgtggtgctggaggacagcgggttttatacttgcgtggcgaataatgccgcaggcgaggacacgcataccgtgagccttactgtacacgtgctgccgactttcaccgagcttccaggtgatgtgtcactgaacaaaggcgagcagcttcggctatcatgcaaagccacaggcattcctctcccaaaacttacctggacgtttaataacaacattatccctgcccactttgattccgtgaacggccacagcgagctggtgatcgagagggtgtctaaggaggattccggcacatacgtttgcacggctgagaactctgtgggcttcgtgaaggccattggttttgtgtacgtgaaggaaccacccgtgttcaagggagactacccctctaactggatcgagccacttggcggaaacgccatcttgaattgcgaggtgaagggcgacccgacacccaccatccagtggaaccgcaaaggtgtggacatcgagatctctcaccgtatacgccagctagggaacggctcacttgccatctatgggacagtgaacgaggacgccggtgattacacgtgcgtggctactaacgaggcaggcgtggtagagcgctctatgtccttaaccctgcagagcccaccaattattactctggaaccagtggagacggtaataaatgctggcggaaaaattatcctaaattgccaggctacgggggaaccccagccaactatcacctggtcacggcaaggacactctatttcttgggatgaccgagtgaacgtcctgtccaataatagcctttacattgccgacgcccagaaggaagatacaagcgaattcgagtgcgtggcaaggaatctgatgggaagcgtgctggtaagggtgcctgtcatcgtacaagtgcacgggggattttcgcagtggtccgcctggcgggcatgttcggtgacttgcggcaagggcatccaaaagcggagcaggctatgcaatcagccccttccagcaaatggagggaaaccatgtcaaggctcagatttggaaatgcgaaattgtcaaaacaaaccttgtccagtggacggatcgtggtcagaatggagcctgtgggaggagtgcacaaggtcatgcgggaggggaaatcaaacaagaacacgcacttgtaacaatccatccgtgcagcatggaggtagaccctgtgagggtaacgctgttgaaattattatgtgcaacataagaccatgccctgtccatggggcttggtcagcttggcaaccgtggggaacatgtagcgagagctgtggcaagggcacacaaactcgggctagactctgtaacaaccctccaccagcctttggtggttcgtattgcgacggggctgagacacagatgcaagtgtgcaacgagagaaactgtccaatacatggtaaatgggctacatgggcatcatggagtgcctgcagtgtcagttgcggcggtggcgctcgccaacgaacaaggggctgctccgatccagtaccccagtacggtggcaggaaatgtgaaggctccgatgtccagtcagatttttgcaatagcgatccatgccctacgcacggaaattggagcccatggtctgggtggggaacgtgctcacgcacctgcaacggagggcagatgcgcagatacagaacgtgtgataacccgcctcccagtaacgggggaagggcttgcggaggccctgactcacaaattcagaggtgtaatacagacatgtgccccgtggacggttcttggggctcttggcattcctggagccagtgttccgccagctgcgggggaggcgagaaaacccgcaaacggctatgcgaccaccccgttccggtcaaaggaggacgcccatgtcctggtgacaccacacaggttactcgttgcaacgtccaggcctgtcctggcggaccccagcgggcacggggttccgtcattggcaatatcaatgatgttgagtttggcattgcctttctgaatgcgactataactgactctccaaactccgatacccgcataattcgagcaaagatcaccaacgtcccccgatcgctaggatccgctatgaggaagattgtgtctattctgaacccgatctattggacaactgccaaggaaattggggaggcagtaaatggtttcactctgactaatgcagtcttcaagcgcgaaacccaagtggagttcgccacaggggaaatccttcagatgagccacatcgcgagaggcctggacagtgacggaagtctcctgttggacatcgtggtatcaggctatgtgctgcagctacagtcgcctgcagaggttaccgtgaaagactatactgaggactatattcaaactggccctgggcagctgtacgcctactctacgcgtctgttcaccatcgatgggatttctattccctacacctggaatcataccgtgttctatgatcaagctcagggcaggatgccttttcttgtcgagaccctgcacgcctccagcgtggagtcagattacaaccaaatcgaagagaccctcggctttaagattcacgccagcatctctaaaggtgaccgctcgaatcagtgtccttcaggctttaccctggactcagtggggccattctgtgctgacgaagacgaatgcgccgcaggaaatccttgttcacactcttgccacaacgctatgggcacatactattgttcctgtccgaagggcctgactatcgcagcggatgggcgtacctgtcaagacattgatgagtgcgcgcttggacgccacacatgtcacgctggacaggactgcgacaatacaatcggatcctacaggtgtgtggtgcgttgtggttccggttttcgcaggacaagcgacggactatcctgtcaggacattaatgagtgccaagaaagttcaccctgccatcaacgttgttttaatgccattggcagttttcactgtgggtgcgagccaggataccaactgaaagggagaaaatgcatggacgtcaatgagtgcagacagaatgtttgccgcccagatcagcactgcaagaacacacgaggcggttacaagtgcatcgatctttgtcccaacggtatgaccaaggccgagaatggtacttgcattgatatcgacgagtgtaaagacgggacacaccaatgtagatacaatcagatttgtgaaaatactcgcggttcatatcgctgtgtctgtccaaggggctacagatctcaaggagtagggcgaccttgcatggatattaacgaatgcgaacaggttcctaaaccatgtgcacatcagtgttccaacaccccaggcagtttcaagtgtatctgtcccccagggcagcacctgttaggagacggcaaaagctgtgctggcttggaaagattgccgaactacgggacgcagtatagctcgtataacctggccaggtttagccctgtgcggaataactatcagcctcagcagcactatcgtcaatatagccacctgtacagtagttattccgagtacaggaactctcggaccagtctgagtaggactagacgcacaatccggaaaacttgccctgagggaagcgaggccagtcatgatacgtgcgtggatattgacgaatgtgagaacacagacgcgtgtcagcacgagtgtaagaatacttttggttcttatcagtgcatctgcccacccggatatcaactgactcataacggaaagacctgtcaggacattgacgagtgtctggagcagaatgttcattgtggacccaacagaatgtgctttaatatgcggggttcatatcagtgtatcgatacaccttgccctcctaattatcagagagatccagtttccggcttctgcctcaaaaattgtccacccaatgacttggagtgcgcgctatctccctacgccctcgagtacaagctggtttcgctaccatttgggatcgccacaaaccaagatctgatccggcttgtggcatacacccaagatggggtcatgcaccccagaactactttcctcatggttgatgaggagcagactgtgccattcgcactaagagatgagaatctgaaaggcgtggtgtacacaaccagacccttgagagaggctgagacatatagaatgagagtccgggctagcagctattccgctaacggcaccatcgagtaccagactacgttcatcgtatacattgccgtcagtgcttacccatacta

SEQ ID NO: 225869 - DNA, 16556 bp, synthetic construct
  misc_feature 1..16556: note = Description of Artificial Sequence: Synthetic coding sequence
  source 1..16556: mol_type = other DNA
atgatttcctgggaagtcgtgcacaccgtttttctgttcgccctcctgtactcctctctggcccaggacgccagtccccaatccgagatcagggcagaagagataccagagggtgctagcacccttgcctttgttttcgacgtcacggggtccatgtacgatgatctggtccaagtaatagaaggtgcctccaagattcttgagacctcgctgaaacgccctaagcgtccactcttcaattttgccctagtacccttccacgatcctgagattggccctgtgactatcaccacagaccccaaaaagtttcaatacgagctgcgggagctctacgtacagggcggaggagattgtccagagatgtctatcggggctatcaaaattgcattggaaatctctctgcccggaagttttatttacgtattcacggacgcccgaagcaaagattacagactcactcatgaggtactacaactgatccaacagaaacagagccaggtggtgtttgtcctaaccggggattgcgacgaccggacgcatatcggatataaagtatatgaagaaatcgcgagcacttccagtggccaagtcttccacctggataagaagcaagttaatgaagtcctgaaatgggtggaggaggccgttcaagctagcaaggtgcatctcctttccacggaccatcttgagcaggccgtaaatacttggcggatcccatttgatccaagccttaaagaggtcacggtctctttatccggccctagcccaatgatcgaaataagaaatccgcttggcaagctaatcaaaaagggctttggactgcatgaactgcttaacatccacaattccgctaaggttgtgaacgttaaggaaccagaagcagggatgtggaccgtcaagactagctcttccgggaggcacagcgttcggatcactggtttatcaaccatcgatttccgggctggcttcagccgaaaacctactttagatttcaagaagacggtgtcacgcccagtgcaaggaattcccacatacgtgttactgaatacttctggcattagcacccctgccaggatagacttactggagctgctgagcatctcaggatcatctctgaaaactattcccgttaagtattatcctcatcggaagccctatggcatatggaacatcagcgacttcgttcctcctaacgaggccttcttcttgaaagtaaccggatatgataaggacgactacctgttccaaagggtctccagcgtaagttttagttccatcgtaccagacgcccctaaggtgacgatgccagaaaagactcctggctattatctgcagccagggcagatcccttgctccgtcgattctctccttccgttcacgctatctttcgtgcgaaatggcgtgaccctgggtgttgaccagtacctgaaagaaagcgccagtgtgaatctcgacatagcaaaggtcaccttgagcgacgagggattttatgagtgcatcgccgtctcctccgccggaaccggcagggcccagacgttctttgatgtgtccgagccccctccagtcatacaggtgcctaacaatgtgactgtgacaccaggcgagagggcagtcctgacatgtctcatcatttcagccgtggactacaacctcacgtggcagagaaacgatcgtgatgttaggctcgcggagccagcgagaatcagaaccctggctaacttgtctctggaactgaagtcagtgaagtttaatgatgcaggcgagtaccactgcatggtctcttccgaaggcggatcttctgctgcttccgtgtttctaacagtgcaggaaccgccaaaggttaccgtaatgcccaaaaatcagagtttcactggcggatctgaggtgagtatcatgtgtagtgcaaccggataccccaagcccaagattgcgtggaccgtgaatgacatgtttatcgtgggttctcaccggtacaggatgacttcagacggcaccctattcatcaagaatgccgctcctaaagatgcaggcatttatgggtgccttgcctcaaattcagcaggtaccgataaacagaattctacacttcgatatatagaagctccaaaactcatggtggtgcagagtgaacttctggtggcactgggagatattactgtgatggagtgcaagacatctggcatccctccgccacaggtcaagtggtttaagggcgatctggagctgcgacccagtacgttcttaatcatcgatcccttacttggtctcctgaaaatacaggagacacaggacctcgatgcgggtgattacacctgcgtggctatcaatgaagccggtagggcaactggaaaaataacattggatgtggggtcgccccctgtctttatacaggaaccagctgatgtgagtatggagataggaagcaatgttaccctcccctgttacgtgcaaggctaccccgaacctaccattaagtggcgcagactcgacaatatgcctatcttcagcaggccattttcagtcagttctatatcgcagctgcgaaccggggcactctttatattgaatctatgggcctcagataaaggcacttatatctgtgaggcagaaaaccagtttggaaagatccaatcagagacgacagtgaccgtcacgggcctggtggccccactgattgggatttcaccttctgtggccaacgtcatagagggccagcaactgactctgccctgtaccttgctggccggaaaccccatcccagagcgaaggtggatcaaaaatagtgcaatgttattacagaatccttacatcacagtgaggagcgatggatctttgcacatcgagcgggtgcagctgcaggatggcggagagtatacttgcgtcgcctccaatgttgccggaaccaataataagaccacctcggtggtggttcatgtcctcccaactatccagcacggccagcaaatcctgtctaccatcgaagggattccggtcacgctcccatgtaaggcctccggaaaccccaagccatcggttatctggagcaagaaaggcgagctgatcagcacatccagcgccaagttctcagcgggtgcagatgggagtttgtacgtggtgagtccaggaggtgaagagtcaggggaatacgtgtgcacagctaccaacacagcaggctatgctaaaaggaaagtacagctgactgtatacgttaggccccgtgtgtttggtgaccagaggggcttgtctcaagataaaccagtggaaatctccgtgctagccggagaagaagtcactctaccctgcgaagtgaagtcactgcccccacctataattacctgggccaaggaaacccagctcatttcacctttttccccgaggcatacctttctaccaagcggaagcatgaagataacagaaactcgtaccagtgatagcggaatgtatttatgcgtagctacgaacattgccggaaacgtaacccaggccgtcaaactgaatgtgcatgtgcccccaaagatccagcgaggacctaaacatctgaaagtgcaggtcggacagcgggtggacatcccatgcaatgcacagggcacacctctgccggttatcacctggtcaaagggagggtccacgatgctcgtcgacggggaacatcacgtgagtaaccccgacggaacactgagtattgaccaggctaccccctcagatgctggaatctatacttgcgtggccactaatattgccggtaccgacgaaacagagattaccctgcatgttcaggagcctccgaccgtggaggacctagagccaccctataacacaacattccaggagcgggtcgccaatcaaagaatcgaatttccgtgtcccgcaaaggggacgcccaaacctaccattaaatggttacataacggacgtgagctcacaggacgcgaaccgggaatatctattcttgaggatgggactctccttgtgatcgcctcggtgaccccttatgataatggagaatacatctgcgtggccgttaatgaagccggtacaaccgagagaaaatataatctcaaagtccatgtacctccggtgataaaggataaggaacaggtcactaacgtaagcgttcttcttaaccagctgaccaacctcttctgtgaagtcgagggaaccccatcaccaattataatgtggtacaaagataacgtacaggtgacagaatcgagcaccatccagaccgtcaataacggaaaaattctgaagctgtttagggctaccccagaggatgcaggtaggtatagttgcaaagcgataaacattgccggaacttcccagaaatacttcaatattgacgttctggtcccacccaccatcatcggtacaaatttcccgaacgaggtgtccgtagtgctgaaccgcgacgtggctctggagtgccaggtgaaagggaccccttttcctgacatccattggtttaaagatgggaagccactgtttctgggggatccaaatgtggaactgttagataggggtcaagtgctgcacttaaagaacgctaggaggaacgataaaggtagataccagtgcaccgtctccaacgcagcgggaaagcaagcgaaggatataaagctgactatctacattccacctagtattaagggagggaacgtgaccactgacatctccgtcctgataaactcccttatcaagttagagtgcgagacacggggattgcctatgccagccattacatggtacaaggacggacagcccatcatgagttcaagccaggcattatacattgataagggccagtatttacatatcccacgcgcacaggtgtcagacagcgcaacatacacttgccacgtcgctaacgttgcgggaacagccgagaaaagttttcacgtggatgtgtacgtgccccctatgatagagggaaatctagcaacccccttgaacaagcaggtcgtaatcgcacattctctgacattggagtgcaaggccgctggtaatccgtcaccaattttaacttggctgaaggacggagtgccagtgaaggctaatgacaacatacgcatcgaggccggtgggaaaaaactggagatcatgagtgcacaggaaatcgatcgcggacagtacatttgcgtggcaacctctgtcgcaggtgagaaagagatcaagtacgaagtggatgtgctagtgccacccgctattgaaggaggtgatgagaccagctactttattgtgatggtcaataaccttcttgagttggattgccacgttacaggcagccctccccctaccattatgtggctaaaagatgggcaacttattgatgagagggatgggtttaaaatcctgttaaatggcagaaagcttgtgatagcacaagcccaggtgtccaataccggtctctaccggtgcatggcggctaatactgccggagaccacaaaaaagaattcgaggtgacagtacatgtgcctcccacaattaaaagctcgggtctgagcgagagagtcgtcgttaagtacaagcctgtggctctgcagtgcattgccaatggcatccctaaccctagcataacctggttaaaagatgaccagcctgttaatacagcccagggcaatctcaagatccaatcatcaggcagagtgctccagatcgccaaaacactccttgaagatgcgggtcgatacacctgcgtggctaccaacgctgctggggagacgcagcagcatatccaactgcacgtgcacgagcctcctagtctggaagacgcaggcaagatgcttaatgaaacggtgctggtgtctaatccagtccagcttgaatgtaaggccgctgggaaccctgtgcccgtaattacatggtacaaggataaccgtctcttgtctgggtccacctccatgacatttctgaaccgcggacaaatcatcgatatcgaatctgcacagatttcagatgctggtatctacaagtgtgtggccataaattcggcaggagccaccgagctgttctacagcttgcaagtgcacgttgctccaagcatcagcggtagtaacaatatggtagcggtggtggtcaacaatcctgtccgccttgagtgcgaggcccgagggatccctgccccatccttgacttggctcaaagacggctctccggtcagcagtttctccaatggtttgcaagtcctgagcggaggaaggattcttgcgcttacaagtgctcagatatctgatacaggaaggtatacctgtgtagccgttaacgcggctggtgagaaacagcgcgatatcgatctccgcgtgtacgtgcctcccaacataatgggagaagagcagaacgtctctgtgctcatttcacaggcagtggaattgctttgccagtccgacgccattccgcctccgactctcacgtggctcaaagatggccaccctctcctcaaaaagccgggtctcagcatctctgaaaatcgcagcgtcctgaagattgaggacgcccaagtccaggacacagggagatacacatgtgaggcgaccaatgtggcgggaaagacggagaagaactacaatgtcaacatatgggttccccctaacataggtgggagtgacgaactcacccagctgacggttatcgagggcaatctcattagcttgttgtgcgaaagtagcggcatcccccctccgaaccttatctggaagaaaaaagggtcccccgtccttacggacagtatgggtcgggtgagaatcttgtccgggggaaggcagcttcaaatctccatcgccgaaaagtcagatgctgcgctgtacagctgtgtggcttcaaatgttgccggaacagccaagaaagaatacaacctccaagtgtacattagaccaaccatcacgaactccgggagtcacccaaccgagatcatcgtgaccaggggcaagtccatctcgttagagtgtgaggtgcagggcattccccctccaactgttacctggatgaaggacggacacccccttattaaagccaaaggggtggaaattctggacgagggccacattctgcagctcaagaacatccacgtttccgacactggcagatatgtctgcgtcgcagtcaacgtggccggtatgacagataagaagtacgacctcagtgtccatgccccaccatccataatcggtaaccacaggtctcctgagaatattagtgtggttgaaaaaaactctgtgtctctgacatgcgaggcgtcaggaatcccactgccctccatcacttggttcaaggacggctggcctgtgtccctgagtaacagcgtgcgcattctgagtggtggaagaatgcttcgcttaatgcagacgactatggaagacgccggacagtatacttgcgtcgtcagaaacgcagcgggagaggagaggaagatcttcggcctcagcgtcctggtacctccacacatcgttggggaaaacactctcgaagatgtgaaagtgaaggagaaacaaagcgtaactttgacttgtgaggttacaggaaaccctgtgccagaaatcacttggcacaaggacgggcaacccctccaggaggatgaggcacatcacatcattagtggcggaagatttcttcagatcacaaacgtgcaggtcccacacacaggacgctacacctgccttgctagctcacctgcaggacataaatccagatcattttctttaaacgtgttcgtgagccctacgattgctggagtgggcagcgatggcaacccagaggacgtgactgtgatcttaaactctcccacttcattggtgtgtgaagcttatagctaccctcccgcaacaataacttggttcaaggacggaacacctcttgagagcaatcggaacattcgaatcctgcccggaggacgcaccctacagattctcaatgcacaggaagataacgctggaagatattcatgtgttgctactaatgaagctggcgagatgatcaagcactacgaagtcaaagtttatatcccacccatcattaacaagggcgatttatggggccctgggctgagcccaaaagaagttaagatcaaagtgaataatactctgaccctcgagtgtgaagcatacgctattccttctgcctcactctcctggtacaaggatggccagcccctcaagtcagacgatcatgtgaacatcgccgctaacggccatacacttcagatcaaagaagcacaaatttccgatactggcaggtacacatgtgtggcctccaacatcgcgggtgaagacgagcttgattttgacgtaaatatacaggtgcctccgtcattccaaaaactgtgggagattggcaacatgttagacactgggcgtaacggcgaagcaaaggacgtcatcatcaataacccaatttctttatactgtgaaactaacgcggctcctccaccgactctgacatggtacaaagacggccatcctttaacctcctcagataaagtcctaatactgccgggaggcagggtcctgcagatcccacgagcgaaagttgaggatgccggacgctacacctgcgtggcagtaaatgaggctggtgaagactccctgcaatatgatgtcagggttcttgtcccacctataatcaagggcgctaactctgacctgccagaggaggtgaccgtcttggtgaataagtccgctttgattgaatgtttgtcgtctgggagcccagcaccccgaaatagctggcagaaagacgggcagcccctgctggaagacgaccaccacaagttcttaagcaatggtaggatactgcaaattctgaacacccagatcacagatattggcaggtatgtgtgcgttgccgagaatacggctggtagtgccaagaagtactttaatcttaatgttcacgttcccccttccgttatcgggcctaagagcgagaatctcacagtggtcgtgaacaacttcatttccttgacctgcgaagtgagcggattcccgccacccgacctttcttggctgaagaacgaacagcccataaaattgaatacgaacacccttatcgtcccaggaggacggactctccaaataatccgcgctaaggtgtcggacggaggggagtacacttgtatcgccattaaccaggcaggcgagagtaaaaagaaatttagtttaacagtgtacgttccgccatctattaaggaccacgattctgagagcctgtctgtcgtcaatgtgcgcgagggtacaagtgtctctctggagtgtgagtcgaacgcagtccctcctcctgtaataacatggtataagaatgggcgtatgattaccgagtctacacacgtcgaaattctagcagatggacagatgctgcacatcaaaaaagcggaggttagcgacacaggccagtacgtttgtcgggctattaatgtggctggacgggatgacaaaaattttcacctgaacgtctacgttccaccctcgatcgagggccctgaacgcgaggtgatcgtagagacgatttccaacccagtaaccctaacgtgcgacgcaacaggtatcccacctcctacaatagcatggctgaaaaatcacaagcgaattgaaaattctgacagtctcgaggtgcgaatcctgtccggcggttccaaactgcagatcgctcgctctcagcacagtgattcgggcaattacacctgcattgcctcaaacatggagggaaaggcccaaaaatactacttcctgtccattcaggtacccccatcagtcgccggagctgagatcccctcggacgtttctgtgctccttggagagaacgtggagctggtctgtaacgctaatgggatccccacccctcttatccaatggctaaaagatgggaaacctatcgcctcaggagaaactgaacggattcgtgtcagcgcgaacggctccaccctgaatatttatggagctctgactagtgacacgggtaagtacacctgcgtggctactaatcccgctggtgaagaggataggatctttaacttgaatgtgtacgttaccccaaccatccgtgggaacaaggacgaggccgagaaactcatgacgctggtggacaccagtatcaatattgagtgccgagcaacaggtacaccacccccacagattaactggttgaagaatggactgcccctgcctctgagttcacacatcaggctcctagctgcaggacaggtgatacgcatcgttagggcccaggtgtccgacgtcgcagtctacacctgcgtcgcctctaacagagccggtgttgacaacaagcactataatctccaagtgttcgccccacctaacatggataactccatgggaactgaagaaataactgtgcttaagggatcttcaacgtcgatggcctgcatcacggacgggacgccagccccatcgatggcctggctgcgggatggacaacccctcgggctggacgcccatctgacagtctccactcacgggatggtgcttcaactgctgaaagccgagacagaagactcgggtaagtacacgtgtatcgcctccaacgaggcaggcgaagtttctaagcatttcattctgaaggtcctggagccgcctcacataaacggctctgaggagcacgaagagatttctgttatcgttaataacccactcgaacttacctgtatcgcctcaggcatccctgcccctaaaatgacttggatgaaggatggtcgacctcttccccagaccgaccaagtgcagaccctcggcggaggggaggtcctgaggatatccaccgcccaggtggaagataccggacggtatacctgcttggcctctagcccagctggcgatgatgacaaggaatacttagtgagggttcacgtcccaccaaacatagccggtaccgacgagccaagagacattactgttctgagaaacagacaggtgaccttagaatgcaagagcgatgccgtgccgccacccgtcattacttggttacggaatggagagcgcctgcaagcgacacctcgagtgcggatcctgagcggaggtcgctatctgcagatcaataatgccgatctgggcgataccgcaaactacacatgcgtagcctccaatattgcaggaaagacaacacgagaatttatcctgacagttaacgttccacccaatattaagggtggtccacagtccctcgtgatattgcttaacaaatcgactgtgctggaatgcatcgccgagggggttccaacaccgaggattacctggcggaaggacggtgccgtgcttgccggtaaccacgcacgctactccatcctggaaaacgggtttttacatatccagtctgcacacgttaccgacacaggcagatatctgtgcatggccacaaatgcagccggaacagacaggaggagaatcgacctgcaggtacacgtgcctcctagcattgcaccaggcccaacaaacatgaccgtgatagtgaacgttcagaccaccctagcatgcgaggccactggaataccaaagccaagcattaactggaggaagaatggccaccttctcaatgtagaccaaaatcaaaatagttatagactgctgtccagtgggagcctggtcatcatcagccctagcgtggacgatacggcgacctacgagtgcactgtgaccaacggtgcgggtgatgacaagcgcacggtggatctaactgtgcaggtacccccatccatcgctgacgaacccacagactttctcgtgaccaaacatgctccagccgtgatcacctgtaccgcttccggagttcctttcccaagtattcactggacaaagaacggcatacggttactacccaggggggatggatacagaatcttgtcctccggagctatagaaattctggcaacccagctcaatcatgctggaagatatacctgcgtagctcgcaatgcagccggaagtgctcacaggcacgtgactctacacgtgcatgaaccccctgtgattcagcctcaaccgagcgagctgcacgtgattctgaataatccaattcttctgccatgcgaagctaccggaactccaagtccgtttatcacctggcagaaagaggggatcaatgtgaacaccagtggccgaaatcacgctgtgttaccctctggcggactgcagatcagcagggcagtccgtgaagatgctggaacatacatgtgcgttgcgcaaaatccagccggtactgcgcttggcaaaattaaattaaacgttcaagttcccccagtgatcagcccccatctaaaggaatacgtgattgcggttgacaaaccgatcaccctgtcctgtgaagcagacggcctgccaccacctgacattacttggcacaaagatggcagagctattgtggaatcgatcaggcagcgggtgctatcttccgggtctctccaaattgcatttgtccagcccggtgatgccggacattatacctgcatggcagccaatgtagccggatcatcgtcaacaagcacaaagctcactgtgcatgtgcctccccgtatacgctctactgagggccattataccgtgaatgagaatagccaagcaatcctcccgtgcgttgctgatggaatccccacccctgctatcaactggaagaaagacaacgtcctgttggctaacctcctgggaaagtacacggcagagccttacggcgagctgatccttgagaacgtggttctggaggattctggcttctacacctgtgtagccaacaacgccgcaggcgaggatactcacaccgttagcctgacggtccacgtcctgcccactttcactgagttgcccggagacgtatcattgaacaagggtgaacaactgcgtctttcctgcaaggccaccggcatccctctgcccaaacttacttggacttttaataataacatcattcccgcacacttcgactcagtcaacgggcactctgagctggttatagagagagtcagcaaagaggactccgggacgtatgtttgtacagccgaaaactctgtgggatttgtgaaggcaatcggtttcgtatatgtgaaagaaccccctgtgtttaagggagactatccctcaaattggattgagccacttggtgggaacgccatactcaattgtgaggttaagggggaccccacccccactattcagtggaacaggaagggtgttgacatagagattagccatagaatcaggcagctgggtaatggcagcctggcaatttatggtaccgtcaacgaggacgctggcgattatacttgcgtggcgacgaatgaggcaggcgtggtggaaaggagtatgagcttgaccctgcagtccccccctattataacacttgagcctgtggagaccgtgatcaatgccggaggtaaaatcatcctcaactgccaagcgacaggtgaacctcagcctactatcacttggtccaggcaggggcacagcatatcttgggacgacagagtgaacgtcttgtcaaacaatagcctgtacatagctgatgctcaaaaagaggacacatccgagtttgaatgcgtagctcgtaacctaatggggtccgtattagtgcgtgtacccgtcattgtacaagttcacggtggattcagccagtggtcagcctggcgagcgtgctccgtgacctgtgggaaaggcattcaaaagagatcacggctgtgcaatcagcctttgcccgctaatgggggaaagccctgtcaagggagcgaccttgagatgcggaactgccagaacaaaccttgccccgtggatggctcttggagcgagtggtccttatgggaagagtgcacccggagctgcggcagggggaaccagacacgcacccgtacatgtaacaaccccagcgttcagcacggtggccgaccctgcgaaggcaatgcggtggagattattatgtgtaacataaggccctgccctgtgcacggcgcatggagtgcttggcagccctgggggacttgctcagagtcatgcggaaagggtacgcaaaccagggctagactctgcaataatcctcccccagccttcggtggcagctactgtgacggtgctgagacccagatgcaggtgtgtaatgagcgcaactgcccaattcatgggaaatgggccacttgggcaagctggagcgcctgctctgtgtcatgcggcggtggcgctcggcagcgcacaaggggctgcagtgatcctgtcccccagtatggcggacgcaaatgcgaggggtctgatgtgcagagtgatttttgcaacagcgatccgtgtcccacacatgggaattggtcaccttggtctgggtgggggacttgcagccgtacgtgcaatgggggacagatgagaaggtaccgcacttgtgataaccctccacctagcaacggcggacgcgcatgtggcggaccagacagccagattcagagatgtaacactgacatgtgccccgtagacggctcatggggaagttggcactcctggtcccagtgttcagcttcatgcgggggtggggagaagaccaggaagaggctgtgtgatcaccctgtaccagttaaaggtgggcgaccatgtccaggagatactactcaggtgacaagatgcaacgtgcaggcctgtcccggtgggcctcagcgggctaggggaagtgtaattggaaatattaatgatgtggaatttggcatcgcttttttgaacgcaacaattactgacagtcctaatagcgacacaaggatcataagggctaagattacaaatgttccacggtcgctgggtagcgcaatgcgtaaaattgtctctattctcaaccctatctattggactacagcaaaggagatcggcgaagcggtgaatggtttcaccctgactaacgcagtgttcaagcgtgagacgcaagtggagttcgctactggcgaaatactgcaaatgtcccacattgctcggggactcgactccgacgggagtctgctgttggacattgtggtgtctggttacgtgcttcagttacagtcaccggctgaggttacagtaaaagactacactgaagattacatccagaccgggcctggccagctgtatgcctactccacccgccttttcaccatcgatggcatcagtataccatacacatggaaccacaccgtcttctatgatcaggcccagggaagaatgccatttttggttgagaccctgcacgctagctcagtggaatccgattacaaccagattgaagagactctggggttcaagatccatgccagcatcagtaaaggcgacagaagcaaccagtgcccttccggcttcactctggactctgtgggtcctttctgcgctgatgaggacgaatgcgccgcaggaaatccctgctcgcatagctgccataatgcaatgggaacctattactgctcctgtcccaaggggctgaccatcgctgcagatgggaggacctgtcaggacatagacgagtgtgccttgggcaggcatacatgccatgcagggcaggactgcgataataccataggatcgtatcgatgcgttgtgcgttgcggttcaggttttcgcaggacgtcggatggactttcttgccaggacatcaatgaatgccaggaatctagcccctgccatcagcggtgtttcaatgccatcggctcgtttcactgtggatgcgagccaggataccaattgaaaggacgaaaatgcatggacgtgaacgagtgtcgtcagaacgtctgtcgcccagatcagcactgtaagaatactagaggcggttacaaatgtatcgacctttgccccaacggcatgaccaaggctgaaaatgggacgtgtattgacatagatgagtgcaaagacggcacccatcagtgtaggtacaatcagatctgtgagaacacccgcggaagctaccggtgtgtgtgtccccgaggttatcggtcacagggagtgggcagaccctgtatggacatcgatgaatgcgagaacaccgacgcctgtcagcacgagtgtaaaaataccttcggcagctatcagtgtatatgtcctcctggctatcagttgacacacaacggaaagacctgtcaagatatcgatgagtgcttggaacagaatgttcattgcggcccaaaccggatgtgttttaacatgcgcggatcataccagtgcattgacaccccctgtccaccaaactaccagcgggatcctgtgagtggtttttgtctgaaaaattgtccgcctaatgacttggaatgcgcactgagtccttatgccctcgagtataagttagtttctctgccattcggcatagcaaccaaccaggacttgattagattagtcgcatatacacaggacggcgttatgcaccctcgcacaacttttctgatggtagatgaggaacaaactgttccattcgctcttcgcgatgagaacttaaagggcgttgtatacaccacccgacccctgagagaggccgagacatatagaatgcgcgtgcgagcctccagctactccgcgaatggtaccatcgagtatcaaacaactttcatcgtgtatatcgctgtatctgcctacccttacta

SEQ ID NO: 225870 - DNA, 723 bp, synthetic construct
  misc_feature 1..723: note = Description of Artificial Sequence: Synthetic coding sequence
  source 1..723: mol_type = other DNA
gcaattggaagtttccattgtggatgtgagccaggatatcagctgaaaggtagaaagtgcatggacgtgaatgaatgtaggcaaaacgtttgccggccagaccagcactgcaagaacacacggggtggatacaagtgcattgatttgtgccctaacggcatgactaaggcagagaacggtacatgcattgatatcgacgagtgtaaagacggaacacaccagtgtcgatataaccagatctgcgaaaataccagggggtcctatcgttgtgtgtgtcccagaggttaccgctcacagggagtcggcagaccttgcatggacatcgatgagtgtgagaacacagacgcctgtcagcatgagtgcaagaacacattcggatcctatcagtgcatctgccccccagggtatcagttgacacacaatggtaagacatgccaggatatagatgagtgtctggagcagaacgtgcattgtggccctaatcggatgtgtttcaacatgcgcggaagctaccagtgtattgacactccctgcccccctaactaccagcgcgaccctgtctccgggttctgtctcaaaaattgtccacccaacgacttagagtgtgccctgtcgccatatgcactggaatataagcttgtcagccttccattcggcatagccacgaatcaggatctcattagactggtagcctacactcaggatggcgtcatgcacccttag

SEQ ID NO: 225871 - DNA, 1455 bp, synthetic construct
  misc_feature 1..1455: note = Description of Artificial Sequence: Synthetic coding sequence
  source 1..1455: mol_type = other DNA
atggatcttgggaaagaccagtctcatttgaagcatcaccagacccccgatccacaccaggaggagaatcacagtccagaagtcattgggacctggagcctgagaaacagggaactgctgcgcaagaggaaggctgaagtgcatgagaaagagactagccagtggctcttcggagagcagaaaaaacggaagcagcagcgcaccgggaaaggcaaccgaagaggccgtaagaggcaacagaatactgagctgaaagtggagcctcagcctcaaattgagaaagagatcgtcgagaaggctctggcccctatagagaaaaagactgagcctcctggttctataacgaaggtctttccttcggtggcaagcccacaaaaagtagttcccgaagagcacttttctgagatctgccaggagagtaacatttaccaggaaaacttttctgagtaccaggagatcgcagttcagaaccatagctctgagacatgtcagcacgtcagcgagcccgaggatttgagccccaagatgtaccaagaaatctccgttctgcaagacaattcaagcaagatttgtcaggacatgaaagagcccgaggacaacagccccaatacatgccaggtgatctcagtcattcaggatcacccttttaagatgtaccaggacatggcaaagcgcgaagacttggcacccaagatgtgccaggaagcagcagtgcccaagattctaccatgtcctacgagtgaggacacagcagacttggccggttgttcgctccaggcctatcccaagcctgacgttcctaagggctatatccttgatactgatcaaaaccccgcagaacctgaggaatataacgaaactgaccagggtatcgcagaaaccgagggcctctttccaaaaatccaggagatcgcagagccaaaggacctctctacgaagacccatcaggagagtgccgaacccaagtatcttccacataaaacctgtaacgaaatcatagttcctaaggcaccttcccataaaaccatccaggagacaccccactctgaggattatagcatcgaaatcaaccaagagactcctggctccgaaaagtactcgcctgagacctatcaggagatccccggactggaggagtactcgcccgaaatttaccaggagactagccaacttgaggaatacagtccagaaatttaccaagaaaccccaggccctgaggatctctcaaccgagacttataaaaacaaggatgtgcctaaggagtgcttccctgagccccaccaggaaaccggcggtcctcagggacaagacccaaaagcacatcaggaggatgccaaagacgcttataccttcccccaggaaatgaaggaaaagcccaaggaggagccaggcattccagccattcttaacgaaagccaccctgagaacgatgtgtattcctacgtgctcttttag

SEQ ID NO: 225872 - DNA, 1455 bp, synthetic construct
  misc_feature 1..1455: note = Description of Artificial Sequence: Synthetic coding sequence
  source 1..1455: mol_type = other DNA
atggacctggggaaagatcagtcccacctaaagcaccaccaaacacccgacccccaccaagaggagaaccacagtccggaggtgattggaacttggagtctgcggaatagggagctcctccggaaacgaaaagccgaggtgcacgagaaagaaacctcccagtggctatttggcgagcagaagaagaggaaacagcagaggactggcaaaggcaaccggaggggcagaaaacgccagcagaacaccgagctgaaagtggagccacaaccgcagatcgaaaaggagattgtggagaaggctctggccccaattgaaaagaagaccgaaccgccagggtccatcaccaaggtgttcccttcagtggcttcacctcaaaaggtggtccccgaggaacatttctccgagatatgtcaggaatccaatatttaccaggaaaacttctctgaatatcaggaaatcgcagtccaaaatcattcatcagagacatgccagcacgtgtctgagccggaggacttaagtccgaaaatgtatcaggagatttcagtactacaggataactccagcaagatttgtcaagacatgaaagagcccgaggacaactcgcccaatacctgtcaggttattagcgtgattcaggaccatcccttcaagatgtaccaggacatggctaagagagaggatctcgcccctaagatgtgccaagaagccgctgtgccaaagatcctgccttgccctacctctgaggataccgcggacctggcgggatgtagtctgcaggcctaccctaagccagatgtccctaaagggtacatcctcgacacagatcagaatcctgctgaacccgaagaatataatgagaccgatcaaggcattgccgaaaccgagggcctgttccccaagatccaggagattgctgagcctaaggatctgtccaccaagacacaccaagaaagtgccgagcccaaatatcttcctcacaagacatgtaacgagatcatagtgcccaaggccccatcccacaagacaatccaggagacaccccactcagaggactatagtattgagataaatcaggagacacccggatccgagaagtattcacccgagacataccaggagattcccggactggaggagtattcaccagagatttaccaagaaacgtctcagctagaggaatattcacccgagatttaccaagagacccccggacccgaggacctctccaccgagacctataagaataaggatgtgcctaaggaatgcttccccgagccccatcaagagaccggaggaccccaagggcaagatcccaaagcccatcaggaggacgctaaagacgcttatacctttccacaagagatgaaggaaaaacctaaggaagagccgggaatccccgcaatcctgaacgaatcccatccagaaaacgacgtgtactcttatgtgctgttctag

SEQ ID NO: 225873 - DNA, 429 bp, synthetic construct
  misc_feature 1..429: note = Description of Artificial Sequence: Synthetic coding sequence
  source 1..429: mol_type = other DNA
atggtcttatcgcctgccgataaaaccaacgtgaaggctgcttgggggaaagtcggagcacatgctggtgaatacggcgctgaagctctggaacggatgttcctcagttttccgacgacaaagacgtacttccctcacttcgaccttagccacggttcggcccaagtcaaaggccatggaaagaaagtggcagacgcactaactaatgccgtagctcatgtggacgatatgccaaatgccctatcagccctgagtgacctccatgcccataaactccgggttgatccagttaactttaaactgctgtcgcattgtctgcttgtgacactcgcagctcatctcccggctgagtttacccccgctgtacacgcatctctggacaagtttctggctagtgtgtcgacggtcctgacttcaaaatatcgttag

SEQ ID NO: 225874 - DNA, 429 bp, synthetic construct
  misc_feature 1..429: note = Description of Artificial Sequence: Synthetic coding sequence
  source 1..429: mol_type = other DNA
atggttctatctccagctgacaagacaaacgtcaaagccgcatgggggaaagttggtgctcacgcgggagaatacggcgctgaggcattagaacgcatgtttctttctttcccgacgacaaaaacctatttcccgcatttcgacctgtcgcatggatcagcccaggtgaaaggccatgggaaaaaggtggctgatgcactgacgaatgctgtcgcccacgtggacgatatgccaaacgctttgtcagcactatcagacttacacgcccacaagttgcgggtcgatccagttaacttcaaacttctgagccattgccttctggtaaccctcgcagcacatctgcccgctgaatttacccccgcagtacatgcctctttggacaagttcctcgcctccgtcagtacagttttgacaagcaagtatcgctag

SEQ ID NO: 225875 - DNA, 333 bp, synthetic construct
  misc_feature 1..333: note = Description of Artificial Sequence: Synthetic coding sequence
  source 1..333: mol_type = other DNA
atgtttttgagttttccgactacgaagacgtacttccctcactttgatctgtcacatgggtccgcccaggtgaaaggacatggcaaaaaagtggctgacgccctgacgaatgctgtcgctcatgtcgacgacatgcctaacgccctctcggccctttcggacctgcacgctcacaaactcagagtcgaccccgtgaacttcaaacttttgagtcactgcctgctggtaaccctagctgcgcacctgccagctgagtttacaccagcagtccatgcatcattggataagtttttggcctcggtgtctactgttttgacctccaagtatcggtag

SEQ ID NO: 225876 - DNA, 444 bp, synthetic construct
  misc_feature 1..444: note = Description of Artificial Sequence: Synthetic coding sequence
  source 1..444: mol_type = other DNA
atggtgcacctgactcccgaagaaaagtccgcagttaccgcactgtgggggaaggtcaatgtcgacgaagtaggcggagaggccctcggcagactcctggtggtctatccatggacacagcggttcttcgagtctttcggtgatcttagcacccctgacgccgttatgggtaatcctaaggtgaaagcacatgggaagaaggtgcttggggcattttccgatggccttgcccacttggataatttaaaagggactttcgctacgctgagtgagctgcactgtgacaaattgcacgttgatcctgaaaattttaggctcctaggcaatgtgctggtttgtgtcctggcccaccacttcgggaaagagttcaccccaccggtgcaggctgcttatcagaaagtagttgccggagttgccaacgcactagcccacaagtatcactag

SEQ ID NO: 225877 - DNA, 273 bp, synthetic construct
  misc_feature 1..273: note = Description of Artificial Sequence: Synthetic coding sequence
  source 1..273: mol_type = other DNA
atggtgcacctgaccccagaggaaaaaagcgcggttactgcactgtggggcaaggtgaatgtcgatgaagtggggggagaagctctcggcaggttactggtggtgtatccctggactcagagatttttcgagtctttcggcgacttgtccacccccgacgcagtcatgggcaatccaaaagttaaggcacatgggaaaaaagtgctgggagccttctctgacggcctagcacacctggacaatctcaagggcactttcgctacactctcatag

SEQ ID NO: 225878 - DNA, 426 bp, synthetic construct
  misc_feature 1..426: note = Description of Artificial Sequence: Synthetic coding sequence
  source 1..426: mol_type = other DNA
atggtacacctaacgccagaggaaaagactgcagtgaacgccctgtgggggaaggtaaacgtggatgcggtcgggggagaagcattaggcagactgttggttgtctacccctggacacagcggtttttcgaatcctttggagacttgtcgagccccgatgccgtgatgggtaatcccaaggtgaaggcacatggcaagaaagtcctgggcgcatttagtgacgggctagcgcacttagataaccttaaagggacattttcgcagctgtccgaactgcattgtgacaagctccacgtggatccagaaaatttccgcgtgtgcaagaaggtacccgaagcgcttcaaattggttccacgtgtctgttctataaggaatacatgggaaaggagaagtccaaaggcactgtccaaggtatcaacggctag

SEQ ID NO: 225879 - DNA, 444 bp, synthetic construct
  misc_feature 1..444: note = Description of Artificial Sequence: Synthetic coding sequence
  source 1..444: mol_type = other DNA
atggtgcacctgacccctgaagagaagacagcggtcaatgccttgtggggcaaagtgaatgtagatgcggtcggcggagaagcactcggtcgactgttagtagtgtacccatggacgcaaaggttcttcgagagcttcggcgacctgtcaagccccgatgccgtgatggggaaccctaaagtcaaggcacatggaaaaaaggtgctcggtgcgttctccgatggcctggcccatctagataatttgaaagggacatttagtcagctgagcgagttacattgcgacaaactgcatgtggatcccgagaatttcagactcctgggcaatgtcctggtgtgcgtcctggccagaaactttggaaaagaattcacgcctcagatgcaggctgcctaccaaaaagttgtggccggagtggccaatgctctcgcccacaagtatcactag

SEQ ID NO: 225880 - DNA, 315 bp, synthetic construct
  misc_feature 1..315: note = Description of Artificial Sequence: Synthetic coding sequence
  source 1..315: mol_type = other DNA
atggtccatctcactcccgaggagaaaacggctgttaatgccttatggggcaaggtgaacgtggacgccgtgggaggagaggcgttaggacgcctgttggtcgtgtatccctggacacaacgcttcttcgagtccttcggggacctaagtagtcccgatgccgtgatgggaaatcccaaagtgaaagcccacgggaaaaaggtgctaggggcattctccgacggtctcgcacaccttgacaatttgaaggggaccttcagtcaactgtcggagctccattgcgacaaattgcatgtcgaccctgaaaacttctag

SEQ ID NO: 225881 - DNA, 444 bp, synthetic construct
  misc_feature 1..444: note = Description of Artificial Sequence: Synthetic coding sequence
  source 1..444: mol_type = other DNA
atggttcacttcactgccgaggaaaaagcagccgtgacttctctgtggtccaagatgaatgttgaggaggccggaggagaagcactcggcaggttgctagtggtctacccctggacgcagcgcttttttgactcgtttgggaacttgagctccccttccgccatacttggtaaccctaaagtcaaggcccacgggaagaaagtactgacctcgtttggtgacgccattaagaacatggacaatctgaaaccagcctttgcgaaactttccgaactgcattgcgataagttgcatgtggatcctgagaactttaagcttctggggaatgtcatggtgatcatcctggctactcactttgggaaagaattcaccccagaggtgcaggccgcttggcagaagcttgtctccgctgtagcgatcgccctcgcccataagtaccactag

SEQ ID NO: 225882 - DNA, 444 bp, synthetic construct
  misc_feature 1..444: note = Description of Artificial Sequence: Synthetic coding sequence
  source 1..444: mol_type = other DNA
atggtgcacttcacagctgaggagaaggcagccgtcacatctttatggagtaagatgaatgtggaagaggccggaggcgaggcgctggggagattgctggttgtgtacccctggacgcagaggttcttcgattctttcggcaatctgtcctctccatcggctattctaggaaatcctaaggtgaaggcccacggtaaaaaagttctgacttcctttggcgacgctattaaaaacatggacaatctgaagcccgcttttgctaagctgagtgagctgcattgtgacaagctgcatgtggatccagagaattttaagctcctcggaaatgtaatggttataatcctggcaacacactttgggaaggaattcactcccgaggttcaggccgcttggcagaagctggtgagcgctgtcgccattgccttggcacacaagtatcactag

SEQ ID NO: 225883 - DNA, 264 bp, synthetic construct
  misc_feature 1..264: note = Description of Artificial Sequence: Synthetic coding sequence
  source 1..264: mol_type = other DNA
atggttcattttacagcagaggaaaaggccgctgtgacaagcttgtggagtaaaatgaatgttgaggaagcgggtggagaggctcttgggcgtctgctggtggtgtacccttggacccagagattctttgacagcttcggcaatctgtcttcgccaagcgcgattctgggtaaccccaaggtgaaggcccacgggaagaaagtcctgactagtttcggggacgctattaagaatatggataacttgaagccagctttcgcatag

SEQ ID NO: 225884 - DNA, 444 bp, synthetic construct
  misc_feature 1..444: note = Description of Artificial Sequence: Synthetic coding sequence
  source 1..444: mol_type = other DNA
atgggtcacttcactgaagaggacaaggcaacaatcacttccctgtggggaaaggtaaatgttgaggatgctggcggagagactctgggaagacttctcgtggtttacccatggacccagaggttctttgacagtttcggcaacctgagttctgcctctgcaattatggggaaccccaaggtgaaggcgcacggcaaaaaagttctgacctcgttgggcgacgcaacaaagcatctggatgatctgaaagggactttcgcccagctcagcgaactgcattgcgataagctccatgttgatcccgaaaacttcaagctcctgggcaatgttctcgtaactgtgctcgcgatccacttcggaaaagaattcacccccgaagtgcaagccagttggcagaagatggtgaccgcagttgcaagcgccctgagttctcgctaccattag

SEQ ID NO: 225885 - DNA, 444 bp, synthetic construct
  misc_feature 1..444: note = Description of Artificial Sequence: Synthetic coding sequence
  source 1..444: mol_type = other DNA
atgggccatttcaccgaagaagacaaggccaccattacaagtctgtggggcaaggtgaacgtggaagacgcgggaggagagaccctaggcaggttgcttgtggtctacccatggactcagaggttcttcgattcatttgggaatctgtcatctgctagcgcaatcatgggcaaccctaaggttaaggcccatggcaagaaggtcctgaccagcctgggggacgctatcaagcaccttgatgaccttaagggcactttcgctcaattaagcgaactccattgtgacaaactgcacgtggaccccgagaacttcaagctcctgggcaacgtgctggtaacagtgctggccatacacttcggaaaggagtttacaccagaagttcaggcgagctggcagaaaatggtaacaggggttgcatctgcactgagcagccgataccattag

SEQ ID NO: 225886 - DNA, 477 bp, synthetic construct
  misc_feature 1..477: note = Description of Artificial Sequence: Synthetic coding sequence
  source 1..477: mol_type = other DNA
atgggccacttcactgaggaggataaagcaaccattacatcgctgtggggcaaggttaacgtggaagacgcaggcggtgagacattaggacgcctcctggtagtgtacccatggacacagaggttctttgacagcttcggcaatctttccagcgctagtgccataatgggcaatcccaaggttaaagcccacgggaagaaagtgttgacttctctgggcgacgccatcaagcaccttgacgatctgaagggcacatttgctcagctcagcgaattacactgtgataagctgcatgttgaccccgagaattttaagcttctggggaatgttctcgttacagtgctggctatccactttgggaaagaattcacccccgaggtacaggcctcatggcagaagatggactggtcaggccaatgtccagtgctgcaaattcccctatcctcgttgcctatgatgcagagcttccaagggtag

SEQ ID NO: 225887 - DNA, 414 bp, synthetic construct
  misc_feature 1..414: note = Description of Artificial Sequence: Synthetic coding sequence
  source 1..414: mol_type = other DNA
atggtggtgctgggcgaaatgaagagaaaggtcttacctctacatttcctccccttcatgcgcctcctggtcgtatacccatggacacagcgttttttcgactctttcgggaatctgtcatccgccagcgctatcatggggaatcctaaggtcaaggcgcacgggaaaaaggtcctcacctctctgggtgacgccattaagcacctggacgatcttaagggaacgtttgctcagctgtcagagctgcattgtgacaagctgcacgtggatcctgagaatttcaagctgctgggcaatgtgctggtcaccgtgctggcgattcatttcggaaaagagttcacacccgaggtccaggccagctggcagaaaatggttactggtgtagcatcagcactgagttcaaggtaccactag

SEQ ID NO: 225888 - DNA, 444 bp, synthetic construct
  misc_feature 1..444: note = Description of Artificial Sequence: Synthetic coding sequence
  source 1..444: mol_type = other DNA
atgggtcattttacagaggaagacaaagccaccattactagtctgtggggcaaggtgaatgtggaggatgcaggcggagagaccttggggagattgctggtagtgtacccttggactcagcggttctttgatagctttggaaatctgagctccgcctccgcaataatgggcaatcccaaagttaaagctcatggaaagaaggtgcttacctctttgggtgacgctataaagcatctggacgacctgaaaggaaccttcgctcagctttctgagctgcattgtgataagctgcatgtggaccctgaaaatttcaaactcttgggcaacgtgctcgttaccgttctggccatccatttcgggaaggaatttactcctgaagtgcaggcgagctggcaaaaaatggtgaccggcgtagcctcagccctatcatctcgatatcactag

SEQ ID NO: 225889 - DNA, 426 bp, synthetic construct
  misc_feature 1..426: note = Description of Artificial Sequence: Synthetic coding sequence
  source 1..426: mol_type = other DNA
atgttgtcagctcaggagcgcgctcagatagcccaggtctgggatctgatagcgggacacgaagcacagtttggcgcagaactgctcctgagattattcaccgtctatccttcaaccaaagtttacttccctcatctgtctgcttgtcaggatgcaacccagttgctgtcgcatgggcagcgtatgctggctgccgtgggggcagcggtgcagcacgtggacaacttgcgagctgccttgtcaccactggccgatttacacgcactggtcctacgcgtggaccccgctaacttccccttactgattcagtgcttccacgtggtgctggctagccatttgcaggatgaattcactgtgcagatgcaagccgcttgggacaagtttctgacgggggtcgccgtggtgctgaccgaaaaataccggtag

SEQ ID NO: 225890 - DNA, 429 bp, synthetic construct
  misc_feature 1..429: note = Description of Artificial Sequence: Synthetic coding sequence
  source 1..429: mol_type = other DNA
atggcactgtctgccgaggatcgcgctcttgtgagagctctgtggaaaaaactcggctccaatgtcggagtctacaccacggaggccctggagcgaacctttctggcctttccggcaaccaagacttatttctcacacctcgatttgtccccaggaagttcgcaggtgcgagcacacgggcaaaaggttgctgatgctctgtcactggccgtggagcgcctggacgacctacctcatgctctaagcgccctgtctcatctgcatgcgtgtcagttgagagtagaccctgcctcattccaactcctgggccattgcctactggtcaccctggctcgacattatcccggtgattttagccctgcccttcaggcatctctcgacaagtttctgtcccacgtaatttcagcccttgtgtccgaatacagatag

SEQ ID NO: 225891 - DNA, 429 bp, synthetic construct
  misc_feature 1..429: note = Description of Artificial Sequence: Synthetic coding sequence
  source 1..429: mol_type = other DNA
atgagcctgactaaaacggaacggacaattattgtctccatgtgggctaagatcagcactcaggcagacaccatcggtaccgagacactggagcgcctatttctgagtcacccccagacaaaaacctacttcccgcacttcgacttacacccaggatctgcccaactgcgtgcgcacgggtccaaagtggtagccgctgtcggggatgctgttaagtcgattgatgatattggcggtgcactgtccaagttgagcgagctacacgcttacattctgcgcgtggaccccgtcaactttaaactgctgagccattgtctactggtaacgctggccgctcgtttccctgccgactttacggcagaagcccatgcggcatgggacaagtttttatccgtcgtttccagcgtcctcaccgaaaaatacaggtag

SEQ ID NO: 225892 - DNA, 1389 bp, synthetic construct
  misc_feature 1..1389: note = Description of Artificial Sequence: Synthetic coding sequence
  source 1..1389: mol_type = other DNA
atggcccgagttctgggcgcaccagtggcgttgggcctatggtccctgtgttggagtctggccatagccactcctctgccccctacatcagcccacgggaacgtagcggagggcgagactaagcctgatcctgacgtgacagagcgttgcagcgacggttggagcttcgatgcgacaaccctcgatgataacgggaccatgcttttttttaagggagaattcgtgtggaaaagccacaagtgggatcgggagctgatttccgagaggtggaagaacttcccttcaccagtcgacgccgcatttaggcaggggcacaattctgtcttcctcatcaaaggagacaaggtttgggtctatcctcccgaaaagaaggaaaaaggctatcccaaattattacaggatgagtttcctggcatccctagtcctcttgatgccgcagtggagtgccacaggggcgaatgccaggcagaaggagtgctgttttttcaaggcgatcgcgaatggttctgggatcttgctacaggtacaatgaaggagcgatcttggccggcagtcgggaactgtagtagtgcgctcagatggctcggcagatactattgcttccaggggaaccagtttcttcggttcgaccccgtgagaggcgaggtacctcccagataccccagagacgttcgcgactacttcatgccctgccccggacgcggacatggccaccgaaacggtaccggacatggaaactcgacacaccatggacccgagtacatgaggtgttccccacatctggtcctgagcgctttgacttccgataatcacggtgctacatacgccttctccggtacccactactggagactggatacgtccagggacgggtggcactcctggcctattgcgcaccaatggccgcagggaccctccgccgttgacgcagctttttcctgggaagagaagctttatctcgttcagggcacccaagtgtatgtttttctgacaaaaggcggatataccctggtgtctggttatcctaagcgactggagaaggaggtgggcacaccacatggcattatcctggattctgtggatgccgcttttatctgtccaggatcctcccgcctccacatcatggcgggacgacgactatggtggctggacctcaagagcggggcacaggctacttggactgagcttccatggccccacgaaaaagtggacggtgccctgtgtatggaaaaaagtctaggaccaaactcctgcagcgcgaacggccctggcctttatctgatacatgggccaaacctctattgctattcagatgttgagaaactgaatgcagcgaaagccttgcctcaacctcagaacgtcacatctctcttgggctgtactcactag

SEQ ID NO: 225893 - DNA, 765 bp, synthetic construct
  misc_feature 1..765: note = Description of Artificial Sequence: Synthetic coding sequence
  source 1..765: mol_type = other DNA
atggctcgcgtgctaggcgcaccagttgctctcggcctctggtctttgtgctggtcgctggccatcgctacgccacttccgccaactagtgcccacgggaatgtagccgaaggagaaacgaaaccagaccccgacgtgaccgagagatgcagcgatggctggtcttttgacgccacaacactggatgataacgggactatgctgtttttcaaaggagaattcgtgtggaaatcccacaagtgggatagagaattaatctcggaaaggtggaaaaacttccccagcccagtggatgcagccttcaggcaggggcataactcagtttttttaattaagggtgacaaggtttgggtttatccccctgagaagaaggagaaaggctaccccaaacttctccaggatgaattcccaggcataccctcaccactggacgccgctgtggaatgccacagaggtgagtgtcaggccgaaggggtgctgttttttcaaggagaccgtgagtggttttgggacctggccacaggaacaatgaaagagaggtcctggcccgcagtgggcaactgtagttccgcactacgttggcttggaagatattattgtttccagggcaatcagtttctacggttcgacccagttcgcggtgaggttcctcctaggtaccctcgagacgttcgggactatttcatgccctgccccggacgtgggcacggacataggaacggcacaggacacggaaactcaatatgcgctgtggcccacatctag

SEQ ID NO: 225894 - DNA, 1353 bp, synthetic construct
  misc_feature 1..1353: note = Description of Artificial Sequence: Synthetic coding sequence
  source 1..1353: mol_type = other DNA
atgtggctaaaggtgtttaccacttttttgtctttcgccacaggcgcttgttctgggctcaaggtaaccgtcccatcccatacagttcatggggtgagaggccaggccttgtaccttcccgttcattatggcttccataccccagcaagcgacatccaaattatctggctcttcgagcgcccacataccatgcctaaatacttgttaggctccgtgaacaagtctgtcgtgccggatctggagtaccagcacaagttcactatgatgccgccaaacgcctcactgttaatcaaccccctacaattcccagatgaggggaattacatcgtcaaagtaaacatccagggcaacgggacccttagcgcttcccagaagatccaggtgaccgttgacgatccagtgaccaaacccgttgtgcaaattcaccctccctccggggctgtggaatacgtggggaatatgaccctgacctgtcacgtggagggcggaactcggttggcatatcagtggctgaaaaatggccgacctgtgcacacctcgagtacctattcgttttcaccccagaacaacactctgcacattgcacctgtaaccaaggaagacatcggcaattatagttgccttgtgcggaatcctgtgtccgaaatggaatccgacattattatgccgatcatttactacggcccttacggactccaggtgaatagtgacaaggggctcaaggtaggtgaagtgtttaccgtcgatctgggtgaagcaatactgtttgactgcagtgccgatagccatccccctaacacatattcgtggatccgaaggactgataatacgacctacattatcaagcacggaccacgcctggaggtcgcttctgaaaaagtagcccaaaagactatggactacgtgtgttgcgcatacaacaacattaccggtaggcaggacgagacccattttaccgttattattactagcgtgggtctggagaagctggcacagaaagggaagtcactttcccccctagcctctatcaccggtatctctttgttcttgatcatcagcatgtgtttgctgttcctgtggaagaaatatcagccttataaggtaatcaagcagaagcttgaaggtcggcctgaaactgagtatcgcaaggcccagaccttcagcggacatgaagacgctttggatgatttcgggatctacgagttcgtggcctttcccgacgtctccggcgtctctaggattccttcaagatctgtgccagcgtctgattgtgtctcaggccaagatctgcattccaccgtctatgaagtaattcagcatattccagctcaacagcaggaccaccccgagtag

SEQ ID NO: 225895 - DNA, 1389 bp, synthetic construct
  misc_feature 1..1389: note = Description of Artificial Sequence: Synthetic coding sequence
  source 1..1389: mol_type = other DNA
atggggcaagatgcttttatggagccatttggggataccctcggggttttccagtgcaagatttacctgctgctgttcggggcttgctctggactcaaggtgactgtgcccagtcacactgtgcatggcgtccgaggccaggccctctatctccctgtgcattacgggtttcatacacctgcaagcgatatccagatcatatggcttttcgaacgccctcataccatgccgaagtacttgctcggatcagtgaataaaagtgtcgtgccggatttggagtatcagcacaagttcacgatgatgccccctaacgctagcctgctcattaaccccctgcagtttcctgacgaaggaaactacattgtcaaggtaaatattcagggaaacggtactctgtctgccagtcagaaaatccaggttacagttgacgaccccgtgacaaaacccgttgtccagatacatcccccaagcggggcagtggagtacgtaggaaacatgacgttgacatgtcatgtcgagggaggaaccaggttggcatatcaatggctgaagaacggacgccctgtgcacaccagctctacttattccttttccccacagaataacactctgcatatagcgccagtgaccaaagaggatattggcaattattcctgcctcgtgaggaaccctgtatcagaaatggagtccgatataattatgccaataatttactacggtccgtatggactgcaggtgaatagcgataaaggtttaaaggtgggagaagttttcactgttgacttaggtgaggcaatcctctttgattgtagtgcagactctcaccccccaaacacatactcttggattaggaggaccgacaataccacctacatcattaaacacgggcctcgactagaggtggccagcgaaaaggtcgcacagaagacaatggattatgtctgctgtgcctacaacaatatcacagggagacaggatgagactcacttcaccgtgatcattaccagtgtcggtctggagaagttagctcagaagggcaaatctctctcaccactggcttcaattacaggcatttccctgtttctcattatcagtatgtgtctcctttttttgtggaagaaatatcagccttacaaggttatcaaacagaaacttgaggggagacccgagaccgagtaccggaaggcccaaacattttctggccatgaagatgccttggatgatttcgggatttatgagttcgtggcttttccagacgtctcgggggtgtcacgaatcccttcaaggtcggtcccagcatctgattgcgtgagtggtcaagacctacatagcaccgtgtatgaggtgatacagcatattccagcgcaacagcaggaccatcctgagtag

SEQ ID NO: 225896 - DNA, 1104 bp, synthetic construct
  misc_feature 1..1104: note = Description of Artificial Sequence: Synthetic coding sequence
  source 1..1104: mol_type = other DNA
atggcctatagggtgctgggcagagccggtcctcctcagcctaggagggcacgacgtctgctttttgcgttcaccctttctctgagttgcacctatttgtgttactcattcctctgctgttgtgacgatctgggacgaagtcgcttgttaggcgcacccagatgtctgcggggtccaagcgcgggaggacagaagctcctacagaagtcccgaccgtgcgacccatccggcccaacaccctctgagccatccgccccaagtgcgcctgccgcagctgtgcccgcacccagattgagcggctccaaccattctggcagccccaaactgggaactaaacggctgccacaggccctgatcgtgggcgtgaagaagggcggaactagggccgtccttgagttcatcagagtgcaccccgatgttcgggcactggggactgagcctcacttttttgatagaaattatggtcgcggattagactggtacagatcactaatgcctaggaccctggagtcccagataactttggaaaaaacgccaagttacttcgtgactcaggaagcgcctcgaagaatcttcaatatgagccgagatacgaagttgatcgtagtcgtgagaaatcctgtgacacgggctattagtgattatacccagaccttatccaagaagcccgatatacccacgttcgagggtcttagttttcggaataggaccctgggcctggtggacgtaagttggaatgcaatacgcatcggaatgtacgtgttacatctagagagctggttgcaatactttcccctggcacagattcacttcgtttcgggcgagagactgattacggaccctgcgggagaaatgggaagagttcaggactttctgggaattaaacggttcattacggataagcatttctattttaacaaaactaaggggtttccttgcctgaaaaaaactgagagctccttgctgccccgttgcctgggtaagagcaaggggagaacacatgtgcagattgaccctgaagtgatcgatcagctaagggaattttaccggccttataacattaagttctacgagactgtggggcaggatttccggtgggaatag

SEQ ID NO: 225897 - DNA, 1035 bp, synthetic construct
  misc_feature 1..1035: note = Description of Artificial Sequence: Synthetic coding sequence
  source 1..1035: mol_type = other DNA
ccaccggctcgcgcacacggggcaatggcatacagagtgctgggtagggccggtcctcctcagcccagaagagccaggcggctgctttttgcctttacactatcattgtcttgcacctacctctgttactcttttctgtgttgctgtgatgatctggggagatcgagactacttggcgctcctagatgcctgaggggcccatctgcagggggtcagaaactcttacagaaatcccgcccttgtgatccctccggcccaaccccgtcggagccttctgcaccatcagcccctgctgccgcagtgcccgctccacggttgtccggctccaaccattcaggatcgcccaagctgggaaccaagagactacctcaagccctgattgtcggagtgaaaaaggggggaacccgggcagtgctggaattcatccgggtacacccagatgtacgggcactaggcactgagccacatttcttcgacagaaattatggtcggggtctggattggtaccgttcattgatgccacggacactggagagtcagatcaccctcgagaaaacacccagttacttcgtgacgcaggaagcccctcgacggatcttcaacatgagccgcgatacaaaattaatcgttgtcgttaggaaccctgtgaccagggccatatccgactatacacaaacgctgtctaaaaagccagacattcctacattcgaggggttatcgtttagaaatagaacactgggcctggtcgacgtgtcgtggaacgctatacgcattggcatgtacgtactacatcttgaatcttggttgcagtacttccccctcgcgcagatccacttcgtgagtggcgagcgactgataaccgacccagcaggagagatgggcagagtccaggattttcttgggataaagcggtttatcaccgacaagcatttctactttaacaagactaaaggattcccatgcctaaagaaccgcatagaaccccctgccagcatgctgggccagatcaaaagggaaaattcctgcaccgattag

SEQ ID NO: 225898 - DNA, 1221 bp, synthetic construct
  misc_feature 1..1221: note = Description of Artificial Sequence: Synthetic coding sequence
  source 1..1221: mol_type = other DNA
atggcacctcctggcccagcctcagctttaagtacttcagcggagcccctgagccggagtatttttcggaaattcctgctgatgctctgctccctcttgacctctctttatgtcttttactgtcttgcagagcgatgtcagacactctcaggacctgtggtggggctctctggtgggggtgaggaggccggagcccctgggggaggagtcctcgccggaggcccacgggaactggcggtatggcctgctgcggcacagcggaaacgattgttgcagcttccgcagtggcgcagaagacggcctcccgcaccgagagatgacggggaggaggccgcatgggaggaagagtctcccggtctcagcgggggacctggcggaagcggcgctgggagtacagtcgccgaagctcctccaggcacccttgcgctcctgttagacgagggatccaaacagctcccacaggccattataataggggtgaaaaagggcggaacacgcgctctattggagtttctcagggtgcaccctgacgtacgcgctgtaggggctgaaccacacttcttcgatagatcttatgataagggcttagcatggtaccgggatctgatgccaaggacattagacgggcagattactatggaaaaaactccttcttactttgttaccagagaggcaccggctagaatctcagccatgagcaaggacacaaaacttatcgtggttgttcgtgatccagtaactagggcgatctccgactacacgcagaccctgagcaagcggcctgacattcctaccttcgagagcttgacattcaagaataggactgctggccttatcgacacctcttggtccgctattcagatcggcatttatgccaaacacctcgagcactggcttaggcatttccccattaggcaaatgctcttcgtgtcgggggaacgacttatatccgatcccgctggcgagcttggaagggtgcaggatttcctcggactgaaaagaatcatcactgataagcatttttatttcaacaaaaccaaaggcttcccctgtttgaagaaagccgaaggctctagtaggccacactgtttggggaagaccaaggggcgaacccaccccgagatcgatcgggaggtggtgcggagactgcgagagttctatagaccattcaacctgaaattctatcagatgacaggccatgatttcgggtgggacgggtag

SEQ ID NO: 225899 - DNA, 1173 bp, synthetic construct
  misc_feature 1..1173: note = Description of Artificial Sequence: Synthetic coding sequence
  source 1..1173: mol_type = other DNA
atgggacagagactgtcaggcggaaggtcttgtctggatgtccctggacggcttttgccccagccccctcctccgcctcctcccgtgagacgaaagctcgctctgcttttcgctatgctatgtgtgtggctttacatgtttctatacagctgtgctggctcctgcgctgctgccccaggactactgctgttggggtcaggaagtcgagcggcacacgacccccctgcactcgccactgcccctgatggaactcccccacgactcccatttcgtgcaccacctgcgacccccttagcctccggaaaagagatggccgagggcgctgcttcccccgaggagcagagtccagaggtgcctgacagcccctcgcctatttctagctttttttctgggtccggttccaagcaattgcctcaggctattatcatcggcgttaagaaggggggaacccgggctctcctggagttcttgcgtgtccacccggacgttagggcggtcggcgctgaacctcacttttttgaccgctcttacgataagggccttgcgtggtaccgagacctgatgcctaggaccctcgacggacagataacaatggaaaagacaccgtcttatttcgtgactagggaggccccagcacggatctctgcaatgtctaaagataccaaacttatagtagtggtcagggatcccgtcacaagggccatcagtgactacactcagacattgagtaagcgtcccgatattccaaccttcgagagccttacgttcaagaaccgcactgcaggactcatcgatacctcatggtccgctattcaaattggcatttacgcaaagcacctggaacattggctccgtcattttccaatccgccagatgctcttcgtctctggagagcgcttgatctcggatccggcaggagaactcggcagagtgcaagacttcctaggcctgaagagaattataaccgacaagcacttttatttcaataagacaaaaggttttccatgtctgaaaaaagccgaaggatcaagcagacctcattgtcttgggaaaaccaaggggagaacgcaccctgaaatcgaccgagaggtggtgcgcaggctgcgcgagttttatcgaccattcaacctgaagttttatcagatgacagggcacgattttgggtgggactag

SEQ ID NO: 225900 - DNA, 1173 bp, synthetic construct
  misc_feature 1..1173: note = Description of Artificial Sequence: Synthetic coding sequence
  source 1..1173: mol_type = other DNA
atgggccaacggctcagcgggggtaggtcatgtctggacgttcccggtaggctccttcctcagcccccaccacctcctccgccagtgaggcgcaaattggcacttctgttcgccatgctgtgcgtgtggttgtatatgtttctctactcttgtgccggttcctgtgctgccgctcctgggcttctactactgggttccggtagccgcgctgcacatgacccacccgctctggcaaccgccccagacggcactcctccaaggctcccgtttagagctccccctgccacccctctagccagcgggaaggagatggccgagggcgctgcatccccagaagagcaaagccctgaggttcccgattcccccagccctatttcttcattcttttccggaagtgggtccaagcaacttccccaggccatcattatcggagtaaagaagggcggtacccgcgcacttcttgaatttttaagggtgcatcctgacgtacgggctgttggagccgaaccacattttttcgaccgatcctatgacaaaggactcgcatggtaccgggatctaatgcccaggactttggatggccaaatcacaatggagaagacgcctagttactttgtcacccgtgaggcccctgcaagaatctccgctatgtctaaagatacaaagctgatcgtggtcgtgagggatcccgttactcgggctataagtgactacactcagaccctgtcaaaacggccagatatccccacattcgagtccctcaccttcaagaatcggacagcgggactgattgacacatcctggtctgctattcaaatcgggatctacgcgaaacaccttgagcactggctgagacatttccccattaggcagatgctattcgtctcgggggagagactcatttccgatcccgcaggggagctggggcgtgtccaagattttcttgggttgaaaagaatcattacagacaagcatttctacttcaacaagacaaaagggttcccttgccttaagaaagccgagggcagtagcaggccacattgcctcggcaaaacaaagggacgaacacatcctgaaatagatagagaagtcgtcagaaggcttcgggagttctatcggccattcaacctgaaattttaccagatgaccgggcatgatttcggttgggattag

SEQ ID NO: 225901 - DNA, 1371 bp, synthetic construct
  misc_feature 1..1371: note = Description of Artificial Sequence: Synthetic coding sequence
  source 1..1371: mol_type = other DNA
atggctcggtggcccgcacctccccctccgccacctccgcctcctccactggcggctccccctccacccggagcttctgccaagggccctcccgctcggaagctgctgttcatgtgcacgctcagtctgagcgtgacgtacctgtgctacagccttttggggggatccgggagtctccagttccccctggcattgcaggagtctcccggagcggcagcagagcctcctccttctccacccccaccctcactcctgcctaccccagtgaggctaggagccccttcccagcctcccgctcccccacctttggataacgcctctcacggcgagccaccagagccacctgaacagccggctgcaccgggaacagacggatggggccttccttcaggcggtggcggagcccaggacgcttggctcagaaccccactcgctccttcggaaatgatcaccgcacagagcgctctccctgagcgggaggcacaagagagtagcactaccgatgaggacctggcgggacgaagagcagccaatggatctagcgagcgcggaggcgctgttagcactcccgattacggggagaagaagttaccacaggctctgattatcggtgtcaagaaaggtggtacacgggctttactggaagctatccgggttcaccctgatgtacgcgctgtcggagttgagcctcacttctttgaccgaaactacgagaaggggttggaatggtaccgcaatgtgatgcctaagacgctggacggtcagattaccatggaaaagacgcctagctattttgtaacaaacgaggcccctaaaagaatccatagtatggctaaggacattaaactcatcgtcgttgtgagaaacccggtcaccagggccatcagcgactatacacagacactctccaagaagcccgagattccgaccttcgaggtgttggcttttaaaaaccggacattgggcctcattgatgcctcatggtccgcaatacgaatcgggatctacgcacttcatctcgagaactggctccaatactttcccctttcgcaaatattgtttgtgagcggggaaaggttaatcgttgatccagctggggaaatggctaaagtgcaggattttcttggactgaagcgggtggtaacggagaagcatttctattttaataagacaaagggatttccctgtctaaagaagcctgaagacagctccgcacctcggtgcctgggcaagtctaagggaagaactcacccacggatagatccagatgtgatccaccggctaaggaagttttacaaacctttcaatctgatgttttaccaaatgaccggccaggactttcagtgggagcaggaagagggagataaatag

SEQ ID NO: 225902 - DNA, 1041 bp, synthetic construct
  misc_feature 1..1041: note = Description of Artificial Sequence: Synthetic coding sequence
  source 1..1041: mol_type = other DNA
atgcttttcaaacagcaagcttggctgaggcaaaagctccttgtgttgggaagtcttgcagtggggagtctcctatatctcgtggccagggtgggaagcctcgataggcttcaacccatttgcccgatcgaaggcaggctgggcggagctaggacccaggccgagttcccccttcgggctctgcagttcaaaagaggtcttcttcacgaatttcgaaaaggcaatgcatctaaagaacaggtccgcctccacgatctggtgcagcagctcccaaaggccattataatcggcgtgaggaaaggaggaacacgggcactattggaaatgctgaatcttcacccagctgtcgtcaaagcttctcaagaaatccacttcttcgataacgacgaaaactatggaaagggtatcgagtggtatcgtaagaaaatgccatttagctacccccagcagatcacaatagagaagagcccagcctacttcatcactgaagaagtgcctgagcgtatctacaagatgaacagtagtataaaacttctgattatagtgagagaacctaccacgcgggcaatcagcgactatactcaggtgttagagggaaaagagcgtaaaaacaagacctattataaattcgagaaactggcaatcgacccaaatacctgtgaagtgaacaccaaatacaaagctgtccgcacttccatttataccaaacacctggagaggtggctaaaatacttccccatcgaacagtttcatgtagttgatggggaccgtctgattaccgagccgttgcctgaacttcaattggtcgaaaaatttctcaatcttccccctcgcattagtcaatataatctttattttaacgccacccgcggtttttattgtctccgctttaacatcatcttcaataagtgcctcgccggaagcaagggaaggatccacccagaggtcgacccaagtgtcataaccaaactccggaagttttttcatcctttcaaccaaaaattctaccagataacaggtcgcacactgaattggccttag

SEQ ID NO: 225903 - DNA, 1041 bp, synthetic construct
  misc_feature 1..1041: note = Description of Artificial Sequence: Synthetic coding sequence
  source 1..1041: mol_type = other DNA
atgcttttcaagcagcaggcgtggctgcgacagaagttgctcgtgcttggaagcctggctgtggggtctttgctttacctggttgccagggttggctccctcgatagactgcagccaatctgccccattgagggccgactgggaggagccaggacccaggccgaatttcctctgagagcccttcagtttaagcggggactgctccacgaatttcgcaagggaaacgccagcaaggagcaggtacgcctgcacgatctggtccaacaactcccaaaggcaattataataggagtccgaaaaggcggtactcgagctcttctggaaatgttaaatctgcatccggcagtggtaaaagccagtcaggaaatccacttcttcgataacgatgagaactatgggaagggaatcgaatggtatcggaagaaaatgcccttctcttaccctcagcaaataacgatcgaaaaatctcctgcttactttattaccgaagaggtgccggaacgcatctacaaaatgaatagttcaatcaaactccttataattgtacgtgagcccactacaagggccatctccgattacacacaggttctcgagggcaaggagagaaaaaataagacttactataagttcgaaaagctggctatcgatccgaatacatgcgaggtgaacactaaatacaaggccgtgcgcactagtatttacaccaagcacctagagcgctggctgaaatactttcctattgaacagttccacgttgttgacggagacaggctgatcaccgaacctctgcctgagctgcaactcgtagagaagttcttaaacttgcctccgcgtatctcccagtacaatctttactttaacgccactcgtggattttactgtctccggttcaacatcatttttaacaagtgcctggctggatccaagggcagaatccatcctgaggtggatccatccgtgatcacaaagttaagaaagttttttcatccttttaaccagaagttttatcagatcactggcagaaccctcaattggccttag

SEQ ID NO: 225904 - DNA, 969 bp, synthetic construct
  misc_feature 1..969: note = Description of Artificial Sequence: Synthetic coding sequence
  source 1..969: mol_type = other DNA
atgctcttcatcaagtttattcatctggaggtgtttagcatgcccgagagggccattgctagacatgaagtccgggaaattgaacaaaggcataccatggatggtcccagacaagatgccacactggacgaagaggaagatatggtgatcatctataatcgggtcccaaaaacagcttccacatccttcaccaacatcgcttatgacttgtgtgccaaaaataagtaccatgtgctgcatataaatactactaagaacaaccctgtgatgagcctccaggatcaggtgagattcgtgaagaacattacatcttggaaagagatgaagcccggattttatcacggacacgtgagttacttggacttcgccaaattcggtgtgaagaagaagcccatctacattaatgtcattcgggacccaatagagaggctggtgtcctattactactttctgagatttggagatgattatcgcccaggcctgaggcgtaggaagcaaggtgataagaaaacgttcgatgaatgcgtggcggaagggggtagcgattgcgcccctgagaagctgtggcttcagatcccgttcttctgtggtcatagttctgagtgctggaatgtgggttcgcgctgggccatggatcaggccaagtataatcttatcaacgaatacttcctggtcggagttacagaggagctggaagattttatcatgttgttagaagcggctctgcccagattctttcggggagcgacagaattatatcgcaccgcacccgataccgctaccccttcccaccgacacggcccaatttgtggcagcaagtctatttcttcactgctcgtcaaggtatctcccgtgtgcaaggattcacactgccactgcaggcggggaactgggactcccaaaggcgagacattagccaccctggctccttgttcccagagctggtcttctgtaacccatagatggtag

SEQ ID NO: 225905 - DNA, 912 bp, synthetic construct
  misc_feature 1..912: note = Description of Artificial Sequence: Synthetic coding sequence
  source 1..912: mol_type = other DNA
atgctgttcatcaagttcatccacctagaggttttctctatgcccgagcgcgctattgcacgccacgaggtgcgtgagatcgagcagaggcataccatggacgggcctaggcaggatgcaacactggacgaagaagaggacatggttatcatttacaatcgtgtccccaaaacagcctctacttcctttactaacatcgcatacgacctgtgcgctaaaaataagtatcatgtcttgcacattaacacaacgaagaacaatccagtgatgtcattacaggaccaggttcggtttgtcaagaacatcacctcctggaaggaaatgaagcctgggttctatcacgggcatgtttcttacctcgacttcgccaaatttggggtcaagaaaaaacctatatacattaacgttatccgcgaccccatcgagcgtttagtatcatattattacttcttacgtttcggagacgactacagacctggtcttaggaggcgaaaacagggggacaagaagacatttgacgagtgtgtcgcagaggggggatctgactgtgcccctgaaaaactctggctgcagatcccgttcttttgcggtcactcctccgagtgttggaatgttggaagcagatgggctatggaccaggctaagtacaatctgatcaatgaatactttctggtcggggtgacagaggagctggaggatttcatcatgctactggaagcggctctgccccgtttctttcgtggtgctaccgaattgtataggaccgcgccagacaccgctactccatcccatcggcatgggccaatctgtggatctaaatcaatatctagccttttggttaaagtttcccccgtttgcaaagattcccattgtttgggtaagtgcagtcgcaacggcctgagtgctgtgtag

SEQ ID NO: 225906 - DNA, 1071 bp, synthetic construct
  misc_feature 1..1071: note = Description of Artificial Sequence: Synthetic coding sequence
  source 1..1071: mol_type = other DNA
atgggcttgctgaggatcatgatgcctccgaagctgcaactgcttgccgtggtggcattcgcggtcgcaatgctgttcctggaaaaccagatacagaagttggaggaatccaggtcgaagcttgagcgagctattgcacggcacgaagtgagagagattgagcagaggcacactatggacgggccacgtcaagatgcaactttagatgaggaagaggatatggttattatatataaccgagtgcctaagacagcgtcgacttcgtttaccaatattgcttacgacctgtgcgccaaaaataaatatcacgtgctccacatcaatactacaaagaataacccagtaatgtcccttcaagaccaggtgcgctttgtaaagaacattacttcctggaaagaaatgaagcctggcttctatcacgggcatgtgtcatacctcgactttgccaaattcggcgtcaaaaagaagcctatatatatcaatgtgattagagacccaatcgagcgactggtgtcatactactatttcttgaggttcggggacgattaccgacccggactaagacgccgaaagcaaggcgacaagaaaactttcgacgaatgtgtggctgaaggaggttctgactgtgcccctgaaaaactctggcttcaaatccctttcttctgtggacactcctctgagtgctggaatgtgggttccagatgggccatggaccaggccaagtacaatcttatcaacgaatattttctggtcggcgtaacagaggagctagaagactttattatgctactcgaggcggcactgcctaggttttttcgtggtgccactgagctgtaccgaacgggcaaaaaatcccacctccggaagaccacagagaaaaaacttccaacaaaacagactatcgccaagctgcagcaaagcgatatctggaaaatggaaaacgagttctatgagtttgccttggagcaatttcaattcattcgcgctcacgctgttagggaaaaggatggcgacctgtatattcttgcacagaattttttctatgagaaaatctaccccaagagcaactag

SEQ ID NO: 225907 - DNA, 690 bp, synthetic construct
  misc_feature 1..690: note = Description of Artificial Sequence: Synthetic coding sequence
  source 1..690: mol_type = other DNA
atggggctcctgcggatcatgatgccaccaaagttacaactactggcagtggttgccttcgccgtggcgatgctgttcctggaaaatcagattcagaaactagaggagagtcggtccaaactcgagagagctatcgctcggcacgaggtgagagagatcgagcagaggcacaccatggacgggccaagacaggacgcaacacttgacgaagaggaagacatggtgattatctataatcgggttccgaaaactgccagcacttcattcaccaatatcgcgtacgacttatgcgcaaaaaataagtatcacgtattgcacatcaacaccaccaaaaataatcccgtgatgagcttgcaagaccaggtcagatttgtaaagaatattacctcctggaaagaaatgaagcccggtttttatcacggacatgtcagttatctcgatttcgccaaattcggtgtcaaaaagaagcccatctacattaacgttatcagagaccctattgagaggcttgtcagctactactacttcctccgcttcggggacgattaccggccaggattacgcaggcgcaagcaaggagacaagaagaccttcgatgagtgcgttgctgagggcggatccgactgtgcgccagaaaaactgtggctgcagataccgtttttctgcgggcattcttccgagtgttggtag

SEQ ID NO: 225908 - DNA, 1236 bp, synthetic construct
  misc_feature 1..1236: note = Description of Artificial Sequence: Synthetic coding sequence
  source 1..1236: mol_type = other DNA
atgcgcagacgccgtgcagggggtagaacgatggtcgaacgcgcttccaagttcgttctagtcgtggccggttccgtatgcttcatgctgatcctctaccagtacgctgggcctggacttagcctcggggctcccggaggtcgcgcaccccctgatgatcttgacctgttcccaacaccagaccctcattacgaaaaaaagtactattttcccgtgagagaactggaacgctcactacggttcgacatgaagggtgacgacgttattgttttcctccacatccagaagacagggggaaccacttttggaagacatctggtgcagaacgttagactcgaggtgccatgtgactgtaggcctggacagaaaaaatgcacctgctaccggccaaatcgtcgcgaaacttggttattctcccgttttagcacaggatggagttgtggcctccatgccgattggactgagctgacgaactgtgtgccgggagttctcgatagaagagacagcgctgccctacgaactccacgaaaattttactacattacattgctgcgcgaccctgtgagtaggtacctcagtgaatggaggcacgtccagagaggcgcaacttggaagacttccctgcatatgtgtgacggaaggactcccactcccgaggaactcccaccgtgttacgagggcactgactggtctgggtgcacgttacaggaatttatggactgcccatacaatctggccaacaatagacaggtccgcatgcttgctgacctctccctagtgggctgctataacctctcatttattcctgaagggaagcgggcacagttgctgttagagtcggctaagaagaatctgagaggcatggcgtttttcgggctgacagaatttcagcgcaagacacagtacctgtttgagcgcacattcaatctgaagttcataagacccttcatgcaatataattccacacgcgctggcggagtggaggtggatgaagatacaatacgcagaatcgaagaactgaacgacctagacatgcaactctacgactacgcaaaggatttatttcaacaacgataccaatacaaacggcagctcgaacgacgcgagcaacgcttgcggtcccgagaggaaagactgctgcacagggccaaagaggccctgcctagggaggatgccgacgagccaggccgagtgcctaccgaggattatatgagtcacatcatcgagaaatggtag

SEQ ID NO: 225909 - DNA, 831 bp, synthetic construct
  misc_feature 1..831: note = Description of Artificial Sequence: Synthetic coding sequence
  source 1..831: mol_type = other DNA
atgcttttcttgtttgccgtaattgttttgcagtatgtctgtcctggtacggaatgccaactcctgcgcctacaagctttcagttcgcccgtgcctgacccctaccggagcgaggatgagtctagcgcaagatttgtcccacgatacaactttacccggggagacctcctccgaaaggttgacttcgatatcaagggagacgatttgattgtgttcttgcacattcagaagaccggcggtacaacttttggaagacacctcgtcagaaacattcagctggagcagccctgcgagtgccgagtgggacagaagaagtgcacctgccatagacccggaaagcgggagacgtggctgtttagtcgtttctcgacgggctggagctgtggtctgcatgcagattggacggaactcacatcttgtgtcccaagcgtagtagacggcaaacgagatgctcggctccgaccttccagatggcggatctttcagattctcgacgctgcttccaaagacaagcgtgggagcccgaatacgaacgcgggagccaactctcccagctccacaaagacacggaacaccagcaaatctggtaagaacttccactatattacgatcctgagagacccagtgtcccggtacctgtccgagtggaggcatgtccagagaggagccacgtggaaggcctcccttcacgtgtgcgatgggaggccccctacctcagaggaattgcctagttgctatacaggcgatgactggtctgggtgccctctcaaggaatttatggattgcccctataatcttgccaacaacaggtgcgcctgcagcccaacctag

SEQ ID NO: 225910 - DNA, 1389 bp, synthetic construct
  misc_feature 1..1389: note = Description of Artificial Sequence: Synthetic coding sequence
  source 1..1389: mol_type = other DNA
atggacgagaagagtaataaattgctgttggctttggtgatgctatttctgttcgccgtcattgttctccaatatgtgtgccctgggaccgagtgccaattgctccgtttacaggccttttcctcacctgttcctgatccataccgatcagaggacgaaagctccgctagatttgtgccgagatataactttaccaggggagatctactgaggaaggtagattttgacatcaaaggcgatgatttgattgtctttctgcatattcaaaagactggagggactaccttcggacgccacttggtacgtaacatacagctcgagcagccctgcgaatgtcgggtagggcagaagaaatgcacatgtcaccggccagggaaacgcgaaacttggttgttctctagattttcaacaggctggtcttgtgggttacacgccgactggacagagttgacatcctgcgtgcccagtgtggtagatgggaagagagatgctcgacttcggccatcccgctggaggattttccagattctcgatgccgcaagcaaagacaagcgagggtcacccaacactaatgccggagccaatagtccctcctctaccaagacccggaacacatcaaagagcgggaaaaactttcactacatcaccatactaagggatccagttagccggtacctgtctgaatggagacacgtgcaaaggggggcaacctggaaggcaagcctacatgtttgcgacggcagaccaccaacttccgaggaactgccatcctgctataccggcgacgactggtctgggtgtccccttaaggaatttatggactgcccttataatctggccaataacaggcaggttaggatgctctccgatctgactcttgtgggatgctacaacttgtcagttatgccagaaaagcagcgtaataaagtcctgcttgagagtgccaaatctaatctgaaacatatggctttctttggcctgacagagtttcagcgcaagacccagtacctgtttgaaaagacctttaatatgaactttatttccccattcacccagtataataccactcgagcaagctctgtggagattaatgaagagattcagaagcgcatcgaagggctgaactttctggacatggaactgtacagttatgcgaaagatctgttcctgcagcgttatcaatttatgcgccagaaagagcatcaagaggcgcgtcgtaaacggcaagaacagcggaaatttctgaaagggaggctgctccaaacccactttcaatcacagggtcaaggtcagtcacagaaccccaaccaaaatcagagcaaagaacagaatgacaatactagtaacgggacgaacgactacatcgggagcgtagagaaatggaggtag

SEQ ID NO: 225911 - DNA, 1818 bp, synthetic construct
  misc_feature 1..1818: note = Description of Artificial Sequence: Synthetic coding sequence
  source 1..1818: mol_type = other DNA
atggccctgcccgcttgtgctgtcagagaatttgaaccacctagacagccagaaaggggcgctcccgtgagaaccacatgtccccgaaggcattctagagtcgaagctgagttggctgcaagtagaccaggttctgtggccgcatctgtgagggccggtccacccaggggagtgagccacgggtttcacacacgcccactgctggataaacccagaaaggcatcttccagtctggccggagcagcttgcgctccactgtttgccctgctatctaggggcaggcgaagacgaatgcacgtactgcggaggcggtgggatttaggatcactgtgccgagccttgctaactaggggtctggctgctctgggccatagcctcaagcacgtgctgggggctatcttctctaagatcttcgggccaatggcttctgtgggaaatatggacgaaaagagcaataagctcctgctcgccctagtgatgctgttcctgtttgcagtaatcgtccttcaatacgtgtgccctggcaccgaatgtcagctgctgaggctgcaggcattctcctcacccgtgcccgacccttataggtccgaagatgagtctagcgcccgttttgtgccacgctacaactttactaggggcgacctgctgcgcaaggtggactttgacatcaagggcgatgatcttattgtgttcctccacatacagaagacgggtggcacaacctttggtcggcatcttgttaggaatattcagctcgaacagccttgcgagtgtagggtaggacagaagaaatgcacttgccatagacctggaaagagagaaacctggctttttagccgattcagcaccggctggtcttgtggtttacacgctgactggaccgaattgacatcctgcgtcccctccgtggtcgatggcaaacgcgatgctaggcttagaccctccaggaactttcactatatcaccattcttcgagaccccgtctcccgatatttgtcggagtggcgacatgtccagcggggagctacctggaaggcctctcttcacgtttgtgacggacggcctcccacatcagaggagctaccctcttgttatactggcgatgattggagcggctgccccttgaaagagttcatggactgcccctataatctggccaacaatcggcaagtcagaatgttgtccgacttgacattggtaggatgctacaacctgtcagtgatgccagagaagcaaagaaataaagtgctactcgaatctgctaaatcaaacctgaaacacatggctttctttggcctgaccgagttccaaaggaaaacacaatacttgttcgagaagactttcaacatgaactttatctccccttttacccagtacaatactacaagagcctcctccgtggaaataaatgaggagatccaaaaacgcatcgagggactgaattttctagacatggaactgtacagctacgctaaggatctatttctgcaacgttaccagtttatgaggcaaaaagagcatcaagaagctcggaggaagagacaagagcagcgcaaatttttgaagggtcggttgttacaaacccacttccagtcccaagggcagggtcagtcacagaatcctaaccagaatcagtcacaaaaccccaacccgaacgctaatcaaaaccttactcagaacctgatgcagaacctgacccagtctttgagtcagaaggaaaaccgcgaatctccaaaacagaactcagggaaggagcaaaatgataacactagtaatggcacgaatgactacattggcagtgtggagaagtggcgatag

SEQ ID NO: 225912 - DNA, 1380 bp, synthetic construct
  misc_feature 1..1380: note = Description of Artificial Sequence: Synthetic coding sequence
  source 1..1380: mol_type = other DNA
atggatgaaaaatcaaataaattactgttggccctcgtcatgcttttcttgtttgcggtgatcgtcttgcaatacgtctgccctggtacagagtgccagctgctgcggttgcaggctttctcatctcccgtgcccgacccttatcgctccgaagatgagtcatctgctcgttttgtgcctaggtataatttcacaaggggtgatctactgaggaaggttgatttcgatattaagggcgacgatctcatcgtgtttctccacattcagaagaccggaggtacgacctttggaaggcaccttgtgaggaatatccaactagaacagccctgcgagtgtcgggtgggccaaaaaaaatgtacctgtcatagaccgggaaaaagggaaacatggctcttctcgcgcttttccaccggatggagctgcggactgcatgcagattggaccgagctgaccagttgcgtccctagcgttgttgacggcaagagagatgccagattgcgcccttcacgaaactttcactacatcaccatccttagagaccctgttagccgctacctgtccgaatggcgccatgtgcagaggggggctacctggaaagccagccttcacgtgtgtgatggacgccctcccacttcagaggaacttccttcttgctacactggggacgactggtccggctgtcctctgaaggaattcatggattgtccatacaatctcgccaacaacagacaggtccgaatgctgagcgatcttacactggttggctgctataatctaagtgtcatgcctgagaagcagcgcaacaaagtgcttctggagtccgctaagtccaatctgaaacatatggccttcttcggactgactgaattccagcgtaagacacagtacttgtttgaaaaaaccttcaatatgaattttatttcaccatttacgcaatacaatacaaccagagcgagcagtgttgaaatcaatgaggaaattcagaaacgaattgaagggctcaacttcctcgacatggagttgtacagctatgctaaggacttattcttgcagaggtaccaattcatgcgtcagaaagagcaccaggaagcacgccgaaagcgtcaggagcagaggaagtttctgaaaggtcgtctgcttcaaacccactttcagtcacagggtcagggacagtctcagaaccccaaccagaaccagtcacaaaaccccaaccctaatgcgaaccagaaccttacccagaatctcatgcagaacctgacgcagtccttgtctcagaaggagaatagggagtcccctaagcaaaattcaggcaaggaacagaatgataacaccagcaacggaactaatgactatatcggctctgttgagaagtggcgttag

SEQ ID NO: 225913 - DNA, 996 bp, synthetic construct
  misc_feature 1..996: note = Description of Artificial Sequence: Synthetic coding sequence
  source 1..996: mol_type = other DNA
atgctcctgaaacacaatggtaagttgctcttattttaccttctgtcttaccaggcgctggccagcgactggttttactgttctttcaatcgctggcggatcttccaaatcctagatgcagcaagaaatttccactatattaccatccttcgcgacccggtgagccgatacctgagcgagtggcgccacgtgcagagaggggctacatggaaggcaagcctccacgtttgtgatggacgtcccccaacctccgaagagctccctagctgctacactggcgacgactggtccggatgtcctctcaaggagtttatggactgtccgtacaatctggcaaacaacagacaagtcaggatgcttagcgatttgacgctagtggggtgctataacctgagcgtcatgccagagaagcagcgtaataaagttctactggagtcggcaaaatcaaacctgaaacatatggccttcttcggccttacagaatttcagcgtaagactcagtacctgtttgaaaagacttttaacatgaattttatcagtccatttactcagtataacaccacacgtgcgtcctcagtggaaattaatgaggaaatccaaaaacgcatagaaggcctgaactttttagacatggaactctattcctacgccaaggatctctttctgcagaggtaccagttcatgcgccagaaagagcatcaggaggcccgtagaaaaagacaagagcagcgaaaatttctcaaagggagacttctgcagacacactttcagtctcagggtcaggggcagagccagaatccaaaccagaaccagagtcagaaccccaatccgaacgccaatcagaacttgacccagaacctcatgcaaaatcttactcagtcactctctcaaaaagagaaccgcgaatcacctaagcagaattctggaaaagagcaaaacgataacaccagcaatggcacgaatgactacatcgggtccgttgagaaatggcgatag

SEQ ID NO: 225914 - DNA, 1938 bp, synthetic construct
  misc_feature 1..1938: note = Description of Artificial Sequence: Synthetic coding sequence
  source 1..1938: mol_type = other DNA
atggcgttgcccgcttgcgccgtgagagaatttgagcctccacgccagcctgagcgcggtgccccagtccgcacaacttgtcccagacgacactcacgagtggaggcagagctcgccgcttcacgccctgggagtgtggctgcctctgtgagagccggtcccccaaggggcgtctcccacggttttcatacacggccactcctggacaagcccaggaaagcctcttcctccttggccggagccgcatgtgcccctctgtttgccctcctcagtaggggcagacgccgacgaatgcacgttttgcgacggaggtgggaccttggctctctttgccgggcactcctcacccggggtctggcggctctcggtcattctctgaagcacgtgcttggggcaatcttcagtaaaatctttggcccaatggcctccgttggaaatatggacgagaagagcaataagctgttgctggcccttgtcatgctgtttttattcgccgtcatcgttctacagtacgtgtgtccaggtaccgagtgccaattgttgcggctgcaggccttcagctccccagttcctgatccatacagaagcgaggacgaaagctcagctcgattcgtgcctcggtacaacttcaccagaggggacctactgcgcaaggtcgactttgacatcaagggcgatgacctcatcgtctttctgcacattcaaaagacagggggaaccacctttggccgacacctggtgaggaatattcaactggagcagccttgcgagtgccgagttggccagaagaagtgcacctgccaccgccctggaaaacgcgagacgtggctgttctctcggttctcaaccggctggtcctgtgggttgcacgctgactggactgaactcacttcctgcgtaccctcggtggtcgacggtaagcgcgatgctcggctacggccttcgagatggcgcatattccaaatactggatgccgctagcaaggataagagaggttcccccaacacaaatgctggcgcaaactccccttcttccacaaaaacacgcaacacctctaaaagcggaaaaaacttccactacatcactatcctgagggacccagtgtctagatatctgagcgagtggcgtcatgtgcagagaggggctacatggaaggcttccttgcatgtgtgtgacgggcgtcccccaacctctgaggagcttccctcgtgctacaccggggacgattggtccgggtgccccttaaaagaattcatggactgcccttacaacctggccaataataggcaagttcgcatgctttctgaccttacacttgttggctgctacaatctgagcgtgatgcctgaaaaacaacgcaacaaagtcctgttggaaagcgcaaaatcaaacctgaagcatatggcttttttcggtctgacagaattccagcgaaagacacaatatttgtttgaaaagacatttaacatgaatttcatttcccctttcacacaatataataccacgcgagctagctcagtcgagatcaacgaagagatccagaaaaggatagaaggcctgaattttctggacatggagctgtattcatacgcaaaagacctgtttctgcagagatatcagtttatgagacagaaagagcaccaggaagcccgacgcaaacggcaggagcagcggaagttcctgaaagggagactgttgcagacacactttcagtctcagggccaaggccaaagccagaatcctaaccagaaccagagtcaaaacccaaatcccaacgcaaaccagaacctcacgcaaaaccttatgcagaatctgacgcagagtttgagtcagaaggagaatcgggagtcccctaaacaaaattctgggaaggagcaaaatgataacacgtccaatggcacgaatgactacattggttccgtggagaagtggagatag

SEQ ID NO: 225915 - DNA, 1416 bp, synthetic construct
  misc_feature 1..1416: note = Description of Artificial Sequence: Synthetic coding sequence
  source 1..1416: mol_type = other DNA
atggatgagagatttaataagtggctgttgactccggtcctgaccctcctgttcgtggtgatcatgtaccagtatgtttcaccatcttgtacatccagctgtactaactttggggagcagccaagggccggagaagctggaccacctgcagtgcccggacccgcaaggcgggctcaggccccacccgaggagtgggagcgacggcctcaactaccacccccacccagggggcctcctgaaggacctcgcggtgctgcggcaccagaggaagaggacgaggagcccggagaccctcgagagggcgaggaagaagaagaagaggacgagcctgacccagaggcaccggaaaacggtagcttaccaagattcgtccccaggttcaactttagccttaaagatctcactagattcgttgacttcaatataaaggggagggacgtgatcgtgtttctccacattcaaaagaccgggggaacgacctttgggcgtcacctcgtgaaaaacataaggctggagcagccatgttcctgcaaagctggtcagaagaagtgtacttgccacaggccgggaaaaaaagagacatggttgttcagccggttctcaaccggttggtcatgtggcctccacgccgattggactgagcttaccaattgcgtcccagccatcatggaaaagaaggactgtccccgaaaccattcccatacccggaacttttactatatcacaatgctgagggatcccgttagtagatatctgtcagagtggaaacacgtacagagaggggcaacttggaagacatcactgcacatgtgtgatgggcgttcacctacccccgatgaacttcccacttgttacccaggggacgattggagtggcgtgagtttgagggagttcatggactgcacctataacctggcaaataatagacaggtgcgaatgctcgctgacctgagcctcgtaggctgctacaacctgaccttcatgaatgagtcagagaggaatacaattctactgcagtctgcaaagaacaaccttaagaatatggcattttttggtctgaccgaattccagaggaaaacgcagttcctgttcgagcggacatttaatctgaaattcatatcccctttcacacaatttaacattacacgggcaagcaacgtggaaattaacgaaggggcacgacagagaattgaggacttaaacttcctggatatgcagctttatgagtacgccaaagatctgttccagcagcgctaccaccacacgaagcaattggaacaccagcgggacagacagaaacgcagggaggagcgcaggctccaacgagagcaccgcgaccatcaatggccaaaggaggatggagccgctgaggggaccgtcaccgaggactataacagccaggtcgtaaggtggtag

SEQ ID NO: 225916 - DNA, 543 bp, synthetic construct
  misc_feature 1..543: note = Description of Artificial Sequence: Synthetic coding sequence
  source 1..543: mol_type = other DNA
tgagcacagaccccacctcctcccccagccgcagtggctgtcgcagtcacccccgtgcctcagttccccagagcatgtaccgaagctgagttcgcttgtcactcctacaacgagtgtgtggcacttgaatacaggtgcgaccgcagacccgactgcagagacatgtctgacgagttaaattgcgaggagcctgttctgggcatatcgccaaccttctcactgttggtagagaccacgtccctgcccccaagacccgaaacaactatcatgaggcaaccccctgtcacccatgcaccccaacctttactgccaggatccgtcaggcctcttccttgcggaccccaggaggcagcttgccgtaacggccactgcataccacgtgactacctgtgcgatggccaagaagattgtgaggacggctccgacgagctggattgtgggccaccccctccatgtgagccaaacgagtttccttgcggcaacggtcattgtgccctgaaactctggcggtgtgacggtgactttgattgcgaggatcgctag

SEQ ID NO: 225917 - DNA, 285 bp, synthetic construct
  misc_feature 1..285: note = Description of Artificial Sequence: Synthetic coding sequence
  source 1..285: mol_type = other DNA
taaggacacccccattctccaagctcaggcgctgcatgggcggcagcctttctgggaggaagacccccaggaacatcttgctgtacactaagcgttcagccactgaggacccaagccgctacagcagcaggtagtcctacccgttgggcacagcctcggccactccccagctgcagttcgaaaaaccccgagttggggccagagctgcctcgagatgtatatatgcctggtccatggacactcggggagggcccagggcagtgcccagctggataccctcgttag

SEQ ID NO: 225918 - DNA, 13176 bp, synthetic construct
  misc_feature 1..13176: note = Description of Artificial Sequence: Synthetic coding sequence
  source 1..13176: mol_type = other DNA
atggggtggcgcgctgccggagcactcctcctggccctactcctccacggcagacttctggccgtgacacacggcctgagggcatacgacggcctgtccctgcccgaagacatcgagaccgtgaccgcatcccagatgagatggacacactcctatctgagcgacgatgaagacatgcttgctgactcgattagcggggatgacttggggagtggtgacctgggatcaggagatttccaaatggtgtactttcgggcactggtgaatttcacccggagcatagagtatagcccccaattggaggacgccggaagccgcgagttccgcgaggtgtcagaagcggtggtcgacacattagagtcagagtacttgaagatcccaggcgatcaagtggttagtgtggtttttattaaggaactggacggttgggtatttgtcgagctcgatgtcggatcggaaggcaacgctgatggagcccaaatccaagagatgctcctgcgcgtgatatccagcggttcagtcgcttcctatgtgaccagcccccaggggttccagttcagaaggctgggtacagtccctcagtttccacgggcttgtacggaggcagagttcgcatgtcattcctataatgagtgtgtggccctcgaatatcggtgcgaccggaggcctgattgtcgcgatatgtcagatgagcttaattgtgaagagccggtccttggtatttcaccaaccttcagtctgttagttgagaccacctcgctacctccgaggcccgaaacgacgattatgaggcagccccctgtaacacacgcgcctcagcccctgctccctgggtcagtcagaccactgccatgcggtccccaggaggccgcatgcagaaatggccactgcattcccagggattatctttgtgatggccaggaggactgtgaggacggcagtgatgaactggactgcgggcctcccccaccatgcgagccaaatgagtttccgtgcggcaatgggcattgtgctctcaagctctggaggtgcgacggagattttgactgcgaagacagaactgacgaggcaaactgcccgacaaaaaggcctgaggaggtctgcgggccaacgcagttccgctgcgtgtctacgaatatgtgtatcccggcatcttttcactgtgatgaagaatcagattgcccggatagatccgacgagttcgggtgcatgcccccacaagttgtcaccccacccagagaaagcatccaggcgtcaagaggacaaacagtgacttttacttgtgtggcaattggcgtgcctactccaatcattaactggcggctcaattgggggcacatcccatcacatccaagggtaaccgtgacttccgagggcggtaggggaactcttatcataagagatgtaaaagagtcagaccagggagcttacacctgcgaggccatgaatgctcgcggaatggtgtttgggataccagacggagttttggaattagtgccccagagaggcccttgccccgacggccatttctacctggagcacagtgccgcttgtctgccatgcttctgcttcggaattacctctgtttgtcagagtactcgcaggtttcgggatcaaatccgactgcgattcgatcagccagatgatttcaaaggggtcaacgtgactatgcccgctcagccagggaccccccctctctcttctacacagttgcagatcgaccccagtctgcatgagttccagctggtggacctgagccggaggtttctcgtgcatgattctttttgggcccttccagaacagtttctgggcaataaagtggactcttacgggggtagccttcggtacaacgtacgatatgaactcgcccgtgggatgctggaacctgtacagagacccgacgttgtgctgatgggcgctggctaccgactattatcccgaggtcatacaccaactcagccaggggcacttaaccagcgtcaggtgcaattctcggaggaacactgggtgcacgagtctgggagaccagtccagcgggcagaactcctacaagtgctccagtcactggaggctgtactcatacaaactgtatacaatacaaagatggccagcgtaggcttatctgacatagctatggataccaccgtaacacatgctacgtctcatggtagggcccatagcgtcgaagagtgccgatgtcctatcggatactcaggcctcagttgcgagtcctgtgacgcccactttacaagagtcccaggaggtccctacctgggaacttgcagcggctgcaattgcaatggacatgcttcaagttgtgacccagtgtatggacactgtttgaattgccagcataatactgaaggccctcagtgtaataagtgtaaggccggatttttcggcgacgccatgaaagcaacagccaccagttgcagaccttgcccttgcccctacatcgacgcctcgcggcgtttttccgatacttgttttctggataccgatggtcaggccacttgtgacgcctgcgcgcctggctacactggccgaagatgtgaaagctgtgcccctggctatgaaggtaaccccatacagccaggaggaaagtgcaggcccgtaaaccaggagattgtgcggtgtgatgagcgaggctcgatgggaactagtggagaagcctgtagatgtaaaaataatgtggtggggagactgtgtaacgaatgtgccgatggtagctttcatttgagcacgaggaaccccgatgggtgcctgaagtgtttctgtatgggggtcagccgccactgcacttcaagtagttggtcacgagcacagttacacggcgcaagcgaggaacccggtcactttagcttgacgaatgctgcaagcacacacacgaccaacgagggcatttttagtccgacaccaggcgagctaggcttttcctcattccaccgccttctgagcggaccgtatttttggagcttgccgtcccgcttcctgggggacaaggtgacctcttacggaggagaattgagatttaccgtgacacagcggtcccagcctggatccacgcctctgcacggccagccactcgtggtacttcagggcaacaacattatactcgaacaccatgtagcccaagagccctcaccagggcaaccctctacatttattgtcccttttagagaacaggcgtggcagagacctgatggacaacccgcaacacgggagcatctgctaatggcactggccggaattgataccttactcattcgcgctagctatgctcagcagcccgctgagtctcgggtcagtgggataagcatggacgtggcagttccagaggagactgggcaggaccccgcattggaggtggagcagtgctcctgtcctccagggtatcgtggcccatcttgccaggattgcgacaccggatacactcgcaccccaagtggactctatttgggcacctgcgagaggtgcagctgccacggccatagcgaggcctgcgagccggagactggcgcatgccagggatgtcagcaccataccgagggccctcgctgtgagcagtgccagccaggttactacggggacgcacaacgcggtaccccccaggactgccagctttgcccttgttacggcgaccctgctgccggtcaggccgcacatacatgttttctcgacaccgatggccatcccacttgcgacgcttgttcgcccggacacagtggaagacactgtgaacgttgtgcgcctggatattatggcaacccatcccagggccagccttgtcagcgcgactctcaggttccgggtcctatcggatgcaactgcgatccacagggctcagtctccagtcaatgcgatgccgcaggacaatgtcagtgtaaggctcaggtggaaggtctgacctgctcacattgtaggcctcaccatttccatttgtcagcttctaatccagacggatgcctgccatgcttctgtatgggtattacacagcagtgcgcctcttcagcgtacactcggcatctcatttcgacacacttcgcaccgggtgacttccagggattcgctttagtcaatccgcagaggaacagccggctaaccggcgaattcactgtagagcctgtaccggaaggcgcacaactgagctttggaaatttcgcacagctcggacatgagtctttctactggcagctgccagagacctaccaaggagacaaagttgccgcatacgggggaaagctcagatataccctgagttacaccgccggtccccagggcagcccactgagtgaccccgacgttcagattacgggaaacaacatcatgctcgtcgcctcccagcccgcactgcaaggccctgaacggcgaagctatgaaatcatgttcagagaggaattctggcgacgcccagatggacagccagccacgcgcgaacatctgctgatggccctcgctgacctagacgagctccttattcgcgcaaccttttccagtgtacccttggccgcatcaatctcggctgtgtcacttgaggtggcacagccgggacctagtaaccgacccagggccctcgaagtcgaggaatgccgatgcccacctggatatatcggactatcatgccaggattgcgccccagggtataccagaacagggagcggcttgtatctgggccactgtgaactctgcgaatgtaatggtcactccgatttgtgccacccggagaccggcgcatgttcgcaatgccagcataacgccgcaggtgaattctgcgagctatgtgcgccaggctattatggcgacgccactgccggtacgcctgaggattgccagccttgtgcctgtcccttaactaatccggagaatatgttcagcagaacatgcgaatcattaggggcaggcggatatcggtgtacagcctgcgaaccagggtacactggccaatattgcgaacagtgcggcccaggatacgtcggcaaccctagcgtgcaggggggtcagtgcctgccggagaccaatcaagcgccactggtggtggaggtgcaccctgccaggtccatagtaccccaggggggttcccactccctgaggtgccaggtgtctggcagtcccccacattacttctactggagtcgcgaggacggccgacccgtgcccagcggcacgcaacagagacaccagggatccgagttacactttccatcagtgcagccatcagacgcgggtgtttatatctgtacatgtagaaacctccatcagagcaatacctctcgggcagagctcttagtgaccgaggcgcctagtaaaccaatcacagtgaccgtcgaggagcagcgctctcagagtgtaaggccaggtgcagatgtgactttcatctgtactgccaagtcaaagagtcccgcttataccctcgtctggacaaggttacacaatggaaaactccccacccgagccatggactttaacggaatactgacaattcggaatgttcaactttcagacgccggaacttatgtgtgcactggtagcaatatgttcgccatggaccagggaaccgccaccttacacgttcaggcttcagggaccctcagcgcaccggttgtctccatccatccaccgcagctgacagttcaaccaggccagctcgccgaatttagatgttccgcaaccggctcacctacgcccacactggagtggaccggtgggccaggaggacaactccccgctaaagcgcaaatccatgggggaatactgagattgcccgctgtggaaccgaccgatcaagcccaatacctctgtagagcacatagtagtgcgggacagcaggtagctagagccgtcctgcacgtacatggaggcggaggtccacgcgtgcaggtctcgccagagagaacccaggttcacgccggaagaactgtccgcctgtattgccgcgcagctggggtcccctccgccactattacatggcgtaaagaaggtggatccttgcccccacaagcacgcagtgagagaaccgatatcgctaccctactgatcccagccataactactgctgatgccggtttttatctgtgcgtagccacgtcaccagccggaaccgctcaagccaggatccaggtggtggtcctgagtgcctccgacgcatccccaccaccggttaagatcgaaagctctagtccctcagtcacagaggggcaaacactcgatctaaattgcgttgtggcgggaagcgcccacgcccaggtgacctggtaccggagagggggttccttgcctccacatacccaggtacatggtagccgcctcagactgccgcaggtgtcccctgcagacagcggcgagtatgtgtgccgagtggaaaacggatccgggccaaaggaggcatccataaccgtgtctgtgttacacggcacgcacagcgggcctagctacacacccgtgcctggttcaactagaccaatccgtatcgagccaagtagttctcacgttgcggagggacagactttagatctgaattgtgtggtaccgggtcaggctcatgcacaggtaacctggcataaaagaggtggatctctgccagcaagacaccagactcatggcagtttattgcggctgcaccaggtcacccccgcagacagtggcgagtatgtgtgccatgtggtggggaccagtggcccattagaagcatctgttctggtgacaatcgaggcctccgtgatccccggtccaatccctcccgtcagaatcgagtccagtagcagtaccgtcgccgagggccaaacactagacctcagttgcgttgtagcaggccaggcccacgcccaggtgacatggtataagcggggaggaagcctacctgctaggcaccaggtcagggggtcaaggctgtatatcttccaggcgtcccctgccgacgcaggccagtatgtatgccgcgcatcaaacggcatggaagcctcaataactgtgactgtgacaggcacccagggcgcaaatctcgcctatccggctggatcaacccagcctatacgaatcgaacccagcagctctcaagttgcagaggggcagaccctagatcttaactgcgtggtgccaggccaaagccacgcacaggttacctggcataagcggggaggttccttgccagtacgtcaccaaactcatggatctctacttcgattatatcaagcctctccagctgattcgggagaatatgtgtgcagagttctgggttcaagtgttcctctggaggcttctgtgttggttaccatcgaaccggctggcagtgtgccagccttaggcgttacccccacagtcaggatcgaaagttcttcctctcaagtcgccgagggtcaaaccttagatctcaactgcctcgtagcaggtcaagcccatgcccaggtgacttggcataaacgagggggatctctgccagcccgacaccaggtgcatggatctcgactgagactgcttcaggtgactcccgctgactccggcgagtacgtctgcagagtggtggggtcctcgggcactcaggaggcgagcgtcttagttactattcaacagaggctgagcggatcacactcccagggcgtggcctatcctgtgcgtattgagagtagcagcgccagtctggccaacgggcataccttggatctgaactgcttggtagcatctcaggcacctcacactatcacttggtacaaacggggagggtctctacccagtagacaccagattgtgggatccagactccggatcccgcaggtaactcccgctgatagcggggagtatgtttgtcacgtgagcaacggagcgggtagccgtgagacttcgctgatcgtaactattcaggggtccgggtccagtcacgtgcccagtgtgtcccctccgatccgcatcgagagttcctctccaaccgtagttgaaggacagacactggatctcaattgcgtggtggcacgacaaccccaggcaataattacttggtacaagcgaggaggatcacttccgtcccgccaccagactcacggttcgcacctcagactgcaccaaatgagtgtcgcagactccggagagtacgtgtgtcgggcaaataacaacattgacgccctggaagcctcaatcgttatatcggtatcacccagcgctggctctccatccgccccaggcagctccatgcctattcgcatcgaatcctcaagcagccatgtggctgaaggtgagactctggatctcaactgtgtggttcccggacaggctcacgctcaagtgacatggcacaagagagggggatcccttccttcacatcatcagacgagaggttccaggctacgcctgcaccacgtgagccccgcagattccggggaatacgtatgcagggttatgggctcctctggaccccttgaagcttctgtgctggtcactatcgaggcctcggggtccagcgctgtgcacgttcccgcacccggtggcgcacctcctattcgtatcgagccttcgtccagccgagtggcggagggccagacgcttgacctaaaatgtgttgtacccggtcaggcacatgcccaggttacttggcacaaacgaggaggcaatctcccagctaggcaccaagtgcatggccctctgctgcgtctgaatcaggtgtccccggcagattcaggggagtactcatgccaagtgaccggtagttctgggacattggaagcatccgtattagtcacaatcgagcccagctcaccagggccaatccccgcaccagggctcgcgcagccgatttatattgaagcaagcagcagtcacgtgacagaaggacagaccctggatctcaactgcgtggtgccaggccaggcccatgcccaggtgacatggtacaagcgcggtggctccctgcccgctagacatcagacacatggctctcagcttagactccaccttgtgagtccggcagactctggagaatacgtttgcagagcggcatctggacctggtcctgaacaggaagctagcttcaccgtcacagtgccaccatcagagggttcttcctaccggctgcggtccccagtcattagcatcgaccccccatcatctacagtgcagcaggggcaggatgcttcttttaagtgtctgattcacgacggcgctgctcctataagcctggagtggaaaacacgcaatcaggaactggaggacaatgtccatatttcacctaacggcagcatcattaccatcgtggggacacggccaagcaatcacggcacctacaggtgcgtagcttctaatgcctacggagtggctcagtcagttgtgaatctgtcagtgcacggacccccaacagtgagcgtcttgccagaaggcccagtgtgggtcaaggtcggcaaggcggttactctggagtgtgtgagtgctggcgagccacgctcgtctgccagatggacacggatcagctcaacccccgcaaaactggaacaaagaacatatggacttatggattcccatgccgtgctacagatcagctccgcgaaacctagtgatgcgggtacgtatgtgtgccttgcccagaatgcattagggaccgcccagaaacaggtagaagtgatagtggatactggggctatggccccaggagccccacaggtgcaggcagaggaagccgagctcaccgtggaagcgggtcacacggctaccctgcggtgttccgctaccggaagccccgcacctacgatacactggagtaagcttcgttctcccctgccctggcaacaccgcctggaaggtgacactctaatcatccccagagtggctcagcaggactccggtcagtacatttgtaatgccacatcccccgcagggcatgccgaagccactatcatactccacgtggaatcaccgccttatgccaccaccgtgccagaacacgcctccgtccaagcaggcgagactgttcagctgcagtgcctggctcacgggacccctcctctcacattccagtggtcacgggttggttcgagtttacctggcagagctacagccaggaatgaactgttgcacttcgagcgcgctgccccagaggattctgggagatatcgctgtcgcgtaaccaataaggtaggcagtgctgaagcctttgctcagctccttgttcagggtccaccgggatctctccccgctacatccattcccgcaggttcaactcccaccgtgcaggtgaccccacagttggaaacaaaaagcatcggcgcatctgtggagttccactgcgcggtcccctctgaccgcggtacgcagttaagatggtttaaggaggggggacagctgcccccaggacacagcgtgcaggatggcgtgctgcgaattcagaatctggaccagtcctgccagggcacctatatttgccaggcccacggcccttggggtaaggcccaagcatccgctcagctggtcatacaggcccttccatcagtgcttataaatatccggaccagtgtgcagaccgtcgtcgtgggacacgccgtggagtttgagtgcctggccctaggtgacccaaagccccaggtgacgtggtcaaaggtgggcggtcatctgcggccagggatcgttcagtccggcggagtggtgaggattgcacacgtggaactggccgacgccggacagtacaggtgcaccgcgaccaacgctgccggaaccacccagtcacacgtactgcttctagtacaggcacttccacagatttctatgcctcaagaggtgcgggtgccagccggtagcgctgctgtctttccatgcattgcttctgggtaccccaccccagatatatcctggtccaagctggacggaagcttgccacctgactctcgcctggagaataatatgcttatgctaccaagtgtccggcctcaggatgctggcacctatgtctgcaccgccacaaataggcagggcaaagttaaggcctttgctcacctacaggtgcctgaaagggtagtgccctacttcacacagacaccttatagctttctccctctgcccactatcaaagacgcctatcgcaagtttgagatcaagataactttccgcccagactccgccgacgggatgttgctgtataacggccaaaagcgtgtgccaggatcccccaccaaccttgccaacagacaacctgatttcatttcgtttggactggttggcggacgtcccgaattccgattcgacgcaggaagtggcatggcgaccatccggcacccgactcccctggccctcggccattttcacactgttacactccttagatccctgacccaaggatctctaatagtaggcgacctggcgcctgtgaatggaacgtcccaaggtaaatttcagggactcgatttgaatgaggagctgtacttgggtggatatccagattacggcgcaattcccaaggccggtcttagcagtggattcattgggtgcgtgcgcgaactgaggattcagggtgaggagattgtcttccacgacttaaacctgaccgctcatggcataagtcactgtcccacgtgcagagaccgaccttgccagaacggcggacagtgccacgatagtgaatcttcttcgtacgtttgtgtatgccctgcaggattcactgggagccgttgcgagcactcccaggctctgcactgccatccagaggcgtgcgggccagatgctacctgtgtgaacagacctgatggtcggggttacacctgccgatgtcatctcgggaggtccggcctgcgttgtgaagaaggtgtgaccgtaactacaccaagtttgtctggtgcagggtcttaccttgcactcccagccttgacaaacacccatcacgaactcaggttggatgtggagtttaagccattagccccagatggcgtgctcttgttcagtggaggcaaaagcggacctgtggaagacttcgtctccttggcaatggtggggggtcacctcgagtttaggtacgagctggggagcggacttgcagtgttacggtcggcagagccactggcacttggtaggtggcatagagtgtcggccgagcggctgaacaaggatggcagcctgagggtcaacggcggaaggcccgtgttgcgatccagtcctggcaagagccagggcctgaatttgcatactctcctgtatctgggtggggtggaaccttcagtgccgctgagccctgccaccaacatgagcgcgcattttcggggatgcgtcggagaagtgtctgttaatgggaaacgcttggacctcacctactcttttctagggagccaggggatcggtcagtgctatgacagcagcccttgcgagagacagccttgccaacacggtgcaacctgcatgccagccggagagtacgagtttcaatgcctgtgcagggacggattcaagggggacctgtgtgaacacgaggaaaatccatgtcagctgcgggaaccgtgccttcatggaggaacgtgtcaaggaacgcgctgtctctgcctgcccggtttctcaggaccacgctgccagcaaggctcaggacacggcatcgccgagtcagattggcacctcgagggctcgggcggaaatgacgcccctgggcagtacggagcctatttccacgatgatggttttctcgcattcccaggccatgttttcagtcgctcactaccagaagtgcccgagacaatcgagctcgaggtgcgcactagcaccgccagcggcctgctgctgtggcagggagtcgaggttggagaagctggccagggcaaagacttcatctccctgggattacaggatgggcacctggtgtttagatatcagctgggatccggagaagctagactggtgtcagaggaccccataaacgacggcgaatggcacagagtgacggccctgagggaaggacggcgagggtccattcaggtggacggggaggaattggttagtgggcgatcccccggacccaacgtggccgtgaacgcgaagggaagtgtctatataggcggagcccctgatgtggccaccctgactggtggacgcttctcatctggcataacgggctgcgtcaagaacttggttcttcacagcgctcggcctggagctcctcctccccagcctttggacctgcagcatcgagcgcaggcaggagctaacactcgcccttgtcctagttaa

SEQ ID NO: 225919 - DNA, 720 bp, synthetic construct
  misc_feature 1..720: note = Description of Artificial Sequence: Synthetic coding sequence
  source 1..720: mol_type = other DNA
gtaacacacggcctccgagcgtatgacggactgtcactgcccgaggatatcgaaaccgttactgcgagtcagatgagatggacccattcatacctctcagacgacgaagatatgctcgctgactcgatatccggtgatgatctgggcagcggggatctcggctcaggcgacttccagatgggatcctggatggctggattcttgtggtcctggatgtgggctaggaaaggcatgagaatgggcctgagattccgcaggtgttgttccgggtcatcccccgctgccctctggccgcctaccagcccactgccgcgagacagttcatcggatgcttgggcccagtgcccttcatcccaggagccagcaaggaggccctcattgccggctacggccacgatgagtgtgtggccctggagcatagctgtcactggtggcccaaccgcaggtacgtgtctgatgtcttcaattgttcgttcccagtcctgggtatcagccccacacagcttatcactctggcgcaggcatctgtaccgtccaggacaacggcagccaagctgtgattcacatcagtcccccacgctgttatctccttgtttcccggtaccgtctgggccttgccctgtcggccctaggcggccacacgctgctatggggacggcatctccagagaccacttccgcgaccgaccgtcggaccgcacgaaccgccgcaatgtcctag

SEQ ID NO: 225920 - DNA, 567 bp, synthetic construct
  misc_feature 1..567: note = Description of Artificial Sequence: Synthetic coding sequence
  source 1..567: mol_type = other DNA
atgaacgcaggcgcatctgtactcactttcccgtgggcagtttacgggctacctagagcacggccagcagtgacagatctgacggggcctctaccaccaagcagccctgctctgccatctgtccttattaatatccggacgtccgtgcagactgtcgtggttgggcacgccgttgagttcgagtgcctcgccttgggggatccaaagccccaggttacctggtcaaaggtgggaggccacctcagaccaggcatcgttcaaagcggcggtgtcgtaagaattgcgcacgtcgagttagcagatgctggacagtacaggtgcaccgctaccaacgccgctgggacgacccagtctcatgtgctactgctggtgcaagccctgccccaaatctccatgccccaggaggtacgcgtgccagcgggtagtgccgctgtgtttccatgcattgccagcggttaccctactcccgacatcagctggtcaaagctggatgggtctttgcctcctgactcccggttggaaaataatatgctgatgttgcctagtgtcaggccgcaggatgcttag

SEQ ID NO: 225921 - DNA, 594 bp, synthetic construct
  misc_feature 1..594: note = Description of Artificial Sequence: Synthetic coding sequence
  source 1..594: mol_type = other DNA
tgaactcccagtggtctgtacctgggaacatgtgaacgatgcagctgtcacggacactccgaggcttgtgagcccgagactggggcttgccaggggtgccagcaccacactgaggggcctcggtgcgagcagtgtcaaccaggatattacggggatgcacagcggggtactccacaagattgtcagttgtgtccctgctacggggacccggctgctggtcaggcggcacacacatgctttttagataccgacggccatccgacgtgcgacgcatgctccccagggcacagtggccgacactgtgaaaggtgtgcaccgggatactacggtaacccgtcgcagggacagccctgtcaacgggattcacaggtgcctgggccaatcggatgcaactgcgacccacaggggtccgtgagttcccaatgcgatgcagcaggacaatgccagtgtaaggtctcccccaacccatgcccatgcggcgcttgctctgccccactgcctcgcccttgtggagagatcagacagcatctcgtcgaggccgaaacctgggcttggggtgccggacacggtggtcaagggcgaggttgtccttag

SEQ ID NO: 225922 - DNA, 492 bp, synthetic construct
  misc_feature 1..492: note = Description of Artificial Sequence: Synthetic coding sequence
  source 1..492: mol_type = other DNA
cctcctgtgaagattgagtcttcatccccctcagtgacagagggacagacccttgatttgaattgtgtggtggcgggttctgcccacgcccaggtcacatggtaccggcgtggcggatcattgcctccccacacccaagtacacggaagccggttgcgcctgccccaggtcagtccagcagattctggcgagtatgtatgtcgggtcgagaacgggagcggaccaaaggaggcgtccattactgtatcttattgcccacccgcatggtcctggtgtgtgccaggttcaacacggccaatccgtatcgagccttcgtccagccacgtggctgaagggcaaactcttgacctaaactgcgttgtcccaggccaggcacacgcacaggtcacatggcacaagagggggggtagtctgcccgcacggcaccagacccatgggagccttctcaggttgcatcaggtaacacctgccgacagtggagagtatgtgtag

SEQ ID NO: 225923 - DNA, 573 bp, synthetic construct
  misc_feature 1..573: note = Description of Artificial Sequence: Synthetic coding sequence
  source 1..573: mol_type = other DNA
cctgaggacattgagactgtgaccgcatctcaaatgaggtggacccactcttatctgtcggatgacgaagacatgctggctgattccatctcgggggacgatcttggtagtggcgacctgggcagcggagatttccagatggtttacttccgcgctttggtcaatttcactcggagtatcgagtatagcccccagctagaggatgccggatcacgagagttccgcgaggtgagcgaggccgtcgtagacacactggagtctgaatacctcaagatccctggagatcaggtggtttccgttgtgtttattaaggagcttgatggatgggtcttcgtcgagctagacgtcggtagtgagggaaatgctgatggggcacagatccaagagatgttactgcgcgtgatctcatccgggagcgtggcgagttacgtcactagcccccagggctttcagtttagacgactcggaacaggggagcccatcctcgtcagtggcatagcttctagtcgcctggtcggctcgcccttttctgtttccgccatcggcagccagctgggtcttgcacaccactag

SEQ ID NO: 225924 - DNA, 624 bp, synthetic construct
  misc_feature 1..624: note = Description of Artificial Sequence: Synthetic coding sequence
  source 1..624: mol_type = other DNA
ggagagtcccgtgaagggaggggatatcggcaggtagctcagagagtggcggagcgatctcccgtgccgtcattgctgagtcactctggatgcgttgtccacactagactgtcacccgtcccatctgtcagcccccctattcggattgagagctcctcccctacagtcgtggaaggtcagacgcttgatttaaattgtgttgttgccagacagcctcaggcaataattacctggtacaagagaggcggaagcctgccaagtaggcaccagacccatggttcacatcttcgcctacatcaaatgtcagttgctgattctggtgagtatgtctgccgcgctaacaataatattgacgctcttgaggcctctatcgtcatttctgtcagcccttctgctggaagtccaagtgcccctggctccagcatgccgattcggatcgaatcaagctcatcgcacgtcgcagagggagaaaccttagatttaaactgcgttgtgccgggacaagcacatgcgcaggttacttggcacaaacggggaggctcactgcccagccaccaccaaacgcgcggatcccgcctgaggcttcatcacgtgagcccggcagactctggagagtacgtatag

SEQ ID NO: 225925 - DNA, 1104 bp, synthetic construct
  misc_feature 1..1104: note = Description of Artificial Sequence: Synthetic coding sequence
  source 1..1104: mol_type = other DNA
atggggtggcggcgtggcagaggcgcaccacgttttcctgatgggatggctgccggtcagaggcgaagttctctatcaaggctggggtctcaggccgaaggtttattgacaagtcagaccatggggggacaggccgaaacactgctcacttcccagactggttggctcctcggccgtggatgtaacctgggatctcctggcggtcaggtatcttgggataaggtcaggatacctggcgtcctccagaggttgggggtaacttactttgtggtggccgtattagagttactctttgcgaaacccgtccccgagcattgtgcttccgagagaagctgcctgagtcttagggacattacaagctcttggcctcagtggctgctgatcttggtcctagagggcctctggctgggcctgacttttctgctgccagtgccaggttgtcccacaggttacctcggccctgggggaataggagacttcggaaagtatccaaactgtactggcggtgcagctgggtacattgatcgtttattgcttggagacgaccatctgtatcagcacccatctagcgcagtcctctaccacacagaagtggcgtacgaccccgaaggcatacttggaacaatcaattctattgtgatggcctttctgggtgtccaggcagggaagatcctcctgtactacaaagctcggacaaaagacatactgattcggtttactgcttggtgctgtatcctcggcctgattagcgtcgcgctgacgaaagtgtccgagaatgaagggtttatccccgtgaataaaaatctctggtccctgagttatgtgactactctttccagcttcgctttcttcattctcctcgtgctctacccagtggtggatgtcaaaggtttatggacgggaactccctttttctatcctggtatgaactccattctcgtgtatgtcggacatgaggttttcgagaattattttccctttcaatggaagctgaaggataaccagtcacataaggagcacttgacgcaaaacatcgtggccacagccctgtgggttcttatcgcgtacatcctgtacagaaagaagatcttttggaagatttag

SEQ ID NO: 225926 - DNA, 669 bp, synthetic construct
  misc_feature 1..669: note = Description of Artificial Sequence: Synthetic coding sequence
  source 1..669: mol_type = other DNA
atgtccggcgctggccgagccctggcagcacttttgctggctgctagtgtcctgtccgcggctttattggcccctggtggctcctctgggcgagatgcccaggctgctccacccagagatcttgacaagaaaaggcatgccgagcttaaaatggatcaggccctgctgctcattcataacgagctgctgtggactaacttaactgtgtactggaagtcggagtgttgctaccattgtctgttccaggtactggtgaatgtgccccagagtcccaaggcaggaaagccttccgcggcagcagcgtcagtcagcacccagcacggttcaattctacagctcaacgacaccctggaggaaaaggaggtgtgcaggctggaatacaggtttggcgagttcggcaattatagtcttctggtcaagaacattcacaatggggtgagcgaaatcgcatgtgatttggcggtgaatgaagatccagttgattccaatctgcccgttagcatcgcttttctcattgggctggcggtcattatagtgatttccttcctgcgattactgttaagggtgctcctttgccacccaggatggtcagcggtcgccccatcccgtttgactccttcctctgcgtcgcgtgtgcacaccattctgctgccacagcccccagagtag

SEQ ID NO: 225927 - DNA, 1908 bp, synthetic construct
  misc_feature 1..1908: note = Description of Artificial Sequence: Synthetic coding sequence
  source 1..1908: mol_type = other DNA
atgagtggagccggtagggccttggctgccctcctgctagcagcatcggtgctgagcgctgccctgctcgcaccgggaggctcaagcggaagggacgctcaagctgccccaccgagagacctcgacaaaaaaaggcacgccgaactgaaaatggatcaagctctgttactgatccacaacgagctgctttggacaaatctcaccgtgtactggaagagcgagtgttgctaccattgcctcttccaggtactggtcaatgtgccccagtctcctaaggctgggaagcccagcgcagccgcagctagcgtgtctacgcaacatgggtctatcctgcagctgaacgatactcttgaggagaaagaagtctgcagactggaatacagatttggtgagtttggcaattattccctcctggtgaaaaacatccacaatggcgtttcagaaatagcgtgtgatctcgccgtcaatgaagacccggtggactcgaatcttccagtctcaattgctttcctaataggcctggccgtgatcatcgtaatctctttcttacggctgctgttgtcccttgatgatttcaataattggatcagcaaggccattagtagccgagagaccgatagactgatcaattccgagctgggctctcccagccgcaccgacccactggatggggacgtccaaccagctacttggcggctgtctgcgctgcctccgcgactccgctccgtggatacatttagaggcatcgcactgatcttgatggtctttgtgaattatggaggagggaaatactggtatttcaagcacgcatcctggaatgggctcacagtggccgatctcgtgtttccttggttcgtatttataatgggcagcagtattttcctctccatgacaagcattctgcagagagggtgctctaaatttaggcttttgggcaaaatcgcatggaggtccttcctcctgatctgcattggcatcataattgtgaatcctaattactgtctaggccctttaagttgggataaagtcaggattcctggagtcctgcagagactgggtgtgacctatttcgtcgttgccgttctggaactgcttttcgccaagccagtgcccgagcactgtgcttcagagaggtcatgtcttagccttagggatatcactagttcttggccacagtggttgcttatcctcgtgctggaggggctgtggctgggtctgacattcctcctgccggtgcctgggtgccccacaggttacctgggccctgggggtataggagacttcggcaagtacccgaactgtacaggtggggctgcgggatatatcgaccgtctcctgttaggggacgatcacctgtaccagcatccttcctccgccgtactgtaccacacagaggttgcttacgaccccgagggtatccttgggaccattaattctatcgtcatggccttcctgggtgtgcaggccggaaagatcctgctttattataaagctcggaccaaggacattctgatcagatttaccgcatggtgttgcattttagggctgatttcagtggccctgacgaaagtttcagagaacgaaggctttatccccgtcaataagaacctgtggagcctgagttacgtaaccaccctgtctagctttgccttcttcatcttattagttttataccccgtggtggacgtgaaagggttgtggacagggacacctttcttctaccccggaatgaatagcattttagtgtacgtgggtcacgaggtgttcgagaactattttccgtttcagtggaagcttaaggacaaccagtcccacaaggaacacttgactcagaacattgtggctacggccttgtgggtgctgattgcatatatactgtaccgcaaaaagatcttctggaagatatag

SEQ ID NO: 225928 - DNA, 1992 bp, synthetic construct
  misc_feature 1..1992: note = Description of Artificial Sequence: Synthetic coding sequence
  source 1..1992: mol_type = other DNA
atgaccggcgcacgagctagcgcggcagagcagcgcagagcaggccgttctggacaggccagagccgctgagagggcagccggtatgtcaggtgccggtcgggctttagccgcactgctgctcgccgcttcggtgctgagcgccgctctattggctccgggaggctcatccgggagggatgcccaggctgctccacctagagaccttgataaaaagaggcacgctgagctcaaaatggaccaggccctgttactcatccacaatgagttactttggaccaacctgaccgtttattggaagagtgaatgctgttaccattgcctcttccaggtcttggtaaatgttcctcagagccctaaagctggcaagcccagcgcagcggctgccagcgtctctacgcagcatggttccattctgcagctcaatgacactctggaggagaaagaagtctgtcgactcgagtatcgctttggagagtttggcaactactcgttattggtgaagaatatccacaatggtgtgtctgagattgcatgcgacctggcggtaaatgaggatcccgtcgattcgaatctacctgtgtcaatcgcttttctcatcggattggcagttataattgtcattagtttcttgaggctcctcctgtccctcgatgattttaacaattggatttctaaggccatctcctccagagaaacagacagattaatcaacagcgagctgggctcaccttcaaggactgacccattagatggagatgttcagccagccacctggagacttagtgcgctgccgccaaggctgaggtctgtggatacctttagaggcatcgctttaattctgatggtgttcgtgaactacgggggaggtaaatactggtatttcaaacacgcttcttggaacggactgaccgtggccgacttagtcttcccatggttcgtctttatcatgggctcttctattttcctttctatgacctcaatcttgcaacgagggtgctccaaattccgcctgctcggaaagattgcatggagatctttccttttgatctgtatcggcataatcattgtgaatccgaactactgcctcggaccactgtcctgggacaaagtacgcataccgggtgtactgcagcgtctcggcgttacatacttcgtagtggcagtcctggagctcctctttgcaaaacctgtgccggagcactgcgcctccgaacggtcttgcttgagcttaagggatataaccagctcatggcctcagtggctgctgatcctcgtgctcgaggggctctggcttggactgacctttctcttgcccgtcccaggctgtccaactggttacttaggccctggtggcataggagacttcgggaagtaccccaattgtacaggcggagcagcgggatacatcgacagactcttgctgggcgacgaccatctgtaccagcacccatccagtgccgtcctgtatcacaccgaagtggcttatgacccggaggggattctcgggacaatcaattcgattgtaatggcctttcttggcgtccaggccggaaaaattctgctgtattacaaggcgcgaacaaaggatatactgattaggttcaccgcctggtgctgtattctcggtctcatctctgttgcactcactaaggtctctgaaaatgaaggatttatccctgtgaataagaacctctggagtctgtcttacgttacgaccctaagctccttcgcttttttcatccttctggttctgtacccagtcgtagatgtgaaagggctctggaccggaaccccattcttttacccgggaatgaactctatcttagtctatgtcgggcacgaagtattcgaaaattactttcccttccagtggaagcttaaggacaatcagtcacacaaggagcacctcactcaaaacatagtcgctaccgctctgtgggtgctgatcgcctacattctgtatcggaagaaaattttctggaagatctag

SEQ ID NO: 225929 - DNA, 1647 bp, synthetic construct
  misc_feature 1..1647: note = Description of Artificial Sequence: Synthetic coding sequence
  source 1..1647: mol_type = other DNA
atgcgcgtgttgtgcgcgtttcctgaagcgatgccgtccagtaattcgcggccacccgcttgcctggcccctggggctctctatctagcactactgctgcacctctcactctcctcccaggcgggtgaccggaggcccttacctgtggacagggcagccggattaaaggagaagaccctcatcctacttgatgtgtccacaaagaacccagtgaggactgtcaacgagaatttcctttccctgcagttagaccccagcataatccatgacggctggttagacttcctgtctagcaagagattagttacgctcgcccgaggtctgtctccagcatttctaagattcggtggcaaacgcaccgattttctgcagttccagaatcttcgtaaccccgcaaagtcccgcggagggccaggaccagattactatttaaagaattacgaggacgacattgtccggagtgatgtggcccttgataaacagaagggctgcaaaatcgctcagcaccccgacgtgatgttagaactgcaacgggagaaggccgcacagatgcacttggttctactgaaagagcagttcagcaatacctatagcaacctcattctgactgcacgttctctagataaactgtacaattttgccgactgttccggtttacatctaatatttgctctaaacgctctaaggcggaatccaaataactcttggaatagttccagcgcactctctctgttgaaatacagcgcctctaagaaatataacatctcttgggagctgggcaacgaaccaaacaactatcgaaccatgcacggacgagcagtgaacggaagccagctcggaaaggattacattcagctgaagagtctgctgcagccaatccggatttacagtcgcgcaagtctgtatggtcccaatataggccgacctagaaagaatgtgatcgccttgttagatggtttcatgaaagtggccggatcaactgttgacgcggtgacatggcaacattgctatattgatggcagggtagtcaaggtgatggactttctcaaaaccaggctgctcgacaccctctcagatcagatccgcaagatccagaaggtcgttaacacttacactcccggaaagaagatctggctggagggtgtggtgactacaagcgctgggggtaccaacaacctgtccgactcttatgccgcaggctttctgtggctcaatacacttggcatgttagccaatcaagggattgacgtggtgatacgccatagtttctttgaccacggctataatcatctggtggaccagaattttaaccccctgccagactactggttgtcgctcctttacaagaggcttatcggaccgaaggtactggcagttcatgtggctggactgcaacgaaaaccaaggccagggcgtgtgatccgggataagttgcggatctacgctcactgcacaaatcatcataatcacaattacgttagaggtagtataacgctgtttatcattaacctccacagaagcagaaaaaaaataaaactggcgggtacgttgcgcgacaaattagtgcaccagtacctgctgcagccatacggacaagaagggcttaaaagcaaaacccagaggtgccagtattgtgggattatttag

SEQ ID NO: 225930 - DNA, 1605 bp, synthetic construct
  misc_feature 1..1605: note = Description of Artificial Sequence: Synthetic coding sequence
  source 1..1605: mol_type = other DNA
atgcgagtcctgtgcgccttcccagaggccatgccatcctctaatagccgtccgccagcctgccttgccccaggagccctgtacctcgccctgcttttgcacctgtccctcagctctcaggctggggacagaaggcctttgcctgtggacagggcagccggtctgaaggaaaagaccctgatcctgcttgacgtctcaactaagaaccccgtgaggaccgtgaacgagaacttcctgtcattacaacttgacccttctattatccatgacggctggttggacttcctctcttctaagagactcgtgacccttgcccgagggttgagcccggcttttctgaggttcggcggaaaaaggacagacttcctgcagtttcagaaccttcggaaccccgcaaagagccgaggcggacctggcccagactattatcttaaaaactacgaagacgatattgttaggtctgacgtcgctttagacaagcagaagggttgcaaaatcgcccaacatcccgacgtcatgctggagttacagcgtgaaaaggctgcacagatgcacttggttttgctgaaggagcaattcagcaacacctactctaacctgatacttacagagccaaacaattatcgtactatgcatgggagagctgttaatggctctcagctgggcaaggattatattcagctcaaatcccttctgcagccgattagaatatacagccgcgcatccctatatgggccaaatattgggagaccacgaaagaacgttatcgcactgctcgacgggtttatgaaagtggctggctcaaccgtagacgcagtcacctggcaacattgttacatcgacgggcgtgtcgtcaaagtcatggatttcttgaaaaccagactactcgacacactgagcgaccaaatacgcaagatccagaaagttgttaatacctacacccctggaaagaagatctggctggaaggagtggttaccactagtgccggagggaccaataacctgagtgatagctatgccgctggatttctatggctcaacaccctgggcatgctagctaaccagggaattgacgtagtgattcggcacagtttttttgatcacggctataaccaccttgtagatcagaatttcaatccacttcccgattactggttgtcattgctctataagaggctgattggtcctaaagtgttagcagtccacgtcgctgggctgcaaaggaaacctagacctggtcgcgtcatcagagacaaactcagaatttacgcacattgtactaaccatcacaatcataattacgttcgcggaagcatcaccttattcatcatcaatctccatagatctagaaagaagatcaagttagccggtaccttgcgcgataaactggttcatcagtacttgttgcagccttacgggcaggagggcctaaagagcaaaagcgttcagctgaatggccagcctctcgtaatggtggacgatgggacactcccagagctgaaacccagaccactgagggccggtcggaccctcgtgattcctccagtaactatgggtttctatgtggtgaagaacgtgaatgctcttgcatgccggtacagatag

SEQ ID NO: 225931 - DNA, 1779 bp, synthetic construct
  misc_feature 1..1779: note = Description of Artificial Sequence: Synthetic coding sequence
  source 1..1779: mol_type = other DNA
atgagggtgttgtgcgcttttcccgaagctatgccctcctcaaactccagaccacctgcctgtctcgcaccgggagcactttatttggcacttctcctgcacttgagtttgtcatcccaagcaggtgacaggcggccactgccagttgatcgagcggctggtctcaaggagaaaactcttattctgctggacgtctcaactaaaaaccccgtgcgcacggtcaacgaaaacttcctctcactgcaactagatccttctatcattcacgatgggtggttggacttcctctcaagcaagcggctcgtaaccctcgcccgtggattgagcccagctttcctgagatttggcggaaaaaggaccgattttctgcagttccagaatttgaggaaccccgcaaagtcaagggggggtcccggacctgactattacttgaaaaattacgaggatgatatcgtacgaagtgatgtggccttggacaagcaaaaaggatgcaagatcgcccagcatcccgacgtgatgctcgagctgcagcgcgaaaaagccgcacaaatgcacttggttcttctgaaagagcagttcagcaatacctactcaaaccttattctgaccgcacggtctctggataaactgtacaatttcgcagactgcagtggcttacatcttatctttgcccttaatgcacttcggagaaatccaaataacagctggaactcctcctctgcactatcattgctgaaatactctgcctcaaaaaagtacaacatttcctgggagctcggcaatgagccaaataactataggacaatgcacggcagggcagtaaatggctcacagctgggcaaggactacattcagctgaagtcattgctgcagcccatcagaatatactcgagagcttctctctatggcccaaacatcggaagaccacggaaaaatgtgattgccctgctggacggcttcatgaaagtggccggttctacagtcgacgcggtcacctggcaacattgttatatagacggtcgcgttgtgaaggtgatggatttcttgaaaaccagactgctggacacactctcagaccagatccggaagattcagaaagttgtgaatacttatacaccgggaaaaaaaatttggttggagggggttgtgaccaccagcgccggaggaacgaataacctgtcggactcttacgccgctgggttcttgtggctcaacacattgggtatgttggcaaaccagggaatcgacgttgtcatccggcactccttctttgatcatgggtacaatcacttggttgatcagaattttaacccattgccggactattggctttcactcctgtacaaaaggcttatcgggccaaaggttctggccgtgcacgtcgctgggttgcagaggaaaccacgacctggtagggttatacgagacaagctgagaatttacgcgcactgtacgaaccatcataatcataattacgtgcggggatctatcacactcttcattatcaaccttcacaggagtcgcaagaaaatcaaactcgcaggaactctgcgcgacaaactggtgcaccaatacctcctacagccctatggccaggagggcctgaagtcaaaaagtgtgcagctcaacgggcaaccattggtcatggtagacgacgggaccctgcctgaactaaagccccgtcccctgagagcagggagaaccttggtgattcccccagtgactatgggcttttacgtggttaagaatgtgaacgcactcgcctgtaggtatcgatag

SEQ ID NO: 225932 - DNA, 1443 bp, synthetic construct
  misc_feature 1..1443: note = Description of Artificial Sequence: Synthetic coding sequence
  source 1..1443: mol_type = other DNA
atgcgcgtgctttgtgccttccctgaggctatgcctagttccaatagcagacccccagcctgtctcgcacccggtgccctctacttggccctgctgctccatcttagcctgagctctcaggctggcgatcggaggcccttgcctgtcgatagggcagctggactgaaagaaaagaccctcatcctactggacgtctctacaaaaaatcctgtccggacagttaatgagaattttctgtccctgcagctggatccaagcattattcatgacggatggctcgacttccttagcagtaaacggcttgtcacccttgccagaggtctcagccccgcttttctgaggtttggcggaaagaggacagattttctccaatttcagaacctgcggaatcctgcgaagtcccggggaggtcccggacccgattattacttaaagaactatgaagacgaacccaacaattatcgcactatgcacggccgagccgtgaacggcagtcaactaggaaaggattacatacagctgaagagcctgctccaaccgatccgaatttattctcgagccagtctgtacggcccaaacatcggcaggccgaggaaaaatgtgatcgcgttgctcgatggctttatgaaggttgccggatctaccgtcgatgcggtgacgtggcaacactgttatattgatggcagggtagtgaaagtgatggacttccttaagactcgtctgctggacacccttagcgatcaaattcgtaagatccagaaggtggtcaatacatacactcctggtaagaagatatggctagagggtgtggtgactactagcgccggaggaacgaacaatctctccgactcgtatgcagccggattcttgtggctcaatacactgggaatgctggctaatcagggtattgacgtggtcatccggcattccttcttcgaccacggatacaatcaccttgtggaccaaaacttcaatccattgccagactactggctgtccctgttgtacaagcgcctcatcggtcccaaagtgttagcagttcacgttgcgggattgcaacggaaacccaggcccggtcgtgtgattcgagataagctccgaatctacgctcactgtaccaatcatcacaaccacaactatgtcagggggagcattaccttgtttattatcaacctccataggtcacgcaagaagatcaaactcgccggaactctccgggataaattggtacaccagtacctgcttcaaccgtacggacaggaagggttgaagagcaaaagtgtgcaacttaatggacagcctttagtgatggtagatgacggcacattgcccgagctgaagccaaggcccctcagagcagggagaacactggtgataccccctgtgactatgggtttctatgtagtgaagaatgtgaatgctctggcgtgtaggtacagatag

SEQ ID NO: 225933 - DNA, 1251 bp, synthetic construct
  misc_feature 1..1251: note = Description of Artificial Sequence: Synthetic coding sequence
  source 1..1251: mol_type = other DNA
atgaaaagagagcgtggtgccctgtcacgagcatctcgagctttgagactcgcaccctttgtgtacctgctcctcattcagactgaccccctggagggtgtgaacattacaagccctgtcaggttaatacacggaactgttggcaagtcagcactgttatcagtgcagtactcttccacctcttctgatcgccctgtcgtgaaatggcagctgaagcgggataagccggtgaccgtcgtgcaaagcatcgggactgaagtgatcgggactctgcggccagattatcgagatcggattcgtctgtttgaaaatgggtccctcctcctttctgacctgcagctggctgacgaaggtacttacgaagtggaaatttccatcaccgacgacaccttcacgggggagaaaaccattaatctgactgttgacgttcccatctctagaccccaggtactggttgcaagtaccacagtgttagaactgtcggaggcatttaccctcaactgcagccacgagaacgggactaagccctcatacacatggctcaaagacggtaaacctctcctgaacgactcccggatgctgttgtcgccggaccagaaggtgctgaccattacgcgcgtgctcatggaagacgacgacctgtattcctgcatggtcgagaaccctatctctcagggcaggtccctgcctgtgaaaataacagtgtacaggaggtccagtctctatattatcctcagcaccggcggtatattcttactggtaactttggtgactgtgtgcgcctgttggaagccaagtaagagaaagcaaaaaaaactggaaaaacaaaactcccttgagtatatggaccagaacgacgatcgactgaaacctgaggcagacactctgcccagatctggcgaacaggagcgcaaaaaccccatggctttgtacattttgaaagataaggattccccagaaacggaggagaatcctgcaccagagccgcgatcagccaccgaacctggcccacctggctacagtgtatcaccagcagtcccgggaagaagccctggactccctatccgttccgccaggcgttatcccaggtctcctgccagatccccagctactgggcgtacccattcctctcccccacgtgcacccagctctcctggcaggagcaggtcagccagccgaacacttcgcacggccggagtccatatcatcagggaacaggatgaagccggacctgtagagattagtgcctag

SEQ ID NO: 225934 - DNA, 1104 bp, synthetic construct
  misc_feature 1..1104: note = Description of Artificial Sequence: Synthetic coding sequence
  source 1..1104: mol_type = other DNA
atgaagcgtgagaggggcgctttgtctcgagccagcagggctctgaggctggccccatttgtgtacctcctgctgatccagacagatccacttgaaggcgtaaatattaccagcccagtccgtctgatacacgggaccgtggggaagtctgctcttctgtccgtacaatactcctctaccagctctgaccgaccggttgttaagtggcagttgaaaagggacaagcccgttaccgtggtgcaaagcatcggaaccgaggtgattggcaccctgcgacccgattaccgagaccgcattaggttattcgagaacggtagtctgctgctgtcagaccttcagctggcagacgaggggacgtatgaggtggagatctccattacagacgataccttcaccggcgagaagacaatcaatctaaccgtggatgtaccgatctctcgcccacaggttctggtggcgtctactaccgtactcgagctgtccgaagcctttacgctgaattgctcccatgagaacggaactaagccttcctacacttggctgaaagatggaaaaccgctgctcaatgacagcagaatgctgctatctcccgatcagaaggtcctgaccataacacgcgtcctgatggaggacgatgacctgtactcttgtatggtcgaaaacccaatttcccagggtcggtcactgcccgtgaaaatcacagtgtacagacgttcctctctttacattattctctcaaccggtggtatttttctgcttgtgaccctcgtaactgtatgcgcttgctggaagccatccaagaggaaacagaagaagctggagaaacagaattcattagagtatatggatcaaaacgatgaccggctcaaacctgaaggtgaactgccggctactcagtcaccaattccttcaacaatcagatcagtaggatgctgggagaaggctgagctgggcgacaaagaaaactcttccgccggaaccctgccgtctgatcttggcgctagcaaaggcaaagagcccgaacctgcttcgctagcctctagccacagcctcccaagacggcacgccatgccgagcaccctttccgtgtccgttcacgagtag

SEQ ID NO: 225935 - DNA, 669 bp, synthetic construct
  misc_feature 1..669: note = Description of Artificial Sequence: Synthetic coding sequence
  source 1..669: mol_type = other DNA
atgtcccaaaccaaaatgcttaaagtcagggtgactctgttctgcatcctggccggaatcgttctggccatgactgccgtagtaactgatcattgggctgttctgagtccccacatggaacaccataacaccacgtgcgaggccgctcactttggcctctggagaatttgcacaaaaagaattcctatggacgatagcaagacatgtggaccgatcacgctgccgggtgagaagaattgcagctactttagacacttcaatccaggagagagttccgagatctttgaattcacaacccagaaggagtactcgatctcagctgcagcgatcgcaatcttctccctcggattcataatccttggatcactgtgtgtattgcttagccttgggaaaaagcgggactacctgctgcggccagcgagcatgttttacgcctttgctggcctgtgcatcttagtgagcgttgaagttatgaggcagtctgtgaagagaatgatagactccgaggatacggtttggatagaatactactactcctggtccttcgcatgcgcttgtgcagcatttatccttctctttttggggggtctggccttgctgctgttcagcctgccacggatgcctaggaacccctgggagtcttgtatggatgcagaacctgaacactag

SEQ ID NO: 225936 - DNA, 633 bp, synthetic construct
  misc_feature 1..633: note = Description of Artificial Sequence: Synthetic coding sequence
  source 1..633: mol_type = other DNA
atggacttggaagagtttctgtccgagaatggcatcccccctagcccatcccagcacgatcacagcccccatccccctggacttcagccagcctccagtgcagccccttctgtgatggacctgtccagtcgggcttccgcccctctgcacccaggcatccctagcccaaactgcatgcagagccctatacggcctggccaactactcccagctaacaggaatacaccgagtcccattgatcccgacaccattcaagtccccgtaggttacgaacccgatcccgcagacttagccttgagcagcatccctggccaggagatgttcgacccaaggaagagaaaattttccgaggaagagcttaagccccagcccatgatcaaaaaagccaggaaggtttttatccctgatgatttaaaagatgacaagtactgggcccgtagacgtaaaaacaacatggcagctaagaggtctagagatgccagaaggttgaaagaaaatcagatcgccatacgagcgagtttcttagaaaaagaaaatagcgccctcaggcaagaagtggcagacctcaggaaagagttgggaaaatgcaaaaacatactcgcaaaatatgaggccaggcatggaccactgtag

SEQ ID NO: 225937 - DNA, 1095 bp, synthetic construct
  misc_feature 1..1095: note = Description of Artificial Sequence: Synthetic coding sequence
  source 1..1095: mol_type = other DNA
atgcaccctcaggttgtgattctttccctgatcctacatctagccgattccgttgccggtagcgtcaaggtgggaggcgaagctgggccttccgtgaccctcccctgtcattatagcggagccgtcacaagcatgtgctggaatcggggatcatgctcactgtttacttgtcagaacggcatcgtttggaccaacgggactcacgtgacataccgcaaagatacacgctataaactgctcggagacttgagtcgcagggatgtgagcctcacaatcgaaaacacagcagtgagcgattccggcgtgtattgctgccgcgtggaacatcgtggttggtttaatgatatgaaaatcaccgtcagtcttgagatagtgcctcccaaggtgaccactacccctattgtgaccacagtgcccactgtgacgactgtacgtacgtccaccactgttcctactaccaccaccgttcccatgacaacggtccctaccacgactgttcccaccacaatgtctataccaacaaccacaaccgttttgacaactatgaccgttagcacgacgactagtgttcctactaccactagcatccccaccactacaagcgtaccggtcacaacgaccgtatcaacctttgtgcctccgatgcctctgcctcgacagaaccacgagccagttgcaacctccccttcatcccctcaacccgcagaaactcatcctacaaccctgcagggggctatacgtcgtgagcccacctcaagtcctttgtactcttacacaaccgacggcaacgacaccgttactgagtccagcgatgggctctggaacaacaatcaaactcagctttttctcgaacattcgctgctgacagctaacacgaccaaagggatctatgcaggagtgtgcatttccgtcttggtgctgttagccctgcttggtgtgataatcgcaaagaaatactttttcaaaaaggaagtgcaacagcttagcgtgagcttttccagtctccagatcaaagccttacagaatgcagtggaaaaggaagtgcaggctgaggacaatatttacatcgagaactctctatacgcgaccgactag

SEQ ID NO: 225938 - DNA, 1206 bp, synthetic construct
  misc_feature 1..1206: note = Description of Artificial Sequence: Synthetic coding sequence
  source 1..1206: mol_type = other DNA
atgcacccgcaggtagttatactcagccttatcttgcaccttgccgatagtgtagctggctccgtaaaagtaggtggagaggctggtccctcggtcactctgccatgtcactattccggtgcggtaacaagtatgtgttggaatcgtggctcttgctcactcttcacatgccaaaacggaatcgtctggactaatgggacacatgtcacataccgtaaagatacacgctataagctgctaggtgacctctctaggagggacgttagtttgacaatcgaaaacacggccgttagtgacagcggagtttattgttgccgggtcgaacatcgcggttggttcaacgatatgaagatcacagtctccctggagatcgttccccctaaggtgaccacaacccccatcgtcacgacagtgcctaccgttaccacagtgaggacaagcactacagtgcccacaaccactaccgtgcctatgactaccgttcccaccaccacagtccctacaaccatgtcaatacctaccaccaccaccgtgcttacgacaatgacagtatccaccacaacgagtgtccccacgacaacgtctatccccaccaccacatcagtgccggtcaccaccacagtgtccacctttgtgcccccaatgccgctgccgaggcagaatcatgaaccagtggcaacaagtccaagttcaccacagccagctgagacacatcccacaacactccagggagccatcagaagggagcctactagctctcctctgtactcatatactacagacggcaatgatactgttactgaatcctccgacggattgtggaataataatcagacccaactgttcctcgagcacagcctcttaacagctaataccacaaagggaatttacgccggagtctgcattagcgtgttggttttactcgcattgctgggggtcattattgctaagatgtttcatctcgccgcattcaagttgaaactgtgtaaaatgcaactaaagcgtaaaagcaagcagaagaccatttcaactcttagaatcgtctttatgccacgaactaaaacccagtggtgctcactgagagtctacgcacacgagtgccgtagactcaacagacaccagcacatccggaggctattagaccccaagacaatctttctgtttcaatttcatcttgcattccaacacgtctcagacaccggctag

SEQ ID NO: 225939 - DNA, 672 bp, synthetic construct
  misc_feature 1..672: note = Description of Artificial Sequence: Synthetic coding sequence
  source 1..672: mol_type = other DNA
atgcatccccaggtagtgatccttagtctgattttacaccttgccgatagtgtcgccggttctgtcaaggtggggggtgaggccggaccttctgtgactcttccctgtcactactcaggcgcagtgaccagtatgtgctggaacaggggttcctgttccctctttacctgccagaacggtatagtgtggaccaatggtactcatgtcacctatcggaaggacactagatacaagcttctgggagatctgtcccgcagggacgtgtcgctcactattgagaataccgctgtgtctgatagcggggtctattgctgcagagttgaacacagaggatggtttaatgatatgaaaatcacagtgtctctggaaatcgtgccacctaaggtaactaccaccccaatcgtaacaaccgtccccaccgtgaccactgtgcggacatccactaccgtccctaccacaaccacagttcctatgacgaccgtgccgaccacgactgtgcccacgacaatgtcaattcccacaactacaacggtgttgaccactatgacagtgtcgacgacaacatctgtccctactaccacaagcatccccactactacaagtgttccagttactaccacagtcagtactttcgttcctccaatgccactgcctagacaaaatcatgagtag

SEQ ID NO: 225940 - DNA, 1095 bp, synthetic construct
  misc_feature 1..1095: note = Description of Artificial Sequence: Synthetic coding sequence
  source 1..1095: mol_type = other DNA
atgcacccgcaggtggtaattctgagtctcattttgcacctcgcggattccgttgcaggctctgtgaaggtgggcggagaagctggtccaagcgtcacactgccttgccattatagtggagcggtaacaagtatgtgctggaatagaggaagttgcagtctgtttacctgccagaatggtatagtttggaccaatggaacccacgtgacttacaggaaggacactcgctacaaactattaggcgacttgagcagacgggacgtgtcactgacaattgagaatactgcagtcagtgactcaggggtgtactgttgcagggtcgagcaccgcggttggttcaacgatatgaagataactgtaagcctggagatcgtccccccaaaagtgaccaccactcctatcgtgactacagtccctaccgtcaccacggtgagaaccagcaccactgtgcccactacgaccactgtgcccatgacaacagtcccgacaacaacagttccaacgacaatgtcaatccccactaccactactgttctgaccacgatgactgttagcaccacaacatccgtccccactactacctccatccctacaacgacgtcggtgcccgtgactacgaccgtgagcacatttgttcctccaatgcccctccctcggcagaaccacgagcccgtggccacaagtccgtcctctccacaacctgcagaaacacaccccactactctacaaggcgcaatcagacgggaaccaacttcttccccattgtattcttacacgaccgatggaaacgacacagtgacagagtcttccgacggactctggaataataatcaaacacagctatttcttgaacattctttgctcacagccaataccaccaaggggatttatgctggcgtgtgtatcagcgttctcgtgttgttggctctgctcggcgtcattatcgcgaagaaatacttcttcaagaaggaggtgcaacagttaagcgttagtttttcatccctgcaaataaaagcgttgcagaacgccgtggagaaagaggttcaggccgaagataacatttacattgaaaatagcctgtatgctactgactag

SEQ ID NO: 225941 - DNA, 1095 bp, synthetic construct
  misc_feature 1..1095: note = Description of Artificial Sequence: Synthetic coding sequence
  source 1..1095: mol_type = other DNA
atgcatccacaagtcgtgattctgagcttgatactccatctcgcagacagcgttgctggctcagtgaaggtggggggtgaggccggaccctcagtcacgttgccctgtcactattcaggggctgtaacttctatgtgctggaaccgcggatcctgcagcctctttacttgtcagaatggcatagtatggactaacggcacccacgttacatataggaaagacactcggtataagctactgggagacctctccaggagagacgttagcttaaccatcgaaaatactgctgtaagtgactccggagtttattgctgccgggtggaacacagggggtggttcaatgacatgaagattaccgtgtcccttgaaattgtgcctcccaaagtgactacaactccaattgttaccaccgttcctaccgtgacaacagtgaggacctcgactacagtgcccacgactacgactgttcccatgaccaccgtcccaactaccactgtcccaactactatgtcaattccaaccacaacaactgtgcttaccaccatgaccgtgtctactaccacatcagtgccgaccaccaccagcatccccacaaccacctccgtgccagtaacaaccacagtatccacgttcgtccccccaatgcccttgccacgacagaaccatgaacccgtcgctactagcccctcctccccacagccggcagaaactcatcctaccactctccagggggctattcggagagagcccacaagctcacccctgtactcctacacgactgacggcaacgacaccgtgactgagagttcggacggactgtggaacaacaaccagacacagttgttcctagagcatagtctgcttactgcaaacactacaaagggcatctatgcaggagtgtgcatctcagtgctcgtgctcctggctttgcttggcgtgataatagccaagaagtatttttttaagaaagaggtgcagcagctgagcgtatccttttcctccttacaaatcaaggccctccagaacgcagtagaaaaggaagtccaggccgaggataacatttacattgagaattcattgtacgcaaccgactag

SEQ ID NO: 225942 - DNA, 522 bp, synthetic construct
  misc_feature 1..522: note = Description of Artificial Sequence: Synthetic coding sequence
  source 1..522: mol_type = other DNA
atggagcccggtgccggtcatctcgacggccaccgcgctggatctccctcactgcgtcaagctctgtgcgacggttcagcggttatgttcagtagtaaagaaagaggtagatgcacagtcattaactttgtccccctcgaagcgccactccgcagcactccacgcagcaggcaggtgactgaggcgtgcggaggcgaagggcgagccgtgcccttgggcagtgaacctgagtggtccgtgggagggatggaagccaccctcgagcagcatctcgaagacaccatgaagaatcctagcattgtgggggtgctctgcacagactcacaggggttgaatctgggctgtcgtggaacgttaagcgatgagcatgcgggtgtaatcagcgtgctggcacagcaggcagcgaaattaacctctgacccaacagatattcccgtcgtgtgcctcgaatctgataacggtaacattatgatacaaaagcacgacggcataaccgtggccgtgcataagatggcgtcctag

SEQ ID NO: 225943 - DNA, 267 bp, synthetic construct
  misc_feature 1..267: note = Description of Artificial Sequence: Synthetic coding sequence
  source 1..267: mol_type = other DNA
atgggaaactggggtctgggcatcgctccatgggtcgatggtgagagcgagctggaattcagacgtctgggaatgcagggcccattggaagcacttaggagaagagagtggaatacgcagagggcctcattttcattctcgtttttaatcgcactctctccccatactgtggattattgccactcctatgagttgttcaatcggaggtggcacggacatgtgctggcaacccagagaccttctctttttatactgatgctggtgtag

SEQ ID NO: 225944 - DNA, 2334 bp, synthetic construct
  misc_feature 1..2334: note = Description of Artificial Sequence: Synthetic coding sequence
  source 1..2334: mol_type = other DNA
atgggtaggggatcagggaccttcgagagactgctggacaaggccacgtcccagctgttgctggagacggactgggagtctatcctgcagatctgcgacctgattagacaaggcgatacacaagccaagtatgccgttaattccatcaagaaaaaggtcaatgataagaacccacatgtagcattgtacgcgctggaggtcatggagagcgtggtgaagaattgcggccagacagtccacgacgaggtggcaaacaaacagactatggaggagcttaaggatctattgaaaagacaggtggaggtaaatgtgcgcaataagatcctgtacctcatccaggcttgggcacatgctttcaggaacgagcccaagtataaagtggttcaggacacgtaccagattatgaaggttgaggggcatgtgttcccagagttcaaagaatccgacgccatgtttgccgcagaacgagcccctgactgggtcgatgccgaggaatgtcaccggtgtagagttcagttcggggtaatgaccaggaagcaccattgccgcgcttgcggtcagatcttctgtggaaaatgctcttctaaatatagtacgataccaaagtttggaattgagaaagaagtaagagtgtgcgagccctgctatgagcagctcaacaggaaagcagagggaaaggccacaagtactacagagttgccgccagagtatctgactagccctctctcgcagcagtcacaacttcctcctaaacgcgatgaaacggctctgcaagaagaagaagagcttcagctggcacttgctctgtctcagtctgaggctgaggaaaaggagagacttcgtcagaaaagtacctatacctcctatcccaaggctgaacctatgccatcagccagctcagccccaccggcaagctctctctactccagccccgtcaattcatctgcccctctcgcagaagacatcgatccggagctagctagatatctcaataggaattattgggagaagaagcaggaggaggcccgtaaatctcctactcctagcgcccctgtccccctgacagaacctgccgctcagcctggagaaggccatgccgctcccaccaatgtggttgaaaaccccctgcctgagacagacagccaacctatcccgccttccggcggtccgtttagcgagccacagttccacaatggagagtcggaagagtcgcatgagcagtttctcaaggccctccaaaacgccgtgacgacgtttgtgaatcggatgaagagcaatcatatgagaggtaggtctattacgaacgattctgccgtactgagcctctttcagtcaattaatggaatgcacccccagctgctggagctgttgaatcaactggacgagcgcaggctctattacgaagggcttcaggacaagctggctcaaatccgcgacgccagaggggcattgtccgcgttgcgagaggagcatcgtgagaagctgagacgagcagccgaagaagcggagaggcagcgccaaattcaactggcacagaaactggagattatgaggcagaagaaacaagaatacctggaggtgcaacgacagcttgcgatccagcggctgcaagagcaagaaaaagagcgccagatgcgtctcgaacaacaaaagcagactgtccagatgagagcccagatgcctgccttcccccttccttatgcccagcttcaagccatgcccgcagctggaggcgtactctaccagccttccggaccggctagtttcccttcaactttctcacctgcaggttcagtggagggatcaccaatgcacggcgtgtacatgagtcagcctgcgcctgcggcagggccatacccatcgatgccatctactgctgccgaccctagtatggtctcagcctacatgtatccagctggggcaactggggctcaggcagcccctcaggctcaggctgggcctaccgcaagtcccgcttatagttcttatcagcccacccccacagcgggttaccagaatgtggctagtcaggcccctcagtcattaccagcaatctcacagccaccccagtcctccaccatgggctacatgggcagccaaagcgtcagcatggggtaccagccctacaacatgcagaaccttatgaccactctaccctctcaagacgctagcctaccgccacaacaaccttacatcgcgggtcagcagcccatgtaccagcaaatggccccatctggaggacctccccagcagcagccaccggtggcccagcagccacaagcgcaaggcccaccagcccaaggcagcgaggcccagctgatttctttcgattag

SEQ ID NO: 225945 - DNA, 2076 bp, synthetic construct
  misc_feature 1..2076: note = Description of Artificial Sequence: Synthetic coding sequence
  source 1..2076: mol_type = other DNA
atgggacggggaagcgggacgtttgaacgtctgttagataaggctacttctcaactgctcctggaaactgactgggaatccatactacagatatgtgacctgattcggcagggagatacacaggccaaatacgccgtcaattcgatcaaaaaaaaggtgaatgacaagaacccccacgtcgccctatacgcattagaggtgatggagtctgtggtcaaaaattgcggtcagactgtgcatgatgaggtggccaataagcagactatggaagagttgaaggatctgctgaagcgccaggtggaagttaatgtgcgcaataagatactgtacctaattcaggcctgggctcacgcttttcgtaatgagcccaagtataaggtggtgcaagatacttaccaaataatgaaggtggagggtcatgtgtttccagaatttaaggaatccgacgcaatgtttgcagctgaacgggctccagattgggtcgacgctgaggaatgccaccgctgcagggtccaatttggcgtgatgacccgaaaacaccattgtcgggcttgcgggcagattttttgcggcaagtgtagttccaaatacagtaccatacctaaattcggcatagagaaagaagtgcgtgtttgtgagccgtgttatgagcagttgaaccgcaaagcagaaggtaaggccactagcactacagagctgccccctgagtatctgacctcccccctgagccagcagagccaactgccgcctaagagggacgaaactgcactgcaagaggaagaggaactgcaactggcactagccttgtcacagagcgaagcagaggaaaaagagcgacttagacaaaagagcacctatacctcatatcctaaggccgaaccaatgccctctgcgtctagcgcacctcccgcatcatcattgtatagcagcccggttaactcaagcgcacccctcgctgaagacatcgatcccgaattggccaggtatctaaatagaaactattgggaaaagaaacaggaggaagctcggaagtcccctactcccagtgcaccggttcctctaactgagccagctgcccagcccggagaaggacatgcggctcctacaaatgtcgtcgagaatcctctgcctgagacggattcccagcctatccccccttctggcggaccctttagtgaacctcagttccacaatggtgagagcgaggaatcccatgaacagttccttaaagccctgcagaatgcagttaccaccttcgttaacagaatgaaatcaaatcacatgagaggcaggagtataaccaacgactctgccgtcctctcgttgtttcaaagcataaacggcatgcatccgcaactcctggagctgcttaaccaacttgacgagagaaggctatactacgaaggtctgcaggacaagctggcgcagattagagatgctcgcggtgcattgtcagccctgagagaggagcatagggaaaaactgcgccgtgctgccgaggaagctgagcgacagagacagattcagctcgcccaaaaacttgaaatcatgatgcacggggtttacatgtctcagcccgctcccgctgcgggaccctacccgagcatgcctagtactgcggcagatccatctatggtgtccgcctatatgtatcctgcaggagctactggggcacaggctgcgcctcaggcccaagcagggcctacagcaagtcctgcctatagttcttaccaacccacgcctacagccggatatcagaatgtggcttcacaggcccctcaatcgctgccagctatcagccagccgcctcaatctagcacaatgggatacatggggtcacaatccgtgtctatggggtaccaaccttacaatatgcagaaccttatgaccacactcccctcgcaggacgcctcactccctcctcagcaaccctatatcgcaggccagcaaccaatgtaccaacaaatggctccctcaggcggacctccccagcagcagcctcctgttgcccagcagccacaggcccaaggccctcccgcacagggttctgaggcccaactaatcagcttcgattag

SEQ ID NO: 225946 - DNA, 324 bp, synthetic construct
  misc_feature 1..324: note = Description of Artificial Sequence: Synthetic coding sequence
  source 1..324: mol_type = other DNA
atgaggctctcaaagacccttgtcgacatggacatggcagactactcggcagcccttgaccccgcatataccactctcgaatttgaaaatgttcaggtactcacaatgggtaacgattttgttgccgctgcctccaggcagatagaggcaagtcctcccacatctttggagcatatttggagaggaggtcagttctcaacagggaggcatgtgcccatccgaaggcatcagccacaacgggcacaacagccaggctgtcaacgtccggtttgccacttgcgcggtcccggacacggccagaccctcaggtgtctggaactgtag

SEQ ID NO: 225947 - DNA, 1425 bp, synthetic construct
  misc_feature 1..1425: note = Description of Artificial Sequence: Synthetic coding sequence
  source 1..1425: mol_type = other DNA
atgcgcttaagtaaaaccttagttgatatggacatggccgactattctgctgctctggatcccgcatacacaaccctggaatttgaaaatgttcaagtgctcactatggggaacgataccagtcctagcgaagggaccaacttaaacgccccaaacagtctaggtgtgtccgccttatgcgcaatctgcggcgatagagctactggcaagcattacggagcatcttcctgcgatggctgtaaaggttttttcaggagatctgttcgaaaaaaccacatgtactcatgtcggttttcacgccagtgcgtggtggacaaagataaaagaaaccagtgcaggtactgtagactgaagaaatgtttccgggcaggcatgaaaaaggaggccgtgcagaatgagagagatcgtatcagtacacgccgatcatcatacgaagattcaagcctaccgagcataaacgccctgctgcaagctgaagtgctgtctaggcagatcaccagccctgtgagtggcattaatggcgatatccgcgctaaaaagattgcctcaattgccgacgtttgcgaaagtatgaaggagcagctgcttgtactggtggaatgggcaaaatacatccccgcattttgcgaactcccactcgatgatcaggtggccttgctgagggctcacgcgggagagcacctcttactgggagccacgaagagatccatggtgttcaaggacgtgctgctgctgggaaacgactatatcgtccccagacactgtcctgagctagctgagatgtcccgagtgagtatacgcatactggacgagcttgtacttccttttcaagagctgcaaattgacgacaatgagtatgcgtacttgaaggctatcattttcttcgaccccgacgctaagggcctatcagaccccggtaagattaagaggctccggtctcaggtgcaagtgtcactggaagactacattaacgacaggcagtacgactctcgtggaagattcggtgaactgttgctgttgctgccaacactgcagagcatcacttggcagatgattgagcagattcagttcattaagctgtttggaatggcaaaaattgacaacttactccaggaaatgctgctgggtggttctccctctgacgcgccacacgctcatcatcctctgcacccacacttgatgcaggagcacatggggaccaacgtaatcgttgctaacactatgcctacacatctaagcaacgggcagatgtgcgaatggccacgcccacgcggtcaggcggctacccccgagaccccacagccatcccctcccggagggtctggttccgaaccttacaaactgctgcccggtgcggttgccacgatcgtaaagccactttccgcaataccccagcctaccatcacgaagcaggaagttatctag

SEQ ID NO: 225948 - DNA, 1359 bp, synthetic construct
  misc_feature 1..1359: note = Description of Artificial Sequence: Synthetic coding sequence
  source 1..1359: mol_type = other DNA
atggtatccgtgaatgcgccacttggcgcacctgtagaaagtagctatgatacatccccttctgaaggaactaacttgaatgccccaaatagtttgggggtgagcgccctgtgtgccatttgtggggacagggcaaccgggaaacattatggtgcaagttcttgtgacggatgcaaaggatttttcaggcgctctgttaggaaaaaccatatgtacagttgcagatttagtaggcagtgcgtggttgataaagacaagaggaatcaatgcagatattgtcggctgaagaaatgtttccgcgcaggcatgaagaaggaggcggtccaaaatgaacgggataggatctctacaaggagaagctcctacgaggactcaagtctgccctcaatcaacgcactcctgcaggcggaggtgttgagccgacagatcacatctcctgtaagtgggataaatggcgacatcagggctaaaaaaatcgcctccattgccgatgtgtgcgaatctatgaaggagcagttactagtgctagtggaatgggccaagtatattcccgctttttgcgagttacctctcgatgaccaagttgccctcctcagagcacacgcgggagagcatttactgctgggggctactaaacgatccatggtgttcaaggatgtcctgctgctggggaatgactacattgtgcctcggcactgtcctgagcttgccgaaatgagcagggtttctattaggatcctagacgaactggtgcttccctttcaagaattacagatagatgacaacgaatacgcgtatctgaaggccattatctttttcgatcccgatgcgaaagggttatccgaccccggtaaaatcaaaaggcttaggtctcaggtgcaagtgtcattagaggactacattaacgataggcagtacgattcccgtgggaggtttggtgaactgctcttactcttgcccactttgcagagtatcacttggcagatgattgaacaaatccaattcatcaagctattcggaatggccaagatcgacaatttgctgcaggagatgttgctgggaggctctccttcagacgctccacatgcgcaccatccgctgcacccacatctcatgcaggaacatatgggcaccaatgttatcgtggctaatacgatgccgacccatctctctaacgggcaaatgtgtgaatggcctcgcccacgcggacaggccgcaacgcctgagacgcctcagccaagtccacccggtggaagcgggagcgaaccgtataagcttttgcctggcgctgtcgcaaccattgttaagccactgagcgccattccccaacccaccattaccaagcaagaggtcatctag

SEQ ID NO: 225949 - DNA, 1515 bp, synthetic construct
  misc_feature 1..1515: note = Description of Artificial Sequence: Synthetic coding sequence
  source 1..1515: mol_type = other DNA
atgagactatcaaagaccctcgtggacatggacatggccgactactctgcagccctggacccagcttatacaacactagagttcgaaaatgtgcaggtgctcacgatgggaaatgttttgttaccgctgcggctagccagactgaggcaccccctaagacatcactggagtatttccgggggagtggacagcagcccacagggcgacaccagcccatccgaagggactaatctgaatgctccgaactcactcggtgtatcagccctgtgcgcgatctgcggcgaccgggcaacaggcaaacattacggcgctagctcttgcgatggctgcaaagggttctttaggagatcagtcagaaagaatcacatgtattcttgtcggttcagccgtcaatgcgttgttgataaagataagcggaaccagtgtcgctattgtcggcttaagaagtgctttagagctgggatgaagaaggaggctgtacagaacgaacgggaccggattagtactagacgcagtagctacgaggatagcagtctaccaagtataaacgccctgttgcaggccgaagtattgtctagacagataacttctcctgtctctggaatcaatggggacatacgagcaaaaaaaatagcgtcaatagccgacgtgtgtgaatccatgaaagagcagctgttggttctggttgaatgggctaagtacatccctgcattttgtgaattgccactggatgaccaggtagccctattgcgagctcacgccggagaacacctgctgctcggggcaacgaagaggtccatggtttttaaggatgttctcttgctcggcaacgactatatagtgcctcgccattgccccgaactggcagagatgagccgcgtgtctatcagaattctcgacgagctcgttttgcccttccaggaactgcagatcgatgacaatgagtacgcctacctaaaggctatcatattttttgaccccgatgcaaagggcctcagtgacccaggcaagattaaacgcctgaggtctcaggtgcaggtctcgttagaagattacatcaacgaccgacagtacgactcccggggaaggttcggagagctcttgctgttgctgcctaccctgcagagtattacgtggcaaatgatagagcagattcagttcattaaactctttgggatggcaaagattgacaacctgttgcaggagatgttgcttgggggatccccttctgacgctccacatgcccatcaccctcttcaccctcacctaatgcaggaacacatgggcaccaacgtgatagttgccaacacaatgcccacacacctgagcaacgggcaaatgtgtgagtggcccaggccgaggggccaagccgctacacctgagaccccccagccgtcacccccagggggaagcggtagtgaaccatataaactgcttccaggagcggttgcgacaatcgtcaagcccctgagcgccattccccagcccactatcactaaacaggaagtgatttag

SEQ ID NO: 225950 - DNA, 1395 bp, synthetic construct
  misc_feature 1..1395: note = Description of Artificial Sequence: Synthetic coding sequence
  source 1..1395: mol_type = other DNA
atgagactctccaaaaccctcgtggatatggacatggctgactactccgccgctctggatcctgcttacactaccttggaattcgagaatgtgcaggtgctaactatggggaatgacactagtccctcagagggtacaaacctgaatgcaccgaatagcctcggtgtctccgcgctgtgcgcgatttgcggcgatagggctaccggcaagcactacggcgcatccagctgcgatggttgcaaaggatttttccggaggagcgtgcggaaaaatcatatgtacagttgcaggttttctcgacagtgtgtggttgataaagataagagaaatcagtgccgctactgccgtctaaaaaagtgctttcgggctggaatgaaaaaggaggcagtgcagaatgagcgtgacaggatttcgacaaggagaagctcctacgaggactcctctttaccatcaatcaatgccctgcttcaagctgaagtactcagtagacagattaccagccccgtttcaggtattaacggtgatataagggccaagaaaatagcaagcattgccgacgtctgcgaatctatgaaggagcagttgcttgtgttggtggaatgggctaagtatataccagccttctgcgaactgcccctggatgaccaggtggccctgctgagagcccacgcaggagagcacttgctcttgggagctactaagaggtctatggttttcaaagacgtcctgctgctgggaaatgactatatagtcccacgccactgccccgaactggctgagatgagtcgggtctcaatccgcatccttgacgaactcgtactgcccttccaggaattacagatcgacgacaacgagtatgcgtaccttaaggccatcattttcttcgacccagacgccaagggcctgtcagatccagggaaaattaagcgcctcaggtcacaggtgcaagtgtccctcgaggactacatcaatgaccgccaatatgactctcgcggtagattcggagaactgttgctactccttccaaccttacagtctataacctggcagatgattgagcagattcaattcatcaaactgttcggaatggccaaaatagataacctcctgcaagagatgctcctggggggaagtccttcggacgccccacatgcccaccaccccctgcaccctcacctgatgcaggagcatatgggcactaacgtgatcgtggcgaacactatgcccacacatctttcaaatggccagatgagtacgccagaaacaccccagccgtcccctcctgggggatcaggctctgaaccatacaagcttctccctggcgctgtggccaccatagtcaaacctctgagcgctataccacagcctaccatcaccaagcaggaagtaatatag

SEQ ID NO: 225951 - DNA, 1254 bp, synthetic construct
  misc_feature 1..1254: note = Description of Artificial Sequence: Synthetic coding sequence
  source 1..1254: mol_type = other DNA
atgcgcctgagtaaaacccttgttgatatggacatggccgactattcagctgctttagatcccgcatatacaacactcgagtttgagaacgtgcaggttctcacaatgggtaatgacacatcacccagcgagggaactaacttaaacgcgcctaacagcctgggagtgtctgccctctgcgccatatgcggggatcgggctactggcaaacattatggcgctagctcctgcgacggctgtaagggcttttttaggcgcagtgtcagaaaaaaccacatgtactcctgccggtttagccggcaatgcgtggtggataaggacaaaaggaatcaatgtagatactgccggctcaaaaagtgcttcagagccggaatgaagaaggaagcagtgcagaatgaaagagaccgaatttcaactaggagatcatcatacgaggattcctcgctgccatctatcaacgccctgctgcaagccgaagtcctttcccggcagattactagtcccgtgtcgggcataaatggagatatacgagccaagaagattgccagcatcgccgatgtgtgtgagtcaatgaaggagcagctgttggtgctcgtggagtgggcaaagtatattcccgctttttgtgagctccctctagacgaccaggtcgccctgctgagagcccatgctggtgaacacctgctgttgggcgctacaaagcggtccatggtcttcaaggacgtcctcctgctgggtaacgactatattgtcccgaggcactgtcctgaactggctgaaatgtcccgggtctccatcagaattcttgacgagttggtgctgcccttccaggagctccaaatcgacgataatgaatacgcctacctgaaagctataatattcttcgatcccgacgccaaaggattatctgaccccggaaaaataaagagactacggtcccaagtccaagtgagtctggaggattatattaatgaccgacagtacgattcccggggaagattcggggagctgctgctgcttctgcccactttgcagtccattacgtggcagatgatagagcagatccagttcattaaattattcggtatggccaagatcgataatctcttgcaggagatgcttttgggtggtccgtgccaagcacaagaaggccgagggtggtctggggacagccctggcgatagaccccatacagtatctagccccctatcgtcactggccagtcccttgtgccgtttcgggcaggtggcctag

SEQ ID NO: 225952 - DNA, 1329 bp, synthetic construct
  misc_feature 1..1329: note = Description of Artificial Sequence: Synthetic coding sequence
  source 1..1329: mol_type = other DNA
atggttagcgtaaacgcacctctcggcgcacccgttgagtcttcctacgatacttcccccagcgagggtaccaatctgaatgccccaaattcgttgggggtcagtgccctgtgcgcgatatgtggggatcgcgcaacagggaagcactacggggcatcttcttgtgatggatgtaaagggttttttagaagatcagtgagaaagaaccatatgtatagttgccgcttctctcggcagtgcgtggtggacaaagataaacggaatcaatgcagatattgccggctgaaaaagtgctttcgagccggaatgaaaaaagaagctgtgcagaatgaaagagatcgtattagcacacgtagaagttcttatgaggattcctcactgccatcaattaatgcactgttacaggcagaggtcctctcaagacagattacaagtccagtgtctggcatcaatggtgacattcgagcgaaaaagatcgcctcaatcgccgatgtttgcgaaagcatgaaggaacagcttctggtgttagtggagtgggccaaatacatcccagcgttctgtgagttgccacttgacgaccaggtggcactcttgagggctcatgcgggtgaacatctcttgttgggcgctacgaaaaggtctatggtctttaaggacgtcctactcctggggaatgactacattgtaccacgccattgcccagagctggcagaaatgagccgcgtgtccatccggattctcgacgaactggtgcttccattccaggagctgcagatcgacgacaatgagtacgcgtatttaaaggccattatctttttcgaccccgacgcgaagggcctctccgatcctgggaaaattaagcgtctaaggagccaggtccaggtatcccttgaagactatatcaacgatcggcagtacgattcgcggggacgcttcggagagctgctgttattgctgccgacattgcagagcatcacctggcaaatgatagagcaaatccagtttattaagctgtttggaatggccaaaatcgacaatctgctgcaagagatgctgctggggggatcacccagcgatgcaccgcatgcccaccacccactgcatccccatctgatgcaggagcatatggggaccaatgtgatcgtagctaacaccatgccaacccatctgagtaacggtcagatgagcactccagagaccccacagcctagccctcctggaggctctggatcagaaccctacaaacttctccccggtgccgtcgcaacaattgtcaagccgctctccgccataccacagcctactattacgaagcaagaagtcatttag

SEQ ID NO: 225953 - DNA, 1227 bp, synthetic construct
  misc_feature 1..1227: note = Description of Artificial Sequence: Synthetic coding sequence
  source 1..1227: mol_type = other DNA
atgaataccaccgacaatggagttaactgtttatgcgccatatgtggagatagggccacaggaaagcattatggagccagcagttgcgacggttgtaaaggattttttaggcgaagcatcaggaagtctcacgtatatagctgtagattttccagacaatgtgtagtcgacaaggataaacggaatcagtgcagatactgccgcctacgcaagtgttttcgagctggcatgaagaaagaggccgtccagaatgagcgcgacagaattagtacaagacgttctactttcgatggttctaacattccctcaataaacaccctcgctcaggctgaggtgaggtcaagacaaatttcagtttcctctcccggtagctctaccgatattaatgtgaagaagattgcaagcattggcgacgtgtgtgagtctatgaagcagcagttgctggtactggtggaatgggctaaatacattccagccttctgcgagctcccattggatgatcaggtagcgttgctaagggcccatgccggtgagcacctgctgctcggtgctaccaagcgttccatgatgtataaggacatcttgctattaggaaacaactatgtgattcatagaaactcatgtgaggtagagatcagtagagtggcgaacagagtcctggacgagttggtcaggcctttccaagaaatccagatcgatgacaacgagtacgcatgcctgaaagcaattgtcttcttcgatccggatgccaaggggcttagcgacccagtcaagatcaagaacatgcgcttccaagtacagatcggactggaggattatattaatgacaggcagtacgactctcgaggcaggttcggggagctacttctgttgttaccgactctgcagagtatcacatggcagatgatcgagcagatccaatttgttaaattattcggtatggtgaagattgataatctgttacaggagatgttgctaggcggtgccagcaatgacggtagccacctgcatcatcccatgcatccccacctgtctcaggacccgttaaccggacaaaccattctgttaggccctatgtctaccctggtccacgcagatcagatctccacacctgagacccccctgccctcgccgcctcagggcagcggtcaggagcagtataagatcgctgctaatcaagcgagtgtcatctcccaccaacacctctcaaaacaaaaacaactctag

SEQ ID NO: 225954 - DNA, 1338 bp, synthetic construct
  misc_feature 1..1338: note = Description of Artificial Sequence: Synthetic coding sequence
  source 1..1338: mol_type = other DNA
atggacatggcaaattattccgaagtcttagatccgacctatacgaccctggagttcgagactatgcaaatcctgtacaactctagcgactccagtgcccctgaaaccagtatgaacactaccgataatggagtgaactgtctgtgcgccatctgcggcgaccgtgcaaccggcaagcactacggcgcttccagttgcgatgggtgcaaggggttctttcggagatccatcagaaagagccatgtgtacagctgcaggtttagcagacaatgcgtggttgataaagacaagaggaaccagtgtcggtactgtaggcttcggaaatgttttagggctggcatgaagaaggaggcagttcagaatgaacgcgaccggatttctacccggagaagcaccttcgatggatccaacatcccctctatcaacacactcgctcaggctgaggtacgtagtaggcagatctctgtcagctccccagggtcatcgactgatattaatgtgaagaagatcgcttctataggtgatgtttgtgagtcgatgaaacagcagttgcttgtgctggtggagtgggctaaatatatccctgccttctgcgaattgcctctagatgaccaggttgcactcctgagagctcacgctggcgaacacctgttgttgggcgcaacgaagaggagtatgatgtacaaagacattcttctgttggggaataactatgtgatccatcgcaattcctgtgaggttgagattagcagagtggcaaaccgggtcctggacgaacttgtgaggcccttccaggagatccagatcgatgataacgagtatgcatgcttgaaagccatcgtgttcttcgaccccgatgcaaaagggctcagtgaccccgtgaagatcaaaaacatgaggtttcaagtgcagatcgggttggaagattatatcaacgatcggcagtacgatagccgaggtaggtttggtgaactgttgctgctcttacccaccctgcaatctattacgtggcaaatgatcgagcaaatacagtttgtgaagctgtttgggatggtcaaaatagacaatctgctgcaggaaatgctgctcggcggagcctcgaatgatggctcccatctccatcaccccatgcatcctcatcttagccaggatccgttaactggacaaaccattcttctcggcccaatgagtacactggtgcatgcagaccaaatctccactcccgagacgcccctgccatcgcctcctcaggggagtgggcaggaacagtacaaaatcgctgctaaccaggccagtgtgatttcccaccagcatttaagtaagcagaagcagctgtag

SEQ ID NO: 225955 - DNA, 723 bp, synthetic construct
  misc_feature 1..723: note = Description of Artificial Sequence: Synthetic coding sequence
  source 1..723: mol_type = other DNA
atgagccgatccaatcgtcaaaaagagtacaagtgtggtgacctggtattcgcgaagatgaagggctacccccattggccagccagaatcgatgaaatgccagaagcagctgtaaagtctaccgctaataaatatcaggtcttctttttcggcactcatgaaacagcttttctgggtcctaaagacttgtttccctatgaagagagcaaagagaaattcggcaagcccaataagaggaagggcttttcggagggactgtgggagatcgaaaataatcccacagttaaggcctcgggatatcagtcaagccaaaagaaaagttgcgtggaggagccggagcctgagcccgaagcagccgaaggcgacggtgacaagaagggaaatgccgagggttcaagcgatgaagagggtaagctggtgatcgatgaacccgcaaaggaaaagaacgaaaagggggcattaaagaggagggcaggcgatctgcttgaagactctcccaagaggccaaaggaagcagagaaccccgagggtgaagagaaggaagcagctacgctggaagttgaaagaccgctccctatggaggttgaaaaaaattccaccccttctgagcccggttccggtcgcggtccccctcaggaggaggaggaggaggaagatgaggaggaggaggccactaaggaggacgcagaagccccagggataagagaccacgaatctctttag

SEQ ID NO: 225956 - DNA, 771 bp, synthetic construct
  misc_feature 1..771: note = Description of Artificial Sequence: Synthetic coding sequence
  source 1..771: mol_type = other DNA
atgcaccccgaggggggacagttcgtgccacaactcctaggacacctactagccaccaagctcaaacgattcctcttatcaaaggggggtcgcagagcccaaatcccagatgtgtcgagagccacacctcacaccatagacgaaatgcctgaggcagcggttaaatcgaccgcaaataagtaccaggtgttcttcttcggtactcacgagaccgctttcttagggccaaaagacctcttcccctatgaggaatccaaggagaagtttggtaagcctaacaaacgcaaggggtttagtgaggggctgtgggaaattgaaaataatccaaccgtaaaggccagtgggtaccagagtagtcagaagaagagctgcgtggaagagcctgagcctgagcccgaagccgcagagggagatggagacaagaaggggaacgccgaggggtcctccgacgaggagggtaagcttgtgatcgacgagccggctaaagaaaaaaacgagaagggtgcgctgaagcggcgtgccggtgaccttcttgaagatagtcctaagaggcctaaggaagcagagaacccagagggcgaggaaaaagaagccgctacgctcgaagtggagcgccctcttcccatggaggtggaaaaaaactcaactccatcagagcccggatctggcagaggacccccacaagaagaggaggaagaggaagacgaagaggaggaggctaccaaagaggacgccgaagcacccggaattagagaccatgaaagcctgtag

SEQ ID NO: 225957 - DNA, 702 bp, synthetic construct
  misc_feature 1..702: note = Description of Artificial Sequence: Synthetic coding sequence
  source 1..702: mol_type = other DNA
atggagcagcgcgcaggtggaaacagggttcagacttccacactgaattgcgcaggagcagccgtgatcgatgagatgcctgaagcagccgtcaagtcaactgctaacaagtatcaggtctttttttttggcacacatgagacggccttcttgggacccaaggacctgtttccgtatgaggagagcaaggaaaaatttgggaagccaaataagaggaagggattctctgaagggctgtgggaaatcgaaaataatccaaccgttaaagcctcaggttatcagagctcacagaagaaatcttgtgtcgaggaacctgaacctgagcccgaggccgcagaaggcgatggggacaaaaagggtaacgctgagggaagttccgacgaggagggcaagttagttattgacgaaccagcgaaagagaaaaatgaaaaaggcgctctaaagcgcagggcaggcgacctacttgaagacagtcccaagcggccaaaggaggcggagaacccagaaggagaagagaaagaagctgctacactggaggtggaaaggcccctgcccatggaggtggagaagaattctactccaagtgagccgggtagcggacgtggccctccccaggaggaggaggaggaagaggatgaagaggaggaggcgacaaaggaagacgctgaggctcccggaattcgtgaccacgagtccctttag

SEQ ID NO: 225958 - DNA, 789 bp, synthetic construct
  misc_feature 1..789: note = Description of Artificial Sequence: Synthetic coding sequence
  source 1..789: mol_type = other DNA
atgtctaggtccaaccggcaaaaggagtacaaatgcggagacctggtcttcgctaagatgaaggggtaccctcattggcccgcacgtatcgacgagatgcctgaggctgccgtgaagtcaaccgccaacaagtatcaggtcttcttttcaggacccacacgcagacatagctgggcccctaagacgagcagcttaacccgtaacccaagacgcagcctggctagtcccacaaggggaaaaggctccgcccgaggctgtgggagatcccgcactaccttattgtcacgtctgccagccatctccccccctccatcctgcacagagccctgccttcctggtcaatgggtgtacccaggcgctaaccccaccgagagcagtcagaagaaaagctgtgtggaagagcccgagcctgaaccagaggccgcagagggagatggcgataagaaggggaacgcggagggctcaagcgatgaagaaggaaaactggtgattgacgaacctgccaaggagaagaatgaaaagggggctcttaaacggagggccggagacttactagaggattcaccgaagaggccgaaggaggcggagaatcctgaaggggaggagaaggaagctgctacccttgaggtggaacggcctcttcctatggaagtggagaagaatagcacacccagcgaaccaggctctgggagggggccacctcaggaggaagaggaggaggaagacgaggaagaagaggctaccaaagaagatgcggaggcccctgggatccgcgatcacgaaagatag

SEQ ID NO: 225959 - DNA, 627 bp, synthetic construct
  misc_feature 1..627: note = Description of Artificial Sequence: Synthetic coding sequence
  source 1..627: mol_type = other DNA
atgccagaggccgcagtgaagagcacagccaataaatatcaggtctttttttttggcacgcatgagaccgcctttctgggaccaaaagatttattcccttacgaagagtctaaggaaaagtttggtaaaccaaataagcgcaaaggcttctctgaaggtttatgggagatcgagaacaaccccaccgttaaggcatcagggtatcagtcctctcagaagaaatcctgtgtggaagagccagagccagagcctgaagctgcagaaggagacggcgataaaaaaggcaacgcggaggggtcctccgacgaggaaggcaagttggtaatcgacgagcctgcaaaggaaaagaacgagaagggcgctctgaagcgtcgtgcgggtgatctgctggaggatagtccaaagcggccaaaagaggcagaaaatcccgaaggcgaggagaaggaggcagctacattggaagtggagcggccactgcctatggaagtcgagaaaaatagtactccctccgagcctggtagcgggcgtggcccaccccaagaagaggaggaggaggaagacgaggaagaagaggccacaaaggaggacgccgaagcaccaggtatacgggatcacgaatccctctag

SEQ ID NO: 225960 - DNA, 723 bp, synthetic construct
  misc_feature 1..723: note = Description of Artificial Sequence: Synthetic coding sequence
  source 1..723: mol_type = other DNA
atgtctcgctccaaccgccagaaggaatacaagtgcggtgacctggtctttgctaaaatgaagggttatcctcactggcctgctaggatcgatgagatgccggaagccgcagttaaatccactgccaacaagtatcaggtgttctttttcggtacacatgagacggcatttctcggccctaaagatctctttccatacgaggaaagtaaagagaagttcggaaaacccaataaaagaaagggattcagtgagggactctgggagatcgagaacaaccctactgtcaaagcctctggctatcagagtagccagaagaagtcatgcgtggaggagccagagccagagcctgaagccgctgagggggatggtgacaagaagggtaacgccgaaggctcgtcagacgaggaagggaaattagtaatagacgagcctgctaaagaaaaaaacgagaaaggcgcattgaaacgcagagcaggcgatcttctcgaggattcacctaaacggcctaaggaggccgagaaccccgagggggaggagaaagaggccgctaccctggaggtcgagagaccactccctatggaagtagaaaagaatagcacacccagcgagcctggcagtggaagagggcctcctcaagaagaagaagaggaggaggatgaagaggaagaagcaacaaaggaggacgctgaagccccagggatccgcgatcacgaaagtctgtag

SEQ ID NO: 225961 - DNA, 2676 bp, synthetic construct
  misc_feature 1..2676: note = Description of Artificial Sequence: Synthetic coding sequence
  source 1..2676: mol_type = other DNA
atgcacgccattaacggttttgtattcggaaatctgcctgagctcaatatgtgtgctcaaaagcgcgttgcatggcatcttttcggcatgggcaacgagatcgatgtccacacagcttttttccatgggcagatgcttacaacccggggacaccatacggatgtcgccaacatctttcccgctacatttgtcacggctgaaatggttccgtgggaaccaggaacctggctgatctcttgccaagtcaattctcacttcagggatggaatgcaggccctgtacaaggtcaagagttgttccatggcccctcccgtggacctgctcactgggaaagtccggcagtacttcatcgaagcccacgaaattcagtgggactacggcccaatggggcacgatggctcgaccgggaagaatctgagggaacccggtagcatatccgacaaattcttccagaaatcctcctctcgaattggcggtacctactggaaagtgcgctacgaagctttccaggacgaaaccttccaagaaaaaatgcatctcgaagaggatagacacctaggcatcctgggccctgtaatcagggctgaggtgggagataccattcaggtggtattctataaccgcgcttctcagcctttttcaatgcagcctcatggtgtgttctacgagaaggattacgaaggcactgtgtataatgacgggagttcctaccccggtctggtcgcaaagccctttgagaaggtgacttaccgttggaccgtccctccacatgctgggcctacggctcaggatcctgcctgtttgacctggatgtactttagcgctgccgaccctatccgtgacaccaactcaggactcgttggccctctgttagtgtgccgcgctggggcactgggcgcagatgggaaacagaaaggggtagataaggagttcttccttctatttaccgttctagacgaaaataagagttggtacagtaacgcaaaccaagctgccgctatgctggactttaggctgctgtctgaggacatcgagggctttcaagactcaaatagaatgcacgcaataaatggcttcctgttctccaatcttcctcggttggacatgtgcaaaggagacactgtggcctggcatctgctcggactgggcacagaaaccgatgtccacggggttatgttccaaggcaatactgtgcagctgcagggaatgagaaagggtgccgcaatgctgtttccacacacttttgtcatggctatcatgcagcctgacaatctaggtacattcgaaatctattgtcaggcgggtagtcatcgcgaagctgggatgcgcgcaatttacaatgtcagtcagtgccctggccaccaggccactcctaggcagaggtatcaggctgcgaggatctattacatcatggccgaggaggtggagtgggactattgccctgacagatcatgggaacgagagtggcataaccagtcagaaaaagactcatatggctacatcttcttatcaaataaggatggcttactggggtccaggtataaaaaggcggtattcagggagtatactgacggaaccttcaggataccgaggccacgcacgggacccgaggaacacctcggcatacttggccctttgattaaaggtgaagtgggagatattcttactgtggtttttaaaaataatgctagcaggccatattccgtgcatgcccacggagtgttggaaagtacaaccgtgtggcccttggcggctgaacctggcgaagtcgtcacttatcaatggaatattccagagaggagcggccctggaccgaacgatagcgcgtgtgtgagttggatctactattccgccgttgaccctatcaaggatatgtactcagggctcgtgggtccactggccatttgtcagaaaggcatcctggagcctcacggaggaagaagcgatatggaccgagagttcgccctgcttttccttatattcgacgagaacaagtcctggtacctggaggaaaacgtggctacgcatggatcccaggacccgggtagtatcaacctgcaggacgaaaccttcctggaatccaacaaaatgcacgctattaacggcaaattgtacgccaacctgagaggcctgactatgtaccagggcgagagggtagcttggtatatgctcgcaatgggccaggatgttgacctacacactatccatttccacgccgagagctttctatacagaaatggtgaaaattacagggccgacgtagtggacctgttccctgggaccttcgaggtcgtagagatggttgccagtaatcccggtacttggctaatgcactgccatgtgacagaccatgttcacgcgggaatggagaccctgtttactgtgtttagccgcaccgaacacctgtctcccttaacagtcatcaccaaggaaaccgagaaggcagtgccaccaagagacattgaggagggcaatgtgaaaatgctcggcatgcagattcctataaagaatgttgaaatgctggccagcgtgctcgtggctatcagcgtgaccctccttctggtggtgttggctctggggggagtggtgtggtaccagcatcgccagcgcaagctgcgaagaaaccgtcggagtattcttgatgacagctttaagctcctaagcttcaaacagtag

SEQ ID NO: 225962 - DNA, 3477 bp, synthetic construct
  misc_feature 1..3477: note = Description of Artificial Sequence: Synthetic coding sequence
  source 1..3477: mol_type = other DNA
atggagtctggacacctcctgtgggcattgttattcatgcaatccctttggcctcagttgacagatggcgcaacgcgagtttactatttgggcatcagggatgtgcagtggaactacgcacctaaaggcaggaatgttatcaccaaccagccattggacagcgatattgtcgcatcaagcttcttgaaaagcgacaaaaaccgaatcggcggtacctacaaaaagacaatatacaaagagtataaggacgactcctataccgacgaggtcgcccaacctgcctggctggggttcttgggtcctgtattacaggccgaggtgggggacgtgattctgatacacctgaaaaactttgcgacccgtccctacacgattcatccgcacggagtgttttatgagaaagattccgagggatcactgtatcctgatggctccagtgggcctttaaaagctgacgacagcgtaccgccaggcggatcgcatatctataactggaccatccccgagggacacgcccctactgacgcagatccagcttgcctcacttggatctatcactcccatgtagacgcgccaagggatattgctactggtctgattggcccactgattacgtgcaagcgcggagctctcgatgggaattcacctcctcagcggcaggatgttgaccacgacttcttcctgctcttttctgtggtcgatgaaaaccttagctggcacctgaatgaaaatatagccacctactgctccgaccccgctagtgtggataaggaggacgaaacttttcaggagtctaataggatgcacgccataaatggattcgtgttcgggaacttgccagaactcaatatgtgcgctcagaaacgcgtcgcatggcacctgttcggaatgggtaacgaaattgacgtgcacacggccttcttccatggccagatgctgaccacgcggggtcatcatacggatgtagcgaacatctttccggctaccttcgtgactgccgaaatggtcccctgggagccaggaacttggctgatctcatgtcaggttaactcccatttccgcgatgggatgcaggccctgtataaggtaaagtcatgctccatggcgcctcccgtagacctgttgaccggaaaagtcagacagtactttattgaagcacatgaaatccaatgggattacggtccaatgggccatgacgggtcaaccggtaagaacctaagagaacctgggtccatttccgataagttcttccagaagagcagcagccggattggaggtacatactggaaggtgcgatacgaggcattccaggatgaaacgtttcaggagaaaatgcatctggaggaagacaggcatctcgggatcctagggccagtgataagagccgaggttggggatactatacaggtagtgttttacaaccgagcttcccagccattttccatgcaaccccacggcgtattctacgagaaggactatgaaggcacggtgtataatgacggttctagttatcctggactggttgctaagccgtttgagaaagtgacataccggtggacggtgccccctcatgcaggcccaaccgcgcaggaccctgcctgcctgacttggatgtacttcagcgcagctgaccccatcagagacactaactccgggttggtgggaccactccttgtgtgccgtgccggagctttgggcgctgacggcaagcagaagggagtggacaaggagttcttcctgttgttcacagtgctcgacgagaacaagtcatggtatagcaatgcaaaccaggctgccgcaatgctggacttccgcctgctatccgaagacattgagggctttcaggattccaacagaatgcacgctatcaacgggttcctcttttcaaacctaccccgattagacatgtgcaagggcgatacagtggcttggcacctgctaggtctagggacagagaccgacgtgcacggggtgatgtttcagggaaataccgtgcagcttcaaggcatgaggaaaggagcagccatgctcttcccgcacacatttgtcatggcaattatgcagcctgacaatctcgggacgttcgagatatactgccaagccggatcccaccgcgaggcaggcatgagagcgatctacaacgtgtctcagtgcccaggtcaccaggctacgcctcggcagaggtaccaggccgcacgaatctattacataatggcagaggaagtcgagtgggattattgccccgacaggagctgggagcgggagtggcataaccagagtgaaaaggatagttacgggtacatctttctgtccaataaggacgggttattgggatctcgctacaagaaagctgtgtttagagaatatacggacggaactttccgcatacccagaccccgaaccggacctgaagaacacctgggcattcttggaccattgatcaaaggggaggtgggagatattctgaccgttgtgttcaagaataatgcatcccgaccttattccgtacatgcccatggcgtattagagtctacaactgtatggcctctggccgcagaaccgggagaggtcgtgacttaccaatggaacatacctgagaggtcaggtcctggcccaaacgatagcgcttgcgttagttggatctattatagcgctgtggatccaattaaagatatgtacagcgggctggtgggcccattagctatttgtcagaaggggattttggagccgcatggcggacgatccgacatggaccgcgaattcgcattgctttttttgattttcgacgagaataaatcgtggtacctggaagaaaacgtggcaacacatggctcgcaggatcccggatcaatcaatcttcaagacgaaaccttcctggagagcaataagatgcacgcgattaacgggaaattgtatgctaacctccgcggtctgactatgtaccaaggggaacgggtggcctggtacatgctcgccatggggcaggatgtggatctccacaccatccattttcatgctgagagcttcttatatcgcaacggagagaactacagagccgatgttgtcgacctttttccgggaactttcgaggtggttgagatggttgcgagcaatcccggaacttggttgatgcactgtcatgtgacggatcatgtgcatgcaggaatggagacactgtttaccgtatttagtcgaaccgagcatctctcgccgctaaccgtcataaccaaggagacagagaaagcagtgccaccaagagatatcgaggagggaaacgtgaagatgctgggaatgcagattcccataaaaaatgtggaaatgctggctagtgtactagttgctatctcagtgacgctcctcctggtagtattggcactgggcggagtagtatggtatcagcataggcaaaggaaattacgccgaaacagacgcagtatccttgacgactcttttaaattgctaagtttcaagcaatag

SEQ ID NO: 225963 - DNA, 3486 bp, synthetic construct
  misc_feature 1..3486: note = Description of Artificial Sequence: Synthetic coding sequence
  source 1..3486: mol_type = other DNA
atgtgggccatggagagcggacacctgctttgggcgctacttttcatgcagtccctctggccccaactgacagacggagcgacaagggtgtattatttgggcatacgggatgtgcagtggaactacgcaccaaagggacgcaacgtgattaccaaccagcctttagatagcgacatagtggcctctagcttcctcaaaagcgataagaataggattgggggtacttacaagaaaactatctacaaagagtacaaggacgacagctatacagatgaagtggctcaaccggcttggttagggttcttggggcctgtgttgcaggccgaggttggggatgtaattcttatacacttaaagaatttcgccacaaggccttacaccatccacccccatggggtgttttacgagaaagactctgaaggtagcctttaccccgacggatcctcaggacctctcaaggcagacgattctgtgccacccggagggtcacacatttacaattggaccatcccagaggggcatgcacccactgatgccgatccggcttgcctgacctggatctaccactctcatgtagatgcaccgagggacattgctacgggcctgatcggaccactgataacttgtaagcgcggtgctctggacgggaacagcccgccacagcgccaggacgtggaccatgatttcttcctgctgttttcagtggtggatgaaaatctttcctggcatctcaacgagaacatcgcaacctactgcagtgaccccgcttcagtggataaagaggacgaaaccttccaggaatccaacaggatgcatgccataaacgggttcgtattcggaaatctgcccgagctgaatatgtgcgcccaaaagcgagttgcttggcatctattcggaatgggcaatgaaatcgacgtacataccgccttctttcatggccagatgctgaccaccagggggcatcacaccgatgtcgccaatatctttccggcaacctttgtaacggccgaaatggttccctgggaacccggaacgtggttgatctcatgccaggtgaattctcacttcagagacggcatgcaggccctttacaaggtcaaatcgtgttctatggccccacctgtggacctgcttaccgggaaagtgcgtcagtactttatagaagctcatgagattcagtgggactacggacctatggggcatgatggatcaacgggaaaaaatctgcgtgagcccggatccattagcgacaagttcttccagaaatccagctcaaggatcggagggacttactggaaagtgcggtacgaggcgttccaagacgaaacattccaggaaaagatgcatctagaggaagatcgacacctagggatcctgggccctgttattcgggcagaagtaggcgatactattcaggtggtgttttataaccgagccagtcagccttttagcatgcagccacatggggtgttttacgagaaagactacgaagggacagtgtataatgatggctcctcctatccaggactggtggctaagccatttgaaaaggtgacctatcggtggacagttcctccccatgccggacccactgcccaggaccccgcttgtctcacctggatgtacttcagtgccgctgacccaattagagacacaaacagtggactcgtaggccctctgctcgtgtgcagggcgggagctctcggcgcagatggcaagcagaagggtgtcgataaggagttttttctacttttcactgtactggacgagaataaatcttggtattccaatgcaaaccaggccgcagcaatgctggacttccggctgctgtctgaggacattgaaggcttccaggactccaatcggatgcacgctattaacggattcttattcagcaacttgcccaggctcgatatgtgcaaaggtgataccgtggcctggcaccttctaggtctgggaacagaaaccgacgtgcatggagtgatgtttcaagggaacacagtccagctccagggaatgaggaagggcgcagctatgctgtttccacacacctttgtgatggcaataatgcaacccgacaacttgggtacattcgagatatactgccaggcaggatcccacagagaagctgggatgagggctatctataatgtgtctcagtgccctgggcaccaggctaccccgagacagaggtatcaggccgctagaatctactacatcatggccgaagaggtggaatgggactattgtccagacaggagctgggagcgtgaatggcacaatcagagtgagaaagattcctacggctacatcttcctatctaataaagatggcttgctgggaagtcgttataaaaaggccgtgttccgcgagtataccgacggcaccttccggatccctcgtcccaggacaggcccagaggagcacctgggaatcctagggcctctcattaaaggagaggtgggcgatatccttactgtcgtgtttaagaacaacgcgtccagaccttattctgtccatgcccacggcgttctggagagtacaacagtgtggccactggcggcagaacccggtgaggtcgttacataccagtggaacatcccagagcgttccggtcctggacccaatgattccgcatgcgtgagttggatatattattcagccgtagaccccataaaggacatgtattccggactagtcggccctctggccatctgtcagaaagggatcctggagcctcacgggggtagatccgatatggatagggaatttgctttgctcttccttatctttgatgagaacaagtcatggtatctggaagaaaatgtggcaacacacgggagtcaggatcctggctccatcaacctgcaggacgagacgtttctggaaagtaataagatgcacgctatcaacggaaagctttatgcgaacctgcgtgggctgaccatgtatcagggtgaaagggtggcgtggtatatgctggcgatgggtcaggatgtcgatttgcacacaattcacttccatgccgagagctttctgtataggaatggagagaattatcgcgcagacgtcgtggacctttttcccggtacctttgaggttgtcgaaatggtggcctcaaaccccggtacatggttgatgcattgccacgtgacagaccacgttcatgccggtatggagaccttgttcacggtgttcagtaggaccgagcatctctccccgctgaccgtgattactaaagagactgagaaggccgtgccacctcgtgatatcgaggaagggaacgtgaagatgttagggatgcagattccgattaagaatgttgaaatgctggcatcagtcctggtagcgatctccgtgacgctgttactggtcgtcctcgccctcggcggtgtggtgtggtatcagcataggcaacgtaagctcagaaggaatcgccgtagcattcttgacgattcttttaaactgctcagtttcaagcagtag

SEQ ID NO: 225964 - DNA, 2910 bp, synthetic construct
  misc_feature 1..2910: note = Description of Artificial Sequence: Synthetic coding sequence
  source 1..2910: mol_type = other DNA
atgtgggcgatggagagtggacacctactgtgggcactgctgttcatgcagagtttatggccacagctgaccgatggggctacaagagtatattaccttggaattagggatgtacaatggaactacgcccctaaagggaggaacgtcataactaatcaaccactcgactcagacattgttgcatcgagtttcctgaaaagcgacaaaaatcggatcggtggaacatacaaaaaaacaatctacaaagaatataaggatgattcctacaccgatgaagttgcgcagcccgcttggctcggattcctcgggcctgtactgcaggccgaggttggcgacgttatcctgatccatctgaagaattttgctaccaggccgtacactattcatccacatggggtattctatgagaaagacagtgaaggaagcctgtaccccgatggatcttctggacccctcaaggcggatgatagcgtcccaccaggagggtcacacatctacaattggactattcctgagggacatgcccctaccgacgcagatcccgcttgtctcacctggatctaccacagtcacgtcgacgcgcctcgggacattgctacggggctcattggcccactgatcacctgtaaacgaggagcactagatggcaactccccgccacaacggcaagacgtagatcatgactttttcttgctgttctctgtcgtggacgagaacctttcttggcacctgaacgagaacatcgccacctattgcagcgatccagccagtgtagacaaggaagatgagacttttcaggagtccaacagaatgcatgccatcaacggatttgtcttcggtaacttaccggagttgaacatgtgcgcccagaaacgcgtagcatggcacctgtttggtatgggcaatgagattgatgtccatacagccttcttccatgggcagatgctgaccactaggggacatcacaccgacgtcgcaaacatatttcctgctacatttgttacagcagaaatggtcccctgggagcctgggacatggctgattagttgccaggtgaattctcactttagagacggcatgcaggcgttatacaaagtcaaatcatgtagtatggcccctcctgtagacctgttaacaggaaaagtgcgacagtacttcatcgaggcccacgaaattcagtgggactatggaccaatgggacacgacggcagcacaggcaagaatctccgggaaccgggttcgatatccgataagttttttcagaaaagttcttccaggattggcggaacatattggaaggtacgctacgaggcctttcaagatgaaacctttcaggagaagatgcacctcgaagaggataggcacctgggaatccttggcccagttatcagagcagaagtgggggacacaatccaggtagttttttataatcgcgcatctcagccattctctatgcagcctcacggcgtcttctacgaaaaagactatgaaggaactgtatacaatgacggaaccttcgagatttattgccaggctggcagtcaccgggaagccggaatgcgtgctatatataacgtgagtcaatgccccggtcatcaggcaacgccacggcagcgttaccaagcggctcgtatctattacatcatggctgaggaagtggagtgggactactgtcccgaccgaagttgggaacgagagtggcacaaccagtccgaaaaagatagttacgggtacatattcttgtccaacaaggatggcctccttgggtcccgatataagaaggctgtgttcagagagtataccgatggtacgtttaggattccacggcctcgtactggtcccgaggaacacctcgggatcctgggcccattgatcaaaggggaagtcggtgatatcctcacagtggtgttcaagaataatgcgtcccgcccttattcagtgcacgcccatggggtcctcgagtctacaactgtgtggcccctggccgctgaacctggcgaggtggtgacctaccagtggaatatccctgagaggagcggacccggacctaatgattctgcgtgtgtaagctggatttattactcagccgtggatccaattaaagacatgtactccggtctagttgggcctttggctatttgccagaaaggcattctagaaccacatgggggtaggtcagacatggaccgcgagtttgccctgctatttctaatcttcgatgagaataagagttggtacctggaggaaaacgtggccacacatggttctcaagatcccggaagcataaacttacaggatgagacatttctagaatccaacaagatgcacgctataaacggcaaactgtacgccaatcttcggggactcacaatgtatcaaggagagagggtagcttggtatatgcttgcaatgggacaagatgtggatctgcataccatccatttccacgcagagtccttcctctataggaacggcgagaattacagagccgatgtggtggatctgtttcctggcacatttgaagtggtggagatggttgcgtctaaccccggaacctggctcatgcattgccacgtaactgaccacgttcacgccggaatggaaaccctcttcacggtcttcagtagaactgagcacctcagcccccttaccgttataaccaaggaaaccgaaaaagcggtcccacctcgggatatcgaagaaggtaatgtgaaaatgctcgggatgcagattccaatcaaaaatgtcgagatgctggcctccgtgcttgtggctataagtgtgacccttcttctggtcgtgctggcattgggcggagtggtgtggtaccagcacagacagcggaagcttaggcgcaatcgacggagtattctggatgactcttttaagttactgagctttaaacagtag

SEQ ID NO: 225965 - DNA, 2436 bp, synthetic construct
  misc_feature 1..2436: note = Description of Artificial Sequence: Synthetic coding sequence
  source 1..2436: mol_type = other DNA
atggaaagtgggcacttgctgtgggccctgctctttatgcaatccttatggccccaactcacggacggtgccactcgggtgtattatctgggcatccgggacgtgcaatggaactatgctccgaaaggtcggaatgtgattacaaaccagcccctagatagcgacatcgtggctagtagcttcctgaaatctgataagaaccgtattggcggaacatataagaaaacaatctataaagaatataaagacgactcgtatactgacgaagtcgctcagcctgcctggctagggtttctgggtcccgtgcttcaggccgaggttggggacgtcatcctaatccatttgaaaaacttcgccacccgcccatacacaatccatccacatggagtgttctacgaaaaggattccgagggctccctctaccctgatggcagtagcggaccactgaaggcagatgatagtgtccccccagggggaagccacatttataattggacaattccggaaggccacgctcctacggatgctgaccctgcatgtttgacatggatttaccattcccacgtggacgcaccgagggatattgcaacagggctgattggaccccttattacctgcaaacggggagcgctagacgggaattccccaccgcagagacaggatgtggatcacgactttttcttactgttctcagtcgtggacgaaaatctgtcctggcacctgaatgagaatatagccacctattgtagtgaccccgcttcggtcgacaaggaggatgaaaccttccaggagtccaacagaatgcatgctatcaatggcttcgtttttggaaacctccctgaactcaacatgtgtgcccagaaacgcgtggcatggcacctgtttgggatgggaaacgaaattgatgtgcatactgcctttttccacggacaaatgctgactactcgtggtcaccatacagatgtggccaacatattcccagctaccttcgtgactgccgagatggtgccatgggaacccggaacctggctgatctcctgccaggtgaattcccatttccgggacggcatgcaagccctctataaggtgaagagctgttctatggcccctccagtggacttgctgacaggcaaagtaaggcaatactttattgaggctcacgagattcagtgggactatggacccatgggccacgacggctccactgggaagaaccttagggaacctggctcaatctccgacaagttttttcaaaaatcgtcgtctcggataggcggtacctactggaaggtccggtacgaagccttccaggatgagactttccaggagaaaatgcacctagaggaagaccgacacctgggaatcttagggcctgtcatcagggcagaggtcggtgacacaatccaagttgttttttacaaccgggcaagccagcccttttcaatgcaaccacatggagtattttacgagaaggactatgaagggactgtgtataacgacgacccaatcagagacaccaactccggtcttgtcggacccctgctggtttgccgcgctggagccctgggcgctgacggtaaacagaaaggagttgacaaggagttttttctgctctttactgtgctagatgaaaataaatcgtggtacagcaacgccaaccaggccgctgcgatgctggattttagacttctgtcagaggacatagagggcttccaggatagtaatcgaatgcacgcgattaacggattccttttttctaatttaccccgacttgatatgtgtaagggcgacactgtggcatggcatttgctaggccttggaaccgagacagacgttcacggcgtaatgttccaggggaataccgtgcagctgcaggggatgcgtaaaggcgctgcgatgctcttcccacacaccttcgtgatggctattatgcagcctgataacctgggaacatttgaaatctattgccaggcaggaagccaccgcgaggccggtatgcgagctatctacaacgtgtcccagtgccctggccaccaggccactcctaggcagcggtaccaggctgctcgaatttactatattatggcggaagaggtcgagtgggactactgccctgacaggagctgggagagggaatggcacaatcagtccgagaaggattcctacgggtacatatttttatccaataaagatggattattgggatcacgctacaagaaagccgtgtttcgagaatacaccgacggcactttccgaatcccaagaccccgaactggtcctgaagaacacctggggatccttggccctctgattaagggcgaggtaggcgacatccttactgtcgtgttcaaaaataacgccagccgtccatactctgtgcacgcacacggcgtgctggagagtactaccgtgtggccactggccgctgaaccatag

SEQ ID NO: 225966 - DNA, 3483 bp, synthetic construct
  misc_feature 1..3483: note = Description of Artificial Sequence: Synthetic coding sequence
  source 1..3483: mol_type = other DNA
atgtgggctatggaaagcggtcacctgctgtgggcactcctgtttatgcaaagtctgtggcctcaactgactgacggggcaaccagagtgtactacttaggtattagggacgtgcagtggaactacgctcctaagggtaggaatgtgatcactaaccagccattggattccgatattgtggcctcctctttcctaaagtctgacaaaaaccgcatcgggggaacctacaagaagactatctataaagaatataaagatgacagctatactgacgaggtggcgcagccagcatggctcgggtttctgggccctgtactgcaggccgaggtcggagatgtgatcttgatccacctgaagaactttgctactaggccttacaccatccaccctcacggagtgttttacgagaaagacagcgagggatctttatatcctgatggaagcagcggcccactgaaggccgacgatagcgtaccacccggaggcagtcacatatacaactggactattcccgaaggccacgcacctactgatgctgatcccgcttgccttacctggatctaccatagtcatgtagatgctcccagggacatcgcaaccggactaattgggccacttattacctgtaaaaggggggctttggatggcaatagccccccacagcgccaggacgtggatcatgattttttccttctctttagtgtggtggacgagaacttaagttggcacctcaacgaaaatattgccacctactgtagcgaccctgcctctgtcgataaagaggacgaaacctttcaggagagcaatagaatgcacgctatcaacggcttcgtctttggcaatttgcctgaacttaacatgtgtgcacagaagcgggtggcctggcatctcttcggaatgggcaacgagattgatgtacataccgccttcttccatggccaaatgcttactacccgagggcatcatactgacgtggccaatatttttccagcgaccttcgtgacggcggagatggtaccctgggagccaggaacctggctgatttcctgccaggtgaatagtcatttccgggacgggatgcaggcactgtataaggtcaagagctgttcgatggcacctcctgttgatctgctcacgggtaaggtcaggcagtatttcatcgaggcccacgagattcagtgggactatgggccaatgggtcacgatggatccactgggaaaaatctgcgggagccaggtagtatctcagacaagttcttccagaaatcatcatcacggatcggagggacatactggaaggtcaggtacgaagcctttcaggacgagacttttcaggagaaaatgcacctcgaagaagaccgccacctcggcatcctggggccagtaatccgggcagaggtcggtgatactatccaggtggtcttttataatagggccagccaaccattttcaatgcagcctcatggagtgttctacgaaaaagactatgaggggacagtatataacgacggatcatcatatcccggtctggtcgccaagcctttcgaaaaggttacatatagatggaccgttccaccccacgccggtcccactgctcaggacccagcgtgtctaacatggatgtatttcagtgctgcggacccaatcagggacacaaacagtgggctcgtagggccactccttgtatgccgcgctggcgcactgggggctgacggcaaacagaaaggtgttgacaaggaattctttctcctgttcacggtgctggacgaaaacaagtcgtggtactctaatgcaaaccaagctgccgcaatgctggacttccggttgctgtctgaagacattgagggattccaggactcgaaccggatgcacgctattaacgggtttctgttcagcaacctgcccagactggatatgtgcaagggcgacactgtggcttggcaccttctcggtttggggactgagactgacgtccacggcgtgatgtttcaggggaatacagtacagctgcaggggatgcgcaagggagccgctatgctgttccctcacacgttcgttatggccatcatgcagcctgacaatcttggtacgtttgagatctattgccaggcaggctcccaccgagaagctggcatgcgtgcaatctacaatgtgtcccagtgccccggtcatcaagcgacccctcgccagaggtatcaggctgcaagaatctattacattatggccgaagaggtcgaatgggattactgccctgatcggtcctgggagagagagtggcacaatcagagcgagaaagacagttacggctatatcttcctgagcaacaaagacggccttttaggaagtagatacaagaaggcggtctttcgcgagtacactgacggaacattccgcattcccagacctaggacgggaccagaggagcatctcggcatactcggcccactgatcaagggcgaggtgggagacatattaactgtcgtatttaagaataatgccagccgcccatacagtgtgcatgcccatggggtcctcgaaagcaccaccgtctggcctttggcggctgagccaggcgaagtggtgacttaccaatggaatatacctgagagaagcggaccgggtccaaatgacagcgcctgtgtctcttggatatattattctgccgtggatccaataaaggacatgtacagtggattggtgggtcctcttgctatttgtcagaaaggcatcctggagccccacgggggacgctctgatatggatcgagaatttgcgttgttattcctcatcttcgatgagaacaagtcctggtatctcgaagaaaacgtggccacacacggcagtcaagacccagggtctataaatctgcaggacgaaacgtttttggagtctaacaagatgcatgctattaacggcaagctatatgccaatctgcggggactgactatgtaccaaggtgaacgagtcgcctggtacatgcttgctatgggacaggacgtggatttacataccattcatttccacgccgaatcgttcctgtaccgtaatggagagaactacagggctgatgttgtcgatctctttccagggactttcgaggtggtggaaatggtggcctctaacccaggcacatggcttatgcactgtcatgttaccgaccatgtgcacgccggtatggaaacgttattcacagtgttctctaggactgaacacctctctcccttgaccgttattacgaaagaaacagagaaagtgcccccacgtgatatagaagaagggaatgtcaagatgctgggcatgcagattcccattaagaacgtggagatgctcgcaagtgttttagtggctatcagcgttacactcttactggtagtacttgccttgggaggagttgtgtggtatcagcatcgccagaggaaactgagacgcaacagacgctctattctagacgactctttcaagctgcttagtttcaaacagtag

SEQ ID NO: 225967 - DNA, 627 bp, synthetic construct
  misc_feature 1..627: note = Description of Artificial Sequence: Synthetic coding sequence
  source 1..627: mol_type = other DNA
atggaatccgggcatctgctttgggccctgctgttcatgcagtcactatggcctcagcttacggatggtgcaaccagagtgtattacctggggatacgcgatgtgcaatggaactacgcacccaaaggcaggaatgtaattacaaatcaacctctggattctgatatagtggcatcttctttcctgaaatcggacaaaaaccgcatcggtggtacgtacaaaaaaaccatttacaaggagtacaaggatgattcttatacagatgaggttgcacagcctgcctggctcggttttctgggacctgtcctgcaggcagaggtgggcgatgtcatcttgattcacttgaagaactttgccactaggccctacaccatccaccctcacggagtattttacgagaaagattctgagggctccctgtatccggatggttccagcggacctctcaaggccgacgactcagtcccacctggtggcagccacatctataactggaccatccctgaaggccatgccccaactgatgcagatcccgcatgcctcacctggatctaccactcacacgtggacgcgccacgagatatagccaccggactaatcgggccactgatcacatgcaagcgctag

SEQ ID NO: 225968 - DNA, 3639 bp, synthetic construct
  misc_feature 1..3639: note = Description of Artificial Sequence: Synthetic coding sequence
  source 1..3639: mol_type = other DNA
atgactcagaccctgccataccatttgtctttgttaaatgtgctgttccctgggccatgctccaggcacttcaagttcagaagaggtaaatgtgctcagccagcttggcgaaaggtctccgcaccctctcaggacttgttaatcacaaaggtcatgtgggccatggagagcgggcatctgctgtgggcattgctatttatgcagtctctctggccccagctcacagatggtgctactagggtgtactaccttggtatacgcgacgttcagtggaattatgcacccaagggacgaaatgtcatcactaatcaaccactggattctgatatcgtagcttccagcttcctgaagtccgataaaaatcgaattgggggaacttacaagaagacaatctacaaggagtacaaggatgacagttatacagatgaggtggcccaacccgcatggctcggcttcctgggccctgtgctgcaggcagaggtaggtgacgtcatacttatccatctgaagaatttcgctacaagaccgtataccatccacccgcatggggtgttctacgagaaggactcggagggctccctgtatcccgacgggtcctctggacctttaaaggccgacgactcagtacctccgggagggtcccatatatataactggaccataccagagggccatgccccaactgacgcagatcccgcttgtctaacgtggatctaccattcccacgtggacgccccaagagatatcgccacgggccttatcggcccactcattacatgcaagcggggtgctttggatggcaacagccctccacagaggcaggatgtggatcatgacttcttccttcttttttctgttgtggatgagaatctcagctggcacttaaatgaaaacatcgccacgtattgtagcgatccagccagtgtggataaggaggatgagacctttcaggagtctaaccggatgcacgctattaatggctttgtattcggtaacctgcctgagttgaatatgtgcgctcaaaagagggtcgcctggcatctctttggaatgggcaatgagatcgacgttcatacggcattctttcacggccagatgctgacgactaggggccatcataccgatgtggccaatattttccctgctaccttcgtaacagccgagatggttccctgggagcctggtacctggctgatatcctgtcaggttaatagtcactttagggatggaatgcaagcattatacaaagttaagagttgctcgatggccccacccgtagacctgttaactggcaaagtgagacagtactttattgaggcacacgagattcagtgggattacggcccaatgggacatgatggatcgacaggcaagaacctacgcgaaccaggaagcatcagcgataagttctttcaaaaaagctctagtcggattggagggacttactggaaggtgcggtatgaggcttttcaggacgaaacctttcaggaaaaaatgcatctcgaggaggaccgccaccttgggatcctggggcctgttatacgtgccgaagtgggcgatactatccaagtggtcttttacaatcgagcatcgcaaccattcagtatgcagccccacggtgtgttctacgagaaggattatgaaggaactgtgtataacgacggcagcagctaccctggcctcgtggctaaaccatttgaaaaggtcacctacagatggacggttccaccacatgcgggacccaccgcccaggatcccgcttgtttgacctggatgtattttagcgctgcagacccaatccgagatacaaactcgggtctggtgggccctctgcttgtgtgtagagctggtgcactgggcgctgatggcaagcagaaaggcgttgataaggaattcttcctactctttactgttctggatgagaacaagagttggtactctaacgcaaatcaggcagccgcaatgctcgattttagactgctcagcgaagacatcgagggctttcaggattcaaatagaatgcatgcaatcaatggcttcctgttcagcaacctccctaggctagacatgtgcaaaggtgatactgtagcttggcatctgcttgggctgggtactgagactgatgtgcatggggtcatgtttcaggggaacactgtgcagctccaagggatgcgtaaaggagctgcaatgctattcccgcacacttttgttatggccatcatgcagcctgataatctcggaacgtttgaaatctattgtcaggctggctcacatagggaagctggcatgcgagcaatttacaacgtttctcagtgtcccggacatcaggccacaccaagacaacgctaccaggctgccaggatttactacatcatggccgaggaagtcgaatgggactactgccccgaccggtcatgggagcgcgaatggcataatcagtccgaaaaggattcctacggctacatcttcctgtccaataaggacggactcctgggctccaggtacaagaaggctgtcttccgagaatacacagacgggacattccgcatccccagacccaggacaggaccagaggaacacctgggtatcctgggccctctgattaaaggggaggtgggtgatatcctgacagtggtattcaaaaacaatgcatcaagaccctactcagtccacgctcacggagtgttagagtctacaaccgtgtggcctctggcagccgaacccggtgaagttgtgacataccagtggaacatcccggaacggagcggacccggtcccaatgattctgcgtgcgtatcctggatttattacagtgctgtggaccccatcaaagacatgtattccggcttggttggcccactcgccatctgccagaaagggatcctagaacctcacggcggacgctcagatatggatagagaattcgccctgctgtttcttatcttcgacgagaataaatcatggtacctggaggaaaacgtggcgacacacgggtcccaggatcccggatcaataaatcttcaagacgaaaccttccttgagtctaacaaaatgcacgctatcaacggcaagctgtacgcgaatttgcgaggcctgactatgtaccagggcgagagggtggcttggtacatgctggcaatgggtcaggatgtggacctgcatacaattcatttccacgccgaaagtttcctataccgcaacggcgagaactaccgagcagatgtggtggacctttttccgggaacattcgaggtcgtagagatggtggccagtaacccagggacatggttgatgcattgtcacgttaccgatcacgtccacgccggtatggaaaccctatttacggtcttctcacggaccgaacacctctcccccttgaccgttattactaaagagaccgagaaagcagtacctccccgtgacatagaggagggaaatgtgaagatgctgggcatgcagataccaattaagaacgtagagatgcttgctagtgtcctggtcgcaatttctgtgacactcttgctggtggtcctagctctgggtggcgtggtgtggtatcagcatcgacaaagaaagctgcggagaaataggcggtccattctggacgacagctttaaacttttgtctttcaaacagtag

SEQ ID NO: 225969 - DNA, 1254 bp, synthetic construct
  misc_feature 1..1254: note = Description of Artificial Sequence: Synthetic coding sequence
  source 1..1254: mol_type = other DNA
atggcccagaaagagggcggacggacagttccttgttgtagcagacccaaagtggccgctctcacagctggcacactgctactgctgaccgccataggggctgcctcctgggccattgttgccgtgctgctccgctccgaccaagagcctttgtatcccgtacaggtatctagcgccgatgcacgcctcatggtattcgacaagacggaaggcacatggaggctgttgtgtagcagccggagtaacgccagggtagcaggactgtcttgcgaggagatgggtttccttagggctctgacgcacagcgagctagacgttcgaactgccggagccaacggtaccagcggttttttttgcgtggatgaaggaaggcttccccacacacagaggcttctggaggtgatatccgtttgcgattgccccagagggaggtttctggctgcgatttgtcaggactgtgggagacgaaagctgcctgtggatcgtatagtgggcggtagagataccagcctggggagatggccttggcaggtttccctgagatacgatggcgctcacttatgcgggggaagcctgctcagcggtgactgggtcctgacagccgcacattgtttcccagaacgtaatagagtgctctccagatggcgcgtctttgcaggggctgtggctcaggccagtcctcatggcctgcagctgggagtgcaagcagtcgtgtaccatggcggttacctccccttccgagacccgaacagcgaagagaactcaaacgatatcgctctagtgcacctgtccagccccttgcctttaaccgagtatattcagcctgtttgcttaccagccgcaggacaagcactcgtcgatggaaagatttgtactgttacgggatgggggaatacgcagtactacggccaacaggcaggagtattgcaggaagcccgagtgccaattattagtaacgacgtctgtaacggggctgacttttacggcaatcagattaagcccaagatgttttgcgccggttaccccgaaggcggaatagatgcatgccagggggacagcgggggacccttcgtatgcgaagacagcatcagcagaacccctcggtggaggctgtgtggtatcgtgtcatggggtacaggttgcgcactagcacagaagcccggagtttatactaaagtaagcgattttcgcgaatggatcttccaggctatcaagacccattccgaagccagcggaatggtgactcagctgtag

SEQ ID NO: 225970 - DNA, 1254 bp, synthetic construct
  misc_feature 1..1254: note = Description of Artificial Sequence: Synthetic coding sequence
  source 1..1254: mol_type = other DNA
atggcccagaaggagggtggcaggaccgtcccctgttgctccaggcccaaagtggccgctctgactgctggtacactgcttctgctcaccgcgataggcgctgcgagttgggccatagtagctgttctgctacgcagcgaccaggagccattgtacccagtgcaagtgtcttctgcagacgccagactgatggtgttcgataagactgaaggcacatggaggctgctgtgctcttctcgatccaacgcaagagttgcgggtttgtcctgtgaggagatgggcttccttcgagcccttacacacagtgagctggacgttcgcaccgccggagcgaacgggacgagtggattcttttgtgtcgacgaaggcagactccctcatactcagaggctgctagaagtcatcagcgtgtgcgactgcccaaggggacggtttcttgctgcaatttgccaagattgtgggaggagaaagttgcctgtcgataggatcgtagggggacgagacacatcccttggtcgatggccgtggcaggtgagcctacgctatgacggcgcacatctgtgcggtggttccctcctaagcggcgactgggtgctcaccgccgctcactgtttcccagagcggaaccgggtcttgtcacgctggcgagtctttgcaggcgcagtagcccaggccagtccacacggcctgcagctgggagtgcaagccgtcgtgtatcacggaggctatcttccgtttagggatcccaactcagaagagaattctaacgacatagctttggtacacctatcctccccgctgccccttacggaatacattcagcccgtgtgcctcccggcagcgggacaggcactggtagacgggaagatttgcacggtaacaggttggggcaacactcaatactatggccagcaggccggagtacttcaggaagctcgagtccccattatttcaaacgacgtgtgcaacggtgctgacttttatggaaatcagatcaagcccaaaatgttttgcgctggttacccagagggaggaattgacgcctgtcagggtgattccgggggacccttcgtgtgtgaggacagtatatccaggacccccagatggagactctgtgggatcgtttcttgggggacggggtgtgcccttgcccagaaacccggagtgtataccaaggtttccgatttcagagagtggatcttccaggctatcaaaacccattccgaggcgtctggaatggtgacccagctttag

SEQ ID NO: 225971 - DNA, 1182 bp, synthetic construct
  misc_feature 1..1182: note = Description of Artificial Sequence: Synthetic coding sequence
  source 1..1182: mol_type = other DNA
atgtgtaaaatgcgaactagggaggatatgcaactcgggaatgaaggtccaggtaccgcgcttaggctgatacatctgcaagtgagcagtgcagatgcgcgtctaatggtgtttgacaaaacggaagggacatggcgcctcctgtgttcttcccgcagtaacgcacgagtggccggtctatcatgcgaggaaatggggttcctacgcgcactcacgcattcagaactcgatgtccgcacagccggtgctaacggcacgtcggggttcttctgtgttgacgagggtaggttgccccatacgcagcgcctgttagaagtgatatccgtgtgcgactgtccgcgtggccgtttcctggccgctatctgtcaggattgtggtagaagaaaactgcctgtagatcgaattgtcggtgggcgtgataccagtctgggcagatggccatggcaagtgagcctgagatatgacggcgctcatctctgcggtggctcattgctgagcggagactgggtgttaactgctgcccactgtttccctgagcggaatagggtcctcagtagatggagagtattcgctggtgccgtcgcacaggcctcccctcacggcttgcaacttggcgtgcaggcagttgtctatcatgggggatacctcccatttagggaccctaactctgaggagaattccaatgacatagccctcgtgcatttgtccagccctctcccgctgaccgagtacatacagcccgtttgtcttcccgcagccggtcaagcattggtggatggtaagatctgtaccgtgaccggatgggggaacacgcagtactatggacaacaagcaggcgtcctgcaagaggcgagagtacccatcatatcaaacgacgtatgcaatggcgcagacttttacggaaatcagataaaacccaagatgttttgtgccggatatccagaagggggaatcgatgcttgccagggcgattctggagggccattcgtgtgcgaggatagcattagtcgcacacccagatggaggctttgtggtatcgttagctggggcaccggatgtgcccttgcacagaaacccggtgtgtacactaaagtgtcagatttccgggagtggatttttcaggctattaaagttaaggtcgggtctcgatgggaacccggttggggtcggctgggagtttag

SEQ ID NO: 225972 - DNA, 2103 bp, synthetic construct
  misc_feature 1..2103: note = Description of Artificial Sequence: Synthetic coding sequence
  source 1..2103: mol_type = other DNA
atgaaatgcgtgctcgtagctacagagggagcagaggttctgttctactggaccgatcaggaattcgaagaaagtctccgactgaaatttgggcagagtgagaacgaagaggaagaattacctgccctcgaggaccagctgtccaccctattggcacctgtaatcatttcgtctatgactatgctggagaagctctctgacacctatacatgcttctcaaccgaaaacgggaatttcctatatgtcctgcacctgtttggggagtgcctgttcatagcaatcaacggcgaccatactgaaagcgagggtgatctccgaaggaaactgtacgtcttaaagtatctgtttgaagtgcacttcggtcttgtcacagtggacggccatctgatcagaaaagaactcaggcccccagacctcgcccagagagtgcaactgtgggagcactttcaatcgctgttgtggacatatagccggctccgcgaacaggaacagtgctttgcggtggaggccttggagcggctgatacatcctcagttatgcgaactgtgtatagaagcgttggagaggcatgttattcaggccgtcaatacatcccccgaacgcggtggcgaagaagccttacacgcattccttttggtccattccaaacttctagctttttacagcagtcatagcgcgagcagcctgagacctgccgatctgctcgccctcatccttctggtccaggacctctaccctagcgagtcaactgccgaggacgacattcagccttccccaagacgagccaggtcctctcaaaacattcccgttcaacaggcgtggagccctcatagcaccggtcccacaggagggtcatcagctgagacagagacagacagtttttctctccccgaagaatactttacaccagcaccgtcacccggtgatcaaagctcagggagcaccatttggctcgaggggggaactcctccgatggatgcattgcagatcgccgaagacactctgcagacattggtgccccattgtcctgtgccctccggcccacggaggatctttctggatgccaatgtgaaggagtcctactgtccattagtgccccatacaatgtattgcctgcctctgtggcaaggaattaacctagtgctgctaactcggagccctagcgcgccactggcgctggtgctctcccaattaatggacggcttttccatgctcgaaaagaagcttaaggagggcccagagcccggtgctagcctcagatctcagccattagtgggggaccttaggcaacgtatggacaaattcgtgaagaataggggcgcacaagaaattcagagcacgtggttagagttcaaagccaaagctttctctaaaagcgagcccggatcctcttgggaactgctacaggcatgcgggaaactcaaacggcagctttgcgctatctacagacttaattttctgaccactgccccatcccgcggagggcctcatctcccccaacacctccaggaccaggtgcaaagactgatgcgtgaaaagctcaccgactggaaggactttttgctggttaagagcagaaggaatataacgatggtatcatacttggaagactttcccggacttgtacactttatctacgtggaccgcacaactggtcagatggtcgcaccgagcttgaactgctcacaaaagacatctagcgagctgggaaagggaccactggctgccttcgtcaaaacgaaagtctggtcactcatccagctggccagaaggtacttgcagaaaggctacaccactctgcttttccaagagggggatttctattgttcctactttctgtggtttgagaacgacatgggatacaagttgcagatgatcgaggtgcctgtgctcagcgacgattcggtgcccattggtatgctgggcggtgattactataggaagctgctccgctactactctaagaaccggcctacggaagctgtaagatgttacgagctcctagccctgcacctgtccgtgattcccaccgaccttctggtacaacaggccggtcagctggctagacgcttgtgggaagcctctcgaattcctctactgtag

SEQ ID NO: 225973 - DNA, 975 bp, synthetic construct
  misc_feature 1..975: note = Description of Artificial Sequence: Synthetic coding sequence
  source 1..975: mol_type = other DNA
atgaaatgcgtccttgtggcgacagagggagctgaggtgctgttctattggacagaccaggagtttgaagagtcactgcgactcaagtttgggcagagcgaaaatgaagaagaagagctgccagctcttgaggatcagctgtcgactctcctcgcacccgtgatcatttctagcatgacaatgcttgagaaactatctgatacatacacgtgcttctctacagagaatggtaactttctctatgttctgcatctgttcggggaatgtctgttcatcgctattaatggcgaccacacggagtcagagggggatctccggcgtaagctttacgtgctaaagtacctgtttgaggtgcacttcggcctagtgaccgtggatggccatttgatccggaaggagctcaggcccccagaccttgctcaacgggtccagctgtgggaacattttcagtccttgctgtggacctactcccgactccgggaacaggagcagtgttttgcagtagaagcgctcgaaaggctcatccatccccagctttgcgaactctgtattgaagctctggaacggcacgtcatccaagcagttaatacatcacccgaaagaggaggagaggaagccctacacgcgtttctcttagtccacagcaaattgttggctttctatagctcccattctgcctcttcactgcgaccagctgatctgctagctctgatcttgctggtgcaagatctttaccccagcgagagcacagcggaggacgatatccagccatcacctcgacgggctcgtagtagccagaacattccagtacagcaggcatggtctccccactccacggggcctaccggcggatcctctgcagaaacagagactgacagcttctccctacctgaagaatactttacccccgcaccatctccaggtgaccaatcaagcggagaggatagaaggaaagcaggaggcaataactcttag

SEQ ID NO: 225974 - DNA, 981 bp, synthetic construct
  misc_feature 1..981: note = Description of Artificial Sequence: Synthetic coding sequence
  source 1..981: mol_type = other DNA
agactcattcatccccagttgtgcgaattatgtatcgaggcactggagagacatgtgatacaagcagtgaacacctccccagagcgcggaggggaggaagcactgcacgccttccttttggtccactcaaagctccttgcgttctactccagccatagcgcgtcttcacttcggcctgccgacttgctcgccctgattcttctagtgcaggatctgtatccgtcagaaagtacggcagaggacgatattcaggagacggactcattttctcttcctgaagaatactttacccccgctcccagcccaggagatcaatccagcggcagtaccatatggctggagggagggactccccctatggacgcgctgcagattgcagaagacacgttgcagactttggtgccccactgtcccgtccccagtggtccccgacgaatctttctcgacgccaatgttaaggaatcgtattgcccactcgtgccacatacaatgtattgcctacctctttggcaagggattaatctggtgttgctgacacgttctcccagtgccccactggccctagtattgagtcaattaatggatggattctccatgctcgaaaaaaagctcaaagagggacctgaacctggagcatctctgagatcacagcccctggtcggagatctaagacaacggatggataaatttgtcaagaacagaggcgcacaggagatccaatccacgtggctggaattcaaagcaaaggccttttcaaagtctgagcccggttcctcctgggaactcttgcaggcctgtgggaaactgaagcgccagttgtgcgccatttaccggctcaatttcctgacaaccgctccatcacggggaggtccacatctgcctcagcacctccaagaccaggttcaacggttaatgagagaaaaattaactgattggaaggactttctgctggttaaaagccgccgaaacatcacgatgtag

SEQ ID NO: 225975 - DNA, 2103 bp, synthetic construct
  misc_feature 1..2103: note = Description of Artificial Sequence: Synthetic coding sequence
  source 1..2103: mol_type = other DNA
atgaagtgtgtgctcgtggcaaccgagggcgcagaggtccttttctactggaccgaccaggagttcgaagagagtctgcgtctcaagtttggacagtctgagaacgaggaagaggaactgcccgctctggaggatcaactctctacactgctggctcctgtgatcatatccagtatgacaatgctggaaaagctatctgacacgtatacctgttttagcactgaaaatggcaatttcttgtatgtgttgcacctgtttggagagtgcctgttcatcgctatcaacggtgatcacactgagtccgaaggggacctgagaaggaaattatacgtccttaaatatctgtttgaggtgcattttggactcgtgactgtagatggccacctgattcgcaaggaactgcgacctcctgacctggcccagcgggtgcagctgtgggaacactttcagtcgttgttgtggacctattccagattgagagagcaggagcagtgctttgcggtggaagcgttagagcgcctcatccacccccagctctgtgaactgtgtatagaagcacttgaaagacacgtaattcaagccgtgaataccagccctgaacgtgggggtgaagaggccctgcacgccttcttgttggtccacagcaaactcttggctttttattctagtcattccgcatcatccctaaggcctgctgacttattggcattaatcctgctggtgcaggatctctatcccagcgagagcacagccgaggacgatattcaacccagccctcgcagggctcgttccagtcagaacattcctgttcaacaagcatggtctccacattcaacgggtcctactggcggatcatcagccgaaaccgaaacagactcgttctctctgcccgaggagtattttacacctgccccatcccccggagatcagtcctccgggagcaccatttggttggaaggcggaactcctccgatggatgctcttcaaatcgcagaggatactcttcaaaccctcgtccctcactgcccagtcccttctggcccacgaagaattttcctcgacgctaatgtcaaagagagttactgccctctagtaccgcacaccatgtactgcctccctctatggcagggcatcaatctcgtcctcctgacacgctcaccctccgctcctctcgccttggtcttgtcgcagctgatggacggcttctccatgctggaaaaaaaacttaaggaggggcctgagccaggggcttctctcagaagtcagccactggtgggagacctccgacagcggatggacaagttcgtaaagaaccgcggagctcaggaaatacagagtacctggcttgaatttaaggcaaaggcgttctccaaatcagagcctgggagcagctgggagttactgcaggcttgcggaaaactcaagcgccaattgtgtgctatatatcgcctgaattttctgactacagcacctagtcgcggagggcctcacctaccacagcacctccaggaccaggtccagcgcctcatgcgagagaagctgaccgactggaaggactttctcctggtgaaatctagacgcaatattactatggtgtcttatctggaggacttccctggcctcgtgcatttcatttacgtcgacaggaccacaggacagatggttgcgcctagtttgaactgcagccagaagacatcaagcgagctgggtaagggcccattggcagcttttgtgaaaacaaaagtgtggagtctgatccagttggcaagacggtatctgcagaaagggtacacaaccctcttgttccaggagggtgacttctattgctcttacttcctgtggtttgagaatgacatggggtataagttgcagatgatagaggtaccagttctgtccgacgattcggtgccaattgggatgctagggggagactattaccggaaactcctgcgctactactccaagaacagacctaccgaggcagtcagatgttatgagctcctggcattgcatcttagcgtgatcccaactgatctgcttgtgcaacaggcaggacagctggctcgtcggctgtgggaggcctcccggataccacttctgtag

SEQ ID NO: 225976 - DNA, 2004 bp, synthetic construct
  misc_feature 1..2004: note = Description of Artificial Sequence: Synthetic coding sequence
  source 1..2004: mol_type = other DNA
atgaagtgcgtacttgtggctaccgagggggctgaagtgcttttctattggactgaccaggagtttgaagagagccttagactgaagttcggtcaatcagaaaacgaagaagaggaactaccagccctcgaggaccagcttagcacgttgttggcacctgtgataatctcctctatgactatgcttgagaaacttagcgacacctatacttgtttcagtacagagaacggaaatttcctctatgtattgcatttattcggggaatgtctgttcatagccattaatggtgatcacacggagtctgagggggacctaaggcgtaagctttacgtcctcaaataccttttcgaggtccacttcggcctcgttacagtagacggccacctgattagaaaggagctccgcccaccagacttagcccagagagtgcagctgtgggaacattttcagtctctgctatggacgtactccagattgcgtgagcaggagcagtgcttcgccgtcgaggcactcgagcgactaattcatccccaactgtgtgagctttgtatcgaggctctggaaaggcatgtgattcaggccgtcaatactagtcctgaacggggaggcgaggaagccctacacgcctttctgctcgtacattccaagcttctagcgttctattcctctcacagcgcttctagcttgcgtcctgccgaccttttggcattgatcttactggtgcaagacttgtaccccagtgaatctaccgcggaagatgatattcaggaaacagatagtttcagtctgccagaggagtactttacccccgctccttcaccgggagaccagagttctggatcaacaatatggctcgagggcggtactcccccaatggacgccctgcagatagctgaggatactctgcaaaccttggttcctcactgtcccgtcccttccggacctaggaggatctttctcgacgctaacgttaaagagtcttattgtccacttgtacctcacactatgtactgcctgccactctggcaaggaatcaacctggttctgctcacaagaagccctagcgctcccctcgccctcgttttgtcacagctcatggacggcttctccatgctagagaaaaaattgaaagagggcccagaacctggggcatcccttaggtctcagcccctggttggtgatctgaggcaacgtatggacaagttcgtgaagaatcggggtgcccaggaaatccagtccacatggcttgagttcaaagccaaggccttttcgaagtccgagccaggttcgtcctgggaactactgcaagcttgtggtaaactgaagcgacagctgtgcgccatttaccgactgaattttctgaccacggcccctagtagggggggaccccacctgcctcaacacttgcaggaccaggtccaaagactgatgagagagaaattgaccgactggaaggactttctgctggtcaaatctagaaggaacatcacaatggtcagctatcttgaggattttccaggactggtgcattttatttacgtcgaccgcacaaccggccagatggtagcaccatccctcaactgctcccagaaaacctcaagcgaacttggtaaaggcccattggccgctttcgtcaaaacaaaagtctggagccttattcagctggcacgcaggtatttacagaaggggtataccactctcctcttccaggagggggacttttactgctcttatttcctctggttcgagaatgacatgggctacaagctgcaaatgatcgaggtgccagtcttgtctgatgacagtgtcccaattggcatgctcggtggagactactaccgaaagttgttgagatattacagtaagaatcgccctaccgaggcggtgcgctgctatgaacttttggccctccatctgagcgtaattcccaccgatctgttggtgcagcaggctggacagttggctagacggctttgggaggctagcaggataccattgctctag

SEQ ID NO: 225977 - DNA, 480 bp, synthetic construct
  misc_feature 1..480: note = Description of Artificial Sequence: Synthetic coding sequence
  source 1..480: mol_type = other DNA
taactccgccctccggacctcgcccagcgcgtccagctttgggaacactttcaatcgctcctatggacatactcccgactgcgagaacaggaacagtgtttcgctgtcgaggcactcgaacgcctgattcatccacagctgtgtgaactgtgtatagaggccctggagaggcacgttatccaggctgtcaatacatcccctgagaggggtggagaggaggcactccacgccttcttgttagtccattcgaagctgctggccttctattctagccactcagcctctagtctccgcccagcggacctactggcattgatactgctagtacaggacctgtaccccagcgaatccactgctgaagatgacatccaagagaccgattcgttctcacttcctgaggaatacttcactcccgcaccttcccctggcgatcaaagtagtggcgaagaccgtagaaaggccggtggaaataactcttag

SEQ ID NO: 225978 - DNA, 3015 bp, synthetic construct
  misc_feature 1..3015: note = Description of Artificial Sequence: Synthetic coding sequence
  source 1..3015: mol_type = other DNA
atggtgcagctttataatctgcacccatttggcagccagcaggtggtaccctgtaagctcgagccggatcgattctgtggcggagggagagatgctctgttcgtcgcagcaggttgtaaggtcgaggcctttgcggtagctggacaggagctgtgccaacccaggtgcgcattctctacactgggccgtgtcctgagactggcctactcggaggctggggactacttggtcgcgattgaagaaaagaacaaggcgacatttttgcgcgcttatgttaactggagaaataaacgaacagagaacagccgggtctgcattcgaatgattgggcacaacgttgaagggcctttctcaaaggccttcagagaccagatgtacatcatagagatgccgctatctgaggcaccgctttgcattagctgctgtccagtgaaaggagacctcctggtgggttgcaccaataaactcgtcctctttagcctcaagtaccagatcattaatgaagaatttagcctgctggactttgagagatcactgattatccacatcgacaacattacccccgtggaagtcagtttctgcgtcgggtacgtggctgttatgtctgacctggaggtcctcatcgtcaagctcgaaagcgggcctaagaacggggagcgggtgcaccaccatccgcacaagacgaacaatagaatccgcaggaccgaggagggaattagtaacgagatcagccagctggagagtgatgatttcgtgatctgccagaaacctttagaactactcggcgagaagtctgaacaatccggcctttcagttacactcgagtctacgggtctggccgacgagaagcgaaaatacagccattttcagcacctactctaccgcaggtttgccccagatatctcctcttacgttttgagtgacgacatcaaactacattccctgcagctgctgcccatatatcagacaggaagcttaacatctgatggaaaaaacctgtcacaggagaaagaacttctgagcttgttctgtttcttctccctaccgcatgtaggttatctctacatggtggtaaaatcagttgaactgatgtctgtatatcagtatcccgagaaaagtcaacaggctgttctgactccccagttcctgcatgtgatcacctctaacaatctccagtgttttaccgtgaggtgctccgcagccgcagcccgagaagaagatccatatatggacacaacactcaaggcgtgtccccctgtctcaatggacgtgtgcgccctccggattcagctattcatcggcttgaaggctatttgccactttaagaatcatatcatactgctaacaaaagctgagccagaggccatcccggagagaagacaatctcccaaacgtttgctgtctaggaaagacacttctgttaagattaagatcccccctgttgcagaagcgggatggaatctgtatatcgtcaacaccatctctccggttcagttgtataaggagatggtcgattactccaacacctacaaaacagtgaaaacccagtcctgtatccatttgctgtccgaggcccacctgttagttcgggctgcactcatggatgcaagtcagctggaaccgggtgaaaaagcggagctcctggaagcttttaaggagtcatgcggccaccttggcgactgctattcgaggctcgactctcaacacagccacctgacactcccgtattataagatgagtgggctcagtatggcagaggtgctcgcgcgaacagactggactgtcgaagatggcctgcagaagtacgagcgtggccttatcttctatatcaatcatagtctctacgagaacttagacgaagagctgaatgaggaattagccgctaaagtagttcagatgttctacgtcgctgaacctaagcaggtccctcacatcctatgttccccctctatgaaaaatatcaatccactgaccgccatgtcctatcttcggaagctggatacttcggggttttccagcatactagtcaccctcactaaagccgctgtagcgctgaaaatgggagacttagacatgcacagaaatgagatgaagagccatagtgaaatgaaactggtatgcgggtttattctggagcctagactactgatccagcagcgcaaaggtcagattgtgcccactgagctcgccctgcacttaaaagaaacgcaaccaggcctgttagtggctagcgtgctcggactacagaaaaataacaaaattggcatagaagaggctgattcattctttaaggtattgtgtgccaaagacgaagataccatcccccagctgctcgtcgatttctgggaagcccaactcgtcgcttgtttaccagatgtagtgcttcaggagctcttttttaagcttacttcgcaatacatttggcgactgagtaaaaggcagccccctgacactaccccgctgcggacatccgaggaccttatcaacgcatgcagccattacggcttaatttacccctgggtgcatgtggtaatcagctcggactccttagcagacaagaactatacagaggatctctctaaactgcagtctctaatctgcggccctagctttgatattgcatctattatcccctttcttgagcccctgtcggaggatacaatagcagggctctcagtgcatgtgctctgtaggacccggcttaaggagtacgagcagtgcatcgacatcctcttggagaggtgtcctgaagctgtgatcccttatgccaaccatgagctaaaagaggagaatagaactctctggtggaaaaagctgttgcccgaattgtgccagaggattaaatgtggtggagaaaaataccagctgtacctgtctagtctaaaggagactttaagtatagtggcagtggaacttgaactgaaggatttcatgaacgtcctgccagaagatggaacagccaccttctttctaccataccttctttattgttcccggaagaagcccctgacttag

SEQ ID NO: 225979 - DNA, 1587 bp, synthetic construct
  misc_feature 1..1587: note = Description of Artificial Sequence: Synthetic coding sequence
  source 1..1587: mol_type = other DNA
atggcaacctcgacgtccactgaggccaaaagtgcatcatggtggaactactttttcctgtacgatggatctaaggtcaaggaggagggtgaccctacgagagccggaatctgctacttctacccttcacagaccctcctggatcaacaggagctgctttgcggccagattgcgggtgtggtcaggtgtgtgtctgacatctcggacagccctcccactttggtgcgccttagaaagttgaagtttgctatcaaagtggacggagattatctttgggttctagggtgtgctgtcgaattgccggatgtgagttgtaagagattcctggaccaactcgtaggttttttcaatttctataacgggcctgtgagcctagcctacgaaaattgctcacaggaggaactatcaaccgagtgggacacattcatcgagcagattcttaaaaacacatcagacctccacaaaatcttcaactcactctggaatttggaccagaccaaggttgagcctctgctccttctgaaggcggctagaatactacagacatgtcagcgctcacctcacattcttgctggctgcatactatacaagggactaatcgtgagcactcagcttccaccctccctcacagccaaggttctattacaccgcaccgcaccccaagagcagcgacttccaaccggcgaggatgcccctcaagagcacgggaaatggatgctgtggtcttttaagaacagagtcacccaccaaaacccgaacggcgctgcgcttcctcctaatgttcagattataccggtctttgtcacaaaggaggaggcaataagcctgcacgagtttcctgtggagcagatgacacgaagcctcgcctctcctgccggattacaggacggctcagcgcaacatcaccctaagggcggaagcactagcgccctgaaggagaatgctacaggccacgttgaatctatggcttggaccaccccagaccctacgagtcccgatgaagcttgccccgatggaaggaaagaaaatggctgtctatctggacacgacctcgagagcatccgccctgctgggttgcataactccgcgaggggtgaggtactgggtctgtcatcctccctaggtaaggagttagtgttcctgcaggaagaactggacttatccgaaatccacattcctgaagcccaagaggtcgagatggctagcggccactttgcttttctccacgtgcccgtgccagacggtcgcgcaccttactgcaaagccagcctgagcgctagctctagcctggagccaacgccaccggaagacacagccatctccagtctgaggccgccaagtgcgcctgagatgctgacacagcacggggctcaggaacagctcgaagaccacccaggccatagctcacaggctccaattccgagagctgaccctctcccaaaaagcaccgtgcttttctctgggggatgcgtgaaaggcagcgatacacagctatgcgtacccggactggtatggtacctggaacctcagttttactacgtgatcgtgcggcattttttcgacagcatgcggcagacagcgggatag

SEQ ID NO: 225980 - DNA, 2127 bp, synthetic construct
  misc_feature 1..2127: note = Description of Artificial Sequence: Synthetic coding sequence
  source 1..2127: mol_type = other DNA
atggccacttctacctccactgaagccaagtcagccagctggtggaattacttctttctatatgatggatctaaagtcaaagaagagggggaccccacccgcgctggcatttgctacttttatcctagccagaccttgctggaccagcaagagctgctgtgtgggcaaatagctggagtggtcagatgtgtgtcagatatttctgactcccccccaaccctggtgagactgagaaagcttaagttcgcaatcaaggtggatggtgattacctgtgggtccttggctgtgccgttgagctgcccgatgtgtcgtgtaagcgtttcctggatcaattggtcggcttttttaatttctataacgggccagtgagcctggcctatgagaattgttcccaggaggagctcagcaccgaatgggatactttcatcgaacagattttgaaaaacacctccgaccttcacaagatatttaactctctgtggaacttggatcagaccaaggttgagccgcttctgttactcaaagctgccagaatactgcagacctgtcaacgatcccctcacatcttagcaggatgcatcctctataaaggactcatcgtgagtacccaacttccaccttccttgacagcgaaggtcctgctgcatagaaccgctccccaggagcagcggctcccaacaggcgaagatgctccacaggagcacggcgctgctctgccacctaatgtgcagattatcccagtattcgtcacaaaagaggaagctatttctctgcatgaatttcccgtagaacagatgaccagaagcctggcgtctccagcaggactgcaggatgggagcgctcagcaccaccccaaaggtggcagcacaagcgccctaaaggaaaatgccacagggcatgttgaaagcatggcttggactacgccagacccaacgtctcccgacgaggcttgccctgatggcagaaaggaaaatggctgtctctccggtcatgacctggagtctattaggcctgccggtttgcacaattccgcacgtggcgaagtgcttgggctgagtagctcccttggaaaagagctcgtctttttgcaggaggagcttgatctcagtgagatccatatcccagaagcccaagaagttgagatggcctcagggcacttcgcgtttctacacgtacctgttcccgatggccgagcgccatattgcaaagcatctcttagtgcctcctcgtctctcgagccgactccaccagaggacacagcaatcagttctctgaggccccctagcgctcctgaaatgttgacacagcacggcgcacaggagcaattggaggaccacccagggcatagctcacaggccccaataccccgtgccgaccccttgcctcgcaggaccagacggcctcttctgctgccaaggcttgatcccggtcaacggggaaacaaactgccaacaggggaacagggtctcgacgaggacgtggatggtgtgtgtgaatcccacgctgctccaggactcgaatgctcgagcggatcggctaactgccagggtgcaggccctagcgccgatgggattagttctcggctgactcccgcagaaagctgcatgggcctggtgagaatgaatttgtatacacactgcgtaaaggggctagttctgtcccttctggctgaggagcccctccttggcgattccgccgcaatcgaggaggtctatcatagcagcctggcctcccttaacggactcgaggtgcacttgaaggaaacacttcctcgtgatgaagccgcttcaaccagctcaacctacaactttacgcattacgacaggatccagtcactcctcatggcgaatctgccccaggtggccacaccgcaagacaggaggtttcttcaagctgtcagtctgatgcattctgagtttgcccagctgcctgctctctatgagatgaccgtgcgcaatgcctccacagcggtgtacgcgtgctgtaatcccattcaggagacctacttccagcagctggccccagccgcaaggagctccgggttcccaaatccgcaagacggcgcatttagtttgtcaggaaaagctaagcagaagcttctcaaacatggggtcaatttgctttag

SEQ ID NO: 225981 - DNA, 2166 bp, synthetic construct
  misc_feature 1..2166: note = Description of Artificial Sequence: Synthetic coding sequence
  source 1..2166: mol_type = other DNA
atggcacctctgtgcagcctcgcccgttggaattacttctttctgtatgacggctcaaaggttaaagaggagggggatcccactcgcgctgggatctgttacttctacccctcccagaccctgctcgatcaacaagaattactgtgtggacaaattgctggcgtggtgagatgcgtctcagacatcagcgactcacctccaacactggtccggctgagaaagctgaagtttgccatcaaagtggacggggactatctctgggtcctgggctgcgccgtagaactcccggacgtgagttgtaaacggttcctggaccagctcgtggggttttttaatttctacaatggtccggtgtcccttgcctacgagaattgttcccaggaagaactgtccacagaatgggatacgtttattgaacagatcttgaaaaatacttccgatctgcacaaaatatttaattctctgtggaatcttgaccagactaaagtggaaccactattactattgaaggcagccaggattctacaaacctgccagcgatctccacacatcctggcaggatgtatcctgtataagggcctgatcgtttccactcaactgcctcccagcctgactgcaaaagtcttattacacaggaccgccccacaggaacagcgactccctactggtgaggatgccccacaggaacatgggaaatggatgctgtggtcttttaaaaaccgcgtgacccatcagaaccctaatggggctgcccttccccctaatgttcagatcatccctgttttcgtgacaaaggaagaagctatcagcctccacgagttcccggtggagcagatgactcgatcactcgctagccccgctggcctgcaggatgggagtgcacagcaccaccccaagggagggagtacttcagcattaaaggagaatgccactggacacgtcgaaagcatggcctggaccacacccgatcccactagtcctgacgaggcctgccctgatgggaggaaagagaatggatgtctgtcagggcatgatttggaaagcatcagaccggctggccttcacaatagtgcacggggtgaagtcttaggtctgtcttctagcctggggaaggaacttgttttcttacaagaagaactcgacctaagcgagatccatataccagaggcccaggaggttgagatggcatccggtcattttgcctttttacatgtcccagtccctgatgggagggctccctattgcaaggcctcactgagcgcgtcctcttctttggaacccaccccccctgaagatacggccatcagcagtctgaggccaccatcagctccggaaatgctgactcagcatggggctcaggagcagcttgaggatcacccaggccatagttctcaggctccaatccccagggccgaccctttacccaggaggacaagaagaccccttctgttacctagacttgaccccggacagaggggaaacaagcttcctactggagagcagggtctggacgaggacgtggatggcgtatgtgaatcccacgccgctcctggtttggaatgctcatccgggtcggccaattgccagggggctggtcctagtgcggacggtatttccagtcggctgacacccgctgagtcttgcatgggtctcgtcagaatgaatctgtatacacactgtgtgaaagggctggtcctgagtttactggccgaggagcctttactgggagattctgcagcaatcgaggaagtgtatcacagctccttggcctcacttaatggccttgaagtgcatctgaaggaaacattaccacgggatgaggctgcaagcacatccagcacttataacttcacccactacgatcgaatacagtcactgctgatggcaaacttgcctcaggtggcaacacctcaagatcgccgattcctgcaggctgtttctcttatgcacagcgagtttgcgcagctccccgcactctatgaaatgaccgtccgcaacgcctctactgccgtgtacgcttgttgcaacccaatccaggagacctacttccaacagttggctccagcagccaggtcatctggattccctaacccacaggacggtgcattctcactttccggcaaggccaagcagaagctactgaaacacggcgtgaatcttctctag

SEQ ID NO: 225982 - DNA, 2127 bp, synthetic construct
  misc_feature 1..2127: note = Description of Artificial Sequence: Synthetic coding sequence
  source 1..2127: mol_type = other DNA
atggcaacatctacctctacagaagcaaaaagtgcgtcttggtggaactactttttcctgtatgatgggtctaaagtgaaggaggaaggagacccgacacgtgccggaatttgttacttttatcctagccaaaccctgttagatcagcaggaattactctgcggccagattgctggcgttgttcgctgcgtttccgatatttcagacagccccccaacacttgttaggctgagaaagctaaaatttgctattaaggtcgatggagattacctatgggtgctgggctgcgccgtggagctacccgatgtctcctgtaaacggttccttgatcaattagtggggttctttaacttctataacggacctgtctctctagcatacgagaattgttcccaagaggaactgtccaccgaatgggatacatttatcgaacagatcctcaagaacactagcgacttgcacaagatttttaactctctttggaacctggaccagaccaaggtagaacctctcctattgctcaaagcggcacggatcttgcagacttgccagagaagcccacatattttggcgggatgtattctctataagggactgatcgtgtcaactcaactgcccccttctctgactgctaaagtgttgctgcatcgcaccgcacctcaggaacagcggctccccaccggagaagatgcaccacaggagcacggagcggctctgcctcccaacgtccaaatcatccccgtgttcgttaccaaagaagaggccatcagtctgcacgagttccctgtggagcaaatgacccgatccctggctagccccgcagggctgcaggatggctccgctcagcaccatccaaaaggaggtagcactagtgccctaaaagagaacgccactggacatgtggaatcgatggcctggacaacgcctgaccctacttctccggatgaagcctgtcccgacggccgtaaggagaacggttgccttagtggccatgatttagagtccatcagacctgcgggacttcacaattctgcaagaggggaggtgttgggcctcagctcatctctcggaaaagaactagtgttcctacaggaggagcttgacctgagcgagatacatatccctgaggcacaggaggtggaaatggcctctggccattttgccttcttgcacgtgccagtgcctgatggcagagctccgtactgtaaggcctccctctcggcctctagcagtctagaacccaccccccctgaggacactgcaataagtagtttacgccctcccagtgctccggaaatgctgacgcagcatggggctcaggagcagctggaagatcatcccggtcattcatcccaggctcctattccccgtgccgaccctctgcccaggcgaactcgtcgacccctcttgctccctagactagacccagggcagcggggaaataagcttccaaccggagaacagggactcgacgaagatgttgatggcgtttgcgagagccatgccgctcctggtcttgagtgcagctccggcagtgctaattgccagggcgcaggaccttccgctgatggaatttcgtcccggttgacaccagccgaatcttgcatgggtttggtccgaatgaacctttacacacactgtgttaaggggctggttctgagtctattagcagaagagcccctgttgggagattccgctgcaattgaggaggtttaccacagttctctggcctccctaaacgggttggaagtgcatcttaaagaaacactgccacgggacgaagctgcgtctacgtcttcaacctacaactttacgcactacgaccgaatccagtctctgctaatggcaaatttacctcaggttgccacaccacaggaccggagattcctgcaggccgtgtctctaatgcacagcgaatttgcacaattgccagccctgtatgagatgaccgtgcggaacgcatccacagctgtgtatgcttgctgtaacccaatccaggaaacctactttcaacagctagctcctgcagccaggagttccggcttccctaatcctcaagatggggctttctctcttagcggtaaagcaaagcagaagttgttaaaacacggagtgaacctgctatag

SEQ ID NO: 225983 - DNA, 2112 bp, synthetic construct
  misc_feature 1..2112: note = Description of Artificial Sequence: Synthetic coding sequence
  source 1..2112: mol_type = other DNA
atggctcccctctgtagcctggctcggtggaattacttttttctctacgacgggtctaaggtaaaggaggaaggtgatcccacccgggcaggaatttgctacttttacccttcccagactctgctggatcaacaggagcttttgtgtgggcagatagcgggtgtggtgcggtgtgtgtcagacattagcgacagtccccctaccctcgttcgcctcagaaagcttaagtttgctattaaggtggacggcgactacctctgggtgctcgggtgtgctgtagagcttcctgatgtgtcttgcaaacgttttctcgatcagctggtggggttcttcaatttttataacggaccagtgtcgctggcgtatgagaactgttctcaggaggaattgagcacagagtgggacacttttattgagcaaattttgaaaaatacctctgatttacataagatatttaacagcctgtggaacttggatcagactaaggtcgaacctttattgctccttaaggctgcccgaattctgcagacttgtcagagatcaccccatatcctggccggatgtattctttataaggggttaatcgtctcaacgcaactgcccccaagtttgacggccaaagtgctgctgcaccggaccgcaccccaggaacagcggctgccgactggggaggatgcaccgcaggaacatggcgctgccctgcctcctaacgtgcaaattattcctgtcttcgtaactaaggaagaagcgatctcattgcacgaatttccagttgagcaaatgaccagaagtctggcctctcccgcaggactgcaggatggctctgcacagcatcatccaaagggcggatcaacttccgcgctgaaggagaacgccaccgggcacgtagaatctatggcttggaccacccctgatcctacgtcacctgacgaggcctgcccggacggcagaaaagaaaatggctgcctttctggccacgatctagagagcatcagaccagcaggacttcataattccgcgcgtggggaggtgctgggcctcagttcctcactgggcaaggagctcgtgtttctgcaggaggaactcgacctgagcgagatccacatccctgaggctcaggaagttgaaatggccagtggccatttcgcctttctgcacgttcccgtccctgacgggagggcgccatactgcaaagccagtctatctgcatcctcaagccttgagccaactcctcctgaagatactgctatttcttccctcaggccacctagcgctcccgaaatgctcacacaacacggagcccaggagcaactcgaagatcacccgggacatagtagccaagcccctattccgcgtgctgacccactaccaaggaggaccaggaggcctcttctgctgcccaggctggaccctgggcagcgtggcaataagctgcccaccggggaacaggggctcgacgaagacgtagacggagtctgtgagtcccacgccgcacctgggctagaatgttctagtggttctgctaattgtcaaggggcaggaccatctgctgacgggatctcgagcaggttaactccagccgaaagctgcatgggtttggtgaggatgaatttatacacacactgtgtgaagggactggttttatcactcctggccgaggagccacttctgggcgattctgcagccatcgaggaggtgtatcatagttccctggcgagtctgaatggattggaggttcatctgaaagagacactgcctagggacgaagcagctagcacctctagtacatacaatttcacacactatgatagaatccagtcactgcttatggctaacctgccacaggtcgctaccccccaggataggcggtttcttcaggccgtgtcactcatgcattccgagttcgcccaactccccgctttatacgagatgacagtgcgaaacgcatccactgccgtctacgcttgttgtaaccctatccaggaaacttatttccagcagctggcccctgccgctcgctcatcagggttcccaaatcctcaggacggggcttttagcctcagcggcaaggccaagcaaaagctgctgaaacacggcgtgaacttgctatag

SEQ ID NO: 225984 - DNA, 3390 bp, synthetic construct
  misc_feature 1..3390: note = Description of Artificial Sequence: Synthetic coding sequence
  source 1..3390: mol_type = other DNA
atggcatttgtaccagttattcccgagtcctattctcatgtcctggccgagtttgagtctttggacccactattatccgcccttcgactagatagttcaagattgaaatgtacttctattgccgttagccggaaatggctggccctgggtagctcaggaggtggccttcacctgatccagaaggaaggatggaagcaccggctgttcctgagtcaccgggagggggcaatttcccaggtagcttgttgtcttcatgacgatgactatgtggctgtggccacatcgcaggggctggttgtggtttgggagctcaaccaagagcgacgtggtaaaccggaacagatgtatgtgagcagtgagcataaaggcaggcgcgtcaccgcactctgctgggacacagctatccttagagtgtttgttggggaccacgcaggaaaagtgtccgccattaagctgaacactagcaagcaggcaaaggcggctgcggcttttgtgatgttccctgtacaaaccattacaaccgtagactcctgcgtggtccagctggactatctggatggaaggctccttatttcctcattgactagatcctttttatgcgatactgagagggagaagttctggaagatcggaaacaaggaaagggatggggaatatggtgcttgcttcttccccggtaggtgctcaggaggccagcagcccctcatttattgcgccaggcctggttctcgcatgtgggaagtgaatttcgacggagaagtgataagtacgcatcagtttaaaaagctattgtcactcccccctctgccagtgattacccttcgatcagagccgcagtacgatcacacggccggaagctcccagagcttaagctttcctaagttactgcatctgtcagaacactgcgtactgacctggaccgaaagaggcatctacatcttcattccccagaacgtgcaggtgctcctatggagcgaggtcaaggatatacaagatgtcgccgtttgcaggaatgagctgttctgtctccacctaaacggcaaggtgagtcatctgtcattgatttcggtggagaggtgcgtcgagagactgctcaggcggggtctttggaatcttgctgccaggacctgctgcctgtttcagaactctgtgattgcctcacgcgctcgcaaaacacttacagccgacaaactggaacatctaaagagtcaactggatcacggaacttacaacgatctgataagtcagttggaggagctcattctcaagtttgagccactcgattcagcctgctcctccaggcgctcttcaatcagcagccatgagagtttcagcattcttgactcaggcatttacaggataatctctagcaggcgcggaagccagagcgatgaggactcctgttcattgcactctcagaccctcagcgaggacgagaggtttaaggagttcacaagccagcaggaggaggatctgcccgaccagtgctgtggctctcatggcaacgaggacaacgtctcgcacgcccctgttatgtttgagactgacaagaacgagaccttcctgcctttcggaatacctttgccattccgttctccctcccctctggtttcgctccaagccgtaaaggaatccgtgagttccttcgtcaggaaaacaacagagaaaattggcacactgcacacatcccccgatctcaaggttaggccggaactcaggggggatgagcaatcttgtgaggaagacgtgtcgtccgacacttgtcccaaagaggaggatacggaagaggagaaggaggttacgtctcctccaccggaagaggacaggtttcaagagctgaaagttgccactgccgaggcaatgaccaaattgcaggatcctctggtcctctttgaaagcgaatccctccgtatggtgctacaggagtggctgtctcacctggaaaaaacattcgcaatgaaagacttctcgggggtcagcgatacagacaattcatccatgaagcttaatcaggatgttttgctggtcaacgaatccaagaaaggcatcttggatgaagataatgagaaagaaaaaagagacagcctcgggaatgaggagtccgtcgataagaccgcctgtgagtgtgtgcgatctcctcgtgagtctttagacgatcttttccagatttgttcaccttgtgcaatcgcatccggactgagaaacgatctggccgaactgaccacgttgtgccttgaattaaacgtgctgaattccaagattaagtcaacctccggacacgtcgaccatactcttcagcagtattctcctgaaatccttgcctgccaattcctgaagaaatatttcttcttactgaaccttaagcgcgctaaagaatctatcaaacttagttattctaactctccgtctgtctgggacacatttattgagggactgaaagaaatggctagctccaatcccgtctacatggaaatggagaaaggcgatttacctacaagactgaaactcttagacgatgaggtgcctttcgattctccccttcttgttgtctatgctacaagactgtatgagaagttcggcgagtcagcattgagatcgttgataaagtttttcccgagtatcctgccttcggacatcatccagctctgccatcaccaccccgcagaattcctggcatacctggatagtctagtgaagagccgccctgaggaccagcggagctcgttcctggagagtctgctgcagcctgaatccctacgtctggattggctgttattggccgtcagccttgacgctcctccaagcacttccacaatggacgacgaagggtatcccaggcctcattctcacctgctgagctgggggtactcccagctgatcttgcaccttatcaagttaccagctgatttcatcaccaaggagaaaatgaccgatatatgtagatcctgtggtttctggccgggatatttaatactttgccttgagttagagagacgaagggaagcctttaccaacatcgtatacctcaatgatatgtcactgatggaaggagacaatgggtggattccggagacagtcgaggaatggaaactgctgctgcacttaattcagtccaaaagcactaggccggctccgcaggaatcgctgaacggatctctgagcgatggaccgtcaccgatcaatgtagagaacgttgccctcctgttggctaaagccatggggcctgaccgagcctggtccctcttgcaggagtgcggtctggcgctagagctgtcggagaagttcactagaacatgcgacattttgagaatcgccgaaaaacggcagcgcgctctgatccaatcaatgctggaaaagtgtgacaggtttctgtggtcccaacaagcctag

SEQ ID NO: 225985 - DNA, 3048 bp, synthetic construct
  misc_feature 1..3048: note = Description of Artificial Sequence: Synthetic coding sequence
  source 1..3048: mol_type = other DNA
atgtatgtttcaagtgagcacaaagggagacgcgttaccgctctgtgttgggacacagcaattttgcgcgtatttgtgggtgaccatgctggcaaggtgagtgcaatcaagctgaacacatccaagcaggcaaaggcagctgcagcctttgtgatgttcccagtccagaccattacaacagtggatagctgtgtcgttcagttggactacctcgacggtaggctgctgatttcctccctcacgagaagttttctgtgcgataccgaaagagagaaattttggaagattggaaacaaggagcgcgacggggagtacggagcttgcttctttcccggtcggtgtagtggcggtcagcagcctctgatttattgtgccaggcccggttctcggatgtgggaggtgaacttcgacggggaggtgatctctacccatcagttcaaaaaacttcttagcttgccacccctacccgttataaccttaaggtcggagccacagtatgaccacaccgccggatcctcccagtctttgtctttcccaaaactgctgcacctgagtgagcactgtgtccttacctggacagaaaggggaatctatatctttatacctcagaatgtgcaggtgctactgtggtcagaagtgaaagacattcaggacgtagccgtgtgtaggaacgaactgttttgtcttcacttgaatggtaaggtgtcgcatctcagtttgatcagtgttgagcgctgcgtcgagaggctactccgcagaggtctgtggaacctggccgctcgtacatgctgtctttttcaaaactcagtgattgcgagccgcgctcggaaaaccttaacggctgataaactggagcatctcaagtcccagcttgaccacgggacatataatgatctaatctctcagttggaggagctgattttgaaattcgagcctctggatagcgcttgttctagcaggcggagttcgattagttcccacgaatcatttagtatcctcgattccggcatctaccgcattattagctcccgacgaggctcccagagtgacgaagacagttgttccctccattcccagactttgtccgaggacgagagattcaaggagttcacctcacagcaggaggaagacctgcctgaccaatgctgcggaagccatggtaatgaagataatgtttctcacgctcccgttatgtttgagacggacaaaaatgaaacattcctcccctttggcatccccctgccctttaggtccccttcaccactggtctctctgcaggctgtgaaggagtcagtctcaagttttgtgcggaaaacaacagaaaagataggcaccctccacaccagcccagacctcaaagtgcggcctgaactaagaggcgacgagcaatcgtgcgaagaggatgtttcttccgatacctgtcctaaggaggaggataccgaagaggagaaagaagtcacatcccctcctccagaagaagacagattccaggagctgaaagtagccaccgcagaggcgatgacaaagttacaagatccactagtgttgttcgagtcagaaagtctcaggatggttcttcaggagtggctctcccatctggagaaaacttttgctatgaaagatttttccggcgtctccgataccgataactcaagtatgaaactcaatcaggatgtactgctggtgaatgagtctaagaaagggattctcgacgaagacaacgaaaaagagaagagagactcactgggcaatgaggaatcagtcgacaagaccgcctgtgagtgcgtgcgctcaccacgcgaatctctggacgatttgttccaaatatgctccccttgcgccatcgcaagtggactccggaacgacctggcagagctcacgaccctgtgtctggagctgaatgtactaaattccaaaatcaaatcaacaagcggtcacgtggaccatactcttcagcaatactccccggagatactggcttgccagtttctgaagaagtacttcttcctgctaaatctcaaaagagcaaaagagtctatcaagctcagctatagcaactcacctagtgtgtgggatacttttatcgagggactgaaagagatggcatctagcaatcccgtgtacatggaaatggagaaaggcgatctgcccacccgattgaagttgctggatgacgaggtcccttttgacagcccattattagtggtttacgccaccaggctctacgaaaaattcggtgaaagcgcgcttaggagccttattaaattttttccctccatcctacccagcgacattatccaactctgccatcatcacccggcagagttcttggcatatttggattctcttgtgaagtcccgtcctgaggaccaaaggagctcatttcttgagtctctgcttcagcctgaaagtctgcgacttgattggctgctgttggccgtcagccttgatgctcccccttcaacctccacaatggatgatgagggatatccgcgaccccacagccatctcctgtcatggggctattctcagcttatcttacacctcataaagctgccagctgactttattactaaggaaaaaatgacggacatctgccgttcgtgcggtttctggcccggttatctgatcctttgtctggagctggagaggagaagagaagccttcacaaacatagtgtacttgaacgatatgagtttaatggagggagacaacggctggatcccagaaactgtagaggagtggaagttgctgctgcacctcattcaatcaaagagcacccgccctgcacctcaggaatcactgaacggctccctgagtgacggacccagccccattaatgtcgaaaatgtggcgctcctccttgcgaaggcaatgggacctgatagagcatggtccctacttcaagaatgcggtttggcactggagttgagcgagaaattcaccaggacttgcgacatattgcgcatcgccgaaaaacgtcagagagctcttatccagtccatgctcgagaagtgcgaccgcttcctctggtcccagcaagcatag

SEQ ID NO: 225986 - DNA, 3048 bp, synthetic construct
  misc_feature 1..3048: note = Description of Artificial Sequence: Synthetic coding sequence
  source 1..3048: mol_type = other DNA
atgtacgttagcagtgagcacaagggtcgaagagtgacagccttatgctgggatacagccatcctgagggtgttcgtcggagaccatgccggaaaggttagcgccatcaaactcaataccagtaagcaggcaaaggctgctgcagcttttgtgatgttcccagtgcagactatcacaaccgtcgacagctgcgtggtgcagctagactacctggacggtaggcttcttattagcagccttactcgtagtttcctctgcgacaccgagcgggagaagttttggaagataggcaacaaggagcgtgacggggagtacggggcttgtttttttcccggtcggtgttcaggcggacagcagccgttgatttattgtgcaaggcctggatcccgtatgtgggaggtgaatttcgacggggaagttatttccacacaccaatttaagaaactcctgtctctgcctcccctgcctgtgattacactcagaagcgagccccagtacgaccacacagcagggtcctcacagtctctgtcttttcctaaactcttacatcttagcgagcactgtgtactcacgtggacagagaggggcatttatatctttataccacagaacgtgcaagtgttgctctggagcgaggtcaaggacatccaggacgtcgcagtatgtcgaaacgagctcttctgcctccatttaaatggcaaagtgtcacacctcagcttaattagcgtggagaggtgcgtcgaacgcctgttaaggcgaggactgtggaatttggctgccaggacttgttgtttgtttcagaactctgttatagcgtctcgagcccgaaagacactaacagccgacaaactggaacacttaaagtctcaactagaccacgggacttacaacgacctcatctctcaactggaggagttaattcttaaattcgaaccactggacagcgcttgcagcagcaggcgctcatcaatatcatcccatgagagcttctcgattctggacagtgggatttatcgtatcatttcgtctcgcagaggaagccagtctgatgaggattcctgctccctccactctcagaccctgtctgaggatgagcggtttaaagaatttactagccagcaggaagaagatctcccagatcagtgctgcggcagtcatggaaatgaagataatgtctcacacgcccctgttatgtttgaaaccgataaaaatgagacatttcttccatttggcattcccctaccattccgatccccgtcacctctggtctcccttcaggccgtcaaggagtctgtatcatcgtttgttcgtaagactactgaaaagatcggaactctccatacatctcctgatctcaaggtaaggcctgagctgagaggagacgaacagtcctgtgaagaagatgtttcgtctgacacatgccccaaagaagaggatactgaagaagaaaaggaggttacgagccctcctcctgaggaggacaggttccaagaactcaaggttgctaccgctgaggcgatgactaaactacaagatcctctggttcttttcgaatccgaatctctcagaatggtccttcaggaatggctttctcacctggagaagacctttgctatgaaggatttttccggggtaagcgacaccgataatagctccatgaagttaaaccaggacgtgttgcttgtgaacgagagtaagaaagggattttagatgaagacaacgaaaaggagaagcgtgactcactgggcaacgaagagtcagtggacaagaccgcctgcgagtgcgtccggtctcctcgtgaaagcctcgatgaccttttccagatctgttctccatgcgcaatcgcatccgggctgaggaatgacttggctgaacttacaacactgtgcctggagctgaacgtgctgaacagcaaaattaaaagtacctcggggcacgtcgatcacaccttacaacaatactccccggagattctggcctgccagtttctgaaaaagtattttttcctcttaaacctgaaacgggctaaagagtcaattaagctctcctactctaactccccttctgtgtgggatacttttatcgagggcttgaaagagatggccagcagtaatccagtgtatatggaaatggagaagggcgacttgcccactaggcttaaactactggatgacgaagtgccctttgacagccctctgctggttgtgtatgcaacaaggctgtatgaaaaattcggtgagtccgctctccgtagtctgatcaagtttttcccatcaattcttccttccgacataattcaactgtgccatcaccaccctgccgagttcctagcttatcttgatagccttgttaagtcaaggccagaggaccagcgcagttccttcctcgaaagtctgctgcagcctgagtcccttcggttggattggctcttgctggccgttagtcttgatgctcctcccagcaccagcactatggacgacgaaggctaccccagaccccattcccacctcctctcgtggggttacagtcagttgatcttacatctaataaagctccctgccgactttattactaaagaaaaaatgactgacatctgtagatcatgcgggttctggccagggtacctgatcctgtgccttgagctggagagaaggagagaggcgttcaccaacatcgtgtatttaaacgatatgagcctgatggaaggagacaatggctggataccagaaacggtagaggagtggaagctcctccttcacttgattcagtctaaaagcaccagacccgctcctcaggagtcgctgaacgggagcctttcggacggcccaagtcctataaatgttgagaacgtggctctgctcttggcaaaggccatgggacctgatcgggcttggagcctcctccaagagtgtggccttgctttagaactcagcgaaaaattcaccagaacatgcgacattcttagaattgccgagaaacggcagcgagcgctgattcaatctatgctggagaagtgtgacagattcctatggagccagcaggcctag

SEQ ID NO: 225987 - DNA, 2328 bp, synthetic construct
  misc_feature 1..2328: note = Description of Artificial Sequence: Synthetic coding sequence
  source 1..2328: mol_type = other DNA
atgaaaaggagtggcaccttgagattactgtcggatctgtccgcctttggtggggcagcacgacttcgcgaacttgtggcgggtgattctgccgtccgagtgcggggatcacctgatggtcgacacctcctgctgcttcgccctcccggagctgtggcaccgcagcttctggtggctagtcggggacctggcgctgagttggaacgcgcttggccggcaggccagccgtccccgcttgatgctttttttctcccatggccagcccgtcccgcattggtcctcgtgtgggagtcaggcctagctgaggtgtggggagctggcgtgggcccaggctggcgcccattgcaatcaaccgagctctgtcctggcggtggcgcacgtgttgtcgctgtggccgctctgcgcggacgccttgtctggtgcgaagagagacaagccagagctgaaggccctagcggatcacccgcagcagcattctctcattgtgtgtgcgtacgaacactggaaccctctggcgaagcttccacgagccttgggagaacccacgttcttctgcaccattgtccagctttcggtctcctcgccagctgcagacagctgttcttggttcccactgccactacttggcccggagtagcccatgtccttctgatatggagtccgggtaagggtaaagttatggtggcagctcccagacttggactctcctactcgaagtctctgaaccccggacgaggtgatacctgggattttaggacccttttacgaggacttcctgggctgctgtcccccagagaacctctggccgtgcatacatgggctccgacaccacagggactcctgcttctggacttcggcggaacagtgagtttgctgcaatctcacggtggcaccagggctgttggcactctgcaggaagctcctgtcggcccatggggcagcgccgctctcggtacttttcaaggcacacttgcttgtgtgctaggctccacactggagcttctggatatgggtagtggacagttgttagagcggaaagtgctgtcgaccgacagagtccacctgttggagccaccagcccctggcatggaggatgaggaggagctggagacgcgcggaaacctgcgccttctatctgctctgggcctgttctgtgtggggtgggaagcccctcaaggcgtcgaattgccatccgccaaggacctcgtgtttgaggaagcttgtgggtattatcagaggaggtcattacgaggcgcacagttgaccccagaggaactgcgccactctagtacgtttagagctccccaagctttggcctctatcctgcagggccacctgcccccaagtgccctgttgacaatgctccggaccgaactgcgcgattaccgcggtttggagcagctcaaagctcagctagtagctggcgatgacgaggaagcgggatggacggagctcgcagaacaggaggtcgcacgattgctgcggacggaattgattggcgatcagttggctcaactcaacaccgtgttccaggctctccctaccgccgcatggggcgcaacgctaagagccctccagctccagctcgacggcaatggaaagttaaggagtcaagcaccaccagacgtctggaagaaagtgttgggcggaatcacggccggtaaggagccacctaacggaatcctgcctcccttcgaactattgtgccagtgtctatgtcagctggagccacgctggctaccaccgtttgtagaactggcccaacaacaggggggacccggatggggagcaggaggcccaggattaccattgtataggagagccctagccgtcctcggtgaggaaggcacacggcctgaagccctggagctggaactccttctctcctcaggcagacccaaggcggtccttcaagccgtcggacaactggttcagaaggaacaatgggatcgcgctctagatgccggactggccctaggaccctcctctccactgttacggtctgagattttcaaattgttactcgctgaatttgcacagcaccgaagacttgacgcacatttgcctctcctctgtaggttgtgcccacctgagctggcccctgccgagttgctgctactcctccggacttaccttccggacgaggtgggcccaccaacgccattcccggaacccggagcagagccaccactgacagtgggcctccttaaggcgttgctggagcaaacaggggcacagggctggttaagcggaccagttctctccccgtacgaggatattctgtgggatccgtctaccccccctccaacccccccacgggatctttag

SEQ ID NO: 225988 - DNA, 1596 bp, synthetic construct
  misc_feature 1..1596: note = Description of Artificial Sequence: Synthetic coding sequence
  source 1..1596: mol_type = other DNA
atgcttggctttctgagcagagggccaagtatgaagctctgtatgggcttggcgtgcgtgctgtccctctggaatactgtatcaggtatcaaaggggaagctaagaaagagaaaggtatgacttttcttccgacaacagtgagtggcctcagggaggaagaaagaaaagagaaaggagtggccttcctggcaaccacagagctgcctgcacgaagcatcgacctttcagctctcaaccttactgaattggtgaatggaatgctctccagagcactgaaagactccaaaaaatttttctcccttttgagtgtcacatcctactcgtcattcgccttccacaaattctctgtggccgtatacaatatctccaacctgaagactgtggaccccgctaaattccccacacgatactgctactgcctgaacaatcggaccaatgacctctcagattttaccgcccttttggttgatattatcggtaattcaacttcgtacttgaccgagatattcaagagcacatctatcctgagcgtgaaccagtccaatgaatccgactgtatatttatttgtgtcatgaccggtaagtctggtagaaacctatctgacttctgggagatcgaggaaaaatatcctattatcaactacactttcacctccggactctccggcgtcctgggtgccgcaacccgcggaactgctaggacctctaagcccaccacaaagtctcagaagaccctgccatccacaagtcccggacattggacacagtcaaccccttgggccagtgccctaagaagctccccctggacggaaaccgcagctccaagtgaaaccgaggagacactgaatacaggtagaccacctgagctgcctgccagagcgactgctacatggtttagcgcctcacacactttgccggctctggccacaaggcgtgtcgctagaactcagtggctgacagccgataggcagacctgggcctccatctcgtctgtaccctgggcacagacaatcagtgagaaaaagcctggcggatcattgtgggagacgcgtagctctccaccgactacggccggaactgaggaggcgatgaacaccacaagcctgctcgccccagctgcagagatcatggcgaccccaggatcaccgtctcaggctagccctacgctgggagctttcacccatggcacgcaaacgccttctcccacaaaggcaacagctcctaggtacccccagacaggcgatttgagtgcagagtggcccttcactgccggagaagagccagtcctcgtgccacggccacaccaggtttcacggtgccctcagccactctttaaggtcggtgcaatggccgcagctcccctgactttagccatccagcgcctaaacccatgcctgatggagttatgtcagttttttcagcagtgcctgtgcatgtcacagagatctcctcggactgaggacatgcgctattgcttggagtattactcttggtttttgaaaaatgcaacctatatttgccagcgggtgaagagagtctcccacagccacaccctcaaacaaaaatgcctagaaaatatctgtaaaagtgtgtag

SEQ ID NO: 225989 - DNA, 558 bp, synthetic construct
  misc_feature 1..558: note = Description of Artificial Sequence: Synthetic coding sequence
  source 1..558: mol_type = other DNA
atgtccccctccctccaggagggagcacaattgggcgagaataaaccttccacatgtagctttagtatcgagagaatcctgggcttggatcagaagaaggactgcgtgccgctgatgaagccacaccggccatgggccgatacctgctcgtcaagcgggaaggacgggaacctgtgtcttcacgtccccaatccaccttccggcatatcatttcccagcgtagtcgaccaccccatgcccgaagagcgcgcaagtaagtacgagaactactttagcgcttcagaaaggctgtcacttaagcgcgaattgtcctggtatagagggcgacgacctcggactgccttcacgcagaaccagatcgaggttctcgaaaatgtgtttagagtcaattgctaccctggtatcgatattagggaggatttggcacagaaactgaaccttgaagaagaccgaattcaaatttggtttcagaacaggcgggcaaagctaaaacgaagtcaccgcgagagccaatttctcatggcgaaaaagaacttcaataccaatttgctggaatag

SEQ ID NO: 225990 - DNA, 324 bp, synthetic construct
  misc_feature 1..324: note = Description of Artificial Sequence: Synthetic coding sequence
  source 1..324: mol_type = other DNA
atgtccccgtccctgcaggaaggggcacagttgggagaaaacaagccaagtacatgctcgttttccatagagagaattcttggcctcgaccagaagaaagactgcgtccctttgatgaaaccccatcggccttgggctgatacctgctcatctagcggtaaggacggaaatttgtgcctccacgtgcccaacccaccctcagggatcagcttcccgagtgttgtggaccatccaatgcctgaagagcgggcatcaaaatacgaaaactacttttcggcctcagagagattaagcctaaaacgcgagctgtcctggtaccgctag

SEQ ID NO: 225991 - DNA, 1263 bp, synthetic construct
  misc_feature 1..1263: note = Description of Artificial Sequence: Synthetic coding sequence
  source 1..1263: mol_type = other DNA
atggaagttccccctcggctatctcatgtgcccccaccactctttccatcagccccagctaccctggcaagccggagcctctcccattggcgtccacggccaccacggcaattggctccacttctgcccagtctggcccctagcagcgctcgtcagggggctcgaagggcccagcggcatgtaaccgcccagcaaccatcgagactcgccggaggagcagctattaaaggagggcgtaggcgcaggccagacttattcaggaggcactttaagagttcaagcatccaacgttctgccgcagctgcagcagcaacaagaaccgcgaggcagcacccaccagccgactcttccgtgactatggaagatatgaatgaatacagcaatatagaagagtttgctgaggggagtaagataaacgcgagcaagaatcaacaggacgacggaaagatgtttattgggggactgtcttgggacacttcgaagaaagaccttaccgaatatctcagtcgcttcggcgaggtagtggattgtacaattaagaccgacccggtgaccggccgttctcgaggctttggatttgtgctgttcaaagatgccgctagcgttgataaggtccttgagttaaaggaacacaaacttgacgggaagttgattgaccccaagagggccaaggccttaaagggcaaggagccccctaagaaagtgtttgttggagggttgtcaccagatacctctgaagagcagattaaggaatatttcggcgcttttggtgagatcgagaacatagaattaccgatggataccaagaccaatgagagaaggggattctgcttcattacatacactgacgaagagcctgtgaagaaactcttagagtctcggtaccaccagataggatccggcaaatgtgagatcaaagtcgcccagccaaaagaggtctaccgccagcagcagcaacaacaaaagggcggacggggtgcagccgcaggcggaaggggaggcacacgcggacgaggaagaggacaaggccaaaactggaaccagggctttaataactactacgatcaggggtacgggaattacaattcagcttatggaggggaccagaattacagcggatatgggggatacgactacacagggtataattatggaaactacggatacggccagggctacgctgattacagcgggcagcaaagcacgtacggcaaggcctcccgcggaggaggtaaccatcagaacaactaccagccctattag

SEQ ID NO: 225992 - DNA, 735 bp, synthetic construct
  misc_feature 1..735: note = Description of Artificial Sequence: Synthetic coding sequence
  source 1..735: mol_type = other DNA
atggaagatatgaatgaatacagtaacatagaggagttcgccgagggttccaagattaacgcatccaagaaccaacaagatgacggcaaaatgtttatcggcggtctcagttgggatacgtcaaaaaaggatctcacagagtacttatcccgctttggggaggtggtcgactgtaccataaagacagacccggtcacaggcagatcccgcggattcggctttgtcctatttaaggatgctgcctccgtggataaagtcctcgagttgaaggaacataagttggatggcaaactcatagatccaaagcgtgccaaagccctgaaaggcaaagagccccctaaaaaggtcttcgtcgggggacttagtccagacacttctgaagagcagattaaggaatatttcggagcttttggtgagatcgaaaatattgaactcccaatggacactaagaccaacgagaggcggggattctgcttcattacttacaccgatgaagagcccgtcaagaagctcttggagtcgcggtaccaccagataggcagtggaaagtgtgagattaaggtggcccaaccgaaggaagtatatcggcagcagcagcaacagcagaaagggggtcggggagcagccgcaggtggaagaggagggacacgcggtcgcggacgcggacagcagagcacgtatggtaaggcctctagaggcggagggaaccaccagaataattatcagccgtattag

SEQ ID NO: 225993 - DNA, 1263 bp, synthetic construct
  misc_feature 1..1263: note = Description of Artificial Sequence: Synthetic coding sequence
  source 1..1263: mol_type = other DNA
atggaagttccaccacgcttaagccacgtccctccacctctatttccttccgctcccgctaccctggctagcagatccctgagccactggagacctcgacctcctagacagctcgctccccttcttcccagcctggctccctcttcagctaggcagggcgcacgcagagctcagcgtcatgttacggcccagcagccaagccgcctcgcgggaggagcagccattaagggcggtaggagacggagacccgacctgttcaggaggcacttcaaatcgtccagtattcaacggagcgctgccgctgccgctgcaacccgtacagcaaggcagcacccccctgcagatagcagcgtaacgatggaggatatgaacgaatactccaacatagaggagttcgctgagggctctaaaatcaacgcctccaaaaatcagcaggatgacggaaagatgttcatcggagggttgagctgggacacatcaaagaaagatctaacagagtacctgagccgattcggtgaggtggtggattgtactataaaaactgatcctgtcacaggtcggtcaagaggattcggctttgttctgtttaaggatgctgcgagcgtcgacaaagttctggagctgaaggagcataagttggatggtaaattaatcgaccctaaaagggccaaagccctgaagggaaaggaacctccgaaaaaagtgttcgtggggggtctgtcccccgatacatccgaagagcagattaaagagtattttggtgccttcggcgaaattgaaaacatagaattgccaatggacaccaagacgaatgaaaggagaggattttgtttcataacctacactgacgaagaacctgtgaagaaactgttggagagtaggtatcatcagataggctctggaaagtgcgaaattaaggtggcgcagccaaaggaagtgtatcgtcagcaacagcagcagcaaaagggaggccgaggagccgctgccggagggagaggagggacccgaggcagaggcagaggccaagggcagaactggaatcagggatttaataactactatgatcaagggtacggaaattacaacagtgcgtatggaggagaccaaaattattctggttacgggggttacgactacactgggtacaattatggtaattatgggtacgggcagggttatgccgactattctggtcagcagagcacctatggtaaagcgtcccggggtggcggtaaccaccagaacaactatcagccatactag

SEQ ID NO: 225994 - DNA, 1902 bp, synthetic construct
  misc_feature 1..1902: note = Description of Artificial Sequence: Synthetic coding sequence
  source 1..1902: mol_type = other DNA
atggctaaccaggtcaatggcaacgcagtccagcttaaggaggaggaagaacccatggacacctcatccgtgactcacaccgagcactacaaaacactcatcgaggctggtctcccccaaaaagtggccgagcgactggacgagattttccagaccgggttagtggcctatgtggaccttgatgagcgcgcaatcgacgctctacgggagtttaacgaggagggcgctctaagtgtgctgcaacaattcaaggagtctgatctgagccacgtgcaaaacaaatctgcttttctctgcggcgtcatgaagacataccgacagcgagaaaagcagggctcaaaagtccaggagagcaccaagggaccagacgaggccaagataaaagcattgttagaacgcacaggatacacgcttgacgttaccaccggtcagaggaaatatggcggtccaccaccagactcagtctattctggcgtacagccgggaattggcacagaagtcttcgtaggcaaaatccccagagatctatacgaggacgaactggtcccactgttcgagaaggctggcccaatttgggacctgaggctcatgatggatcccctatcagggcagaatagagggtacgcgtttataaccttttgcgggaaggaggctgcccaggaagccgtaaagctgtgcgactcttatgagattagaccaggtaaacaccttggagtgtgtatctcagtggccaataatagactgttcgtggggtcaataccaaaaaacaagaccaaagagaatatcctagaagagttctctaaggtaacagaggggctcgtggatgtgattttataccaccagccagacgataagaagaaaaaccgaggcttctgcttcttagaatatgaggaccacaagtcagctgcgcaggctcgacgtagactcatgagcggcaaggtgaaggtctggggcaacgtggttaccgtggagtgggccgacccggtggaagagccagaccctgaggtcatggctaaggtcaaagttttgttcgttagaaatttggcgactacagtgaccgaggagattctagaaaaatcattttccgagtttggtaagctggaacgggtgaaaaaactgaaggactacgctttcgttcatttcgaggaccgaggggcagcggtgaaggcgatggacgagatgaatgggaaagagattgagggggaggagatcgagattgtgctggccaaaccccctgacaagaagcggaaggagcgccaagccgctcggcaggcgagccgaagcaccgcatatgaggactactattaccaccccccacccaggatgcctcctccaattcgtggcagaggcagagggggagggcgaggtggctacggatacccacctgactactacggatatgaggattactatgatgactattatggctacgactatcatgattaccgcggtggctacgaggatccatactatggatacgatgacggatacgccgtacgaggccgtggcggaggacgcggaggcaggggcgctccacctccccctagaggtagaggagcgccaccacccaggggacgtgctgggtattcccagagaggcgcaccacttggaccacccagaggaagtcgcggagggagggggggtcctgcgcagcagcagaggggcagaggatccagaggctcccgcggtaacagaggcggaaatgtaggtggcaaaaggaaagccgatggttataaccagccggatagtaagcgacggcagacaaacaaccaacagaactggggaagccagccgatcgcccagcagccactccagcagggcggagactacagtggtaattacggttataataatgacaaccaggagttctatcaagacacatacggacaacaatggaaatag

SEQ ID NO: 225995 - DNA, 1902 bp, synthetic construct
  misc_feature 1..1902: note = Description of Artificial Sequence: Synthetic coding sequence
  source 1..1902: mol_type = other DNA
atggcaaaccaagtgaatggcaatgctgtgcagttgaaagaagaggaagaaccaatggacaccagctctgtgacacacacagaacattacaaaacgctgatcgaagctgggctcccccagaaggttgcagagagactcgatgaaatcttccagacagggctcgttgcgtatgtagatctcgacgaacgcgcaatagatgcactgcgcgagtttaacgaggaaggcgcactctccgttctgcaacagtttaaggaatctgacctctctcatgtccaaaacaagagcgcattcctttgtggagtgatgaaaacctacagacagagggaaaaacagggtagtaaagtgcaggagtcaactaaaggtcccgacgaggcgaaaattaaggcactgctggagagaacaggatacacactagatgtaaccacgggacagcggaagtatgggggacccccacctgactctgtatattctggggtccagcctgggatcggaacagaagtgtttgtcggtaaaatcccacgagacctgtacgaagatgaactcgttccccttttcgagaaagccggacccatttgggacctgcggctgatgatggacccactgtcgggccagaaccgcggatacgccttcattacattctgtggaaaggaggctgctcaagaggcagttaagttgtgcgattcatatgaaatccgacctggtaagcacttgggcgtttgcataagcgtcgccaataatcgcctgtttgtaggttcaatccctaaaaataagacaaaagagaacatcttggaggaattctctaaggtcacagaaggactggtggacgtcatcctgtaccatcagcccgatgacaagaaaaagaatcgtggcttctgctttctagagtacgaagatcacaaatcagcagctcaggccaggcgcagactgatgagtggcaaggtgaaagtttggggtaacgtggtgaccgtcgaatgggcagatcctgtagaggagcccgacccagaagttatggccaaggtgaaggtgctgtttgtgcgcaaccttgccaccactgtaaccgaagagattttagagaaaagttttagtgaattcggtaagcttgaaagagtcaagaagttgaaggactacgcctttgtacatttcgaagaccggggagcagccgtgaaggctatggacgagatgaacgggaaggagatcgagggggaggaaatcgaaattgttttggccaagcctcctgataaaaaacgaaaggaacgtcaggctgcaagacaggcctccagaagcacagcttacgaggactactattaccatcctcctcccaggatgcctccaccaatcaggggacgcggaaggggaggcggtagaggtgggtatggatatccccctgattactacggttacgaggattattatgacgactattacgggtatgactatcacgactatcggggtggctacgaggacccctactatgggtacgatgatggctacgccgtcagaggcaggggtggtgggcgaggcggacgaggtgccccacccccaccaaggggtaggggggcacctcctccgaggggcagagccggttatagtcagcggggtgcaccactggggccacctcggggtagcagaggcggtcggggaggacccgcacagcaacagcgcggaaggggctctagaggctccaggggcaaccggggaggcaatgtgggagggaagcggaaagctgacggatataaccagccagactccaagcgcagacagaccaataaccagcagaactgggggagccaacctattgcacaacagcccctgcaacaggggggagattactctggcaattacgggtataacaatgacaaccaggagttctatcaggatacgtacggtcagcaatggaaatag

SEQ ID NO: 225996 - DNA, 1911 bp, synthetic construct
  misc_feature 1..1911: note = Description of Artificial Sequence: Synthetic coding sequence
  source 1..1911: mol_type = other DNA
atggctaaccaggttaacggaaatgccgtgcagctcaaggaggaggaggaacctatggacacatcttccgtcacacacacggagcactataagacactaattgaagcagggctgcctcagaaagtcgctgagcgactggatgaaatttttcagacaggcttggtcgcatatgtcgacctggatgagcgtgctattgacgccctgagagagtttaacgaggagggagccctctctgttctgcagcaattcaaggagtccgacttgagccatgtacagaacaaatctgccttcctatgtggagtgatgaaaacctatcgacagcgcgagaagcagggttctaaggtacaggaaagcactaaaggaccagacgaagctaagatcaaggcactgctagagcggaccgggtacacccttgacgttacaaccggccagcgtaagtatggcggaccgcctcctgatagtgtttactcaggtgtgcaacctggaatcggcactgaggtcttcgtcgggaaaattcccagggacctatacgaagatgagctggtaccattgttcgagaaggctggaccgatttgggatctgcgtctgatgatggaccccctgtcaggacagaatcgcggttatgcttttataacattttgtggaaaggaggcagcccaggaggccgtgaaattgtgcgactcgtacgaaatcaggccgggaaagcacctaggcgtgtgtataagcgtggcaaataatagactgtttgtgggttctatcccaaaaaacaaaactaaagaaaatattctggaggagttctccaaagtgaccggactcaccgagggtttagtcgacgtgatcttgtaccaccagccggacgacaagaagaagaatagggggttttgtttcctggagtacgaagaccacaagagtgccgcacaggccagaagaagacttatgtctggaaaagtgaaagtgtggggcaacgtggtgacagtggagtgggcagaccccgtggaggagccagatcccgaggtgatggccaaagtcaaagtgttatttgtgcgtaatttggccaccactgtcacggaagagattctcgaaaagtcattctctgagttcgggaaactggaaagagtgaagaaattaaaagactacgcatttgtgcactttgaggaccgcggtgccgcagtgaaggccatggatgaaatgaacggtaaggagatcgagggcgaggagatagagatcgtgttggcaaagccaccggataagaaacgcaaagaacgtcaagccgctcgacaagcctcccgctcgactgcctacgaggactattattatcaccctcccccaagaatgcctccacctatccgcggtagaggcaggggcggaggcaggggaggatatggttatccccctgattactacggctatgaggactactatgatgactactatggttacgactaccacgattacaggggcggttacgaagatccatactacggctacgatgatgggtatgccgtgcgaggtcgtggtgggggtcggggagggagaggagcaccaccacccccaagagggaggggtgccccacctccgagaggacgagctgggtactcacagcgtggagctccattagggccaccgagaggttctaggggtggacgagggggtcccgctcagcagcaaagaggcagagggtcacgcggatcccggggtaatcggggaggaaacgtcgggggtaaaagaaaggctgacggctacaaccagccggactcgaagaggaggcaaacaaacaaccagcaaaattggggctctcaacctatagcccagcaacccctgcagcagggaggggactattccggaaactatggttacaataatgataaccaggagttctatcaggatacctatggacaacaatggaagtag

SEQ ID NO: 225997 - DNA, 1422 bp, synthetic construct
  misc_feature 1..1422: note = Description of Artificial Sequence: Synthetic coding sequence
  source 1..1422: mol_type = other DNA
atgaagacataccgccagagagaaaagcagggctccaaagtacaggaaagtaccaagggcccagatgaggccaagatcaaggctctcctggaacgcacgggatacactttggatgtgactacaggacagagaaagtacggtggcccacctcctgacagcgtgtattcaggagttcagcctggtataggcaccgagtgcgatagttatgagatacggccaggcaagcatcttggcgtgtgtatttcagtagccaacaaccgcctgtttgtcggcagtatcccaaagaacaagacgaaagagaacattctcgaagagttttccaaagtcacagaaggactggtggacgtgatactatatcatcagccggacgacaagaagaaaaaccgcggattttgttttctggaatacgaggaccacaaatccgccgctcaggctagaaggagacttatgtccggcaaagtgaaagtgtggggcaatgtggtgactgtggagtgggcagatccagtcgaagaacccgacccagaggtgatggctaaggttaaggtattgtttgtccgtaacctcgcgactacggtgaccgaggagattctcgagaaatccttcagtgagtttggtaagctcgaacgggtcaagaagctcaaagattacgcttttgtgcacttcgaagatcgaggagcagccgtgaaagcgatggacgaaatgaatggaaaggaaattgagggcgaggagattgagatagtgctagcaaagcctcccgataaaaagagaaaggagagacaagcagccaggcaggcctctagaagtactgcttacgaagactattactatcaccctccccctaggatgcctccacctattcgcggacgaggaagaggaggtggtaggggcggatacggatatccaccagactactacggctatgaagactactacgacgactactatggctacgattaccacgattaccgaggcggttacgaagacccatattatgggtacgatgatggatacgcagtaaggggaagaggcggtggtagaggtggcaggggggcacccccacctccacgcggtcgcggagcccctcccccacgagggagagctggctacagccaaaggggtgctccgcttgggcctcctcgcggaagcaggggcggtcgcggagggccagcccagcagcagaggggacgaggctcaaggggttctagagggaacagaggtggaaatgtgggaggtaagcgtaaagcagatggctacaatcagcccgactcaaagagacgccaaacaaataaccaacagaactgggggtcacaacctattgcccagcagcccctgcagcaagggggagattactccggaaattacggttacaacaatgacaatcaagagttttaccaggacacctatggccagcagtggaaatag

SEQ ID NO: 225998 - DNA, 1788 bp, synthetic construct
  misc_feature 1..1788: note = Description of Artificial Sequence: Synthetic coding sequence
  source 1..1788: mol_type = other DNA
atggccaatcaggtgaacgggaacgccgtgcagctgaaagaggaggaggagcctatggatacctcaagtgtgacccacacagaacattacaagactctcattgaagcgggattaccccaaaaagtggccgaaaggctggatgagatattccaaactggtttagtcgcgtatgtggaccttgatgagcgtgcaatagatgccctccgcgagtttaatgaggaaggcgctctcagcgtgcttcaacagtttaaggagagcgacctgtcccacgtgcagaacaaatcagcatttctgtgcggtgtcatgaaaacctatcgccagcgcgagaaacaaggctcgaaagtgcaagagtcaactaaggggcctgatgaagcgaagataaaagtttttgtgggaaaaattcccagggatctgtacgaggatgagctggtccctctgtttgagaaagcagggccaatttgggacctcagacttatgatggatccgctcagtggccagaatagaggatacgcttttatcaccttctgtggaaaagaggccgcacaggaagccgtgaagctgtgcgatagttatgaaatccgcccaggcaagcacctgggggtatgtatttcagtggccaacaataggctttttgtaggctcaattcccaagaacaaaacaaaagagaatattctggaggaattttccaaagtcactgaaggtctggtggatgtaatcctgtaccaccagccggatgacaagaagaagaatagggggttctgttttcttgaatacgaggatcacaagagcgccgctcaggctcgaaggcggctcatgtccggtaaagtcaaggtgtggggaaacgtagttacagtggagtgggccgaccccgttgaggaaccagaccctgaggtcatggctaaagtcaaggtgcttttcgtgagaaatctagcaacaacagtgactgaggagattctggagaaatctttcagcgaatttggaaaactagaacgggtcaaaaagcttaaagattacgcattcgttcatttcgaggaccgaggcgctgcagtcaaggctatggacgaaatgaatgggaaagagattgagggggaagagattgagatcgtcttagctaagccccctgacaaaaagagaaaagagcgacaggcagcaagacaggcttcccgctctactgcctatgaggattattactaccatcctcccccaaggatgccccctccaatccgtggtcgcggaaggggcggaggaaggggcggttacgggtaccctcccgactattatgggtacgaagattactacgacgattattatgggtacgactaccacgactaccgcggaggctacgaagatccttattacggatatgacgatggatacgcagtgaggggcagaggaggcggtcgcggagggagaggcgcaccccctccgcctcgagggcgtggagccccaccccctcggggtagagccggttactctcagaggggggctcctttagggcctccaaggggcagcaggggcggtagaggagggcctgcccagcagcaaagaggtcgtgggagtagagggagtcgcggaaaccggggtgggaacgtgggtggcaaaagaaaggctgatggatacaaccaacccgatagtaagcgaagacaaaccaataaccagcaaaactgggggtcgcaacccatcgcacagcagcccctgcagcaggggggagattatagcggcaattacggctacaacaatgacaatcaggagttttatcaggacacatatggtcaacaatggaaatag

SEQ ID NO: 225999 - DNA, 2304 bp, synthetic construct
  misc_feature 1..2304: note = Description of Artificial Sequence: Synthetic coding sequence
  source 1..2304: mol_type = other DNA
atgcgctcgtgggcgttcagctacttggatgcaatggacaacataacacgtcagaaccaattctatgacacccaggtgattaagcaggagaacgaaagcggctatgagcgaagacccctcgagatggaacagcagcaggcatacaggccggagatgaaaactgagatgaagcaaggtgctccaacctcatttctcccccctgaagcgtcccaactcaagccagatcgacagcaatttcagtcccgcaaacggccttacgaggaaaaccgcggacgtggctattttgaacaccgagaagatcggaggggccgttccccacagcccccagcagaggaagatgaggacgatttcgacgatactctggttgctattgacacgtataactgtgatctacactttaaggtggctcgcgaccggtcttcaggctatccactgaccatagaaggctttgcttacctgtggagtggtgctcgcgctagttatggagttcgtaggggcagagtgtgcttcgagatgaaaattaacgaggagatctctgtgaagcacctgccctctactgagcctgatccgcacgtagtgcgaatagggtggtctctggattcttgctcgacacagctgggagaagagccattctcatatggttacggcggtacaggtaagaagtcaacaaatagccgctttgagaactatggtgacaagtttgccgagaatgacgtgattgggtgttttgctgatttcgagtgtggtaacgacgtcgaactgagcttcacaaagaacggaaagtggatggggatcgctttcaggattcaaaaggaagctctgggcggtcaggctttgtacccccatgttctggtgaagaactgtgccgtcgagtttaacttcggccagagggcagagccctactgcagtgtacttcccggatttacgtttattcaacacttgccactctccgaacgtatccggggaacagtcggtccaaagtctaaggccgagtgtgaaatattgatgatggtaggccttcccgcagccggaaaaactacctgggctatcaagcacgccgcaagcaatccttcgaagaagtacaacattttaggcaccaatgcaatcatggataagatgcgtgtgatgggactacgtaggcagcgcaactacgctggacgctgggacgtcttgatccagcaggccacccagtgtctgaatcggctaattcagatagccgctaggaaaaagagaaactatatactggaccaaacaaacgtgtacgggtccgcacagcgcaggaagatgcggccttttgagggcttccagcgcaaggccatcgtgatttgcccaaccgatgaggacctgaaggaccggaccatcaaacgaactgatgaagagggcaaggatgtgcctgaccacgcagtcctggaaatgaaggcaaatttcacactgcccgacgtgggcgattttctggatgaagtgttgtttatcgaattgcagagagaggaggccgacaagctggtgcggcagtacaatgaagagggcaggaaggccggtcccccacctgagaagagattcgacaatcggggtggtggaggatttagaggcagggggggtggcggagggttccagaggtacgagaaccggggaccacctggaggcaaccggggtggctttcagaatcgtggaggtggctcaggcggtgggggtaattacagggggggatttaatcgatctggcggaggcggttattcacaaaacaggtggggaaacaacaatcgcgataacaataactccaataaccgaggctcttataaccgcgcaccccagcaacagccaccaccacagcagcccccacctccccagcctccacctcagcagcccccacctccgccatcctattcacccgcacggaatcccccaggggcttccacttataacaaaaatagtaacattcctggtagcagcgccaatactagtacccccacagtgagttcatactctccccctcagccctcctacagccagcccccatacaaccagggcggttattctcaaggatacactgcacctccccctccgccacctcccccacctgcatacaattacgggtcatacggcggatacaatccggctccgtataccccacccccacctcccacggcccagacgtaccctcagcccagctacaaccagtatcagcagtatgcccagcagtggaaccagtattatcagaatcagggccagtggcccccttactacgggaattatgactacgggtcttacagcgggaacacacaggggggtacctctacccaatag

SEQ ID NO: 226000 - DNA, 369 bp, synthetic construct
  misc_feature 1..369: note = Description of Artificial Sequence: Synthetic coding sequence
  source 1..369: mol_type = other DNA
atggacgttcggaggttgaaggtgaatgagctacgcgaagaattacagcggagggggctggacacaagggggctgaaggccgagctcgccgagagactgcaggcagctttggaagccgaagaaccagatgatgagcgggaactagatgccgatgacgagccgggtagaccgggacacatcaacgaagaggcagagttacagcccgcaaccttgcaaccaggccgtctgcaacccggtctacacagccccacagccagcacaagcaccactacttgcctgcagctgtgggaattgaggcggctccaacccggtcctctatatcctacagctacgccgcactgcacagacttgccctctgcacaactgtag

SEQ ID NO: 226001 - DNA, 2271 bp, synthetic construct
  misc_feature 1..2271: note = Description of Artificial Sequence: Synthetic coding sequence
  source 1..2271: mol_type = other DNA
atggacaacataaccaggcagaatcaattttatgatactcaagttatcaagcaagaaaacgaaagcgggtacgagcgacgaccacttgagatggaacaacaacaggcctataggccagagatgaaaaccgaaatgaaacagggggcacccacaagctttctaccgcctgaggcttctcaactgaaacctgaccgtcaacagttccagagcaggaaacggccttatgaagagaatagagggcgagggtattttgagcatcgcgaagaccggagaggacgatcaccccaaccgccagctgaggaagatgaggatgacttcgacgatacactggtagccatcgatacctacaattgcgacctccacttcaaggttgctcgcgataggtcaagcgggtatccactcaccattgagggtttcgcctatctctggtcaggtgcacgggcttcctacggagttaggagagggagagtgtgcttcgagatgaaaattaatgaagaaatttccgtcaagcatctcccaagtaccgagccagacccccacgtggtgaggattggctggtccttggattcctgtagtacccagctcggagaagagccgttctcatacggctacggaggaacaggcaaaaagtcgaccaactctcgctttgagaactacggggacaagttcgccgagaacgacgtaattggctgctttgcagattttgagtgcgggaacgacgtggaattgagttttacaaagaacggaaagtggatgggaattgcctttcgtattcagaaggaggccttggggggtcaggcgctgtacccccacgtcttagtaaagaattgcgccgtcgaatttaacttcggccagcgggctgagccctactgttccgtgctgcctgggttcacttttatccagcacctcccattatcagaaaggatccggggtacggtgggcccaaagtccaaggccgagtgcgagattctgatgatggttggcctgcctgcagcgggaaagactacgtgggctattaagcatgccgcatcaaatcccagtaagaagtacaatatcctgggcaccaacgctatcatggataagatgcgggtcatggggctgcgacgccaacggaactatgcgggaaggtgggacgtgctaatacagcaggccacccaatgcctgaacaggctgattcagatagcggcaagaaagaaaagaaactatatcctggatcaaacgaatgtgtatggctcggctcaaaggaggaaaatgcgcccatttgagggctttcaaaggaaggcaattgtgatttgtccgacggacgaggatctgaaagataggaccattaagagaactgacgaagaggggaaagatgtgccagatcatgccgtcctcgagatgaaagcgaattttactctgcccgacgtaggtgactttcttgatgaggtgctgttcattgaactgcagagagaggaggccgacaagctggtccggcagtataatgaggagggacgcaaggctggccctccgcctgagaaacgatttgacaaccgtggagggggagggttcaggggacgcggtggagggggaggattccagcgctacgaaaatcgtggacccccaggtggaaacaggggaggctttcagaataggggcggagggtctgggggtggcggaaactaccggggaggcttcaatcgcagcgggggaggcggatacagccaaaataggtggggtaacaataacagggacaacaataacagtaataaccgaggttcctataaccgagcacctcaacaacagccacccccacagcaacctccccctccacaacccccaccacagcaaccacctccacctccaagttactcccccgctcgcaaccctccaggagcatccacttacaataagaattcgaacatcccgggatcctccgcaaacacatcaaccccaaccgtgagttcctattcgccaccacagccttcatactcgcaaccaccatataatcagggaggctactcccaggggtatacagcacctccaccccctccccctccacctccggcatacaattacggtagctacggaggctacaatcctgccccttatacaccgccaccgccacctacagctcagacttatccccagccatcctacaaccaatatcaacagtacgcacagcaatggaaccagtattaccagaaccagggacagtggccaccctactacgggaactatgattatggtagttatagcggaaacacacagggaggaacctccacacaatag

SEQ ID NO: 226002 - DNA, 2259 bp, synthetic construct
  misc_feature 1..2259: note = Description of Artificial Sequence: Synthetic coding sequence
  source 1..2259: mol_type = other DNA
atggacgtgagacggctgaaggtaaatgagctccgagaggaactgcagaggagaggactggacacccgaggcctcaaagctgagctggcagagcgactgcaaccacccccaccagggcttcagccacacgccgagccaggcggttactccggcccagatggccattacgccatggataacatcactcgccagaaccaattttacgacacacaggtgatcaaacaggagaatgagtccgggtatgaacgtaggcctctcgagatggagcaacaacaggcctataggcctgagatgaaaactgagatgaaacagggcgctcccactagcttcctacctccggaagcaagtcagctgaagccagacagacagcagtttcagtctaggaagaggccctacgaagagaatcggggtcgcggatactttgagcatcgcgaagatagacggggtagatctccacaaccccctgccgaagaagatgaagatgatttcgacgatacattggtggccatcgacacctataactgcgacctgcactttaaggtcgcgagggaccggtcctctggataccccctgactattgagggtttcgcctatctgtggtctggtgccagggcttcctatggggtgagacggggacgagtgtgttttgagatgaaagattttgaatgtggtaacgatgtggagctgagctttacaaagaatggtaagtggatgggcattgcattcagaattcagaaagaagcgctgggagggcaggcactgtaccctcatgtacttgtcaagaactgcgcagtggaatttaactttggtcagcgcgcagagccctactgtagcgtcctgccaggctttactttcattcagcatctcccattgagcgaaaggatacgtggtactgttggccctaagagcaaggccgaatgcgagatccttatgatggtaggtcttcccgcagctggaaagacaacgtgggccataaagcatgctgcatcgaatccaagcaaaaagtacaacatactgggaacaaatgccattatggacaagatgagagttatgggactgcgcaggcagcgtaattatgcgggtcgttgggacgtcctgatccaacaagccacccaatgcctcaacagattgatacagatcgcagcgagaaaaaaacggaactacattctcgatcagacaaatgtctacggcagtgcccagcgaagaaagatgagaccatttgaagggttccaacggaaggctattgtgatatgccccactgatgaggatctcaaggatcgcaccatcaagcgcaccgatgaagaagggaaagatgtacctgatcatgccgttctagaaatgaaggccaactttacactgcccgatgtgggggatttcctcgacgaagttttgttcatagaactgcaaagagaagaagctgacaaattggtccgccaatataacgaagaagggaggaaagcgggacccccacccgaaaaaagattcgacaatcggggagggggagggttcaggggaagggggggaggcggtggctttcaaaggtacgagaacagagggcctcccggaggaaacagagggggatttcaaaacagaggtggaggctcaggcggaggaggcaactaccgcggaggctttaatagaagcggagggggaggatatagccaaaatcgatggggtaataataacagagataataacaatagcaacaatcgtggctcatacaatcgggcaccacagcagcagccaccaccccagcagcccccacctccacagcctccccctcagcagcccccaccacctccatcttacagtccggctagaaatcctcccggtgcctccacatacaataagaactctaacatcccaggaagcagtgccaatacatctactcctactgtgtcgagttatagtccaccccagtcgttcggtttcttccccagcacctttcagccttcttattcgcagcccccatacaaccaaggaggttatagtcagggctatactgcccctccgcctccgcctccacctccccctgcctataattacggatcatacggcggatataatccagctccttatacccctccgcctccaccgacagcacagacctacccacaaccctcatacaaccagtaccagcagtacgcccaacaatggaaccaatactaccagaatcagggacaatggcctccatattatggaaactatgattatggcagctactcgggaaacacccagggcggaacatctacccagtag

SEQ ID NO: 226003 - DNA, 2571 bp, synthetic construct
  misc_feature 1..2571: note = Description of Artificial Sequence: Synthetic coding sequence
  source 1..2571: mol_type = other DNA
atggatgtgcggaggctcaaggtgaatgaactcagggaagagctgcagagacgagggctggacactcggggtctcaaggctgaactggctgaacgactgcaggccgcactcgaagctgaggagcccgacgacgaacgggagttggacgcggacgacgaacccggtagaccaggccacattaacgaggaagttgagaccgagggaggctcggaactggagggcactgcccagccaccgcctccaggactgcagcctcatgcggaacccggtggctattctggaccagacggccactacgccatggataatatcaccaggcagaatcaattctatgatacacaggtgatcaagcaggagaatgagagtggctatgagcgacgcccactcgaaatggaacagcagcaggcatataggccagagatgaagaccgaaatgaaacagggcgcaccaacatccttcctcccacccgaggcctcacaactgaagcctgaccggcagcagttccagagtcggaaacgtccttacgaggagaaccgaggacggggatatttcgagcaccgggaggaccgcaggggccgttcgcctcagcccccagctgaggaggacgaggacgacttcgacgatacgctcgttgcaattgatacctataattgcgacttgcacttcaaggtcgccagagaccgttcctccgggtatcctttaacaattgaggggttcgcgtatctgtggagcggagctcgcgcaagttacggagtgcgtcggggaagagtctgttttgaaatgaagatcaatgaggaaattagcgtaaaacacttgccttcaaccgagcctgacccgcatgtggtgaggatcggctggtcgcttgatagttgttccacacagctaggcgaggagccctttagttatgggtatggtggcactggcaaaaagtctacaaattctcggtttgagaattacggcgacaaattcgccgagaacgatgtcatcggatgtttcgcagatttcgagtgtggaaacgacgtagagctgagttttacgaagaacgggaagtggatgggcatcgccttccggattcagaaggaagctctggggggtcaggccttatatccccatgtcctcgtcaaaaactgtgccgtggagtttaactttggtcagagagccgaaccgtactgctccgtgctgcctggatttacttttatccagcaccttcccctttccgagaggattcggggaacagtcgggccaaaaagcaaggctgagtgtgaaatcctcatgatggtgggactcccagccgcagggaaaactacttgggccattaagcatgcagccagcaacccaagcaaaaagtacaacatcctgggaaccaatgctatcatggacaagatgagggttatgggcttaaggcggcagcgcaactacgcaggcaggtgggacgttttgatccaacaagcaacccagtgtctgaaccgactcatccagatcgctgcccgtaaaaaacgcaactatatcttggatcagaccaatgtctatggaagtgcacagaggcggaaaatgcgcccttttgaggggtttcaacgaaaggccattgtcatatgcccgacagacgaagatttgaaagatagaacaataaagcgtacagacgaggagggaaaggatgtacccgaccacgccgtcctggagatgaaggctaacttcacacttcccgatgtgggagacttcttggacgaggtccttttcatcgaattacagcgggaagaagctgacaaactggtgcgccaatataacgaagaggggagaaaggcaggccctcctcctgagaagcgcttcgataataggggaggtgggggttttcgcggacgcggaggtggtggcggatttcagcggtacgaaaacaggggtccccctggcggtaacaggggtggctttcagaatcgtggcggtggttctggcggagggggaaattacagagggggatttaaccggtccggaggaggagggtacagccagaaccgctgggggaacaacaatagggacaacaacaactcaaacaacaggggatcctacaatcgtgcacctcagcagcaaccccctcctcagcagcctccacccccacagcctccacctcagcagccaccaccaccccctagttacagcccggctcggaaccccccaggcgcatccacttacaacaaaaattcaaacattccgggatcatccgcaaacacttccaccccaaccgtcagctcatactccccccctcagccaagctatagccagcccccttacaatcagggcggttacagccaaggctataccgctcccccaccaccacctcctcctccgccagcatacaactatggatcttatgggggatacaatcccgcaccatatacacctccgcctcctccgaccgctcagacttacccgcagccttcctacaaccaataccaacagtacgcccagcagtggaaccagtactatcagaaccaagggcagtggcccccttattatgggaactacgattacggttcctattcgggaaacacccagggcggaactagcacccaatag

SEQ ID NO: 226004 - DNA, 2751 bp, synthetic construct
  misc_feature 1..2751: note = Description of Artificial Sequence: Synthetic coding sequence
  source 1..2751: mol_type = other DNA
atggactgcgaacactccctgtctctgccttgtcgaggagccgaggcgtgggaaataggaatcgacaagtatttatacgctatgcgcctctcagacgagaccctcattgacatcatgacccgtttccgaaaggaaatgaagaatgggctaagtcgggacttcaaccccactgcaacagtgaagatgctgcctaccttcgtccgttcgatacccgatgggtccgaaaagggggattttattgcccttgatctcggcggttcctcattcaggattctgagagtgcaggtaaatcacgagaagaatcaaaatgtgcacatggagagtgaggtttacgatacgcccgagaatattgtgcacggttccgggtcccagctgtttgatcacgtggccgagtgtctcggggatttcatggagaaacgcaagattaaggataaaaagttgcctgtcggctttaccttttcctttccgtgtcagcagagcaaaatagacgaagcgatattgatcacgtggacgaaacggtttaaagcttccggagtggagggcgcagacgtggtgaagttactgaataaagctataaaaaagcggggagattatgacgccaacatagtggctgtagtgaacgacactgttggcacaatgatgacatgcggatacgatgaccagcattgcgaggttgggcttatcattggcacaggcacaaacgcctgctacatggaggagctcagacacatagacttagttgagggagatgaaggtagaatgtgcattaataccgagtggggggcatttggtgatgatgggagcttagaggacataaggactgaattcgatcgtgagatcgaccgaggctctctcaaccctggtaagcagctcttcgagaaaatggtgagcggaatgtacctgggcgaactggtgcgcctcatcctcgtgaaaatggccaaggaaggccttctctttgaagggaggatcacgcccgaattgctgacacgcggtaagttcaacacgtcagacgtgagcgccatcgaaaagaacaaggaaggtctccacaacgctaaagagattttgacccggctgggggtggagccatcagatgacgactgtgtgtctgtccagcatgtgtgtaccattgtttctttccggagtgctaatctggtcgcagcaaccctgggagccatacttaaccgcctgagagacaataaggggactccacgtcttcgcactacagtgggggtggatggatctttatacaaaacacatcctcagtatagccgtcggttccataaaacacttagaaggctggtaccagactccgatgtgcgctttctcctgtcagaatcggggtctggtaagggggctgctatggtgactgccgtcgcctacaggctcgccgaacagcacagacagattgaggagacccttgcgcacttccacctgaccaaggatatgctgcttgaggtcaaaaaacgcatgcgagctgagatggagctcggtctgagaaagcagactcacaacaatgctgtagtcaaaatgttaccctccttcgttaggcgtaccccagatgggaccgagaatggagattttctggctctcgatttgggagggacgaatttcagagtgctccttgtcaaaattaggagtggaaagaaaagaaccgtggaaatgcataacaaaatctatgcaattccaatcgagattatgcagggcaccggcgaagaactcttcgaccacattgtgtcctgcattagtgattttctggactacatgggaataaaggggccacgtatgcccttgggattcaccttcagcttcccctgtcagcagaccagtctggacgccggaatactaatcacctggacaaagggtttcaaagccacagactgcgtgggccatgacgtcgttacattgttgcgcgacgctatcaagaggcgggaagagtttgacctggatgttgttgccgtggtcaatgataccgtcggcaccatgatgacgtgcgcgtatgaggagccgacttgcgaagtaggcttgatcgtgggcacaggctctaatgcctgttatatggaggaaatgaagaatgtagaaatggtcgaaggagaccagggccaaatgtgcattaatatggaatggggggctttcggggataatggttgcctcgatgacatccgcactcactacgaccggcttgtcgacgagtacagtctgaatgcaggcaaacaacggtatgaaaagatgatttccgggatgtacctcggagaaatcgtaagaaatatcttgatagacttcacaaagaaaggctttctgtttcgaggtcaaatttcagagactctcaagactagggggatcttcgaaacaaaatttctgtcacagattgagagcgaccgcctggccctccttcaagtgcgcgctattctccagcagctgggcctcaacagcacatgcgatgactcgatcctcgtgaaaactgtctgtggagttgtcagccgcagagctgcccaactctgcggtgccggaatggccgctgtggttgacaaaatacgagagaatagaggcctcgataggctgaacgtgacggttggagtcgatggtactctctataaactgcaccctcatttcagtagaatcatgcaccagaccgtcaaagagctgtcccccaagtgtaacgtgtcctttctgctctctgaagatggatctggtaagggggcagccctgattaccgccgtgggcgttcggttgcgcacagaagcctcgtcctag

SEQ ID NO: 226005 - DNA, 2754 bp, synthetic construct
  misc_feature 1..2754: note = Description of Artificial Sequence: Synthetic coding sequence
  source 1..2754: mol_type = other DNA
atgattgccgctcaactgcttgcttactacttcacagagctgaaggatgatcaggtcaaaaagatcgataaatacctctacgccatgcgactgagtgacgagacgttaattgatattatgactcgcttcaggaaggagatgaaaaatggactcagcagagacttcaatccgacagctaccgtgaagatgctacccactttcgtgcggtccatcccagacggctcagagaagggtgacttcatcgctctggacttaggcggtagcagtttccgaatactccgcgtacaggtaaaccacgagaagaatcagaatgtgcacatggagtccgaagtgtacgatactcccgaaaacatagtgcatggttctgggagtcagctctttgatcatgtggcagaatgcctgggtgacttcatggaaaaacgtaagatcaaggacaaaaaacttccagtcggctttaccttctccttcccctgccagcagtccaagatcgatgaggctatcctaatcacatggactaagcgcttcaaagcctccggagtcgagggagcggatgtagtgaagctcctcaataaagctatcaaaaaaaggggagattatgatgctaacattgtggccgtggttaatgacaccgttggcaccatgatgacctgcggctatgacgatcagcattgtgaggtgggtctcatcattgggacaggtactaatgcatgctacatggaagagttacggcatattgaccttgttgagggagacgaaggtcgtatgtgcataaacactgagtggggagcctttggagatgatggatccctggaggatatacgcacagaatttgatagagagattgacagggggtctttaaatcccggaaagcagctgttcgaaaagatggtttccggcatgtatctaggcgaactggtgcgcttaattctggttaagatggcaaaagagggcttgttattcgaaggacgcattacccccgagttattgacgcgcggtaagtttaatacctccgacgtgtcggccatcgagaaaaataaggagggcctgcacaatgccaaagagattctcacacggctgggcgttgaacccagcgacgacgactgtgtcagcgtgcagcacgtttgtactatcgtgtcgttcaggtccgcaaatctggtcgctgctaccctgggagcaatcctcaacagactcagggataacaaaggaacacccaggcttcgcaccaccgttggagtcgacggcagtttgtacaagacacacccacagtatagtaggagatttcacaagacgctacgtcgactggtgcctgattccgacgtgcgcttcttgttaagcgaatctgggtccggcaagggggctgccatggtcacagccgttgcctacagactagcggaacagcatcggcagattgaagaaactctcgctcattttcatctcacgaaagatatgctgcttgaagtgaagaagagaatgcgcgcagagatggaactcggtctgcgtaagcagacacacaacaacgccgtcgtgaaaatgctccccagctttgttcgtcggacacctgacggcacagaaaatggagactttctcgctttagacctcgggggtaccaactttagagtgttattggtgaagattcgaagcggcaaaaaacggaccgtggagatgcacaataagatctatgcgatcccgatcgagattatgcaaggaactggggaggagctgttcgaccacatcgtatcttgcatatcagacttcctggactatatgggcatcaaggggccacgcatgccgctcggctttacattctcctttccttgccagcagacctcgctcgatgccggaatactcatcacctggacaaaaggattcaaagctaccgattgtgtcggccacgacgtggtgacactgctgcgagatgcgattaagaggcgagaagaattcgacctggatgtcgtggcagtggtcaacgacacagtaggcactatgatgacatgcgcctacgaagaaccaacttgtgaagtcggattaatagttgggactgggagcaacgcgtgctatatggaggagatgaagaacgttgagatggtggagggcgatcagggccagatgtgtatcaatatggagtggggcgcatttggggacaacggctgcctggatgatattaggacacactacgatagacttgtggacgaatatagcctgaacgcgggaaagcagcgctatgaaaaaatgatttcagggatgtatttaggagaaatcgttaggaacattctgattgacttcacaaagaaggggttcctgttcagagggcagatctccgaaactctgaagacaagggggatcttcgaaaccaagtttttatcccagatcgagtctgaccgactggctctgctacaagtgcgagccattctgcagcagctaggtctgaacagcacctgtgatgactctatcctcgtgaaaacggtctgcggcgtcgtgtctaggagggcggctcaactgtgcggagcgggaatggctgcagtcgtcgataagattcgcgagaacaggggcctcgaccggctcaacgtgaccgtgggcgttgatggcacattgtacaagctccatcctcatttttcgcgcatcatgcatcaaaccgtcaaagaacttagtccgaaatgcaatgtgtccttcttgctctctgaggacggctcaggtaaaggggctgctcttataacagccgtcggagtccgccttaggactgaagcttcatcctag

SEQ ID NO: 226006 - DNA, 2718 bp, synthetic construct
  misc_feature 1..2718: note = Description of Artificial Sequence: Synthetic coding sequence
  source 1..2718: mol_type = other DNA
atggcaaagcgcgcacttcacgacttcatcgacaaatatctctatgccatgaggctgtccgacgagacactcattgatatcatgacacgcttcagaaaggagatgaagaacggcctcagccgtgacttcaacccaacagctaccgtgaagatgctgcccacatttgtccgtagtatacctgacgggtctgagaaaggcgatttcatagcccttgatctgggcggttcatcattcaggattctgcgcgttcaagtcaatcatgaaaagaaccagaacgtgcacatggagtcagaggtgtacgatactcccgagaacatcgtgcacgggtcgggatcacagctcttcgaccatgtggcggagtgtcttggggactttatggaaaaaaggaaaataaaagacaaaaagctgcccgtaggcttcacctttagcttcccttgtcagcagtcaaaaattgacgaggcaatcctcatcacttggactaaacgctttaaggcttcaggtgttgaaggagcagacgttgtcaagctgttgaacaaggcaatcaaaaagcggggagattacgatgccaacattgtagctgtggtaaacgacactgtgggcaccatgatgacttgcggctacgacgatcagcactgtgaagtcggcctcatcattggaactgggaccaatgcctgctatatggaggagctcagacacatcgaccttgtggaaggagatgagggaagaatgtgcataaacactgagtggggcgctttcggggacgatggcagcttggaagacatccgaactgaatttgatagggaaattgaccgcggatctctgaatcccggaaaacagctatttgagaaaatggtatctgggatgtacctgggggagctggtgaggttgatcctggtgaaaatggcgaaagagggtctgctgtttgaggggagaataacgccagagctgctgactagaggtaaattcaatacatctgatgtatctgccatcgaaaaaaacaaggaaggcctgcacaacgctaaagagatcctcactaggctcggggtcgaaccctcggatgatgactgcgtcagtgtgcagcacgtttgtacgattgtgtcctttagaagcgcgaacctggtcgccgcaaccctgggtgccatcctaaacagactgagggacaacaaagggacgccgaggctccgcactaccgtcggagtggacggtagcctctacaagacccacccccagtattccagacgtttccataagacccttagacggctggtccccgattccgatgtgaggtttcttctgagtgagagcggtagcggtaaaggagcggctatggtgacagctgtcgcttaccgactggccgagcagcacagacagatagaggaaacactcgcgcactttcacctgacgaaagacatgctcctggaggtgaaaaagagaatgagggcagagatggaactcggtctgaggaagcagactcataacaacgccgtggtgaagatgctgccaagttttgtaaggcgcaccccagacggcacagagaatggcgacttcctcgctctcgatctcggaggaaccaattttcgagtcctgcttgtgaaaattcgtagcggaaaaaagagaacggtggagatgcacaacaagatttacgcgattcctatcgagataatgcagggaaccggcgaggagctctttgaccacatcgtctcctgcattagcgactttctagactacatggggattaagggccctcgcatgcccttaggatttacctttagctttccttgtcaacagacttcactggacgccggtatactcatcacctggacaaagggattcaaagccaccgattgtgtgggccacgatgtcgttactctgctgcgcgatgcgatcaaacgacgagaagaattcgatctcgacgtagtcgcggtggtgaacgatactgttggcaccatgatgacctgtgcctacgaagaaccaacttgtgaagtcggcttgatagtcggcaccggctccaatgcttgttacatggaagaaatgaaaaatgtggagatggtagagggtgatcagggacagatgtgcatcaatatggagtggggggcatttggtgataatgggtgcctcgatgacattcggactcattacgatcgactggtcgatgagtacagcctgaatgctggtaaacagagatatgagaaaatgatcagtggcatgtatctcggcgaaatagtgcgcaatattctgatagacttcacaaagaagggctttttatttcggggtcaaatcagcgaaacactgaaaacccggggtatctttgaaacgaaatttttgtcacaaatcgagtccgatagactcgcccttcttcaggtgcgagcaatcctgcagcagctgggtctgaattcaacgtgcgacgactccatcctggtgaagactgtatgtggagtggtgagtcggagggccgctcagctgtgtggtgcaggtatggccgcagtggttgacaaaattcgcgagaataggggtctcgatcgattaaatgtcaccgtgggggtggacgggactctctacaagctgcatcctcatttctctaggataatgcatcagacagtgaaggaactgtcacctaaatgcaatgtctcattcttgctatccgaagacggatcgggcaaaggagcagctcttataacagcggtgggagtaagattaaggactgaagcaagttcctag

SEQ ID NO: 226007 - DNA, 2766 bp, synthetic construct
  misc_feature 1..2766: note = Description of Artificial Sequence: Synthetic coding sequence
  source 1..2766: mol_type = other DNA
atgggccaaatctgtcagagagagagtgctacggccgcagaaaagcctaagctccaccttttggctgagagcgagatcgacaaatatctgtacgctatgagactgtccgacgagaccctgatcgacatcatgacccggttcaggaaggagatgaaaaatggtctcagccgagactttaatccaacggctacagttaagatgttaccaacttttgtgcgctcaatccccgacggaagcgagaagggggatttcatcgccctcgatctgggcggttcctcttttcggatcttgcgggttcaagtcaatcacgaaaaaaatcaaaacgtgcatatggagtctgaagtatatgacaccccagagaatatcgtacacggcagcggctctcagcttttcgatcacgtggcggagtgtctcggcgattttatggaaaaacgcaagattaaggataagaagctccctgttgggttcacatttagttttccatgtcagcaatcgaagatcgatgaagccatcctcataacatggactaaaaggtttaaggcatcaggcgtcgaaggtgccgatgtggtgaaactactgaacaaggcgatcaaaaaacgcggtgactatgacgcaaatatcgtcgctgtggtaaatgacacggtggggaccatgatgacctgtggatatgacgaccagcactgcgaggtcggccttattataggaacagggaccaacgcatgctatatggaagagctcaggcatatcgatctagtggagggagacgagggcagaatgtgtattaataccgagtggggagcttttggggacgacgggtccttagaagacattagaacggaatttgatcgcgagatcgaccgtggatccctaaatcctggtaagcagctctttgaaaaaatggtgtctggaatgtatctgggtgagctggttaggctgatactcgtcaagatggccaaggaaggcctgctgttcgagggcagaatcacccccgagctgctgactagggggaagtttaacacgtcggacgtgagcgcaattgagaaaaacaaggagggtctacacaatgcgaaggaaatcctcacccgcctgggagtggaacccagcgacgacgattgtgtgtccgtgcagcatgtctgtacaattgtgtccttcagaagcgctaacctggtggctgcgacactgggggctatccttaatcgccttagagacaacaaaggtacaccacgtttacgtacaacagtgggcgtagatggcagtctgtacaagactcatcctcagtactcaagaagattccacaagactctgcgaagactggtgcccgattcagacgtgcgtttcctgctgagtgaaagcggcagcggtaagggggcagccatggtcacagctgtcgcttaccggctggcagagcagcaccgccagattgaggagaccctggcacactttcacttgaccaaagatatgcttctcgaagtaaagaagcgcatgagggccgaaatggagctcggtcttcggaagcagacccacaataatgccgttgtcaagatgctgccttcttttgttcggagaacacccgatggtacagagaatggagactttctggcactggatctaggcggtaccaatttccgagtgcttctcgtgaagattcgcagcggcaaaaagagaaccgtggagatgcacaataaaatttatgctattccaatcgagattatgcagggaacaggcgaagagctctttgatcatatcgtaagctgtatatctgacttcttagattatatgggtattaagggcccaaggatgcctctggggttcacattctccttcccgtgccagcagactagtctggatgctggcattctcatcacttggactaagggcttcaaagcaacagattgcgtgggccatgacgtggtcactcttctgcgcgacgctatcaagagacgggaggagtttgatctcgatgttgtcgcggtggtcaatgatacagtgggtacaatgatgacgtgcgcgtacgaggagccaacttgcgaagtaggcctgattgtaggtacaggcagcaacgcctgctatatggaagagatgaaaaacgtggaaatggtggaaggcgaccaagggcagatgtgcatcaacatggaatggggcgctttcggggataacgggtgcttggacgatattagaactcactatgatcgcctcgtggatgagtatagcttaaacgccggaaagcaacgttacgagaagatgatatccggcatgtatctgggggagatagttcgcaatattctcatagacttcactaaaaaggggttcctgtttagaggtcaaatatctgaaaccctgaagaccaggggaatcttcgaaaccaaattcctgtcgcagatcgaatcggatcggctggctctgctgcaggtgcgggcaattttgcaacagctcgggctgaattccacctgcgacgattctatcctagttaaaacagtttgcggagtggtgtcaaggcgtgcagcccagctgtgtggggcaggcatggctgcagtggtggataaaattcgggaaaatcggggactagatagactcaatgtgactgtaggagtggacggaactctgtacaagctccacccccatttcagtcggatcatgcatcaaaccgtcaaggagctgtcccctaagtgcaatgtgagcttcctgttgagtgaagacggcagtggcaagggcgctgcacttataaccgccgtcggggtccggctaaggactgaggctagctcctag

SEQ ID NO: 226008 - DNA, 2748 bp, synthetic construct
  misc_feature 1..2748: note = Description of Artificial Sequence: Synthetic coding sequence
  source 1..2748: mol_type = other DNA
atgatcgcggctcagctcttggcatactatttcaccgaactgaaggatgatcaggtcaagaaaattgataagtacctgtacgccatgcgcctctcagacgagacgctgatcgatattatgacccgctttcggaaagagatgaaaaacggactttcccgcgacttcaatccaacagccacagttaagatgctgcctacttttgtacgcagcatccccgatggctccgagaaaggagacttcattgctttggatctgggtggaagtagttttcgcatactgcgtgtccaagtgaaccacgaaaagaaccaaaacgtccacatggaaagcgaagtgtacgacacaccagagaacatagtgcacggtagtgggagtcagctcttcgatcacgttgccgagtgtttgggcgacttcatggagaagcggaaaatcaaagacaagaagctgcccgtcgggttcaccttttcattcccatgccagcagtccaaaatcgacgaagctattttgattacgtggaccaagagatttaaagcatccggagtggagggcgctgatgtggtgaaactcctgaataaagcaataaagaagagaggagattatgacgctaacatcgtcgcagtagtgaatgatactgttggtaccatgatgacctgcggctacgatgatcagcattgtgaggtcggactgatcattggaacaggcacaaatgcttgttatatggaggagctccggcacattgatctggtggagggggatgagggtaggatgtgcatcaatacagaatggggcgcatttggtgatgacggatcacttgaggatattagaactgagtttgacagggagatcgaccgaggatctctgaaccctggcaaacagctgtttgagaagatggtcagcggaatgtatttaggcgaactcgtgcgcctgatcctggttaagatggccaaggaaggcctcctgtttgaaggacgtatcaccccggagctcctgacccgtggcaagttcaacacaagtgacgtgtctgccatcgagaagaataaagagggacttcacaatgctaaagagatactgacccggctcggggtagaaccttcggatgacgactgtgtctcagtgcaacacgtgtgtaccatcgtgtctttccggtctgcaaaccttgtggcagccaccctgggagctatactgaatcggctgcgcgacaataagggcacgccaaggcttcgaactacagtcggcgtggacggtagcctatataagactcatccacagtattcacggagattccataaaactctgagacggcttgttccagatagcgatgtccgcttcctcctcagcgagagcggatccgggaagggagcagccatggtgactgccgtcgcgtatagactggcggagcagcatagacagatcgaggaaactctagcccacttccacctgaccaaggacatgctgcttgaggtgaaaaagagaatgcgtgccgagatggagctcggattgcgaaagcagacgcacaacaacgctgtagtcaagatgcttccctcattcgtccgcagaactcccgatggcaccgagaatggggatttcctcgccctcgaccttggaggcacaaactttagagtgttgctcgtcaagatacgttccggaaagaagaggacagtcgagatgcacaataagatctacgctattcctattgagataatgcaaggaactggggaagaactattcgaccacatcgtgtcgtgtatctccgactttttggactatatgggcataaaggggcctaggatgccccttggctttacattttctttcccatgccagcaaacctccctggacgccggtattctaataacatggacaaaggggttcaaagccaccgactgcgtgggacacgatgttgtgacacttctgcgtgacgcaataaagagacgggaagaatttgatctggatgtagttgctgtcgtcaacgatactgtcggcaccatgatgacatgcgcttacgaagaacccacttgcgaagtaggcttaatcgttggcacgggaagcaacgcctgctacatggaggagatgaagaacgtggagatggtcgagggcgaccagggccagatgtgcatcaacatggagtggggagcctttggcgataacggttgtcttgatgatatccgcacacattatgaccgactggttgatgagtattcccttaatgccggtaagcaaagatacgaaaaaatgatatctggcatgtatctgggcgagatcgtgcgaaacatcttaatcgactttaccaagaagggattcttgtttagaggacagatctcagaaaccctgaagacaaggggcattttcgaaacaaaatttttaagccagatcgagagcgacaggctggccctgctgcaggtccgggctatcctgcagcagctcgggctcaattctacatgtgatgacagcatattagtaaaaactgtgtgcggcgtagtgtcccggagggctgctcaactatgtggcgcagggatggccgcagttgttgataagataagggaaaacaggggcctggaccggcttaacgtaacagttggtgtggacggcacgctctataagctgcatcctcatttttcacgcattatgcatcagaccgtgaaggaactctcgccaaagtgtaatgtttcttttttgctgtcagaagatggttccggaaaaggagctgccctcatcactgcggtgggcgttagacttagaacagaggcatag

SEQ ID NO: 226009 - DNA, 345 bp, synthetic construct
  misc_feature 1..345: note = Description of Artificial Sequence: Synthetic coding sequence
  source 1..345: mol_type = other DNA
atggctaagagagctctccacgattttatcgacaagtacctgtacgctatgcgtctgtctgacgaaacgctcatcgacatcatgacgcgcttccgaaaggaaatgaaaaacggccttagcagggacttcaatccaaccgcaaccgtgaaaatgctcccgacatttgtgagatcaatccccgacggctcagagaaaggtgacttcatcgccctggatttaggtggaagcagctttagaatcctccgcgttcaggttaatcatgagaagaaccagaacgtgcacatggagtccgaagtctatgatacacccgagaatattgttcatgggtctggatcccagctttag

SEQ ID NO: 226010 - DNA, 876 bp, synthetic construct
  misc_feature 1..876: note = Description of Artificial Sequence: Synthetic coding sequence
  source 1..876: mol_type = other DNA
atggactgtgagcactctctgagcttgccctgtagaggagcagaagcatgggaaatcgggatagataaatacctttacgctatgcggctcagtgatgagacactcatagatattatgacacggtttaggaaagaaatgaagaacggactttctcgcgacttcaacccaaccgctacagtgaagatgctgcccactttcgtgcgcagtatccctgatggatcggagaagggcgactttatagccctggatctgggtgggtcatcttttagaattttgcgggtgcaggttaatcatgaaaaaaaccagaacgtccacatggagtcagaggtgtatgataccccagaaaatatcgtccatgggagtggtagccaactgttcgaccacgtggcagagtgtctgggggacttcatggagaaaaggaaaatcaaggacaagaagctgccagtcggcttcacattcagctttccatgtcagcagagcaagatcgacgaggctatcctaatcacctggaccaaacgtttcaaggcatcaggtgtcgaaggcgctgatgtggtgaagctcctaaataaagcaattaagaagcgtggggattatgacgccaacattgtggccgtggtgaatgacacggtgggcactatgatgacatgcggatacgacgaccagcactgcgaagtgggtctcattatcggaaccggcactaacgcatgctacatggaagaactccgccatattgatctcgtggagggggatgagggacgtatgtgcattaacacagaatggggagcctttggtgacgacggtagcctggaggacattcggacggagttcgatagagagatcgacagggggtccctgaacccaggtaagcagttgtag

SEQ ID NO: 226011 - DNA, 2859 bp, synthetic construct
  misc_feature 1..2859: note = Description of Artificial Sequence: Synthetic coding sequence
  source 1..2859: mol_type = other DNA
atgggtcagatatgtcaacgagagtcacggcagggcctggctatgttgcctcggctattcctcaacccttggcgccaggtgatcctgctcccacagcctcccaaagtgctagggctgcaggcaacggctgcggagaaacccaagctacacctactggccgagagcgagatcgacaaatacctatatgccatgcggttgtcagacgagactctcatagacatcatgacacgctttcgcaaagaaatgaagaatggcttgtcacgagactttaacccaactgctactgtcaagatgctgccaactttcgttagaagcattcctgatggctcagagaaaggcgactttatagccctcgatctgggaggatcttctttccgaatcctccgagttcaggttaaccatgaaaaaaatcaaaatgtccatatggaatccgaagtttatgatacgccagaaaacatcgtacacggttctggcagccagctgttcgatcatgtagccgaatgtcttggcgattttatggaaaagcgaaagattaaggataaaaagctcccagttggattcactttctcctttccctgccagcagtcaaaaattgacgaggccatcctgatcacatggaccaagaggttcaaagcatcaggtgttgaaggcgctgatgtagtgaagctgctgaacaaagccataaagaagagaggcgattacgacgccaatatagtggcagttgtcaatgacactgttggaacaatgatgacatgcggctatgacgatcaacactgcgaggtcggcttgataatcgggaccggaacaaacgcctgctatatggaagagctaagacacatcgaccttgtagaaggagacgaggggagaatgtgcattaatacagaatggggcgctttcggcgacgacggtagcctggaggacatccgcacggagtttgaccgggaaatcgatagaggatccttaaatcctggcaaacagctctttgaaaaaatggtgtccgggatgtatttgggggagctggttcgcttaatccttgtcaaaatggctaaagaaggcctactgtttgagggacggattactcctgagctcctgaccaggggcaagtttaatacgtccgatgtgtcagccatagagaagaacaaagaagggttacataatgctaaggagatcttaactcgacttggcgtggagccgtcagatgatgattgcgtcagtgtccaacatgtgtgtaccatcgtcagttttcggtctgccaacttagtggcagcaaccctgggcgcaatcttaaaccggttgagggacaacaaggggaccccacggttgaggacaaccgtcggcgtagacggaagcctctataagacgcacccgcagtattctcggcgtttccacaagactctgcggcgactggttcccgactcagacgtacgattcttactctccgaatctgggtcaggaaaaggtgccgctatggttacagcagtggcctatcgcttggcggagcagcatagacaaatagaggaaacgctcgctcatttccaccttaccaaagacatgctgctcgaggtgaagaagcgaatgcgcgcagagatggagttgggactccgaaagcaaacccacaataacgccgttgttaagatgctcccttctttcgtcaggaggaccccagacggtaccgagaatggcgattttctggccctggaccttggaggcacgaactttcgggtcctattagttaaaatccgaagcgggaagaagcgaactgtcgaaatgcacaacaaaatatatgcaatccctatcgagataatgcaggggacaggagaagagctcttcgaccacatagtttcatgtatttcggacttcctggactatatgggcatcaagggccctagaatgcccctgggcttcacgttctccttcccatgccagcaaaccagtctcgatgcaggaatcctgatcacatggacaaaaggatttaaggctacagactgtgtgggacacgacgttgtaaccctgttgcgcgacgccatcaagagacgcgaagagtttgacctggacgtcgttgcagtggtcaacgacaccgtcggcaccatgatgacctgtgcctatgaggaacccacctgcgaggttggactcattgtaggcacaggtagtaacgcttgctatatggaagagatgaaaaatgtagaaatggtagaaggggatcaggggcagatgtgcatcaatatggagtggggggcttttggtgataacgggtgcttggacgacatacgcactcactacgacaggcttgtggatgaatactctctgaatgccggaaagcagcgctacgagaagatgatatccggtatgtatttgggtgagatcgtgaggaatatcctgatagattttacaaagaagggctttcttttccgcggacagatatctgagactcttaagacccggggaatctttgagactaagtttctgagtcagattgaatcagatcgtctggcgctgcttcaggtgagagctatcctgcaacagctaggcctgaattctacctgtgatgactccatcctggtgaagaccgtttgcggggtagtttccaggagggccgcacaactttgcggcgctggcatggccgcagttgttgataaaatccgagaaaacaggggactggaccgtttaaacgtcacagtcggagtggatggtacactgtataagctccaccctcacttcagcagaattatgcaccagaccgtgaaggagttatcgccaaagtgtaacgtgtccttcctcctgagtgaggatgggtccggcaaaggcgcagccctcattaccgctgtcggtgtgagactgagaacggaagcctccagctag

SEQ ID NO: 226012 - DNA, 420 bp, synthetic construct
  misc_feature 1..420: note = Description of Artificial Sequence: Synthetic coding sequence
  source 1..420: mol_type = other DNA
atgggtcaaatctgccagcgcgaatccgctactgccgctgagaaaccaaaactgcaccttctagcagagtccgaaattgacaagtatttgtacgccatgcgtctctctgacgagacccttattgacataatgactcgattccgcaaagaaatgaaaaacggactctccagggacttcaatcccactgcaacagttaaaatgctacccacattcgtacgctcaattccagatggtagcgaaaagggggactttatcgctcttgatctcggcggttcttctttcagaattctgagggtccaggtcaaccatgagaaaaatcagaatgtgcacatggagagcgaggtgtatgacacgcccgagaacattgtgcacggcagtggctcacagctttttgaccatgtggccgagtgtctgggctag

SEQ ID NO: 226013 - DNA, 2754 bp, synthetic construct
  misc_feature 1..2754: note = Description of Artificial Sequence: Synthetic coding sequence
  source 1..2754: mol_type = other DNA
atgatcgcatcccatctgctggcttatttctttacagaactcaatcacgatcaggtgcagaaagtggaccaatatctctaccacatgcgactgagtgatgaaactttattggaaatctctaagcggttccggaaggagatggaaaagggcctcggagccaccacccacccaaccgccgctgttaagatgctgcctacgttcgtccggtccaccccagatggcacagagcatggcgagtttctagccctcgatttgggcggtactaattttagggtgctgtgggtgaaagtgaccgataacgggctccagaaagtagaaatggaaaatcagatatacgcgatcccagaagacattatgaggggttcgggcacccaactctttgatcatattgcagagtgcctggctaacttcatggacaaactacagattaaggacaagaagttgcccctgggcttcactttttcctttccctgccaccaaacaaagctggacgaatcattcttagtcagctggacaaaaggttttaagtcatctggggttgagggtcgcgatgtggtggcattaattaggaaggctattcagagacggggagattttgacatcgatatagtggcagtggtaaatgacactgtgggcaccatgatgacttgcggatacgacgaccacaattgcgagattgggcttatagtcggcactggctccaacgcctgttatatggaagagatgagacatatcgacatggtcgaaggagacgagggcaggatgtgtattaatatggaatggggcgctttcggagacgatggaagcttgaatgatataaggacagagttcgaccaggaaattgatatggggtcgcttaatccaggcaagcagctgttcgaaaagatgatcagtggtatgtacatgggcgaattagtaagattgatcctggtgaagatggccaaggaagaactcttgttcggtgggaaactgtctcccgaactgcttaacaccggcaggtttgaaacaaaagacatcagcgacatcgaaggagagaaggacggtattaggaaagctagagaggtcctgatgcgactcggtctagaccccactcaggaggattgcgtcgccactcaccgaatctgccagatcgtctccaccagatctgcatccctctgtgccgcaacactggcggctgtacttcagcggattaaggaaaacaaaggagaggagagactgcgctccacgataggtgtggacggctcagtgtacaaaaaacatcctcatttcgccaagcgcctgcataagacagtgaggaggctggttcccggttgcgacgtgcgcttcctccgttccgaagatggctctgggaagggcgcagcaatggttacggctgtcgcttataggctcgcagaccagcatagagcaaggcagaaaactctggagcatttgcagctctcgcacgatcaattactcgaggtgaaaaggagaatgaaggtcgaaatggagaggggcttatcaaaggaaactcacgcctctgcccctgttaagatgttacctacttatgtttgcgccacacccgacgggaccgagaaaggggactttcttgctttggacttaggtggaactaacttcagggtcctgctggtcagggtcagaaacgggaagtgggggggagttgagatgcataataagatatatgctattccccaggaagtgatgcacggaacaggggatgaattatttgaccacatcgtgcagtgtattgcagattttttggagtacatgggtatgaagggagtgtcgctccctcttgggttcaccttctccttcccttgccagcagaactctctggatgagtcaatcctccttaaatggactaagggtttcaaagccagtggatgtgagggcgaagacgtggtaaccctgctgaaagaagccattcacaggcgcgaggaatttgatctggatgttgtcgcggtcgttaatgatacagtcggcactatgatgacatgcgggttcgaggacccccattgtgaggtgggtttaatagtcggtaccggatcaaacgcatgttacatggaggagatgaggaatgtcgaactagtggagggcgaagaggggagaatgtgcgtgaacatggaatggggtgcattcggggataacgggtgcctggatgattttagaaccgaattcgacgtggcggtggacgagctgagcctaaaccctggaaaacaacgctttgaaaaaatgatctcgggaatgtacctcggggaaatagtcaggaatatccttatagattttactaagcggggactgctgtttagaggcaggattagtgaacgcttgaagactagaggtatcttcgaaacgaagttcctgtcgcaaattgagtctgactgcctcgctttgctgcaggttagagctatcctgcaacacctggggttggaatcaacctgtgatgacagtataatcgttaaagaggtgtgtactgtggtagcgagaagagcggctcagttatgtggcgctggtatggctgctgtcgtcgatagaattagagagaatcggggactggatgctctcaaagtgaccgttggcgtggacggtactctatataaacttcacccgcactttgctaaagtgatgcacgagaccgtgaaggacctggcccctaagtgcgatgtgagcttcctccagtcagaagacgggtctggtaaaggagccgctctgattactgctgttgcttgccggatccgtgaagccggacagcgttag

SEQ ID NO: 226014 - DNA, 2670 bp, synthetic construct
  misc_feature 1..2670: note = Description of Artificial Sequence: Synthetic coding sequence
  source 1..2670: mol_type = other DNA
atgcggctcagcgatgaaacactgctggaaattagcaaaaggttcagaaaggagatggagaagggtctcggcgctaccacacacccaaccgcggctgtgaagatgctcccgacatttgtgagatcaactccagacggaacagaacatggcgagtttctggccctagacctcggaggcactaactttagagtgctgtgggtgaaagtcaccgacaatggattgcagaaagtggagatggaaaatcagatatacgctatccccgaggacatcatgcgaggatccggcacacagctatttgatcacatagctgaatgtctggcgaacttcatggacaagctgcaaatcaaagacaaaaaactgcctctgggcttcaccttctcgttcccctgtcatcagacaaaattggacgagtcctttctggtgtcatggactaaaggctttaaatcatcaggtgtcgaaggacgcgatgtggtcgctctcatacgcaaggcaatccagcgtagaggcgactttgacattgatatcgtggcagtagttaacgataccgttgggacaatgatgacatgtggctacgacgatcataattgcgaaatcgggttaatcgtgggtaccggatccaacgcttgttacatggaggagatgcgtcacattgacatggttgagggcgatgaaggaagaatgtgtatcaatatggagtggggggctttcggagatgacggatctctgaatgatattcgcacagagtttgaccaggaaatcgacatggggtcacttaatccgggtaaacagctgtttgagaagatgatctctggtatgtatatgggagaattggtgagactcatcttagtgaagatggcaaaggaggaactgttgtttggaggtaagttgtccccggaactgcttaacaccggcagatttgagaccaaggacattagcgacatcgaaggagagaaggacggaatccgcaaggctcgcgaggtactgatgaggttgggcttagatccaacacaggaagattgtgtagctacacaccgcatctgtcagatcgtgagcacacggtccgcttctctttgcgctgcgacgcttgcagctgtgctccagcgcattaaagagaacaagggggaggagcgcttacgctccacaattggcgttgacggctccgtgtataagaaacatccccacttcgcaaagcggctgcataaaacagtgagacgccttgtgcccggatgcgacgtgcgattcttacggagcgaagacggaagtggtaaaggcgctgccatggtgactgctgtggcatatcggctggcagatcagcaccgggcaagacagaaaaccctagagcacctacaactctctcacgatcagcttttggaggtaaagcgccgtatgaaggtggagatggaacggggactgtctaaagaaacacacgccagtgcaccagtgaaaatgctgcccacatacgtatgtgccacccctgacggaacagaaaaaggtgattttctcgccctcgatctgggtggcaccaactttcgcgtcctgctggtccgggtacgcaatggtaagtgggggggtgtcgagatgcataataagatctatgccattcctcaggaagtgatgcatggcacaggcgatgagctgtttgaccacatagtccaatgcattgcggactttttggagtacatgggcatgaagggagtcagtctccccctgggctttacctttagttttccctgtcagcagaattcattggacgaatccatactattgaagtggactaagggatttaaggcgagcgggtgcgaaggagaggatgtggtcacactactgaaggaggctatccaccgccgagaggagttcgacctggacgttgtagcggtggtaaatgacactgtaggcaccatgatgacgtgcggctttgaagatcctcactgtgaggtaggactgattgtcgggactgggtcgaacgcttgttacatggaggagatgaggaacgtggagttggtggagggagaagaaggcagaatgtgcgtaaatatggagtggggggcttttggtgataacgggtgtctcgatgattttagaacagagtttgatgtggccgtggatgagctatcgctcaaccccggaaaacagcggtttgagaaaatgattagcggcatgtacttgggggagatagttcgcaacattctgattgatttcaccaagcgaggactcctgttccggggacggatttccgagaggcttaaaacccgaggaattttcgagacaaagtttttgtcccagatcgaaagtgattgcctggctttattgcaggtgcgagctatccttcagcatctagggctggaatctacctgcgatgatagtatcatcgtcaaggaagtctgtaccgttgtggcacggcgtgcagctcagctgtgcggagccggaatggcagccgttgttgatcgtatccgagaaaacagggggctggacgctctgaaggtgactgttggcgtggatgggactctgtataaactgcaccctcattttgctaaggtaatgcacgagactgtaaaagacttggctccaaagtgcgatgtttcattccttcagagtgaagatgggtcaggcaaaggagcggctcttatcaccgccgtcgcctgccggattagggaagcgggtcagcgatag

SEQ ID NO: 226015 - DNA, 2754 bp, synthetic construct
  misc_feature 1..2754: note = Description of Artificial Sequence: Synthetic coding sequence
  source 1..2754: mol_type = other DNA
atgatagcgtcacacttgctggcttacttcttcacagaacttaatcatgatcaggttcagaaggtggatcagtatctgtatcatatgagactcagcgatgagaccctgctggagatttccaaaagattcagaaaggagatggaaaaaggactcggcgctacgactcaccctacagccgcagttaagatgctccccacttttgttcgatccacaccagatgggacagaacacggcgagtttctcgccctggacctgggaggtaccaactttagagtgctctgggtgaaagttacagacaatggcctgcagaaggtggagatggaaaatcagatttatgcaatcccagaggacatcatgcggggatccggcactcagctgttcgaccatatcgccgagtgcctggctaattttatggataaactccagattaaggataagaaactccctctgggctttacgttttctttcccctgccatcagactaaactggatgaaagcttcctggtgagttggaccaagggattcaagtcttctggcgtggagggtagagacgtcgtcgccctgatccgcaaagccatccagcgtcggggagattttgacatcgatattgtggccgtggtgaatgatacggtcggcacgatgatgacctgcggttatgacgatcacaattgtgaaatcggcctgatagtgggaactgggtccaacgcatgttatatggaggaaatgcggcatatcgacatggtggagggggacgagggcagaatgtgtatcaacatggaatggggtgcattcggagacgatgggtctctgaatgatattagaaccgagtttgatcaggaaatcgatatgggcagcctgaaccccggaaaacaattgttcgaaaagatgatctccggaatgtatatgggagagctcgtgaggcttattctggtgaaaatggccaaagaggaactgcttttcggcggaaaactgtctccggaactgcttaacaccggcaggtttgaaacaaaggatatttctgatattgaaggcgagaaggacggcatccgcaaagctcgggaagttttgatgcgtctgggattagatccaacacaagaggattgtgtagcaacacataggatttgtcagatcgtgtccaccaggtctgcaagcctgtgtgctgcaacccttgcagccgtactgcagcgtatcaaggagaataagggcgaggagcgccttaggtcaacgatcggggtcgacggctccgtgtataagaagcacccacattttgctaagcgactccataagaccgtaagaaggctcgttcccggatgcgatgtgcgtttccttcggtccgaggacggttctggtaagggggcagccatggtcaccgccgtggcatatagactcgccgaccagcaccgtgctcggcaaaagactttagagcatctgcagctgtcccacgatcagctgctggaagtgaaacgcaggatgaaagtggagatggaaaggggtctgagtaaggaaacccatgcatcagctcccgtgaaaatgctccctacatacgtgtgtgccacccctgatggaaccgagaaaggcgatttcttggcactggatttagggggaaccaatttcagggtgctgcttgttagagtaaggaatggaaagtggggaggcgttgagatgcataacaaaatatatgcaattccgcaggaggtgatgcatggaaccggcgatgaactctttgaccatatagtccagtgcattgctgattttcttgagtacatgggaatgaagggcgtcagtcttccattgggtttcacatttagttttccttgccaacagaattcactcgatgagtccattctgctgaaatggaccaaggggttcaaggcttctgggtgcgaaggcgaagacgtggtaaccttgctcaaggaggccattcaccgaagagaggaattcgacctcgatgtggtggcagtggtgaatgacaccgtgggaacgatgatgacctgcggcttcgaggacccgcactgtgaggttgggcttattgtgggcacgggaagcaacgcctgctacatggaagagatgagaaacgtcgaactggtggagggagaggaaggccgaatgtgcgtgaatatggaatggggcgctttcggagataacggttgccttgacgactttaggacagaatttgacgtggccgtagacgagttatcccttaaccctggcaaacagaggttcgaaaagatgatatccggaatgtaccttggtgaaatagtccggaacatactgattgattttacaaagaggggcctgcttttcagagggagaatctccgaacgactaaaaactcgcggaattttcgagacaaagttcttatcgcagattgagagtgactgtctggcattacttcaggtgagggccattctgcagcatctgggtctcgaatccacctgcgatgacagtatcattgtgaaggaggtgtgtaccgtcgtggctcggagggctgcgcagttgtgtggcgctggcatggcagcagtcgtcgataggattagagagaaccgcggtctggacgctctgaaggtgaccgtgggggtcgatggaaccctgtacaagcttcacccccattttgccaaagtcatgcatgagaccgtcaaggacctcgcccctaagtgcgacgtgtcgttcttgcagtcagaggatggcagcggtaagggcgcagccttgattaccgccgttgcttgccgcatccgcgaggccggacagcgatag

SEQ ID NO: 226016 - DNA, 2772 bp, synthetic construct
  misc_feature 1..2772: note = Description of Artificial Sequence: Synthetic coding sequence
  source 1..2772: mol_type = other DNA
atggactcaataggctcaagcggcctgcgtcagggtgaagaaactctgtcctgctccgaggaggggctgccgggtccgagcgacagcagtgagctggtgcaagaatgcctgcagcagttcaaagttactagggctcagttacaacagatccaggcctcccttcttggctcaatggagcaagctttgcgaggtcaggcaagcccagcacctgccgtgcggatgctcccaacctacgtcggatcgaccccccatggaacagagcagggagacttcgtggttcttgaactgggagctactggagcctcactgcgagtgctttgggtaaccctaaccgggatcgaggggcatcgggtcgagccaaggtcgcaagagtttgtaatcccacaagaagtgatgctgggcgcaggccagcagctcttcgacttcgccgctcattgtctcagcgagttcttggatgcccagccagtcaacaagcagggcctgcagctgggtttcagtttttcattcccctgtcaccaaactgggctggatagaagcacattgatatcttggaccaaaggttttcgatgtagtggagtggaaggccaggatgtggtgcagctgttaagggatgccatcaggcgacagggggcttacaatatcgacgtggtggccgtggtcaatgacacagtaggcacaatgatgggctgtgaacccggtgtgaggccgtgtgaggttggactggtagtggatacaggcaccaatgcgtgttatatggaggaggctcggcatgtcgctgtactggatgaagaccgtgggagggtatgtgtaagtgtggagtggggcagcttctctgacgacggcgcattaggccctgtacttactacctttgatcacactcttgatcatgagagcctcaatcctggagcgcagagatttgaaaaaatgattgggggactgtacctcggggaactggtgagactggtcctggcccatcttgcaagatgtggcgtgcttttcgggggttgtacctcccccgcattgctgtcccagggctccatattgttggaacacgtcgccgagatggaggacccctcaacaggcgcagcacgggtgcacgccatcctgcaggatttagggctgagcccaggcgctagtgatgtcgagctggtgcagcacgtttgtgcggcagtctgcactagggcagcccagttgtgcgccgctgcacttgctgcagtactcagttgcctccagcatagcagagagcaacagacactgcaggtggctgtggctaccggaggcagggtgtgcgagcggcacccacgattttgcagcgtgctccaggggacagtgatgctcttagcaccggagtgtgatgtgtcactgatcccaagcgtggatggagggggaaggggtgtcgccatggtgaccgcagttgcagccagactagccgctcatcggcgactgctcgaggagacactagccccatttcggttgaatcacgaccagctggccgcagtccaggcccaaatgcgaaaagccatggccaagggtctgagaggcgaggcctcgtccctccggatgcttcctacattcgtcagggctacccccgacggctccgaacggggagatttcctggccctggaccttgggggtacgaattttcgcgttctgctggttcgcgtaacaacaggcgtccagataaccagtgagatttattccattcccgagactgtggctcagggatctggacaacagctttttgaccacatagtggactgtatcgtggacttccaacagaaacaggggctgtcaggtcagtcactgcctctgggcttcacgttctccttcccctgtcgccaactaggccttgatcagggaattttactgaattggactaagggcttcaaagcgtcggactgtgaggggcaagatgtagtgtctctgctccgcgaggctataactcgcaggcaggcggtggaattgaacgtagtagcaattgtcaacgatactgttggtaccatgatgagttgcggatatgaagaccctaggtgcgaaattggactgattgttggtaccggtaccaatgcgtgttatatggaggagctccgcaacgtggctggcgttcctggggatagtggaaggatgtgtatcaacatggagtggggggcattcggagatgacggaagcttggcaatgctgtccacccgcttcgatgcctctgtggaccaggcgtccatcaacccaggcaaacagcgatttgaaaagatgatttcggggatgtatctgggtgaaatcgtgagacacatactgctgcatctgacttccctgggggtgctgttcaggggacagcagattcagcgactccagaccagggacatttttaagaccaagtttctaagtgagatcgagtcagattccctggccctccgccaggtaagagcgattttagaagatcttggactgccccttaccagcgatgatgccctgatggtgctggaagtctgtcaggccgtaagtcagagagcagcccagctctgtggcgcaggagtcgccgcagttgttgagaagatcagagagaaccgtggactggaggaactcgcggtgtctgtgggggtggatggcaccctatataagctgcatccgagattttctagcttggttgccgcaaccgtgagagaactggcccctagatgtgtcgtgaccttcttgcagagcgaagacggatctggtaagggagctgcgttggtgacagccgtggcgtgccggctcgcccagctgacccgggtgtag

SEQ ID NO: 226017 - DNA, 1590 bp, synthetic construct
  misc_feature 1..1590: note = Description of Artificial Sequence: Synthetic coding sequence
  source 1..1590: mol_type = other DNA
atgacatcttcaaggctttggttctctttattgctggccgcagcttttgctggccgagcgaccgcactctggccctggcctcagaatttccagacttcggatcagcgttacgtcctgtaccccaacaattttcaatttcagtacgacgtaagttcagccgcacagccaggatgcagtgtgctggatgaggcgttccagaggtacagggacctgctgtttgggagcggatcctggcccagaccctatctgactggcaaaagacataccctggaaaagaacgtgcttgtcgtttccgtagtgacgccaggttgcaaccagctccccaccctcgaatctgtcgagaactacacactgaccattaacgacgaccagtgtcttcttcttagcgagactgtgtggggcgcactgaggggattggaaacattcagccagttggtctggaaaagcgctgagggcactttctttatcaacaagaccgagattgaggactttccacggttcccacataggggactcttactggatactagtagacattacctgcctctcagttccatattggataccctcgacgtgatggcttacaataagcttaatgtattccactggcacttggtagacgatccctcttttccctatgaatctttcaccttcccggagctcatgaggaaggggagctacaatccagtcacacacatttacacagcccaggatgtgaaagaggttattgaatatgcacgactgcgaggaattcgtgttttggccgagttcgacacccccggacacaccctgagctgggggcctggaattccaggactgctcaccccatgttactctgggtccgaaccaagcgggacctttggaccagtgaatccttctctcaacaatacctatgaatttatgtccacctttttcctggaagtgagcagtgtgttccctgatttctacttgcacctgggcggagacgaggtggattttacttgctggaagagcaaccccgagattcaggacttcatgagaaagaagggcttcggcgaagacttcaagcagctcgagagcttttatatccagactctgctggacatcgtaagcagttacggtaagggctacgtggtgtggcaagaggtctttgacaacaaggtaaaaattcagcccgacacgattatacaggtctggagagaggatatccctgttaattacatgaaagagttggagctcgtgaccaaggcgggatttagagcacttctctccgcaccttggtacctgaaccggattagttatgggcctgactggaaagatttttacattgtggagcccctggccttcgaaggtactcctgagcaaaaagccctagtgattggaggcgaggcatgcatgtggggggagtatgttgataatacaaacctcgttcctaggctctggccacgggctggagcagtcgctgaacgcttgtggtcgaacaagctgacgagtgatctgaccttcgcatacgaaagactgagccattttcgctgtgagctccttcgcaggggtgtccaggcacagcctctgaatgttggattttgtgaacaagagttcgaacagacttag

SEQ ID NO: 226018 - DNA, 906 bp, synthetic construct
  misc_feature 1..906: note = Description of Artificial Sequence: Synthetic coding sequence
  source 1..906: mol_type = other DNA
atgatgactagtgtgtattcaagcctgagactgtcaggcgaactgtccgaagacgtgatggcatataacaaactgaatgtctttcactggcatctcgtcgatgacccgtccttcccatacgaatctttcaccttcccagagctcatgcgcaagggctcatacaaccccgttacgcatatctatacagcgcaagacgtaaaagaggtgatcgagtacgctcgactgagaggcattcgcgtgttggccgaatttgatactcccggtcataccctctcgtggggccctgggatccctggcctgctcactccatgttacagcggatccgaaccgtccggcaccttcgggcctgtgaatcccagcctcaataacacttatgagttcatgagcacgttctttctggaggtctcttctgtttttccagacttttacctccatctcggcggagacgaggttgattttacatgctggaagagcaatcctgaaatacaggacttcatgcgtaaaaaaggctttggtgaggactttaagcagctcgaatcattctatattcagacactgctggatattgtgagttcatacggaaaggggtatgtggtttggcaggaagtgtttgacaataaagtgaaaatccagcccgatactataatccaggtgtggagagaggacatcccagttaactacatgaaagagttagagttggtgacaaaggctggcttcagggctcttctgtcagccccatggtaccttaaccgaatcagctatgggccagactggaaagacttttacatcgtggagcccctggcattcgaggggacaccggagcagaaagccctggtgatcggtggggaggcttgtatgtggggggagtacgtagacaataccaaccttgtccctcggctgtggtag

SEQ ID NO: 226019 - DNA, 507 bp, synthetic construct
  misc_feature 1..507: note = Description of Artificial Sequence: Synthetic coding sequence
  source 1..507: mol_type = other DNA
atggcgtacaacaagctaaatgtattccactggcacctggtcgatgatcctagcttcccttacgaatctttcacctttccagaactgatgagaaagggaagctacaaccccgtcacccacatctatactgcacaggatgtgaaggaggtcatagagtacgctcggttgcggggaatacgagtgctagccgaatttgatactccgggacatacactgtcttggggcccaggaatccctgggctcctgacgccatgttatagtggatccgagcccagcggaacgtttggacctgtcaaccccagtcttaataatacttacgaattcatgtctaccttctttctggaggtgagcagtgttttcccagacttttatctgcatctgggaggcgatgaggtggactttacctgctggaagagcaatccggagatacaggattttatgcgcaagaaaggcttcggcgaggacttcaagcagctagaatctttctacatacaaacttatccttag

SEQ ID NO: 226020 - DNA, 1671 bp, synthetic construct
  misc_feature 1..1671: note = Description of Artificial Sequence: Synthetic coding sequence
  source 1..1671: mol_type = other DNA
atggagctgtgcggactgggcctgccgagaccacccatgcttttagccctgttactggccaccctgctcgcggctatgctcgccctgcttacgcaggtcgcgcttgtcgtgcaggtggccgaagccgcaagggctcccagcgtgtccgcaaaacctggcccagcgctatggccgctgccacttctagttaagatgactcctaacctgttgcacctcgctcctgagaatttctacatttctcattctcccaactctaccgccggaccatcttgtacactgctagaggaagcctttcgacggtaccacgggtacatattcgggttctacaaatggcaccacgaaccggcagagtttcaggctaagacacaagtccagcaattgctcgtgtccattaccctgcaaagcgagtgcgatgcttttcccaatataagtagtgacgagtcgtataccttgcttgttaaagagcccgttgctgtattgaaagctaatcgcgtatggggagctcttcggggactggagacattcagtcagctggtctaccaggatagctatggaacattcacaatcaacgagtccaccatcattgacagtcctcggttttctcatcgcggaattctgatcgatacgagtagacattacctacccgtcaagatcatcttaaagaccctggacgccatggccttcaataagtttaatgtcctgcactggcacatagtcgatgaccaatcttttccataccagagtataacctttcctgaactgtccaataagggcagttattctctgagccacgtgtacaccccaaacgacgtgaggatggtgatcgagtacgctcggctccgcggaatcagagttctgccagaatttgacactcctggtcacactctctcatgggggaagggccaaaaggatctgctgactccttgttattctcgccagaataaacttgactctttcgggcctatcaaccccacgctgaataccacgtactcttttctgactacctttttcaaggaaatatccgaggtctttcccgaccagttcatccacctgggaggcgacgaggtggagttcaagtgttgggagagcaatcctaagatccaggactttatgcgacaaaaaggattcgggaccgattttaaaaagcttgagtcattctatatccagaaagtgctagacatcatcgcgaccatcaacaaaggcagcatcgtatggcaggaggtgtttgatgataaggctaaactcgcacccggaacaatcgttgaagtgtggaaagactccgcgtaccccgaggaactgtctcgggtgactgcttccggatttcccgtgatcttgtccgctccatggtacctagatttgatcagctatggccaggactggcgaaaatactataaagttgagcctctcgattttggtggcactcagaagcagaagcagctgtttatcggcggtgaggcctgtctttggggcgagtacgttgacgcgacaaacctcacacctagactgtggcccagggcgtccgcagttggagaaaggttgtggtcatctaaagatgttagagacatggacgatgcatatgacagactgactcggcaccgctgtcggatggtcgagagaggaatagccgcacagcctctttacgccggatattgcaatcacgaaaatatgtag

SEQ ID NO: 226021 - DNA, 996 bp, synthetic construct
  misc_feature 1..996: note = Description of Artificial Sequence: Synthetic coding sequence
  source 1..996: mol_type = other DNA
atggccttcaataaatttaatgttcttcactggcacatcgtcgatgaccagagtttcccttaccagtccatcactttccccgaactgtctaacaaaggttcatacagtctgtcccatgtgtataccccaaatgacgtgaggatggttatagaatacgctcgtcttagaggtattagagtgctgccagagttcgacactccgggtcataccctttcatggggtaaggggcagaaagatcttttgaccccctgctatagtaggcagaataagttggattcatttggaccaataaatccaacgctaaacaccacatacagtttcctgaccacttttttcaaagaaatttctgaggtgttcccagaccaattcatccatctgggaggtgatgaggtggaattcaagtgctgggagagtaaccccaagattcaagacttcatgaggcagaaggggttcggaacagatttcaagaagctcgaatccttctatattcaaaaggtactggatattatcgccactattaacaagggctctatcgtctggcaggaagttttcgacgataaggccaagctggctcccggaacgatcgttgaggtttggaaggactctgcgtatcctgaggagctctcacgagttaccgccagtggattcccagtcatcctgagcgctccttggtaccttgacctgattagctatggccaggattggcggaaatattacaaagtggagccactggacttcggcggtacgcagaaacagaagcaattattcattggtggtgaagcctgcctgtggggagagtacgttgatgcaacgaatctaactccacgactatggcctagggcctccgcagtgggagagaggctttggtctagcaaagacgtgagggacatggacgacgcttacgaccgccttaccagacaccgatgcagaatggtggagagagggatagccgctcaacccctgtacgcgggttattgcaatcacgagaacatgtag

SEQ ID NO: 226022 - DNA, 2376 bp, synthetic construct
  misc_feature 1..2376: note = Description of Artificial Sequence: Synthetic coding sequence
  source 1..2376: mol_type = other DNA
atgtggaatatgctgattgttgccatgtgcttggcgctgctcggctgtctgcaggcccaagaactgcagggacatgtctctatcattctgctgggagccacaggggacctggcaaagaaatacctctggcagggcctctttcagctttacctggatgaggccggaagaggccacagtttctcattccacggggcagctcttacagccccaaagcagggacaagaactgatggcgaaggctctcgagtccctaagctgcccaaaggatatggccccatcccattgtgctgagcacaaagatcagttcctccagctgagccaataccgtcaactcaagactgctgaagactatcaagccctgaataaggatatagaggcccagttacagcatgcgggactccgagaggccggacggattttctacttctctgtcccaccctttgcttacgaagacattgccaggaatattaactcttcctgccgcccaggcccaggcgcttggctgagagttgtgcttgagaagcccttcggtcatgatcactttagcgcgcagcaactggctaccgagctgggaaccttcttccaagaagaggagatgtatagggtggaccattatttgggaaaacaggcggttgctcaaatactgccattccgtgaccagaaccggaaagccttggacggtctttggaatcgccaccatgtagaacgtgtggagattatcatgaaggaaactgtcgatgctgaagggaggaccagcttctatgaagagtacggtgtcattagagacgtccttcagaatcatctcaccgaggttctgaccttagtggctatggaactcccccacaatgtgagtagtgcagaggccgtgctccggcataaattacaagttttccaggctctgcggggactgcagcggggttccgcggttgtcggacaatatcagtcttattccgaacaagttagacgggaactgcagaagcctgactcatttcattccttgaccccgacctttgcggcagtgttggtccatatcgacaacctgagatgggagggggtgcctttcattctgatgagcgggaaggctctggacgaacgggtgggctacgcgaggattctgttcaagaaccaagcatgctgcgtgcagtcagagaaacactgggcagccgctcagtcacagtgcctgcccaggcagctcgtcttccacataggccatggcgatttgggatcaccagcagttctggtgagcaggaatttgttccgtccatctttacccagctcatggaaagaaatggaaggtcccccagggctgaggttgttcgggtcgccactctctgactattacgcatacagccctgtgagggaacgcgacgctcatagtgtgctgctgagccacattttccacggtagaaaaaattttttcatcaccactgagaacctgctagcttcctggaatttttggactccactgttagagagcttagcacacaaagcgccaaggctgtaccccggtggagccgaaaacggcagactgttagatttcgagttctcaagtggtcgactcttcttctcccagcagcaaccagagcaacttgtgccaggccctggtcccgcacctatgccctctgacttccaggtgctaagggccaaataccgcgagtcccccctagtctccgcctggagcgaagaactcatcagcaagctggccaacgatatcgaggcaacggctgtccgggcagtgagaagattcggtcagttccacctggccctctcaggagggtcttcccccgtggcactgttccagcagctggcaactgcccactatgggttcccgtgggcccacacccacctttggttagtggatgagagatgtgttccgctgtccgaccctgaaagtaattttcaggggctccaggcccacctccttcagcacgtacgcattccatactacaacatccacccaatgcctgtccatttacaacagcgcctgtgtgccgaggaggatcaaggagcacagatttatgccagggagatatccgcgctagtggccaattcttccttcgacttagtgctccttggtatgggcgctgatgggcacacggcttcactgttcccacagagcccaaccgggctggacggagaacagctagtggtcctgacaacgtcccctagccagcctcaccgccgaatgtcactgtctctgcctctcatcaaccgtgccaagaaagttgctgtgctggtgatgggtcgcatgaagcgggaaattactacacttgtgtcccgcgttggtcatgagcccaagaagtggcctatctctggagtgctgccccattccggtcagctggtgtggtacatggattacgacgcttttttgggctag

SEQ ID NO: 226023 - DNA, 1968 bp, synthetic construct
  misc_feature 1..1968: note = Description of Artificial Sequence: Synthetic coding sequence
  source 1..1968: mol_type = other DNA
atggggaggtgggcgtgggttccttcaccgtggccgccaccagggctcggcccattcctgttactgcttctgctgctcctgctcctgcctcgtggatttcaaccgcaaccagggggaaacaggactgagagtcctgagccaaacgcgactgctacccccgctatccctaccatcctcgtgacatcagtgactagtgaaacacctgccacttccgcaccggaggccgagggaccccagtccggtggcctacctcctccaccgcgagccgtcccgtcatcaagttctccccaggcacaggctctaaccgaggacggcagaccatgtcggttcccattccgatacgggggacgcatgcttcacgcatgtacatccgaggggtccgcacatagaaagtggtgtgctacaacacacaactatgatcgcgacagggcctggggctactgcgtggaagccaccccccctcctggcggaccagcagcccttgacccctgtgcctctggaccctgcctgaatggaggctcatgctccaatacccaagatccccagagctatcactgtagctgtcctagagcttttacaggcaaagactgcggaaccgaaaagtgtttcgacgaaacccgctacgaatacctggaagggggagaccggtgggccagggtgcgacaggggcatgtggaacagtgtgaatgcttcggtgggcgaacctggtgtgaaggcaccagacacaccgcatgcctgtcctcaccttgtctgaatggtggcacctgccacctgattgttgctactggcaccactgtctgtgcatgcccccctgggtttgcaggcaggttgtgtaacattgagcccgatgagagatgctttttgggtaacggcacagggtacagaggcgtggccagtacaagcgctagcgggctctcctgcttggcctggaactccgatcttttatatcaagaactgcacgtcgattctgtcggagccgctgcactattaggactcggccctcatgcctattgccgaaaccctgataatgacgaacggccttggtgctacgtggtgaaggactctgcgctgtcgtgggaatactgcaggctcgaggcctgcgaaagcctgacaagagttcaactcagccccgacctccttgcaacgctgcctgagccagcctctcctggacgccaagcctgtgggagaagacacaaaaagagaactttcctgaggcctagaatcattggagggagcagttcactgcccggatcccacccttggctggcagccatttacatcggtgatagcttctgcgcgggtagccttgtgcatacgtgttgggtcgtaagcgcagcacactgtttttcgcacagcccccctcgcgactccgttagcgtggttctaggccaacattttttcaatcgcactacagacgtcacccagacttttggaatcgaaaagtatattccctacactctgtattccgtcttcaatccttcagatcacgatttggtgctgattcgtttgaaaaagaagggggacaggtgcgccacacgcagccagtttgttcagccaatatgccttccagagccgggaagcactttcccagctggccataagtgccagatagccggttggggccatttggacgaaaacgtgagcggttatagctcatctctacgcgaggccctggtccccctggtcgccgatcacaagtgtagttctcccgaagtgtatggtgcggacattagcccaaacatgctctgcgctggttatttcgactgcaaaagcgacgcctgtcagggagattccggtggccctctggcttgcgaaaagaatggtgttgcctacctctacggaattatcagttggggagacggatgcggcagactgcacaagccgggagtatatactagggtggcaaactacgttgactggatcaacgatcgtattcgccctccgaggagattggtggctccctcatag

SEQ ID NO: 226024 - DNA, 3807 bp, synthetic construct
  misc_feature 1..3807: note = Description of Artificial Sequence: Synthetic coding sequence
  source 1..3807: mol_type = other DNA
atgtcatccgtggccgtccttacgcaagagtccttcgctgaacaccgtagcggcctggttccacagcagattaaggttgccaccttgaattctgaagaagagtctgacccaccgacttataaagatgcatttccaccgcttcccgaaaaggccgcttgcctcgagagcgcgcaggaaccaagtggcgcatggggcaacaagatacgccctataaaggcatctgtgatcacccaggtgtttcatgtcccgcttgaggagcggaagtataaggacatgaaccaattcggcgaaggggagcaggctaaaatatgtctcgagattatgcagcggaccggagcacacttggagctttcactcgctaaagatcagggactgagcatcatggtcagcgggaaacttgacgctgtcatgaaagcgcgaaaagacattgtggctcgtctgcagacccaggcctcggcaacggtggctatcccgaaagaacatcatcggttcgttatcggtaaaaacggggaaaagcttcaagacctggagctgaagacggccaccaaaatccagatccccaggccggatgacccttcaaaccagattaaaattactgggaccaaagaaggcattgaaaaagctcgacacgaagtgctcttgatttcagcagagcaggacaagagagctgtagagcgcctggaagtcgagaaagcgttccacccgtttatcgctggaccttataaccggctggtcggagagattatgcaggagacgggaacacggatcaacataccccctcctagcgttaatcgaacagagattgtcttcaccggcgaaaaagagcagcttgctcaggcagtggcacgcataaagaagatatacgaagagaagaagaagaagacaactaccattgctgtggaagttaagaaaagccaacataaatacgttatagggccaaaaggcaactctctccaggagattcttgagagaaccggggtaagtgtggagatccctcctagcgatagtatatctgagactgtcatactccgcggagagcctgagaaattaggccaggcacttaccgaagtgtacgctaaggcaaatagttttacagtgagtagcgtggccgcaccatcatggcttcataggtttatcattggaaaaaaggggcagaacctagccaagatcacccagcagatgcctaaggtgcacatcgaatttacagaaggcgaagataagattacgctagaagggcctactgaagatgtcaatgtggctcaggaacagatcgagggcatggtgaaggacttgatcaaccggatggactatgtcgaaatcaacattgaccataaatttcataggcacctgattggaaaatcaggcgcaaatataaaccgaattaaggatcagtacaaagttagtgtacgaatcccccctgatagcgagaagagcaatttgatcagaatcgaaggagatccacagggcgtccagcaggctaaaagagagcttttggagctggcctcacgcatggaaaatgagcggacaaaagacttgataatcgagcagcggttccacagaaccatcattggccagaagggagagcggatacgtgagattcgagacaaatttcctgaagtgattattaacttccctgacccggctcaaaagtccgacattgtgcagttgagaggcccaaagaacgaagtggagaaatgcacaaagtatatgcagaaaatggtggctgacctagtagagaactcatattcaatatccgtcccaatttttaagcaattccacaagaacattatcggaaaaggcggtgccaacatcaaaaagattagggaagaatcaaatacaaaaatcgacctgcctgccgaaaactccaacagtgagactataatcatcaccgggaaaagggccaattgcgaggctgccagaagcaggatcctgagcattcagaaagacctagccaatatcgccgaggtcgaggtctccataccagcaaaactccacaacagtctgatagggaccaagggtcgcttgattcgctcaattatggaagagtgcggaggagtacatatacatttccccgtcgaaggatccggctctgataccgtggtcataaggggcccttcgagtgacgtggaaaaggccaaaaaacagctcctacacttagctgaagaaaagcagaccaagtctttcacggtagatattagagccaagcccgaataccataagtttctgataggcaaaggcggaggcaagatcagaaaagttagggacagcaccggagcaagagtcattttcccagccgcagaagacaaagaccaggacctgatcactatcatcggaaaggaggatgctgtccgcgaagcacagaaggaattggaagccctgatacagaatcttgataacgtcgtggaagactctatgctggtggacccaaaacaccatcgacacttcgtgataagaagaggccaggtgctccgcgagatcgcagaggagtatgggggagttatggtgtcattccctcgaagtggtacccagagcgacaaagtaaccctcaagggcgctaaagactgtgtcgaggccgcaaagaagcgtatccaagagatcatcgaggatttagaggcccaggttacactagaatgcgccatcccccaaaagttccatcgtagcgtgatgggcccaaaaggaagccggatccaacagatcactcgcgattttagcgtgcagatcaaatttcctgatcgagaggaaaatgcagtgcacagtaccgagccagtcgtacaggaaaatggggacgaggccggagagggccgtgaagctaaagactgcgaccccggaagtccacggaggtgtgatattatcatcatcagtggacggaaagaaaagtgtgaggcagctaaagaagccttagaagctctggttcccgtcaccatcgaggttgaagtcccatttgacctccaccggtacgtcattgggcagaagggctctggcatcaggaaaatgatggacgaatttgaggtgaatatccatgttccggctcctgaattacaaagcgacataatagccatcactggcctggccgctaatctcgatcgcgcaaaggccggtctgctggaacgtgtgaaggagctgcaggcagaacaggaagatcgggcactccggagctttaagttgagcgtaaccgtggatcctaagtaccatcccaaaatcataggaaggaaaggcgcagttataacccaaatcaggttagaacacgatgtgaacatacagttccccgacaaggatgacggtaatcaaccccaagaccagattaccatcactggttacgaaaaaaatacagaagccgctagggatgccattctgaggattgtgggggagctggagcagatggtgtctgaggacgttcctctcgaccatcgggtgcacgcacgaatcattggcgctcggggaaaggcgattaggaagatcatggacgagttcaaagtagacatccgctttccccaatcaggcgcacctgatcccaactgtgtgacggtgaccggcctgcccgaaaatgttgaggaggcgatcgatcatatcctgaacctcgaggaggagtaccttgccgatgtggtggacagtgaagccctccaggtttacatgaagccaccagctcatgaagaagcgaaagcaccttcaagggggtttgttgtgcgtgacgccccatggaccgcttcgtcgagcgagaaggcccctgatatgtcatcttccgaagaatttccatctttcggggctcaggtagctccaaagactttaccctggggccctaagaggtag

SEQ ID NO: 226025 - DNA, 3807 bp, synthetic construct
  misc_feature 1..3807: note = Description of Artificial Sequence: Synthetic coding sequence
  source 1..3807: mol_type = other DNA
atgagcagtgtcgccgtcctcacacaggaaagctttgctgagcatcggtcgggcctcgtgccgcagcagattaaagtggcaaccttgaattcagaggaagagtcagatccccctacgtacaaagacgcattccctccactccccgagaaagctgcttgcctggagtctgcacaagaaccaagcggagcatgggggaacaaaatccgacccattaaagcttccgtgatcacccaggtgttccatgtcccactggaggagagaaagtataaggacatgaaccagttcggagagggtgagcaggcgaagatctgtctggagatcatgcaacggacaggcgctcatcttgagctgagtcttgcaaaagatcagggcctcagtatcatggttagcggaaagctggatgcagtgatgaaagcacgaaaggacatcgtggccaggttgcaaacccaagcttctgctacagttgctattccaaaagagcaccaccggttcgtcatcggaaagaatggagagaaactgcaggatctcgagctcaagacagccacaaagattcagataccgcgtcccgatgatccatccaaccagataaagatcacagggactaaagagggcatcgaaaaggctagacacgaggtgctgctgatttcagctgaacaagacaaaagggccgtggagagattggaagttgaaaaggcattccacccgtttatcgcaggtccctacaaccgcctggtgggtgagataatgcaggagactggcacgcggatcaatatcccccctccttccgttaaccggaccgagattgtgtttaccggagaaaaagagcaactggcccaggccgtcgccaggatcaagaaaatttatgaagagaaaaaaaaaaagactaccacaatcgcagtcgaagtcaaaaagtcccagcataaatatgtaatcggaccaaaaggcaattcactccaggaaatactggagagaacaggtgtctccgtggagatccccccaagcgatagcatttccgaaacagtgattctgagaggggagcccgaaaagctcggccaagcccttacagaggtttatgccaaagcgaattctttcaccgtaagcagcgtggccgcaccatcttggcttcataggttcattatcgggaagaagggacagaatctggctaaaatcacgcaacagatgcctaaagtacacattgaatttaccgagggcgaagataagatcactctggagggacccaccgaagatgtgaacgttgcacaggagcagatcgagggcatggtcaaggatctcatcaacagaatggattatgttgagataaatatcgaccataagttccacagacacttgatcggaaaatccggcgctaacattaacaggatcaaagaccagtataaggtgagcgtccggatcccccctgattctgaaaaaagtaatctcattcggatcgaaggggacccccagggcgtacagcaggctaagagggagctgctggagttggcctctcgcatggagaacgagcggactaaagacctgatcattgagcaaagatttcatagaactataatcggacaaaagggagagcgcattcgcgagatcagagacaaatttccggaggtgattattaatttccctgaccctgcccagaaatcagacattgttcagctgcgcggacctaagaatgaggtggaaaagtgcactaagtatatgcagaaaatggtggcggacctcgttgaaaattcctattcgatttcagtgcccatatttaagcagtttcataaaaatataattggcaagggtggcgctaatattaagaagatcagggaggaaagcaataccaagatcgacttacccgctgaaaacagcaactcagagaccattataataactggaaagagagctaattgcgaggccgctcgcagcagaatactgtccatacaaaaggatctagcaaatatcgctgaggtagaagtttccattcccgctaagcttcataacagtttaatcggtaccaagggacggcttatcagaagcattatggaagagtgcggaggggtgcatattcattttcctgttgaagggtccggttctgatacggtcgtgattcgaggcccatccagcgacgtggaaaaagcaaagaaacagctgctgcatttggctgaagagaaacagactaagtcgttcacagtggacataagggccaagccggagtaccataaatttctgataggtaaaggcggtggaaagataaggaaagtcagggactcaactggagctcgtgttattttccccgctgccgaggacaaggaccaagacctcatcacaatcatcgggaaagaggatgcagtgagggaagcgcagaaggagctcgaggccctcatacagaaccttgacaatgtggttgaggatagtatgctggtggaccccaagcaccatcggcacttcgtgatccgcaggggtcaagtcctcagggagattgccgaggagtatggtggagtgatggtgtcattcccacgcagcgggacccagtcagacaaagtgactcttaagggcgcaaaggattgcgtggaggccgctaagaagcgcatccaagagataattgaggatctggaggcccaagtgacattagaatgtgccatcccccagaagttccaccggagtgtaatggggcctaagggatcccgcatccaacagattaccagagatttttccgtgcagatcaagtttcccgaccgggaagagaacgcagtgcattccacagagcccgtcgtgcaggaaaacggggatgaagccggtgagggacgcgaggccaaagactgcgaccctggcagcccacggaggtgcgacattattattatatcgggcagaaaggaaaagtgcgaggcagctaaggaagcacttgaggcgctcgtgccagtgacgattgaagtagaagtgccgttcgacctgcaccgctatgttataggccagaaggggagtggtataaggaaaatgatggacgagtttgaagtcaacatccatgtccctgctccggaactccagtcagacatcatcgctatcactggactggccgctaacctggatcgggcaaaggcgggactcctcgagcgagtaaaagaactacaggccgagcaagaggacagggcccttaggtctttcaaactttctgtcacagttgatccaaaatatcatccgaaaattattgggaggaagggggcagttattacacagattagactagaacatgatgttaatattcaattccctgataaagatgatggcaaccagccccaagatcagataacaatcacgggttatgaaaaaaatacagaggcagcgcgtgatgctatccttagaatcgtgggagagctggagcagatggtttctgaagacgtccctctggatcacagagtccacgccaggataataggggctcgcggaaaagctattagaaagataatggatgaattcaaggtcgacattcgattccctcagtccggagcccctgatcccaactgcgtgaccgttacagggttgcctgagaatgtcgaggaggctatagaccatatactgaatcttgaagaggaatacctggccgacgtggtggacagtgaagccctgcaggtttacatgaaaccacccgctcacgaggaggctaaggccccatccagagggtttgtcgtgagggacgccccatggaccgcaagttcatccgagaaagccccagacatgtccagctcagaagagtttccctcatttggagcccaggtggctcccaagactttgccttggggacctaaacgttag

SEQ ID NO: 226026 - DNA, 3807 bp, synthetic construct
  misc_feature 1..3807: note = Description of Artificial Sequence: Synthetic coding sequence
  source 1..3807: mol_type = other DNA
atgtctagcgtggcagtgctcacccaggagtctttcgcagaacataggtccggtctggtgccccaacagattaaagtggctacccttaactctgaagaagagtccgacccaccaacctataaggatgcattccctcctttaccagagaaagctgcttgcctcgagtccgcacaggagccttcaggggcatgggggaacaagattcggcctatcaaggcatcagtgattacacaggtctttcacgtccctttggaagaaagaaagtacaaggatatgaatcagttcggtgagggggaacaggcaaaaatctgtttggagattatgcagaggacaggggctcatctcgagctgagcttggccaaggaccagggattgtccattatggtctctgggaaactggatgcagtgatgaaggcacgcaaagacatagttgctcgactgcagactcaagcaagtgcgactgtcgctattcccaaggaacatcatcggtttgttatcggtaagaacggagagaagctccaggacctggaactcaagacagccacaaagatccagatacccaggcctgacgatccaagcaaccagatcaagattaccggaaccaaagagggtatcgagaaagccaggcacgaagtgctcttaatctctgcggaacaggataagcgggctgtggaacgtctcgaggtcgaaaaagcgtttcacccatttatcgctggtccttacaatcggctggtgggtgagatcatgcaggagacggggacccggattaacatccccccaccatccgtgaaccgcaccgaaattgtgttcaccggagagaaggagcagctggctcaagcggtggcccgaattaaaaagatctacgaggagaagaaaaaaaagaccacaaccatagccgtcgaagttaagaagtcccaacacaagtacgtgattggtccaaaaggtaatagcctgcaagagatcctcgagcgcacgggagtctctgttgagatccccccaagtgatagcatttccgagaccgtgatcctccggggtgagcctgaaaaactgggccaggcactgaccgaggtctatgccaaggccaactcattcacagtgtcatcagtagccgcaccatcctggcttcaccgcttcataattggcaagaagggccaaaacctggccaagataacccagcaaatgcctaaggttcacatcgagtttacagagggcgaagacaagataactctggaaggccctacagaagacgtgaatgtggctcaggagcagatagaggggatggtaaaagacctaattaacaggatggactacgtcgagatcaacatcgaccacaaatttcatcgtcatcttattggtaagagcggcgcaaacataaacaggattaaggatcagtataaagtgtcagtccggattcccccagattcagaaaagtccaatctcatacggatcgaaggcgatccacagggggtgcagcaggcgaagcgtgagctgcttgaactcgctagccgcatggagaacgagcgcactaaggacctcatcattgagcagcggtttcacaggacaatcatcggccagaagggcgagcgtatcagggagattcgggacaaattccctgaagttatcataaacttcccagaccctgcccaaaaatccgacattgtccagctccgaggacccaagaacgaggtggagaagtgcacaaaatacatgcaaaaaatggttgcagatctggtcgaaaactcctattccatctcagttcccatcttcaaacagttccataagaacattataggaaaaggtggcgctaatatcaaaaagattcgagaagagtccaacaccaaaattgacttacctgcagaaaacagcaacagcgagactatcatcatcactggcaagcgagcgaattgcgaagcggcacgttctagaatcttaagcatccagaaggatttagccaacatcgctgaagtagaggtatcgataccggctaaattgcacaactccctcattgggacaaaaggtcgacttatccgttctattatggaagaatgtggaggcgtccatatccacttcccagtggaaggtagtggctctgataccgtggtgatcagagggccatcttcagacgtggagaaagctaaaaaacagctgctgcacttagcagaggagaagcagacaaaatccttcaccgttgacattcgcgcaaagccagaatatcataaattccttatcggcaaagggggtggcaagatccgtaaagtaagagacagcacaggagccagggtcatcttcccggcagccgaggataaagatcaggacctgattacaattattggaaaagaagacgccgttcgcgaggcccagaaggaacttgaagcacttatccagaaccttgataacgtggtcgaggacagcatgctcgttgatccgaaacaccacagacatttcgttattaggcggggacaggtcctcagggagatcgccgaggagtacggtggagtgatggtgagcttccctcgatctggtacccagtcagacaaggtgacccttaagggtgccaaggattgtgtcgaagctgcgaaaaaaaggatccaggagatcatcgaggatttagaagctcaggtaacacttgaatgcgctatcccacaaaagtttcaccgctccgtgatggggccaaaaggctcccgtattcagcagatcaccagggactttagcgttcagataaagttcccagacagagaagagaacgccgtgcatagcaccgagccggtcgtacaggaaaatggagacgaggcaggggagggacgagaagcaaaggactgcgaccccggtagtcccagacgctgcgatatcataataatttcgggcaggaaggagaaatgcgaagccgctaaggaggcgctggaggccctagtgccagtgacaatagaggtcgaggtgcctttcgatctccacaggtatgttataggtcagaaaggatcaggtattaggaagatgatggacgaatttgaggtgaatatacacgtacctgcacccgaattacagagtgacatcatcgcaattaccggacttgccgcaaatctcgaccgtgcgaaagccggactattggaaagggtcaaagaactgcaagccgagcaggaagaccgagccctgcggtcatttaaattaagcgtcacggtggatcctaagtaccacccaaagatcataggtcgaaaaggggcagtcatcactcagattcgcctggaacatgacgtgaacatccagtttcccgacaaggacgacggcaaccagccccaggatcagatcactataaccgggtacgaaaaaaatactgaagccgctagagacgcaatcctacgcatcgtgggggagctcgagcagatggtgtcagaggatgtccctttagatcacagagttcatgcgaggatcattggggctagaggcaaggctattagaaaaatcatggacgagtttaaggtcgacatcagatttccccagtccggtgctccagatccaaattgcgtcacagtgactgggctccccgaaaatgttgaggaggccattgatcacatcctgaacttggaggaggagtatttggctgatgtcgtcgattctgaggcgttacaagtttacatgaagcctccagcacacgaggaggcgaaagctccaagtcggggatttgtagtgcgagacgctccatggactgccagcagctctgaaaaagcgcctgatatgagctcctcagaagagttcccttcttttggggcacaggtcgcccctaaaaccctgccatggggaccaaagagatag

SEQ ID NO: 226027 - DNA, 249 bp, synthetic construct
  misc_feature 1..249: note = Description of Artificial Sequence: Synthetic coding sequence
  source 1..249: mol_type = other DNA
atgtctagcgtcgcagttctcactcaggaaagttttgctgagcaccggagcggactagtgccccagcaaattaaagtcgctactctgaactccgaggaagaatcggacccccctacctataaggacgctttccctccactcccagaaaaggccgcatgcctagaatcagcccaagaaccatccggagcgtggggtaacaagattcgccctatcaaggccagcgtgataacacaggtcttccatgtgtag

SEQ ID NO: 226028 - DNA, 45 bp, synthetic construct
  misc_feature 1..45: note = Description of Artificial Sequence: Synthetic coding sequence
  source 1..45: mol_type = other DNA
atgagctccgtagccgtactgactcaagagtcattcgccgagtag

SEQ ID NO: 226029 - DNA, 210 bp, synthetic construct
  misc_feature 1..210: note = Description of Artificial Sequence: Synthetic coding sequence
  source 1..210: mol_type = other DNA
atgagctctgtagccgtactgacccaggagtcttttgcagagcatagatctggcctggtgccccagcagatcaaggttgcaaccctaaattccgaggaggagagcgatccccctacttataaagacgcctttcccccactccctgaaaaagcagcgtgcctagagagcgcccaggagcccagtggtgcctggggaaataagatccgttag

SEQ ID NO: 226030 - DNA, 165 bp, synthetic construct
  misc_feature 1..165: note = Description of Artificial Sequence: Synthetic coding sequence
  source 1..165: mol_type = other DNA
atgtcatccgtcgccgttctcactcaagagtcatttgccgagcatagatcaggcttagtgccccagcaaatcaaagttgcaactcttaatagcgaggaggagagtgacccacccacttacaaggacgcatttcccccactccctgagaaagccgcatgcctgtag

SEQ ID NO: 226031 - DNA, 675 bp, synthetic construct
  misc_feature 1..675: note = Description of Artificial Sequence: Synthetic coding sequence
  source 1..675: mol_type = other DNA
atgtcctccgtggccgttctgacccaagaaagcttcgcagagcaccgatcaggactggtacctcagcagataaaagttgcaacattgaactctgaagaagaatctgacccgcctacgtacaaggatgcatttcccccactcccggaaaaggccgcttgcctggagagtgctcaggagccgtctggtgcgtggggtaataaaattcgacccattaaggcaagtgtcattacccaggtttttcatgtccccctggaggagaggaaatacaaagacatgaatcagtttggcgaaggcgagcaagctaaaatttgcctggagattatgcaacgcaccggcgcacacttggagctctcacttgcaaaggaccaaggcctatccatcatggtctctgggaagctcgacgctgtcatgaaggctcgaaaagacatagtggctaggttacaaacacaagcatcagcaaccgtggccatccctaaagagcaccatcgttttgtaatcggaaaaaacggggagaagttgcaggacttagaacttaagacggcaaccaagattcagatccctaggcccgacgatcctagcaatcagatcaagatcaccggaaccaaggaagggatagaaaaagccagacatgaggtcctactgatctctgccgaacaggataagagggcagtgtag

SEQ ID NO: 226032 - DNA, 246 bp, synthetic construct
  misc_feature 1..246: note = Description of Artificial Sequence: Synthetic coding sequence
  source 1..246: mol_type = other DNA
atgtccagtgtggctgttcttacgcaagagtcctttgccgagcacaggtctggcttagttccccaacagatcaaggtggctacattaaattctgaagaagaaagtgatcccccaacttataaggacgctttcccaccgttacccgaaaaggccgcttgcctggagtccgcccaggaaccatccggtgcatggggaaataaaatccgtccaatcaaggcatctgttatcacccaggtctttcactag

SEQ ID NO: 226033 - DNA, 240 bp, synthetic construct
  misc_feature 1..240: note = Description of Artificial Sequence: Synthetic coding sequence
  source 1..240: mol_type = other DNA
atgtcgtcagttgctgtcttaacccaagaatcattcgccgagcacagatccggtctggtgccccaacagatcaaggtcgccactcttaacagcgaggaagagagcgatcctccaacctataaggacgcgtttccaccgctacccgagaaagccgcatgcttagagagtgcccaggaaccttccggagcctggggtaataaaataaggcccattaaagcatccgtgattacacaggtgtag

SEQ ID NO: 226034 - DNA, 291 bp, synthetic construct
  misc_feature 1..291: note = Description of Artificial Sequence: Synthetic coding sequence
  source 1..291: mol_type = other DNA
atgtccagcgtggcggtcttgactcaggagtcgtttgccgagcaccgatcgggactagtgccccagcaaattaaagtggctacactcaacagtgaggaagaatctgaccctcccacatacaaagacgcttttcctcccctcccagagaaagccgcatgcctggagtccgctcaggaacctagcggagcatggggaaataagataagaccgatcaaggccagcgtgatcacgcaggtttttcatgtccccctcgaagagcgcaagtacaaagatatgaaccagtttggctag

SEQ ID NO: 226035 - DNA, 60 bp, synthetic construct
  misc_feature 1..60: note = Description of Artificial Sequence: Synthetic coding sequence
  source 1..60: mol_type = other DNA
atgagctctgtggccgtgcttacccaggaatcctttgctgaacacagatcagggttgtag

SEQ ID NO: 226036 - DNA, 3708 bp, synthetic construct
  misc_feature 1..3708: note = Description of Artificial Sequence: Synthetic coding sequence
  source 1..3708: mol_type = other DNA
atgcacttagccgagagagataggtggctgttcgtcgccacggtaatgatgcatttcgtgtccatcaagagtggctttcctgggctctgcgtgggtgtgcgaagtaccatgtcctctgttgcggtcctcacccaggaatcctttgccgagcataggtctggactggtgccccaacagattaaggtcgccactttaaactcggaagaggaatctgatccaccgacctataaagatgcgttcccccctcttcccgagaaggccgcatgcttggagtcggcccaagagccttctggtgcctggggaaacaagattcggcctatcaaggcgagtgtgatcacgcaggtgtttcacgttcccctcgaagagagaaagtacaaagacatgaatcaattcggggagggcgagcaagctaagatttgtctggaaattatgcagaggacaggcgctcacctggagctgagcttagctaaggatcagggattatccatcatggtttctgggaaattggacgccgtcatgaaagctaggaaggacattgttgcccgactccagacccaagccagtgcaacagttgctatccccaaggagcatcacagattcgtcattggtaaaaacggcgaaaagctccaggatctggagcttaaaaccgcgacaaaaatccagatcccaaggcccgatgatccatcaaatcagatcaaaattactgggaccaaagagggtatcgagaaggccagacacgaggtgctgcttatctctgctgagcaggacaagcgcgcagttgaacggctggaagtggagaaggcttttcacccattcattgcgggaccgtacaatcgcctggtcggagagattatgcaggaaacaggcaccagaattaacatacccccaccatcagtgaacaggaccgagatcgtatttaccggggagaaggagcagttggcccaggccgtggcccgtatcaagaagatctacgaagaaaaggcaaattcgttcaccgtatcaagcgtggccgctccttcttggctgcacagattcattattggcaaaaagggccagaatctggcaaagattacccaacagatgccgaaagtgcacatcgaattcacagaaggagaggacaagattactctagaaggccctaccgaagatgtaaacgtggcccaagagcagatcgagggcatggtcaaggacctgatcaaccggatggattacgtggagatcaacattgaccataaattccacaggcatctcatcggcaagagcggcgcaaacatcaacaggataaaggaccagtataaagtctccgttagaattcctccagacagtgagaagagtaacctgattagaattgagggggaccctcagggcgtccagcaagccaaacgcgaacttcttgaattggcctctcgaatggagaacgaacgcaccaaagatctgataattgaacaaagattccacagaacaattattggccaaaagggagagcgtattagagagatccgagacaaatttccggaggtcattatcaacttcccagaccccgcacagaaatcggatatagttcaactccgcggaccgaagaacgaggttgaaaagtgtaccaagtacatgcaaaagatggttgctgacctggtagagaactcttattccatctcagtgccaatcttcaaacagttccacaagaacattatcgggaaaggcggagcaaacatcaagaagatcagagaagagagcaacaccaaaattgacctgccagccgaaaattcaaacagtgaaacgatcattattaccggtaaacgagctaactgcgaggcggcaaggtcccgcatcctgagcatccagaaagacctcgctaacattgcagaggtggaagtgtctattccagcaaaactgcacaattctttaattggaacgaaaggccgactgatccgcagcattatggaggaatgtggaggggttcatatccatttccctgtggagggttcaggctccgatacagtggtgattagagggccatcttctgatgttgaaaaagccaaaaaacagttgttgcatttggccgaggagaaacagaccaagtcatttaccgtggatatccgggcaaaaccagagtaccataaatttctcattggaaaaggaggaggtaaaatccggaaggtccgggattctactggcgcaagagttatttttccggcagccgaagataaagatcaggacctgattactatcatcgggaaggaagacgctgtgcgcgaggcacaaaaagaactggaggcgctcatccagaacctggataatgtggttgaggattccatgttggttgacccaaaacaccaccgacatttcgtaattcgacgcggtcaggttctcagggagatcgccgaagagtacgggggtgtgatggtttcattccccagaagtggtacccagagcgacaaggtgactctgaaaggggctaaggattgtgtggaggccgctaagaaaagaattcaagaaatcatcgaggatttggaggcacaagtgaccctcgaatgcgccatacctcagaaatttcatagatcagtgatgggtcccaagggttctcggatacagcagatcacgagggacttcagtgtacagatcaaatttcccgatagagaggagaatgcagtgcactcaacagagcccgtggtgcaagaaaatggcgatgaagctggtgaaggcagagaagcaaaagattgcgaccctggatcccccagacgttgtgacataatcattataagcggtcgcaaagagaagtgcgaggcagccaaggaagccctcgaagcactcgtaccagtgactatcgaggtggaggtccctttcgacctgcacagatatgtgatcggtcagaagggaagcgggattcgcaaaatgatggatgaatttgaggtgaacattcacgtgccggcacccgaactgcagagcgatataattgcaataaccggtctggcagcgaaccttgacagagcaaaagcaggtctgctcgagcgcgtcaaggagctccaggcggaacaagaagatcgtgcactgcgcagttttaaacttagcgtcacagttgatccgaagtaccatccaaagataataggcaggaagggggctgtgatcacgcagattcgtcttgagcacgacgtgaacatccagttccctgacaaagacgatggaaatcagccgcaggaccagattaccattactggatatgaaaaaaatactgaggccgctagggatgccatcctgcggattgtgggcgagcttgagcaaatggtgagtgaggatgtgcctctcgatcaccgtgtgcacgctcggatcattggggctcggggtaaggctatccgcaaaataatggacgaatttaaagtcgacatcaggttcccacagagcggagcacccgaccctaactgtgttaccgttacaggattgcccgaaaacgtggaagaggcaatcgaccacattcttaaccttgaagaagaatatctagcggacgtggtagacagcgaagctctccaggtctacatgaaacctccggctcacgaagaggccaaggccccaagtagaggctttgtcgtgagagatgcaccctggacagcctcgagttccgagaaggcaccagacatgtctagtagtgaggaattcccatcattcggcgcacaagtggctcctaagaccctgccctggggcccaaagcgttag

SEQ ID NO: 226037 - DNA, 666 bp, synthetic construct
  misc_feature 1..666: note = Description of Artificial Sequence: Synthetic coding sequence
  source 1..666: mol_type = other DNA
atgtccagtgtggccgtgctgactcaagaatccttcgctgaacaccgctccggcctggtgccccagcagattaaggtggcgacactgaacagtgaggaggaatccgatccacccacgtataaggacgccttcccgcctctgccggagaaggccgcttgcttagaatcagctcaggaaccgagcggcgcttgggggaacaagattagacccattaaggcatcagtaatcacgcaggtcttccacgtaccattagaagagagaaagtacaaagacatgaaccagttcggggagggagaacaggctaagatatgtttggagatcatgcaaaggaccggcgctcacctggaattgagcctggcgaaagatcaagggcttagcatcatggtgtcgggaaagctcgatgctgtcatgaaggcaagaaaggacatagtagcacgattgcagacacaggcctctgccacggtcgcgatccctaaagaacatcacagattcgttattgggaagaacggcgaaaaactgcaagatcttgaacttaagactgctacgaagattcaaattcccagaccagatgaccccagtaatcagattaaaatcacaggtacaaaagaagggattgaaaaggcacggcacgaggtgctactgatttccgcagagcaagataagtag

SEQ ID NO: 226038 - DNA, 426 bp, synthetic construct
  misc_feature 1..426: note = Description of Artificial Sequence: Synthetic coding sequence
  source 1..426: mol_type = other DNA
atgtcaagcgtggccgttttgactcaggaatcttttgccgaacatagatccgggttggtaccacaacagatcaaggtggctacactgaactccgaggaggagagcgatccacccacgtacaaagatgcttttcctccattgccagagaaagccgcatgtctcgagtccgctcaggaaccgagcggcgcatgggggaataagatccgcccaataaaggcatcggtcatcacacaggtctttcacgtgcccctggaggagaggaaatacaaggacatgaaccaattcggagaaggagagcaggcaaaaatttgtctggagattatgcagaggacaggagcccatctggaactcagcttggccaaagaccagggtctctcgatcatggtgagtggtaagctggatgctgttatgaaagcaagaaaatag

SEQ ID NO: 226039 - DNA, 381 bp, synthetic construct
  misc_feature 1..381: note = Description of Artificial Sequence: Synthetic coding sequence
  source 1..381: mol_type = other DNA
atgtcctcggtcgctgtgctgacccaggagagctttgcagagcaccgcagcggtctcgtcccccagcaaatcaaggttgctaccctgaatagtgaggaagagtccgaccctcccacttacaaggacgcctttcccccactgcccgaaaaagccgcttgtttggagtccgcccaggaacccagtggagcttgggggaacaaaattcgacccataaaagccagcgtgattacccaagtcttccacgtgcccctggaagagcgcaagtataaagacatgaatcagtttggcgaaggcgagcaggccaaaatatgcctggagataatgcaacgaacgggcgctcatctggagctgtctctggcgaaagatcagggcctgtcttag

SEQ ID NO: 226040 - DNA, 444 bp, synthetic construct
  misc_feature 1..444: note = Description of Artificial Sequence: Synthetic coding sequence
  source 1..444: mol_type = other DNA
atgagcagcgtggctgtgcttactcaggagtcatttgccgagcataggtctggcctcgtcccgcaacagataaaggttgcgactctgaacagcgaagaggagtcggacccgcctacttacaaggacgcctttccacctttgcctgaaaaggcagcatgtttggaatccgctcaggagccaagcggggcatggggcaacaaaatccgccctatcaaggcatccgtcatcacccaggtgttccatgtgcccctggaggaaaggaaatacaaggacatgaaccagttcggcgaaggcgaacaggccaaaatctgtctggagattatgcaaaggacgggagcccacctggagctcagtctggcgaaagatcaggggctgagcatcatggtctcggggaagctggacgccgtcatgaaggcaaggaaagatattgtagcaagactttag

SEQ ID NO: 226041 - DNA, 54 bp, synthetic construct
  misc_feature 1..54: note = Description of Artificial Sequence: Synthetic coding sequence
  source 1..54: mol_type = other DNA
atgtcttctgtagccgtattaactcaggagtcatttgccgagcaccgatcctag

SEQ ID NO: 226042 - DNA, 495 bp, synthetic construct
  misc_feature 1..495: note = Description of Artificial Sequence: Synthetic coding sequence
  source 1..495: mol_type = other DNA
atgtctagcgttgccgtgctcacccaggagtcgtttgcagaacataggagcgggctggtgcctcaacagatcaaggtcgccacactcaacagtgaagaggaatccgatcccccaacatataaagatgcgttccctccactcccggagaaagctgcatgccttgagagcgcccaggagcccagcggagcctgggggaataaaattcgacctattaaggccagtgtgatcacacaggtgttccatgtgcccctggaagaacgcaagtataaagatatgaatcagtttggagaaggagagcaggctaagatctgtctggagatcatgcagagaaccggcgcacatcttgagttaagtctagcaaaggatcaggggttgtccatcatggtttccggcaaactggatgcggtgatgaaagcacgtaaggacatcgtggccagactgcagactcaggcctctgctactgtcgccattccaaaggaacatcacagattttag

SEQ ID NO: 226043 - DNA, 144 bp, synthetic construct
  misc_feature 1..144: note = Description of Artificial Sequence: Synthetic coding sequence
  source 1..144: mol_type = other DNA
atgtcaagtgtggctgtgctgacacaggagagctttgcggagcacagatcagggcttgtgcctcagcagatcaaagtggcaaccctgaatagcgaagaggaaagcgacccacctacatataaggacgcttttcccccactatag

SEQ ID NO: 226044 - DNA, 1044 bp, synthetic construct
  misc_feature 1..1044: note = Description of Artificial Sequence: Synthetic coding sequence
  source 1..1044: mol_type = other DNA
atggagaacctgatgacctcctcaacgctgccccctctgtttgctgatgaagacggcagcaaagaatcaaacgacctggcaaccaccggactaaaccaccccgaggtcccttactcttcaggcgcaacttctagtaccaataatcccgaattcgtcgaggatctcagtcagggacagctgctgcagtccgagtcctctaacgcagctgagggcaacgagcaacggcacgaagatgaacagcggtccaaacggggaggctggagcaagggtaggaaacgcaagaagcctcttcgtgatagtaacgcccctaagtcgcccctgacaggttatgtgaggttcatgaatgagcgcagggagcagcttcgtgccaagcgccctgaagtccccttccctgagatcacacggatgctgggcaacgaatggtctaagctcccccctgaagaaaagcagcgatacctcgatgaggctgatagggataaggagcggtatatgaaggaactggagcagtatcaaaagacagaggcttataaggtgttctctcgcaaaacacaggataggcagaaggggaaatcacatagacaggatgccgctaggcaggcaacccatgaccacgagaaggagactgaagtgaaggagagatccgtgttcgatattccaatttttaccgaggaatttttgaatcacagcaaagccagggaagctgaactgagacagctccgaaagagtaacatggaatttgaggaaagaaacgcagctcttcagaagcacgtcgaaagcatgcgtaccgctgttgagaaactggaggtggacgttattcaggaacgctccagaaacactgtacttcaacagcaccttgaaacgctgagacaagttctgacttcctccttcgccagcatgcctttacctggctcgggagaaactcctaccgtggacacaatcgattcttacatgaatagacttcactccattatcttagccaatccccaggataacgaaaatttcattgctaccgtgagggaagtcgtcaatagattggaccggtag

SEQ ID NO: 226045 - DNA, 1044 bp, synthetic construct
  misc_feature 1..1044: note = Description of Artificial Sequence: Synthetic coding sequence
  source 1..1044: mol_type = other DNA
atggagaacctgatgacaagttccacattgcccccactgtttgccgatgaggatgggtccaaagaaagcaatgacctggctactactggtcttaatcaccccgaagtcccctattcatccggggctacgtcttcaaccaataaccccgagtttgtggaggatctttcccagggccagctgctgcagtccgaatcctccaatgctgcagagggcaacgagcagaggcacgaggacgaacagaggagtaaacgcggtggatggtccaaggggagaaaacgcaagaagcctctgcgcgattccaatgcaccaaagtcacccctgaccggttatgtcaggtttatgaatgagcgaagggagcagctacgcgcaaaacgccctgaggtgcccttccccgagattaccagaatgctgggtaacgagtggtccaaactgcccccagaagagaaacaacgatatctggatgaggctgaccgcgacaaagagcggtacatgaaagaactggagcagtaccaaaagaccgaagcctacaaagtgttctcccggaaaacccaggatagacagaaggggaagagtcaccgccaggacgctgctcgccaggctacccacgaccacgagaaggaaacagaagtgaaagagcgctctgtgtttgatatacccattttcactgaggagttcttaaaccactctaaggctcgtgaagccgaacttcgccagttgcggaaatccaacatggaatttgaggagcggaatgctgctctgcagaaacatgtggagagtatgcggacagccgtggagaagctcgaagtggacgtgatccaagaacgaagcagaaacacagtgctccagcagcacctggagaccttgagacaggtgctaactagctcctttgcatctatgccactccccggatccggggaaacgccaaccgtggacaccattgattcttatatgaatcggttgcattccataattttggccaacccacaagacaacgagaactttatcgccacagtgagagaagtggttaacaggctagaccgctag

SEQ ID NO: 226046 - DNA, 471 bp, synthetic construct
  misc_feature 1..471: note = Description of Artificial Sequence: Synthetic coding sequence
  source 1..471: mol_type = other DNA
atggaaaacctgatgactagcagcaccctccctcccctttttgccgacgaagatggatcgaaagaatctaacgatctcgctaccaccggattaaatcacccagaggtgccgtacagctccggtgcgaccagtagcaccaacaacccggaatttgtcgaggacctgtcgcagggacaattgctccagagcgaaagtagcaatgcagctgaaggcaacgaacagaggcatgaggacgagcaaagaagcaagcgcggtggctggtccaagggcaggaaaagaaaaaaacccctcagagactctaatgcacccaaatctcctctgacaggatacgtgaggtttatgaatgagcgtcgggagcagctccgggctaaaagaccagaggtcccgttccctgagattacccgcatgctcggcaatgagtggtcgaagcttcctcccgaggaaaagcaacgctacctcgacgaagcttag

SEQ ID NO: 226047 - DNA, 303 bp, synthetic construct
  misc_feature 1..303: note = Description of Artificial Sequence: Synthetic coding sequence
  source 1..303: mol_type = other DNA
atggagaatttaatgacgtcctctactctccctcccctctttgcggatgaggatggttccaaggagtctaacgatcttgccacaacgggactcaaccatccagaggtcccctactcctccggtgcgaccagctccacaaacaaccccgaattcgtggaagatctatcccaaggacaactgctgcagtctgaatcctcaaacgcagctgaaggaaacgagcaacgacacgaagacgaacagaggagcaagcggggaggatggagcaaaggtagaaagagaaagaagccactgagggacagctag

SEQ ID NO: 226048 - DNA, 489 bp, synthetic construct
  misc_feature 1..489: note = Description of Artificial Sequence: Synthetic coding sequence
  source 1..489: mol_type = other DNA
atggaaaatctgatgacatctagcacccttccccctctgttcgccgacgaggacggctccaaggagtcaaatgacttagcgacgactggtctgaatcatcccgaggtgccatatagcagcggcgcaaccagcagtacaaataatccggaattcgttgaagacctgtcacaaggccagctcctgcagagcgagagctccaacgcagccgaaggcaacgaacaacggcacgaagatgagcagcgcagcaagagaggtggctggtctaagggtagaaagcgtaagaaaccgctacgcgattcgaacgcgcctaagtccccgcttacgggctacgttcgattcatgaacgagaggcgggaacagcttcgcgctaagaggccagaagtacctttccctgagattacccggatgctgggcaatgagtggtctaagctcccacctgaggagaaacagagatacctcgacgaagcagatcgagacaaggagagatag

SEQ ID NO: 226049 - DNA, 954 bp, synthetic construct
  misc_feature 1..954: note = Description of Artificial Sequence: Synthetic coding sequence
  source 1..954: mol_type = other DNA
atgtcacacggtcccaaacagccaggggcagccgcagctccggcaggcggtaaggcacctggccaacacggaggattcgtagtcacagttaagcaagagcgaggcgaagggccacgcgctggagagaaaggctcgcacgaggaagaacctgtgaaaaagaggggctggccaaaaggaaaaaaaaggaaaaaaattttgccgaacggaccaaaagccccagtgactggttacgtgagattcctgaacgaacgacgcgagcagataaggacccggcaccccgatctccccttcccagaaatcaccaagatgcttggcgctgaatggagtaagctgcagccgactgagaaacagaggtacctggatgaggcagaacgggaaaagcagcagtacatgaaggagctgagagcttatcagcagtctgaagcttataaaatgtgcacagagaaaatccaggagaaaaagataaagaaggaggactctagctctggcctgatgaacacactgctgaacggccacaaaggcggtgattgcgacgggttttccacgtttgatgttcctatttttacagaggaattcctggatcagaataaggccagggaggccgagttacggcgattgagaaagatgaatgtggcatttgaagagcagaacgcagtgcttcagaggcacacccaaagcatgtcaagtgctcgagaacgcctagaacaggagctggcccttgaagaaagaaggaccctagcactccaacagcagttgcaggccgtgagacaggcactgacagcgagcttcgcgagtctgcctgtccccggaacaggcgaaactccgactctgggcaccctggatttctatatggctcgccttcacggagccattgaacgagatcctgctcagcacgaaaagctcatagttcggattaaggagatcctggcacaagtcgctagcgaacacctgtag

SEQ ID NO: 226050 - DNA, 807 bp, synthetic construct
  misc_feature 1..807: note = Description of Artificial Sequence: Synthetic coding sequence
  source 1..807: mol_type = other DNA
atggatacccgggttggcacagccatggcatcacccccatctatgttcccttcctcattgaaatctagttggaccaagaccaaaagggtgcgcaggtcattcggtgccgaggatgaatgtggattgcggggtgctgagaggggcacggctgaggcccatgcggaacatgaacagcgcgcaagggctagtggggctggtgctggagcagggggtgcagaggatgccggtgccgctgccgctgctccaggcagggctcccggagcccaccgccaattacgcctgaccgccggagctggccacggccgtaacgctcatgccggacatagcggcctgctgcacggccctgcaagcagatcacaccgggcaaggccacgcccagcaagggaagctcatcggccacatcagggaaatcctggacccggacgccagcgggctcctgtgagatccggacgcgcacatgacgcagaagaaaagctgtgggccaggccctgccatacacccccacggggtagagaggcaggcggacctccgggacccggacctatcctgcacctaggcggatcctccccccctaaaattaagttcctccagcatcccttctctttccaaagcccccagccgcctgagccaggtaaatctacgcgcgacacacctcggaggacgtcacaaccaagagtgcctctgttgggcggacaaacacgctacacagggtctccaggacatccccaggacactggacaaaccaaacccacccctagtacacgccaggacccaccgaactatagtctcaggggggcagtgccatag

SEQ ID NO: 226051 - DNA, 648 bp, synthetic construct
  misc_feature 1..648: note = Description of Artificial Sequence: Synthetic coding sequence
  source 1..648: mol_type = other DNA
atgtcccacgggccaaaacagcccggagccgctgccgctccagcaggcggaaaagcaccaggccagcatggcggttttgtggttaccgtcaagcaggagcgaggcgaaggacctcgagctggcgagaagggctctcacgaagaggagccagttaagaagcgcggatggcctaagggtaaaaaacgtaagaagatcctgcccaatggtcccaaggccccagtgaccggctatgttagatttttgaacgagcgcagagagcaaatccgcactcgtcatcctgacctaccctttccggagataacaaaaatgctcggggcagagtggtctaagctgcagcccactgaaaagcaacgttatctggacgaggcagaacgcgagaagcagcagtatatgaaggagttgagagcctaccaacagagcgaagcctataagatgtgtacagaaaagatccaagaaaagaaaatcaagaaagaggatagttcttcagggctgatgaatacgctcctgaatggccataaaggcggagattgcgacggattcagtactttcgacgtccctatctttactgaagagtttctggatcagaataaagctagagaggcggagctgagaagattgcggaaaatgaacgttgcttttgaggagtag

SEQ ID NO: 226052 - DNA, 429 bp, synthetic construct
  misc_feature 1..429: note = Description of Artificial Sequence: Synthetic coding sequence
  source 1..429: mol_type = other DNA
atgtcacatggtcccaaacagcctggggcagcggctgcccctgcaggcggaaaagcgccagggcaacacggaggctttgttgtaaccgtgaagcaggagagaggtgaaggacccagggccggagagaaaggcagtcacgaagaggagcccgtgaagaagcgtggctggcctaaagggaaaaagaggaagaaaattctccctaatggcccaaaggcccctgtaaccggttacgttcgcttcctcaacgaaaggcgcgaacagatcaggactcgtcatcctgatctcccattcccagagatcaccaagatgctcggggcagagtggtccaaactgcaacctaccgaaaagcagagatacctcgacgaggccgagagagaaaaacaacaatatatgaaggagctccgcgcttaccagcagagtgaggcttag

SEQ ID NO: 226053 - DNA, 324 bp, synthetic construct
  misc_feature 1..324: note = Description of Artificial Sequence: Synthetic coding sequence
  source 1..324: mol_type = other DNA
atgtccgaatctagtagtaaatcttcccagccccttgccagtaagcaggagaaagacggtaccgagaagcggggtcgcggtagacctagaaaacagcctccagtctcgccaggcacagctctggtgggctctcagaaagaaccttcagaagtgccaaccccaaagaggccacgtgggaggcccaaaggaagcaagaacaagggcgctgccaaaacaagaaaaaccacaacaaccccgggacgcaagcctcgaggccgtcccaagaagctggaaaaagaagaggaggaaggtattagccaggaaagcagcgaggaggaacagtag

SEQ ID NO: 226054 - DNA, 291 bp, synthetic construct
  misc_feature 1..291: note = Description of Artificial Sequence: Synthetic coding sequence
  source 1..291: mol_type = other DNA
atgtctgagagcagtagcaagtccagccagcccctagcttcaaagcaagaaaaggacggaacagagaagcgtggcagaggcaggcctcggaaacagcccccaaaggagccgtcagaggtgccaacgcccaagagaccacgcggtagacctaaggggagtaaaaacaagggcgcagcaaagacaaggaaaaccacgacaactcccggacggaaaccccgtggtcgccctaagaaactcgaaaaggaagaggaagagggtatatctcaggagagcagcgaggaagaacagtag

SEQ ID NO: 226055 - DNA, 291 bp, synthetic construct
  misc_feature 1..291: note = Description of Artificial Sequence: Synthetic coding sequence
  source 1..291: mol_type = other DNA
atgtctgagagttcgagcaagtcctctcaaccgctggctagcaaacaggagaaggacggaaccgaaaagagaggtagaggcagacctagaaagcaacctcccaaggagccttccgaagttcctacacccaagcggccaaggggccgtcctaaggggagcaaaaataagggcgctgccaagacccgtaagaccacaactacacccggacgcaagcctcggggaagacccaaaaaattggagaaagaggaggaggagggtatttctcaggagagctcagaagaagagcagtag

SEQ ID NO: 226056 - DNA, 324 bp, synthetic construct
  misc_feature 1..324: note = Description of Artificial Sequence: Synthetic coding sequence
  source 1..324: mol_type = other DNA
atgtcagaaagcagcagcaagtcttctcaaccactggcctcgaagcaagagaaagacggtacagagaagcgtggtcggggtaggcccagaaaacagccgccagtgagtcctggcaccgcattggtgggctcccagaaggaaccatccgaagtgcccacaccaaagcggccaaggggaaggcccaaaggcagtaaaaataaaggcgcagcaaaaacccgaaagacaaccacaacgcctgggaggaagccgagaggacggccaaaaaagttagagaaggaagaggaagaagggatttctcaagagtctagtgaggaagaacagtag

SEQ ID NO: 226057 - DNA, 291 bp, synthetic construct
  misc_feature 1..291: note = Description of Artificial Sequence: Synthetic coding sequence
  source 1..291: mol_type = other DNA
atgtctgaaagtagttcaaagtcttctcaacctctggcctcaaagcaggaaaaggatggcaccgagaaaagggggaggggaagacctcgcaagcagccccctaaggagcctagcgaggtacctacccctaaacggcctcgagggaggcccaagggaagtaagaataaaggagctgctaagacgcggaaaacgaccacgactccaggacggaagcccaggggcaggcctaaaaagctcgaaaaggaggaagaagagggcatcagtcaggagtcgtctgaggaggagcagtag

SEQ ID NO: 226058 - DNA, 987 bp, synthetic construct
  misc_feature 1..987: note = Description of Artificial Sequence: Synthetic coding sequence
  source 1..987: mol_type = other DNA
atgtcggagagcagttcaaaaagttcccaacccctggcatcaaagcaagagaaagacggcactgaaaaacgcggtcgtggccgacccagaaagcagcccccagtgagcccgggaactgcgttagttggaagccagaaagagccctccgaagttcccacacctaaacgccctcgcggacgcccaaaggggagcaaaaacaaaggtgaaggaggtcgagggggtcatctagccggagtattaggaggtggagcggttacacacgcctgccgtctcctcttaacaggcggagccgctagcttctgggactggaccgctctgttgaggtctcaccgccctcatccctttccacggccaacgatcactaccgcctctggccgtcatccccatctaccacccgttccctcccctcctcactatacagcccaccagcctttgcagggtagccatgggttgtcaggcgagcagttttccccaggactgagctcccagcttccacccccaactcacgcttatacccatgcccttctagataaggctaacattcccctctcgagaacgctgcaccttcttcgcccacattccctcgggggaggagatatcgcattgtgggcatttgggttaggtgccccttcactcttgctgcattgcagcttgtggctgccaatcgttggcccaggcagagtgcccctggcccttaaaggtgctcaggccccttctcacccaggaactccctactcgactgcgctggccgctgccggagtggccaatggcggaggatgttggcctcctggcttcccacagcccaattgtctgtgtcaccacgtcggcttaacttttcatcccagcccgacctcccttgtgccagtgctcggctggacagccccttttggctatcgtaaagctggcggagtaagccccctgcttccattgcactgtgggcactccccgttggccctccggctaggctccgagtacattctgtggtag

SEQ ID NO: 226059 - DNA, 291 bp, synthetic construct
  misc_feature 1..291: note = Description of Artificial Sequence: Synthetic coding sequence
  source 1..291: mol_type = other DNA
atgtccgagtcctcctccaaatctagccagcctctggcctccaaacaggagaaagatggaacagagaaaagaggcagaggaaggcctcggaagcagccacctaaggagcctagcgaggtcccgacccctaagagaccccgagggaggccgaaggggtcaaagaacaaaggggctgcaaagacccgtaaaactacgaccacccccggaagaaagcctcgcggtagaccaaagaagttagaaaaggaagaagaggaggggatctcccaggaatcaagcgaggaagaacaatag

SEQ ID NO: 226060 - DNA, 324 bp, synthetic construct
  misc_feature 1..324: note = Description of Artificial Sequence: Synthetic coding sequence
  source 1..324: mol_type = other DNA
atgagtgagtcttcgtctaagagcagccagcctctggcttcaaaacaggagaaagacggcaccgagaagaggggacggggtaggcctcgcaaacagcctccagtgtctcccggtacggcactggtcgggtcccagaaggagccttccgaagtgccaacccccaagcgcccacggggacgacccaaaggatctaagaacaagggcgcagcaaagactcgtaaaacgaccaccacacctgggaggaagccccgaggaaggccgaaaaagctggaaaaggaggaggaagagggcatctcgcaggaatcgtcagaagaggaacagtag

SEQ ID NO: 226061 - DNA, 321 bp, synthetic construct
  misc_feature 1..321: note = Description of Artificial Sequence: Synthetic coding sequence
  source 1..321: mol_type = other DNA
atgtccgcaaggggagagggcgcaggacagccctcaacttctgcccagggccagcccgctgcccctgcgccacagaaaagggggcgtggaaggccacggaagcaacaacaggagccgacaggcgagccctcaccgaagcgccctcggggaagaccaaagggcagcaagaataagtccccttcgaaggccgcacagaagaaggcagaggctacgggcgaaaaacgtccccgtggacggcctcggaagtgggacaacctgctgcctaggaccagcagcaaaaagaaaactagcctgggcaactcgactaaacggagccattag

SEQ ID NO: 226062 - DNA, 357 bp, synthetic construct
  misc_feature 1..357: note = Description of Artificial Sequence: Synthetic coding sequence
  source 1..357: mol_type = other DNA
atgagcgcgagaggggaaggcgctgggcagccttccacatcagctcagggacaacctgccgcacccgcacctcagaagcgcggaagaggcagacctcgcaaacaacagcaggaaccgacaggcgagccgtctccaaagcgcccaagaggacggcctaaagggagtaagaacaagtccccatctaaagctgcgcaaaagaaggcagaagctacaggagagaagcgtccacgaggtcggcctcgaaaatggccccagcaggtggtgcagaagaagccagctcaggtcaacgttgcgctacccggtaaagaccatcctggaaatctgatatatctactgttctccaagaatgcgacttag

SEQ ID NO: 226063 - DNA, 273 bp, synthetic construct
  misc_feature 1..273: note = Description of Artificial Sequence: Synthetic coding sequence
  source 1..273: mol_type = other DNA
atgtcagccagaggagaaggcgctggccagccctccacctctgcgcagggccaacccgcagccccagccccacagaagcgaggcagaggacgtcctagaaagcagcagcaggaacctaccggcgaaccaagccccaaaagacccagaggcaggcctaaggggagcaagaataagtctccttctaaggcagcacaaaagaaagcggaggctacaggggagaaacggcctagaggacgcccacggaaatgggaggagttttatatcgcggcttag

SEQ ID NO: 226064 - DNA, 330 bp, synthetic construct
  misc_feature 1..330: note = Description of Artificial Sequence: Synthetic coding sequence
  source 1..330: mol_type = other DNA
atgagcgcaaggggcgagggtgcaggacaaccctctaccagcgcccaaggccagcctgccgcacctgctcctcagaaacgtggcagaggcaggcccaggaagcagcaacaggagcccaccggtgaacctagccctaagcgcccacgaggcaggcccaaggggagcaaaaacaagagccccagcaaggcagcacagaagaaggccgaagcaaccggagaaaagagaccgagaggcagaccaaggaagtggccccagcaagtggttcagaaaaagcctgcacaggaggagactgaggagacatcctctcaggagtcggccgaagaagactag

SEQ ID NO: 226065 - DNA, 279 bp, synthetic construct
  misc_feature 1..279: note = Description of Artificial Sequence: Synthetic coding sequence
  source 1..279: mol_type = other DNA
atgtctgcgaggggggagggagcagggcaaccaagcactagcgcccagggtcagcccgctgctcccgctccccaaaagcggggtagaggacggccacggaagcagcaacaggagcccaccggagagccctctcctaagcggcctcgagggaggccaaagggatccaagaacaagagtccttctaaggcagcccagaaaaaggcggaagctactggggagaagaggcctcggggacggccacggaaatggtggctgctgatgaagagtccatgttggtag

SEQ ID NO: 226066 - DNA, 312 bp, synthetic construct
  misc_feature 1..312: note = Description of Artificial Sequence: Synthetic coding sequence
  source 1..312: mol_type = other DNA
atgtctgccaggggggagggcgctggacagccctccacttcagctcaggggcaacctgccgctcccgctccccagaaaaggggacgcggacgccctcggaagcagcagcaagagcccacaggagaacccagtcctaaacggccacggggaaggcccaagggcagcaaaaataagtccccttctaaggcagcacaaaaaaaagccgaggctacaggtgagaagaggcctaggggcaggccacgaaagtggcttcgggctcaagcactcgatagtgatggcctcggctctaactccggtcctagtctgagttag

SEQ ID NO: 226067 - DNA, 261 bp, synthetic construct
  misc_feature 1..261: note = Description of Artificial Sequence: Synthetic coding sequence
  source 1..261: mol_type = other DNA
atgagcgctcgcggtgaaggtgcaggccagcccagcacatcagctcagggacagccagctgccccagctccacaaaaaaggggtcgcggaaggccccgtaagcaacagcaggagccaactggcgagcccagccccaagcggccacggggacgcccaaaagggagcaaaaacaagtctcctagcaaagctgcccagaagaaggcagaagcgaccggtgagaagcggcctcgcggacgacccaggaagtggctgcagaattag

SEQ ID NO: 226068 - DNA, 300 bp, synthetic construct
  misc_feature 1..300: note = Description of Artificial Sequence: Synthetic coding sequence
  source 1..300: mol_type = other DNA
atgagcgctagaggggaaggagctgggcagccttctacaagcgcgcagggccagccagctgcacctgcccctcagaaaagaggcagaggtcgtccacgcaaacagcaacaggagcccaccggcgagccgtcccccaaacggccaaggggaaggcccaagggaagtaagaataaatccccttcaaaggccgcacaaaagaaggcagaagccactggggagaaaagacccaggggcaggcctagaaagtggccgcagcaggtcgtgcagaagaagcccgcacaggtgcggcactcacattag

SEQ ID NO: 226069 - DNA, 477 bp, synthetic construct
  misc_feature 1..477: note = Description of Artificial Sequence: Synthetic coding sequence
  source 1..477: mol_type = other DNA
atgggcaagggtgatcctaaaaaacccaggggtaagatgtccagttatgcattttttgtgcagacctgcagggaggagcataaaaagaagcaccctgatgcctcggtgaattttagcgagttctcaaagaagtgctcagaacgatggaaaacaatgagcgcaaaagaaaagggcaaatttgaagacatggccaaggctgacaaggcccgttatgaaagggaaatgaagacctatattccgcctaaaggcgaaacaaagaaaaaattcaaggaccctaatgccccaaagagaccgccttcagcgttttttcttttctgttcagaataccggcctaagattaagggcgagcacccaggcctgagcatcggggacgtggcgaaaaagctcggggagatgtggaacaataccgccgctgacgacaagcagccgtatgaaaaaaaagccgctaagcttaaggaaaagtacgagaagttttag

SEQ ID NO: 226070 - DNA, 648 bp, synthetic construct
  misc_feature 1..648: note = Description of Artificial Sequence: Synthetic coding sequence
  source 1..648: mol_type = other DNA
atgggaaaaggggacccaaaaaaaccccgagggaagatgtcaagttatgcattttttgtacagacgtgtagggaagaacacaaaaagaagcaccccgacgcctcagtgaacttttccgaattttctaagaagtgcagcgaaaggtggaagacaatgtcggctaaagaaaaaggaaagtttgaggatatggccaaggccgacaaagcccgttacgagagggaaatgaaaacgtatatcccccctaagggcgaaactaaaaagaaatttaaagatcccaacgcccctaaaagacctccctcagctttcttcttgttctgttcggaatatcgcccaaaaatcaaaggagagcatcctgggcttagcattggtgatgtggctaagaaactcggggagatgtggaataacaccgctgccgacgacaaacaaccctacgaaaagaaggcggcaaaacttaaggagaaatacgaaaaagatatagccgcttatagggctaagggcaagccagatgccgctaagaagggggttgtgaaggctgagaaaagtaaaaaaaagaaagaagaggaggaggatgaagaagacgaagaagatgaagaagaggaggaagacgaggaagacgaggacgaagaggaagacgatgacgatgagtag

SEQ ID NO: 226071 - DNA, 648 bp, synthetic construct
  misc_feature 1..648: note = Description of Artificial Sequence: Synthetic coding sequence
  source 1..648: mol_type = other DNA
atgggaaagggagaccccaagaaaccgagaggcaagatgtcttcctatgcattcttcgtgcagacctgccgcgaggagcacaagaagaagcaccctgatgcttctgtcaacttttccgagttcagcaaaaaatgttccgagaggtggaagacaatgtcagctaaggagaaaggaaaatttgaggacatggccaaggctgataaggccaggtacgagcgggaaatgaaaacctacattcctcccaaaggtgaaaccaaaaagaaattcaaagatcccaatgcgcctaagagaccaccatccgcctttttcttgttctgttccgaatatcggcctaaaataaagggagagcatcctggccttagtatcggggacgtcgcaaagaagcttggggagatgtggaacaatactgccgcagacgataagcaaccatatgagaaaaaggcggcaaaactcaaggaaaagtatgaaaaagacatcgctgcatacagagccaaggggaaacccgatgccgcaaagaagggtgtggtgaaagccgagaagtcaaaaaagaagaaagaggaggaagaagatgaagaagatgaagaggacgaggaggaggaagaggatgaggaggatgaggacgaggaggaggacgacgacgatgagtag

SEQ ID NO: 226072 - DNA, 294 bp, synthetic construct
  misc_feature 1..294: note = Description of Artificial Sequence: Synthetic coding sequence
  source 1..294: mol_type = other DNA
atgggaaagggcgatcctaaaaagcccagggggaagatgagcagctacgcatttttcgtacagacctgccgtgaggaacataaaaagaagcacccggatgcctccgttaatttctccgaattttcaaaaaaatgtagcgagagatggaaaaccatgtcagcaaaagagaagggtaagtttgaagacatggccaaggccgataaagcaagatatgaacgtgagatgaaaacatacatcccccctaaaggtgagaccaagaaaaagtttaaagatcccaacgccccaaaacgatag

SEQ ID NO: 226073 - DNA, 477 bp, synthetic construct
  misc_feature 1..477: note = Description of Artificial Sequence: Synthetic coding sequence
  source 1..477: mol_type = other DNA
atgggcaagggcgaccctaagaaacccaggggaaagatgagtagctacgctttttttgtgcaaacctgtagggaggagcacaagaagaagcaccctgacgcctcagtcaacttttcagaattcagcaagaaatgctccgaaagatggaaaaccatgagcgcaaaggaaaagggcaagtttgaggacatggccaaggcggataaagccaggtatgaaagggagatgaaaacctatatccctccgaagggggaaactaagaagaaatttaaggatccaaatgccccaaagagaccaccaagcgccttctttcttttttgttcggaataccgcccaaaaatcaaaggagagcacccagggttaagcattggtgatgtcgctaagaaactcggcgaaatgtggaacaacacagctgctgacgacaaacagccctatgaaaagaaagctgccaagctgaaagaaaagtatgaaaagttttag

SEQ ID NO: 226074 - DNA, 648 bp, synthetic construct
  misc_feature 1..648: note = Description of Artificial Sequence: Synthetic coding sequence
  source 1..648: mol_type = other DNA
atgggtaagggggacccaaagaaaccgagaggcaagatgtccagctacgccttcttcgttcagacatgtagggaagaacacaaaaaaaagcaccctgatgccagtgtgaatttcagcgagttctctaagaaatgctctgagagatggaaaactatgtccgccaaggaaaaagggaaatttgaagacatggctaaagcagataaagcacggtatgagcgagagatgaaaacgtatatacctcccaaaggggagacgaagaagaaattcaaggatcccaatgccccaaaacgacccccttccgcctttttcctgttctgttccgaataccggcctaagatcaaaggggaacatcccggactgtctatcggggatgttgccaaaaagctgggggaaatgtggaataatacggccgctgatgataagcagccatacgaaaagaaagctgcaaagctgaaagagaagtacgagaaggatatcgctgcatatcgcgctaaaggcaagccggatgcggctaagaagggggtggtcaaggcggaaaagtccaaaaaaaagaaagaggaggaggaagatgaagaagatgaggaggatgaagaagaggaggaggacgaggaagacgaggatgaggaggaagacgatgatgatgagtag

SEQ ID NO: 226075 - DNA, 648 bp, synthetic construct
  misc_feature 1..648: note = Description of Artificial Sequence: Synthetic coding sequence
  source 1..648: mol_type = other DNA
atgggcaaaggcgatccgaagaaaccccgtgggaaaatgagttcctacgcttttttcgtccagacatgtcgcgaagagcataagaaaaaacacccagatgcctctgtcaatttctccgagttctcaaaaaaatgcagtgagaggtggaagaccatgtctgccaaagagaaggggaaatttgaggatatggccaaagccgacaaggctcggtacgagcgcgagatgaagacctacatcccccctaaaggcgaaacaaagaaaaaattcaaggacccaaatgcacctaaaaggcccccttctgcgttctttctcttctgttctgaatacaggcctaaaatcaaaggcgaacatcccggtctgagcatcggggatgtcgcaaaaaagctaggagaaatgtggaacaacaccgctgctgacgataaacaaccgtatgagaagaaagctgccaagttgaaagaaaagtacgaaaaggatattgcagcataccgcgctaagggcaagcccgacgccgcaaaaaaaggggtcgtgaaggctgagaagtccaagaagaaaaaagaagaggaagaggacgaagaggatgaagaagatgaagaggaagaagaagatgaagaagacgaagacgaagaggaggatgacgatgacgagtag

SEQ ID NO: 226076 - DNA, 489 bp, synthetic construct
  misc_feature 1..489: note = Description of Artificial Sequence: Synthetic coding sequence
  source 1..489: mol_type = other DNA
atgggcaagggcgaccctaaaaaacccagaggaaaaatgagcagctatgcctttttcgtccagacatgtcgtgaggagcataaaaagaaacatcctgatgccagcgtaaatttcagcgaattcagcaaaaagtgttccgaacggtggaaaacgatgagcgctaaggagaagggcaagtttgaagacatggcaaaagctgataaagctcgctatgagcgggagatgaagacttacattccccctaaaggcgaaacaaaaaaaaagtttaaggatccaaatgcaccaaagaggcctccctccgcattttttttgttctgctccgaataccgccctaagataaagggggagcaccccggtttgagcatcggcgatgtcgctaagaagctcggagagatgtggaacaacactgctgcagacgataagcaaccttatgagaaaattctcctccacatagaactgaaggaaagcctgatgcagcagaagcggtag

SEQ ID NO: 226077 - DNA, 630 bp, synthetic construct
  misc_feature 1..630: note = Description of Artificial Sequence: Synthetic coding sequence
  source 1..630: mol_type = other DNA
atggggaagggtgatccgaacaagccacggggaaaaatgtctagttacgcgttctttgtgcagacttgtagagaggagcacaaaaagaaacaccctgattcctcagttaattttgctgagtttagcaaaaagtgcagcgaaaggtggaagaccatgtcagctaaagaaaaatctaagttcgaggatatggccaagagtgataaagctcgctatgatagggaaatgaaaaactacgttcctcctaagggagataagaaaggcaagaaaaaggaccctaacgctcccaaacgccctccttcagcatttttcttattctgctcagagcacagaccaaagattaagagtgagcaccctggcttgtctattggagacacagcaaagaaattaggcgaaatgtggagtgagcagagcgccaaagataaacagccgtatgaacagaaagccgctaagctgaaagagaaatacgaaaaagacatagccgcatacagggcaaagggcaagtctgaagctggaaaaaaaggcccaggaagaccgaccggatctaagaagaaaaatgagcccgaggatgaggaagaggaggaggaagaagaagacgaggacgaggaggaagaagacgaggatgaagagtag

SEQ ID NO: 226078 - DNA, 630 bp, synthetic construct
  misc_feature 1..630: note = Description of Artificial Sequence: Synthetic coding sequence
  source 1..630: mol_type = other DNA
atgggcaagggggatcccaacaagccacggggaaaaatgtcctcatacgctttttttgtgcagacctgcagggaagaacataagaagaaacacccagactcttccgtcaattttgctgagttctcaaagaaatgcagtgagaggtggaagactatgagcgctaaggaaaagtctaagttcgaggacatggctaagtcggataaagcacgttacgaccgggagatgaaaaactatgtgccgccaaagggagataagaagggtaagaaaaaggaccctaacgctcccaaacggcctccttccgctttctttctcttttgcagcgagcaccgccctaaaattaagagcgagcaccctgggctgtctataggggatacagctaaaaagctaggagaaatgtggtccgagcagtccgctaaagataagcagccttatgagcagaaggccgctaaactgaaagaaaagtacgagaaggacattgctgcctacagggccaagggtaagagtgaagcaggaaagaaagggccagggcgtccgaccggcagcaaaaagaagaatgaaccagaagatgaagaagaagaggaggaagaggaagatgaagacgaggaagaggaggacgaggatgaagaatag

SEQ ID NO: 226079 - DNA, 630 bp, synthetic construct
  misc_feature 1..630: note = Description of Artificial Sequence: Synthetic coding sequence
  source 1..630: mol_type = other DNA
atgggtaagggagatcccaacaagccaaggggtaagatgagtagctatgcctttttcgttcaaacctgcagggaggagcacaagaagaaacaccccgatagtagcgtgaactttgcagagttcagtaagaagtgcagcgaacgctggaagacaatgtccgcgaaggagaagagcaaattcgaggacatggcgaagtccgacaaggcgaggtacgatcgagaaatgaagaactatgtgcctcccaaaggcgataaaaagggaaagaagaaagacccaaatgcacccaaacggccaccaagtgccttctttctcttttgctctgaacacaggcccaagattaagagtgagcatccaggtctgagcatcggtgatactgccaagaaactcggggagatgtggtccgagcaaagcgcaaaggacaagcagccttacgagcagaaagcagcgaaactcaaagagaaatacgaaaaagatatcgctgcctatcgcgcaaaaggcaaaagcgaggcgggaaaaaagggcccaggtcgacccactggctccaaaaaaaaaaacgagccggaggacgaggaggaagaagaagaagaggaggatgaagacgaagaggaagaggacgaagacgaggaatag

SEQ ID NO: 226080 - DNA, 405 bp, synthetic construct
  misc_feature 1..405: note = Description of Artificial Sequence: Synthetic coding sequence
  source 1..405: mol_type = other DNA
atgggaaaaggtgacccaaataagccgagagggaaaatgagttcctacgcattttttgtgcagacctgtcgtgaagaacacaaaaaaaagcatcccgattcgagcgtgaactttgctgagttttcaaaaaagtgctctgaaagatggaagactatgtccgcaaaggaaaagtctaagttcgaagatatggccaagtccgataaggctaggtacgacagagaaatgaagaattatgtaccgccaaaaggggataagaaagggaagaaaaaggacccaaatgctcccaaaaggcctcccagcgccttctttctcttctgctccgagcatcgcccaaaaatcaagtccgaacaccccggattgtcaattggagacacagctaaaaaactaggagaaatgtggagttag

SEQ ID NO: 226081 - DNA, 603 bp, synthetic construct
  misc_feature 1..603: note = Description of Artificial Sequence: Synthetic coding sequence
  source 1..603: mol_type = other DNA
atggctaaaggcgatccgaagaaaccaaagggtaaaatgagtgcctatgcattctttgttcagacgtgcagggaagaacacaagaagaaaaaccccgaagtaccggtaaattttgccgagttcagcaagaagtgttccgaaagatggaagactatgagcggcaaggaaaagagtaagtttgatgagatggctaaagcagacaaagtgcgctacgatagggaaatgaaagattatggcccagccaagggtggtaagaaaaaaaaagatccaaatgcaccaaagaggcccccttctggttttttccttttttgctcagaatttaggcctaaaattaaaagtacgaaccccggaatttcaataggcgacgttgcaaaaaagctcggtgaaatgtggaacaatctgaatgattccgaaaagcaaccctacataaccaaagccgcaaaactcaaggaaaagtacgaaaaggatgttgcagactataagtccaagggcaagtttgacggcgctaaaggaccagccaaggtggcccgaaaaaaagtggaagaggaggacgaggaggaagaggaagaggaggaggaggaggaggaggaggaggacgaatag

SEQ ID NO: 226082 - DNA, 567 bp, synthetic construct
  misc_feature 1..567: note = Description of Artificial Sequence: Synthetic coding sequence
  source 1..567: mol_type = other DNA
atggcaaagggtgaccccaaaaagccaaaagggaagatgtcagcctatgccttctttgtgcagacctgcagagaggagcataagaagaaaaacccggaagtccccgtgaacttcgctgaatttagtaagaagtgttcggaacggtggaaaaccatgtcggggaaagaaaagtctaaattcgatgagatggcaaaggccgacaaagttcgttatgatagggagatgaaagattacggcccagctaaaggcggaaaaaagaaaaaggatccgaacgctcctaagcgcccaccttctggtttttttctgttttgcagcgagtttcgaccaaagatcaaatcaaccaacccaggaatctccatcggcgatgtggccaaaaaactcggtgagatgtggaacaatctgaatgattctgagaagcagccttacatcacgaaagccgcaaaactgaaggagaagtacgaaaaagacgttgctgattataaaagtaagggcaagtttgacggggctaaaggaccagccaaggtggcccgaaaaaaagtcgaggaagaggatgaggaggaggaatag

SEQ ID NO: 226083 - DNA, 462 bp, synthetic construct
  misc_feature 1..462: note = Description of Artificial Sequence: Synthetic coding sequence
  source 1..462: mol_type = other DNA
atggcgaagggcgaccctaagaaacccaaaggcaaaatgtctgcgtacgcatttttcgtgcagacctgccgtgaggaacataaaaagaagaaccccgaagtccccgtgaacttcgcagaattttccaaaaagtgttctgaacggtggaagaccatgtccggcaaggaaaagagcaaattcgatgagatggccaaagctgacaaggtgcgctacgatagagaaatgaaggattacggcccagcaaaaggcggaaagaaaaagaaagacccaaatgcccctaaaagaccacccagcgggttctttctcttttgctctgagtttagacccaagataaagagcaccaacccaggcatctccattggcgatgtcgcaaagaaactcggggagatgtggaataaccttaacgattcagagaagcagccatatattacaaaagcagccaagctgaaggagaagtactag

SEQ ID NO: 226084 - DNA, 603 bp, synthetic construct
  misc_feature 1..603: note = Description of Artificial Sequence: Synthetic coding sequence
  source 1..603: mol_type = other DNA
atggcaaaaggtgacccaaagaagcccaaggggaaaatgtccgcatatgcattcttcgttcaaacctgtcgggaggagcacaaaaaaaaaaatcctgaggtgcctgtgaattttgctgaattttcgaaaaaatgcagtgagcgctggaaaaccatgtcaggtaaggaaaagagcaaattcgacgagatggccaaggccgacaaagtgcgctatgacagagagatgaaagactacggccctgccaaggggggtaaaaaaaaaaaggatccaaacgcccctaagcggcctccctctgggttttttctgttttgctctgagttccgacctaagatcaagtccacgaacccaggcatctcaattggcgacgtcgccaaaaaactgggggaaatgtggaataatttgaatgattccgaaaagcagccttacatcacaaaggccgctaaactcaaagagaagtatgagaaggacgtcgctgactataagtctaagggtaagttcgatggggcaaaaggtcccgctaaagtggccagaaaaaaggtcgaggaagaagacgaggaggaggaagaagaggaagaggaggaagaggaagaggaagatgagtag

SEQ ID NO: 226085 - DNA, 582 bp, synthetic construct
  misc_feature 1..582: note = Description of Artificial Sequence: Synthetic coding sequence
  source 1..582: mol_type = other DNA
atggccaagggcgaccccaagaagcccaaaggcaaaatgtctgcgtacgccttttttgtccagacctgccgtgaggagcataagaagaaaaaccccgaggtgccagttaacttcgccgaattttccaagaaatgttccgagcggtggaaaacaatgtcgggcaaagagaagagcaagttcgatgagatggccaaggcggataaggtgcgatacgacagggagatgaaggattacggtcccgcaaagggtggcaagaagaagaaggatcccaatgctccgaaacggcctccctcgggattttttcttttctgctccgagttccgccctaaaatcaagtctaccaaccccggtatatcaatcggcgatgtcgctaaaaagctgggtgagatgtggaataatctgaacgatagtgagaaacaaccttacattactaaggctgcaaagctcaaggagaagtacgagaaggatgtggccgactacaagtcaaaggggaagtttgacggggcaaagggccctgcaaaggtggcaaggaagaaggtggaagaggaggatgaagaagaggaggaagaggaggaggaatag

SEQ ID NO: 226086 - DNA, 273 bp, synthetic construct
  misc_feature 1..273: note = Description of Artificial Sequence: Synthetic coding sequence
  source 1..273: mol_type = other DNA
atgccaaagcgtaaggcggagggcgacgctaaaggagacaaggccaaagtcaaggatgaacctcagaggagaagcgccaggctgtccgctaaacccgctccaccaaagccagaaccgaagcctaaaaaggcgccagccaagaagggcgagaaagtgccaaaggggaaaaagggcaaagcggatgcgggaaaggagggcaacaacccagcagagaatggtgatgccaaaacagatcaggcccagaaggccgaaggcgctggcgatgctaagtag

SEQ ID NO: 226087 - DNA, 234 bp, synthetic construct
  misc_feature 1..234: note = Description of Artificial Sequence: Synthetic coding sequence
  source 1..234: mol_type = other DNA
atgccaaagcggaaatcacctgaaaacacagaaggcaaagatggatctaaggtgacaaagcaggaacccacccggagaagtgctcgcctgtcagcgaagcctgcaccaccaaagcctgaacccaagccacggaagacttcggcaaagaaggaacccggtgctaagattagtagaggcgctaagggaaagaaagaagagaagcaggaagccggtaaagagggtacagagaattag

SEQ ID NO: 226088 - DNA, 300 bp, synthetic construct
  misc_feature 1..300: note = Description of Artificial Sequence: Synthetic coding sequence
  source 1..300: mol_type = other DNA
atgcctaaacgcaaatcccccgagaacacggagggtaaagacggttccaaagtcaccaagcaggaaccgacacgccgttcggcaaggctgtccgcaaaacctgctcccccaaaacctgagcccaagccacgcaagacatccgccaaaaaagaaccaggggctaagatttctcgaggtgcgaagggaaagaaagaagaaaaacaggaagccggaaaggaaggaactgcccctagtgagaatggcgagaccaaggccgaggaggcgcagaaaactgaatcagtggataatgaaggggagtag

SEQ ID NO: 226089 - DNA, 507 bp, synthetic construct
  misc_feature 1..507: note = Description of Artificial Sequence: Synthetic coding sequence
  source 1..507: mol_type = other DNA
atggtcttattcttccgcattaacttacagacaaagaagtgcaaacaaaaaggcaagggcgagcagagagaaaaccgaccaaagtggttaacaaagaaactcaaaaaaacttatctccgaaaaaccggcaagcgaaggctccgtcgggtccagccacttatgaaacaggagcgcaagaaaccatccctgataaacaatcacattccctgcctgattagcggaccgtgcttaccgtcatgtacgatccagagaaacatatttattaattacttcgttaacgcttccttcttagttgcgctggagacatttttgcggaggcgcgaatctcacctgatccctttctttaaatgcaagtgcttttttctgcgaggcgagattatttgctggctgtttatcttctggtacaaccagaaaattgtatgggatatcgagctgtgggaagcactgactgtgtcaggcgtctccctgacattccacaggtggggcgtgtcattttatattctttag

SEQ ID NO: 226090 - DNA, 303 bp, synthetic construct
  misc_feature 1..303: note = Description of Artificial Sequence: Synthetic coding sequence
  source 1..303: mol_type = other DNA
atgcccaagcgcaaggtttcatcagcggagggggctgctaaggaagagcctaagagacggtcggcccgattgagcgctaaacccccagcaaaagtggaagcaaagcctaaaaaggccgctgccaaggacaaatccagcgataaaaaagtgcaaactaaaggcaagaggggggctaaaggtaagcaggccgaggtggccaaccaggagaccaaagaagatctgcccgctgaaaacggggagactaagactgaagagagtccagcctctgatgaagcgggagagaaggaagcaaagtctgactag

SEQ ID NO: 226091 - DNA, 582 bp, synthetic construct
  misc_feature 1..582: note = Description of Artificial Sequence: Synthetic coding sequence
  source 1..582: mol_type = other DNA
atgggaaaacagaactccaagttaaggcccgagatgctccaggatttgcgcgagaacacagaatttagtgagcttgagctccaggaatggtataaagggttccttaaggattgtccaacaggtatcctgaatgtggacgaatttaagaaaatttacgctaacttttttccatatggagatgcatctaaattcgctgaacacgtcttcaggaccttcgacaccaactcggatggcacaatagattttcgcgaattcattatcgctctctcggtgacatcacgtggaagactggagcagaaactgatgtgggctttcagtatgtatgacctcgacggaaatggctatatcagccgtgaagagatgttagagattgtccaggcaatctacaagatggtgtcgtcagttatgaaaatgccggaggacgaaagcacgccggaaaagaggacggagaagatctttaggcagatggatacgaataatgacgggaagcttagcctcgaggagttcattaggggcgcaaaaagcgatccatccatcgtgaggctgctgcaatgcgatcctagtagcgcttcccagttctag

SEQ ID NO: 226092 - DNA, 582 bp, synthetic construct
  misc_feature 1..582: note = Description of Artificial Sequence: Synthetic coding sequence
  source 1..582: mol_type = other DNA
atggggaagcaaaactccaagctgaggccagaggtcttgcaggacctgcgggaaaacactgagttcactgaccatgaactgcaggagtggtacaagggctttctgaaagactgccctaccggccacctcaccgtcgatgagttcaagaagatctacgcaaatttttttccctatggggatgcctctaagttcgcagagcatgtatttaggactttcgatacaaacggagacggcacgattgactttagggaatttattattgcactcagcgtcacttcacggggaaaattagagcaaaaattgaagtgggccttctctatgtatgatctggatggtaatggttatatctcaaggtcagaaatgctggaaatcgtgcaggcaatttacaagatggtatcaagcgtgatgaagatgcccgaagacgaatcaactcctgagaaacgcactgacaaaatcttccgacaaatggatacaaataacgacggcaagctgtcactcgaagagtttatcagaggggctaaaagcgacccatccattgtccgactgctgcaatgcgatccatctagtgcatctcaattctag

SEQ ID NO: 226093 - DNA, 582 bp, synthetic construct
  misc_feature 1..582: note = Description of Artificial Sequence: Synthetic coding sequence
  source 1..582: mol_type = other DNA
atgggcaaacaaaactccaaactgcgccctgaagtcctacaagaccttcgggaaaacactgagttcaccgatcatgagcttcaggagtggtacaaggggttcctcaaggactgcccgaccggtcacttgactgtggacgaattcaaaaagatttatgctaatttcttcccctacggtgatgcgtctaagttcgctgagcatgttttccgaactttcgataccaatggcgacgggactatcgacttccgcgagtttattattgccctatctgtcacttcacggggaaagcttgaacagaagctgaaatgggcattcagtatgtatgatctcgatggtaatggctacatctctcgcagtgagatgctggagattgtgcaggctatctacaaaatggtttcatccgtcatgaagatgcctgaggacgaaagcaccccagagaaaaggacagataagatcttccggcagatggataccaacaacgacggaaagctgtcattggaggaatttattaggggcgctaaaagcgatcccagcattgtgcgactgctccaatgcgatcctagcagcgctagtcaattctag

SEQ ID NO: 226094 - DNA, 93 bp, synthetic construct
  misc_feature 1..93: note = Description of Artificial Sequence: Synthetic coding sequence
  source 1..93: mol_type = other DNA
atgggcaagcaaaactctaagcttaggccagaagtgttacaagatctcagagaaaacactgagttcaccgatcatgagcttcaggagtggtag

SEQ ID NO: 226095 - DNA, 3054 bp, synthetic construct
  misc_feature 1..3054: note = Description of Artificial Sequence: Synthetic coding sequence
  source 1..3054: mol_type = other DNA
atgaaactgttgaaacctacatgggtgaatcacaatggaaagcccatctttagcgtggatattcaccctgatgggaccaaattcgctactggtggacaaggccaggattccggcaaggtggtgatctggaatatgtcgccggtgttgcaggaggacgacgaaaaagatgaaaatatccccaagatgctgtgtcagatggacaaccatctcgcatgcgtgaactgtgtgcggtggtccaattcaggaatgtacctggccagcggtggtgacgataagctgatcatggtgtggaagagggctacttacattggaccatcaactgtctttggttctagcggcaaactcgctaatgtcgaacaatggcggtgtgtttccatcctacgtaatcatagtggcgatgttatggatgtagcctggtcccctcacgatgcttggctcgctagctgtagcgtggacaacactgttgttatctggaacgccgtgaaatttcccgaaatccttgccaccctccggggtcactcgggccttgtgaagggactgacatgggaccccgtgggcaaatatatcgcctcccaggccgacgatcgaagtctgaaagtttggaggacgctggattggcagcttgaaactagtattacaaaaccttttgatgagtgtggaggaactacccatgttcttagattgtcctggtcccctgatgggcactacctggtctccgcacatgcaatgaacaattcagggcctacagcgcagatcatagagcgggagggctggaaaacaaatatggactttgttgggcacaggaaagcagtgacagtggtgaaatttaatcctaaaatttttaagaaaaagcaaaagaatggttcttcagccaaaccgagctgcccctactgctgctgcgcggtgggttccaaagaccgcagcctaagtgtttggctcacctgcctcaagcggccattagtcgtgattcatgagctgttcgataaatcaataatggatattagctggactctaaatggtctcggaattctagtatgtagcatggacggttccgtggcatttctcgacttcagccaggatgaactgggagacccactgagtgaagaggagaaaagccggatccatcagagcacatatggtaaaagcttagccatcatgaccgaggctcagttgagtacagccgtgattgaaaatccagagatgctcaaatatcagcggcgacagcagcagcaacaactggaccagaaatcagcagccacgagagagatggggtccgccaccagcgtggccggagtggtgaacggtgaatctctggaagatataaggaaaaacttgttgaagaagcaggttgagactcggaccgcagatggccgtaggcggatcaccccactctgtatcgcccaactagacaccggcgactttagcacggcattctttaattcaatccctctgagcggcagcctggccggtactatgctgagctcccactcgagcccccagctgctgccgctcgatagcagcaccccaaactctttcggggcttctaagccctgcaccgagcctgtagtggcagctagcgcgagaccagccggagacagcgtgaacaaagactctatgaacgccacctccactccggcagcgctgagtccaagcgtgctgacaactccatcaaagatcgagccaatgaaggcattcgacagccgattcacagagcgatcaaaggcgacaccaggagcgccagcactgacaagtatgacccctacggccgtggaacgattaaaagaacagaatcttgtgaaagaactaagacctagggatctgctcgaatcttctagcgactcagacgagaaagtgccactggcaaaggcctcctccctttccaaacggaagttggagctcgaggttgagacagtggaaaagaagaagaaagggcgtccgagaaaggatagtaggctaatgccggtaagcctctcagttcagagccctgctgctctgaccgctgagaaggaggctatgtgcctgagcgccccagctttagctctaaaactccctatacccagtccccagcgggcatttacactgcaggtttcaagcgacccatcaatgtacattgaggtcgagaatgaggtgaccgtggtgggtggagtgaagctcagccgcctcaaatgtaaccgtgaggggaaggaatgggaaacagtccttacatcccggatcttaacggccgctggctcgtgcgatgtggtctgcgtagcgtgtgagaaacggatgttatctgtgttttctacttgtggacgtagactgctgtctcccatcctgctgccctccccaatctcaacactgcactgcactggaagctatgtcatggctctgaccgccgcagcaaccttgtcagtgtgggatgtgcaccggcaagtggtggttgtgaaagaggagtcccttcatagcatcttggccggaagcgatatgaccgtatcccagatattgctgactcagcatggtatcccagttatgaatcttagcgacggcaaggcatattgtttcaatccttcactgtctacctggaacctcgtaagcgacaagcaggattcactagcccagtgcgcagattttcgtagttcacttccctcccaggacgcaatgctctgctcgggacccctggcaatcatacaagggaggacgtcaaatagcggaaggcaggccgctagactctttagtgttcctcacgtggtacagcaagaaaccacgctcgcttatttggaaaaccaggtggcagcggcacttacactacagtcatctcacgagtacaggcattggctcctcgtgtacgccaggtacctggtgaacgaaggtttcgaatatcgcctgcgagagatctgcaaggatctcctgggtcccgtacattactcaaccggatcccagtgggaaagtaccgtggtcggtctcagaaaacgagaactattgaaagagcttttacccgtgattggtcagaacttgaggttccagcgcctgttcactgaatgccaggagcagctggacatactgcgtgacaagtag

SEQ ID NO: 226096 - DNA, 2433 bp, synthetic construct
  misc_feature 1..2433: note = Description of Artificial Sequence: Synthetic coding sequence
  source 1..2433: mol_type = other DNA
atgaaattgctcaagccaacctgggtgaatcataacggtaagcccattttctctgtcgatatccacccagatggcacgaagtttgcaaccggaggccaggggcaggactctggaaaggtcgttatttggaacatgtcgcccgtgctgcaggaagatgatgagaaagacgagaatatcccaaaaatgttgtgtcagatggacaatcacttagcatgtgtgaactgcgtgagatggtcgaactccggcatgtatttggcctctggaggcgatgacaaacttattatggtgtggaaacgcgcaacttacataggcccatcaactgtatttggatcttctggtaaacttgccaacgtagaacaatggaggtgcgtgtcaatcctccgcaatcacagtggtgacgtgatggacgtggcttggtccccgcatgatgcatggttggcatcttgctcagtcgataataccgtggtcatttggaacgccgtcaagttccctgagatcctagctacactcaggggccacagcggccttgtgaaaggtctcacctgggatcccgtgggcaagtacatcgccagccaagcagacgaccgctcactaaaggtatggcgaacactggattggcagctggaaactagcattactaagccgttcgacgagtgtgggggaacaacacacgtgctgaggctgtcatggtccccagatggacattacttggtgtccgcccacgcgatgaacaacagcggccctacagctcaaatcatcgagcgcgaaggatggaagacaaacatggatttcgtggggcaccgaaaagcggtcaccgtagtgaagtttaatcctaaaatctttaaaaaaaaacagaagaatggatcctccgccaaaccttcctgcccatactgctgctgcgccgtaggaagcaaggataggtccctgtctgtgtggctgacatgtttgaagcgcccacttgttgttatccatgagctgtttgataaaagcattatggatatctcctggactttgaatggattggggatattggtgtgtagcatggacggatctgtagcctttctggacttcagccaagacgagcttggtgatcctctgagcgaagaagagaagtctagaattcatcagagtacatatgggaagtccctggccatcatgaccgaggcccagctttctacggctgtgatcgaaaatcctgaaatgctgaagtaccagagaaggcagcaacaacagcagcttgaccagaaaagcgctgccacccgcgaaatgggaagtgccactagtgtggccggtgtggtgaatggcgaaagtctggaggacatccgcaagaacctgctgaagaagcaagtagagactaggactgcggacggacggaggaggatcacacccctgtgcatcgcccaattagacacgggggatttctcgacggccttttttaattctatccccctgtcaggatcccttgccggaacgatgctgtcttcacacagctcacctcagctgctgcccctggacagtagcactcccaactcttttggcgctagcaagccttgtaccgaaccagtggttgctgcgtccgctaggcctgccggagattccgtaaacaaagattctatgaacgctacttcgacacctgccgctctctcccctagcgtcctcacaaccccctctaaaatcgagccgatgaaagcgtttgatagccgcttcactgaacggtcaaaggctacccctggcgctccagcgctcactagcatgacccccaccgccgtggaaagggatgtgcacaggcaggttgttgtggtgaaggaagaatccctccattccattcttgctgggtcagacatgacagtgagtcaaattttgttgacccagcacggcattcccgtcatgaatctctctgacggaaaggcatattgctttaacccatccctgtctacctggaaccttgtgtccgacaagcaggacagcctggcacaatgcgcggattttcgatcatctctgccgagtcaagatgcgatgctgtgtagcggcccacttgctatcatccagggtaggacctctaatagcgggagacaggccgctaggctgttttccgtcccgcatgtcgttcagcaagagactaccttggcatatctggagaaccaagtcgccgctgccctaacactgcaaagctcacacgagtataggcactggctgcttgtgtacgcccgttacctggtaaacgagggattcgaatatcggctgagggagatttgtaaggacctgctgggcccagtgcactactctacaggcagccaatgggagtctaccgtggtcggcctgaggaagcgggaactgctcaaggaactgctacccgttataggccagaatctgagattccaacgacttttcaccgaatgccaggaacagctggatatccttcgcgataagtag

SEQ ID NO: 226097 - DNA, 1815 bp, synthetic construct
  misc_feature 1..1815: note = Description of Artificial Sequence: Synthetic coding sequence
  source 1..1815: mol_type = other DNA
atgctgtcttctcattctagcccccaattattgcccctggactccagcacacctaacagttttggagcaagtaagccctgcacagagcccgtagtggcggcaagcgcccgacctgctggggacagcgtgaataaagattcgatgaacgccacatcaacaccagccgctttgtctccttccgtgcttaccaccccctctaagatcgaacccatgaaggccttcgactcacgctttactgagagatcaaaggccacacctggtgcaccggcactgacttctatgactcctaccgcggtggaacggctcaaggaacagaacctcgtcaaagagctcaggcctcgggatctgttggaatcaagttctgatagcgacgaaaaggtgcctcttgctaaagccagtagtctgtccaagcggaaactggaactggaagtcgagacagtggaaaagaaaaaaaaaggccgacctagaaaagactctcgcctcatgccagtgtccctctcagttcagtcgcctgctgccctcactgccgagaaagaggcaatgtgtctctctgcccctgccttagcgctgaaattgcccatcccatcgcctcagagagcgtttactctgcaagtgagcagtgatccttcaatgtacatcgaggtggagaacgaagtcacggtggtaggtggcgttaagttatcacggctgaagtgcaatagagagggcaaggagtgggaaacagtgctgacatcaagaatcctaacagccgcaggcagttgcgacgtcgtgtgcgtggcatgcgagaagagaatgctctccgtgttctccacttgcggcagaagattgctttctccaatactcctcccctctccgatctccactctccactgtacaggcagctacgtgatggcacttacagctgctgccactctttccgtgtgggacgttcacaggcaggtagtggtggtcaaggaagaaagcctgcactctatcctcgcaggctctgatatgacagttagccaaatactgctgacccagcatggcatccccgtaatgaacctctcggatgggaaggcctactgctttaatccatctctgagcacttggaatctggtgtcggataaacaagactcccttgcacagtgtgcagacttcaggtctagcttgccgagtcaggatgctatgctgtgcagtgggccactggcaattattcaagggcgtacaagtaattctggaagacaggcagcacggcttttttcggtgcctcatgttgtgcagcaagagacaacactggcctatctggaaaatcaggtcgcagccgctctgactttacaaagctctcacgagtaccggcactggctgctggtttacgcgaggtacctggttaacgaaggctccgccgaggagggtgccgcagaaggggcagccacatcccacagggccgagcctcctattcccgcacccctgcaccgtgtctccggaaccgcccgacatcctgaagggcaggtcgcttgtccaagcctcccatggctgcaacaaggtcaggggcacactctggctgctgatgatatgcaagatagactgtcacccgaccaggccgtagggggaggcgatacaggaaggcgctgcgccgtgctgcatcaaaggcagccttctagcctaggccgatgtgcgctctgtccaggctctgacatcgcttctggagggggatcttcttcactgccgccatccccacgctgcggtgccagggcgggagcacttccacgctgcccgggtgcctcaaaagccgtgccaggcctgccatctcccgctcgaccacagggagggcactag

SEQ ID NO: 226098 - DNA, 2922 bp, synthetic construct
  misc_feature 1..2922: note = Description of Artificial Sequence: Synthetic coding sequence
  source 1..2922: mol_type = other DNA
atgtccccggttctgcaagaagacgatgaaaaggatgaaaacattcccaagatgctgtgtcaaatggacaatcatctggcctgtgttaattgcgtccggtggagcaattccggaatgtatctggcctcaggaggtgacgacaagctgatcatggtgtggaaaagagcgacctacattggtccttcaacggtattcggaagctccggaaaactggctaacgtggagcagtggcggtgtgtgtcaattctacggaatcactccggagacgtcatggatgtggcgtggtccccgcatgatgcttggctcgcatcttgctcggtagacaataccgtggtgatatggaatgccgtcaagttcccagaaattcttgcaacactgcggggacacagcggccttgtaaaggggttgacctgggacccagttgggaagtatatcgccagccaggctgacgacagaagcctgaaagtgtggaggacactcgattggcagctggaaaccagtataaccaaacctttcgatgagtgtggtggcactactcatgtccttcgcctgtcttggtctccggatggtcactacctcgtcagtgctcatgcaatgaacaactctgggccaaccgcacaaattatcgaaagagaaggatggaagaccaacatggattttgtgggccatagaaaagcggtgactgtcgtgaagtttaaccctaaaattttcaaaaagaagcagaagaacggctccagtgcgaagcccagctgcccctattgctgttgcgccgtgggcagcaaggacagatctctgtcagtctggttgacctgtctgaagagacctctggtggtcattcacgagctgtttgacaagtctattatggacatcagctggaccttgaatgggttgggcattctggtgtgctctatggatggttcagttgcctttctggacttcagccaggacgagctgggcgatccgctgtccgaagaggagaagtctaggatccaccagagcacatatggcaagtccttggccataatgacagaggctcagctgtccacagccgtgattgaaaatccagagatgcttaaataccaacggcgacagcagcagcagcagcttgaccagaagagcgccgcaacccgcgagatgggatcggctaccagcgtggctggcgtcgtgaacggagaaagcctcgaagatatccggaaaaaccttttgaaaaagcaggtggaaacgcgcactgccgacggaagacgcagaataaccccactttgtatagcccagctggataccggggatttctccaccgctttctttaacagcataccgctgtctgggtccctggcaggcaccatgctgtcctcacattcgtctcctcagctcttacccttggatagctctacacctaacagtttcggcgcttctaaaccatgcaccgagcctgtggtcgctgctagcgctcgccctgccggtgactctgtgaacaaagattctatgaacgctacgtctactcccgcagcattgtctccctctgttctcacaacacctagcaagatcgaacctatgaaggccttcgactctaggttcaccgaacgatctaaggcgacccctggcgcacctgctctgactagtatgactccaacagccgtggagcgattgaaggagcagaatctcgtgaaggaactccggccaagggatctcctggagtcctctagtgacagcgatgagaaagtacctctagccaaagccagtagcttatccaaaagaaaacttgaactagaggtcgagacggtcgaaaaaaaaaagaaaggaaggcctcgcaaagatagtcgtctgatgcccgtgtctttatcagttcagtcgccggctgccttgacggctgagaaggaagctatgtgcctgtctgcacctgcattggctttgaagctcccgatacccagtccccagcgggcttttacgctccaagtcagctccgaccccagtatgtatattgaggtggaaaatgaagtcacggtggtcggcggtgtaaagttatctagactgaagtgcaaccgcgaaggaaaggaatgggaaaccgtgctgacttcgaggatcctgactgcagctggatcatgcgacgtggtgtgcgtcgcttgtgaaaaaagaatgctctctgtgttttccacttgtggcaggagattgctttcaccaattcttcttccatcaccaatcagtacgcttcactgtacgggttcttacgtaatggctctaactgcggctgccaccctctctgtgtgggacgtccatcgtcaggtggttgtggtcaaagaagagtccttgcactcgatcttagcaggtagcgatatgaccgtgagtcagatcctcctaacccaacatgggattccggtcatgaacctctctgacggaaaagcttattgttttaatccaagcctttccacgtggaacttggtttccgataaacaggattcccttgcccagtgcgctgatttccgcagttcactcccatcgcaagacgccatgttgtgtagcggcccattggcaattatacagggtcggacatccaacagtggacgacaagcggcaaggctattcagcgtcccccacgtggttcaacaggaaacgaccctggcatacctggagaaccaggtggccgcagcgctgaccttgcagagctctcacgaatacagacattggctcctagtgtacgcccgttatctggtcaacgaggggtttgagtatcggctcagagaaatctgcaaggatctccttggacccgtacactacagcacagggtcacagtgggagagcaccgtggtcgggctaagaaagagagaactgctaaaggagttactgcctgttataggacaaaatctgcgttttcagagactgtttactgaatgccaggaacaattggatatattgcgggataaatag

SEQ ID NO: 226099 - DNA, 2421 bp, synthetic construct
  misc_feature 1..2421: note = Description of Artificial Sequence: Synthetic coding sequence
  source 1..2421: mol_type = other DNA
atgtcacctgttctgcaggaagacgatgagaaagatgaaaatattccgaagatgttgtgtcagatggacaatcacctggcctgcgtcaactgtgtgaggtggtctaattcagggatgtatctcgcatcaggcggagacgacaagctcatcatggtctggaaacgggcaacatatatcggccctagcaccgtttttgggtcttccggcaagttggccaatgtggagcaatggagatgcgtgtctatactccgtaatcattctggtgacgtgatggacgttgcttggtccccgcacgacgcctggctggcctcatgttccgtcgacaatactgtggtgatctggaacgcagtcaagttccccgaaattctcgcaactctccgagggcactcaggcctggtcaagggactgacctgggaccccgtaggaaagtacatcgccagccaggctgacgaccgtagcctgaaagtctggcggacactagactggcaactcgaaacgagtatcaccaaaccctttgatgaatgtggaggaaccacccacgtcctgcggctttcttggagtccagacggacattatttggtgtctgcgcatgcgatgaataatagtggaccaactgcccagattatcgaaagagaaggctggaaaacaaatatggactttgtcgggcaccgaaaagctgttacagtagtaaaattcaatcccaagatttttaagaagaagcagaaaaatggttcaagtgccaagccaagctgcccctattgctgctgcgcagtcggctcaaaggaccgtagtcttagtgtgtggctgacctgcttgaagagaccccttgtggtgatccacgaacttttcgataaaagtattatggacattagctggaccctcaacggactgggtattctcgtgtgttcaatggacggcagcgtggcgttcttggacttctctcaggatgaactaggcgaccccctgtctgaggaagagaagagtagaattcaccagtctacttatgggaaatccctagccatcatgacggaggcccagctgagcacagcggtcatcgagaacccagagatgctgaagtatcagcgcagacaacagcagcagcagttagatcagaaaagcgctgcaacacgagaaatggggtcagccacttcagtagctggggtcgtgaatggcgagagtctcgaggacattagaaagaatctgctcaaaaagcaggtcgagacacggacggccgacggtcgacgcaggatcacacctctgtgcattgcccagcttgacaccggcgatttctcaactgctttcttcaacagcatcccactatccgggtctctcgctggcaccatgctcagctcccactcctctccccagctgctaccactcgacagcagtaccccaaacagttttggggcttccaaaccatgtactgagccagttgttgcagcaagcgctagacctgctggggactcagtcaacaaggactctatgaacgcgacatctacgccagccgctctgagtcctagcgtgctcacaaccccttcaaagattgaacccatgaaggcttttgacagtcgtttcacggagcggtcaaaggccacaccaggggcacccgcactcacgtcaatgacacccactgcagtggagcgtttaaaggagcagaacctggtcaaggagttacgccctagagatctgctggagtcgtcctcggactcggacgagaaagttccactcgcaaaggcttccagcctgtccaaaagaaaactggaactggaggtcgagactgtcgagaagaagaaaaagggtcgaccaaggaaggactctcggctgatgcctgttagcctctctgtgcagtcccccgcagccttgactgcagagaaagaggccatgtgtctctcagcaccggctctggcactgaaattgcctataccaagtccccagagggctttcacattgcaggtgagcagcgacccaagcatgtacattgaagttgagaatgaggtgacggttgtaggtggagtcaaactctccagactgaagtgcaatcgagaggggaaggaatgggaaaccgttttaacatcgcgtatactgacagctgcgggtagctgtgacgtcgtttgtgtagcctgtgaaaagcgtatgctttccgtctttagcacctgtggaagacggctgctatcaccaatcttgctcccttcaccaatctctaccctccactgcactggctcttacgttatggctctcacagctgccgctactctcagtgtctgggacgtgcatagacaagtggttgtcgtgaaggaggaatccctgcattcaattttggcaggcacttggtttcttacatcacggacccattggctgagcgttcaaacactgggggcagcctgccatcctaggaccccatgctgcgctcaggatcgctag

SEQ ID NO: 226100 - DNA, 156 bp, synthetic construct
  misc_feature 1..156: note = Description of Artificial Sequence: Synthetic coding sequence
  source 1..156: mol_type = other DNA
atggccagctcaatgaggagcctgttcagtgatcatggaaagtacgttgaatcttttcgcagatttctgaatcattctacagaacaccaatgcatgcaggagttcatggacaaaaaactgccgggaattatcggacggtaccaaaactgctgctag

SEQ ID NO: 226101 - DNA, 879 bp, synthetic construct
  misc_feature 1..879: note = Description of Artificial Sequence: Synthetic coding sequence
  source 1..879: mol_type = other DNA
atggcctcaagcatgcgctcgctgttcagtgatcacggaaaatacgtggagagtttccggaggttcttgaatcacagtacggagcaccagtgtatgcaggaatttatggacaaaaagttacccggtatcattgggaggatcggtgatacgaaatcagaaatcaaaattctctccatcggtggaggagcaggagagattgatctgcaaatactgagcaaggtgcaagcacaataccccggtgtgtgcatcaataacgaggtggtggaacccagtgcagaacagatcgccaagtacaaggagctcgtggcaaagaccagcaacttggaaaatgtcaagtttgcatggcataaggagacatcaagtgaataccaatcaagaatgttggaaaagaaagagctccagaaatgggattttattcatatgatccagatgttatattacgtgaaggatatccctgctactctgaagtttttccacagcctcctcggcaccaatgccaaaatgctcatcatcgtggtgtccggttcctcaggatgggacaaattgtggaagaagtatggatcacgctttccacaggatgatctgtgtcagtatattacatcggacgatctgactcagatgcttgataatctggggctcaagtatgaatgctacgatcttcttagtactatggacatctcagattgttttatagatggcaatgagaatggcgacctgctttgggacttcttgacagaaacctgcaatttcaacgctactgcaccgccagatcttagggcggagctgggcaaggacttacaggagccagaattcagcgctaagaaagaaggcaaagttctctttaataatacactcagtttcatcgtaatcgaggcgtag

SEQ ID NO: 226102 - DNA, 381 bp, synthetic construct
  misc_feature 1..381: note = Description of Artificial Sequence: Synthetic coding sequence
  source 1..381: mol_type = other DNA
atggcaagctctatgaggagcctttttagtgatcatggtaaatacgttgagtccttcagaagattcttaaatcattctaccgaacaccagtgtatgcaagaatttatggacaaaaagttgccagggataattggtaggatcggcgacactaagagtgaaattaaaattctaagcatagggggtggcgctgattgcctgataaggggcagcagtagggtcttaaaaagaaatagctgttttatcctttgttctactcgccagaaagacaaacctggaatgagaatccacgatgaacgatcttcagaactccctttcggggcagccaggttggaatccaaatctgcttttccgagttttctggtctcattcattcttttctag

SEQ ID NO: 226103 - DNA, 879 bp, synthetic construct
  misc_feature 1..879: note = Description of Artificial Sequence: Synthetic coding sequence
  source 1..879: mol_type = other DNA
atggcaagctccatgagatctttgttctcagatcacggaaagtacgtggagtctttccggagattcttgaaccattctactgagcaccaatgcatgcaggagttcatggataaaaagttgccaggcataataggaagaatcggggatacaaagtccgagattaaaatactttccattggtggtggagcgggtgagatcgacctccaaatactcagtaaagtgcaggcccaatatcccggagtttgcatcaacaatgaggtggtggagccttccgcagaacagatcgctaaatacaaagaactggtcgctaaaacgagcaacctggagaatgtgaaattcgcctggcacaaagaaacaagttcagagtatcagtcccggatgctcgagaagaaagaacttcagaagtgggactttattcacatgattcagatgctttattacgttaaggatattccagctactctaaagttttttcactcattactgggcactaatgctaagatgcttatcatcgtggtgtcggggtcctcaggctgggacaagctctggaagaaatacggatccagattcccacaggacgacctctgccagtacattaccagtgacgatcttactcaaatgctggacaatctggggctcaaatatgagtgctacgatcttctgtccacaatggacatctcagactgttttatagacggcaacgaaaacggggatttattgtgggattttctgacagagacttgtaatttcaacgctacagctccgccagacttgagggccgagcttggcaaggatttacaggaacccgaattcagcgccaaaaaggaagggaaggtcctgttcaacaacactctgagttttatagtgatcgaagcctag

SEQ ID NO: 226104 - DNA, 1464 bp, synthetic construct
  misc_feature 1..1464: note = Description of Artificial Sequence: Synthetic coding sequence
  source 1..1464: mol_type = other DNA
atgtctctgccaaacagctcttgccttctggaagataaaatgtgcgaagggaataaaactacaatggccagcccacagctgatgcccctagtcgtagtgctgtctactatatgtttagttacggtgggactgaaccttctggtcctgtacgctgtgaggagtgagaggaagttgcatacagtgggtaacctgtatattgtgagtttgtcagttgccgacttaattgtcggagccgttgttatgccaatgaacatcttgtatcttctgatgtccaaatggagcctggggaggcccctttgtttgttctggctgagtatggactacgttgctagtaccgcttcaatcttttcagtgttcattctctgcatcgacaggtacagatccgtacagcagcccctgcggtatctaaaatatcgcactaagacccgggcatccgccactattctcggtgcgtggttcctgtccttcctctgggttattcccattctgggctggaatcacttcatgcagcaaacgtcagtgcgcagagaggataagtgcgaaacagacttttatgacgtcacctggttcaaggtgatgaccgcaattatcaacttctacctgcccacgcttctcatgctgtggttttacgccaagatctataaggctgttaggcagcattgccaacatcgtgagctcatcaaccgaagcctcccttcattttctgagatcaaactgagacctgagaatcctaagggagatgccaaaaagccgggtaaagaaagtccatgggaagtgcttaaacgcaagcctaaagacgctggcggaggttctgtgctgaagagccccagtcagacaccaaaggaaatgaagtcccccgtggtattcagccaggaggatgacagggaggtggacaagctctactgctttcccctggatatagtccacatgcaggccgctgctgagggctcttctcgcgattatgtggcagtgaacagatctcacgggcagctgaagaccgatgagcaagggctgaatacccacggcgcatcagagatttccgaggatcaaatgctgggagacagtcagtctttctctagaacagacagtgacacgaccactgaaaccgccccaggcaaaggtaagctaagatcagggagcaatactggcctcgactacataaaattcacctggaaaagactaagatcacactcaaggcagtacgtgtccggattgcatatgaaccgggaacgcaaggccgcaaaacaactgggtttcatcatggcagcatttatactgtgctggatcccttattttatcttctttatggtgatcgccttctgtaaaaactgttgcaacgagcatctgcatatgttcaccatatggttaggatatattaattccactcttaacccattgatctacccactgtgcaatgagaacttcaaaaaaaccttcaagagaattctccacattaggtcttag

SEQ ID NO: 226105 - DNA, 39 bp, synthetic construct
  misc_feature 1..39: note = Description of Artificial Sequence: Synthetic coding sequence
  source 1..39: mol_type = other DNA
atgagcttacccaattcatcatgcttactcgaggactag

SEQ ID NO: 226106 - DNA, 1464 bp, synthetic construct
  misc_feature 1..1464: note = Description of Artificial Sequence: Synthetic coding sequence
  source 1..1464: mol_type = other DNA
atgtccctacctaacagttcatgtctgctggaggacaaaatgtgtgaaggaaacaagaccaccatggcatcacctcaattaatgcctctggtggtagtgctgtcgacaatttgcctcgtcacagttggattaaatttattggtgctgtatgcggtacgcagtgaacgcaaactgcacacggtcgggaacctttacatcgtgagcctatccgtagcagacttgattgtgggagccgttgtgatgccaatgaatatattgtacctgctgatgagtaaatggtcactagggagacccctgtgtctattttggttatctatggactacgttgcgtccactgcatccatattttcagtctttatcctgtgcatcgacaggtatagatcagttcagcagcctctaagatacttaaaatatcgaaccaagaccagagcttcggcaacaattctgggggcttggttcctgtctttcctctgggtaattccgatcctgggatggaaccattttatgcaacagaccagcgtccggagagaagataagtgtgagacggatttctacgatgttacctggttcaaggtgatgacagctatcatcaatttttatctgcccacgctgctcatgctgtggttctacgcaaaaatttacaaagccgtacgacagcattgccagcacagggagctgatcaatcgtagtctaccctccttctctgaaatcaaacttaggcctgagaatcccaagggagatgcaaagaagcctgggaaggagtcgccatgggaggtgcttaaacggaaaccgaaagacgcgggaggtggatctgtgctcaaaagcccctcccagactcccaaagaaatgaagtcgccggtggttttctctcaggaggacgatcgagaagtcgacaaactgtattgttttccactggacattgtccacatgcaggcagctgccgagggctcttctagggattatgtggcagtgaatagatctcacgggcagctgaagacagacgagcaggggctgaacactcatggtgcttccgaaatcagtgaagatcagatgctgggagactcccagtcattctcacgcaccgattccgacactacaaccgaaactgccccaggaaaaggcaaactgcggtctggcagtaatacagggcttgattatattaagtttacatggaagcggttgaggagccatagccgacagtatgtatcaggcctccatatgaatcgagaaagaaaggccgcaaaacagctcgggttcattatggcggcttttatcctgtgttggatcccctactttatcttttttatggtcattgccttttgtaaaaactgctgtaatgaacatctccatatgttcacaatctggctgggatatattaactcaacacttaaccccctgatttacccactgtgtaatgagaattttaagaagacttttaaaaggattttgcacattagaagttag

SEQ ID NO: 226107 - DNA, 1464 bp, synthetic construct
  misc_feature 1..1464: note = Description of Artificial Sequence: Synthetic coding sequence
  source 1..1464: mol_type = other DNA
atgtcgcttccgaacagcagttgtcttctcgaggacaagatgtgcgaaggaaacaaaaccaccatggcgagtccgcagctcatgcccttagtcgtggtgttgagtaccatctgtctagtaactgtcggtttgaatctcttggtgctgtacgctgtcagaagcgagcggaagctacacactgtggggaacctttacattgtgtccctatctgtggctgatctcatcgtgggagcggttgttatgcctatgaacattctgtatctcctgatgagcaaatggtctctgggcaggcccctatgcctgttctggctgagcatggattacgtcgcctctacagcaagcatattctcagtcttcattctgtgcattgatagataccggagtgtgcaacaaccactcagatacttgaaatacagaaccaaaacgcgggcatcagccacaattctgggcgcttggttcctcagtttcctgtgggttatcccaatcttgggatggaaccactttatgcagcagacgagcgtacggcgagaggataagtgcgaaaccgatttttacgatgtgacctggttcaaggtcatgacagccattatcaatttttacctgcctactcttttgatgctttggttctacgccaagatctataaggccgtcaggcagcactgccagcaccgcgaactcatcaacaggtccctccctagtttttctgagataaagctgcggccagaaaaccccaaaggtgacgcgaaaaagccaggcaaggaaagcccatgggaggtgctgaagcggaagcctaaggatgccggaggaggcagcgttctcaaaagccctagccagacgcctaaggaaatgaagtctccggtggtgttttcacaggaggatgatagagaggtggataagttgtactgctttccacttgacattgtccatatgcaggccgcagctgagggaagttcaagagattacgtagcagtgaaccgatcacatgggcaacttaaaactgatgaacaaggattgaatacacacggggcatccgagatctctgaagaccagatgttaggggactctcagagcttctcacgtacagatagtgacaccactactgaaaccgcccctggcaagggcaagctacgttccggctctaacacaggcctcgattacatcaagttcacctggaagaggttgcgatctcacagtaggcagtatgtgagtggattacatatgaatcgagagaggaaggcggcaaaacaactcggctttatcatggcagctttcattctttgctggattccctactttatcttttttatggtaatcgccttctgtaagaattgctgtaacgagcacctccatatgtttaccatttggttaggctatatcaactctaccttaaaccccctcatctatccgctgtgcaacgaaaacttcaagaaaacgtttaagcgaatacttcacattcggagttag

SEQ ID NO: 226108 - DNA, 816 bp, synthetic construct
  misc_feature 1..816: note = Description of Artificial Sequence: Synthetic coding sequence
  source 1..816: mol_type = other DNA
atggcggctcctcaggacgtacacgtccggatctgtaaccaggagattgtgaagttcgatcttgaggtcaaggcgttaatacaggatattcgtgattgcagcggaccactgagcgcactgacggaactaaacaccaaggtgaaagagaagtttcaacaacttaggcacaggatccagcctgtcttataccagcgcgcatttatatggaccgcttcgaccttctttttcaaactgacatattcactgaccgatttctcgagcactcagcatgactttaactctccgactacacctgtaaccttttctgacctggagcagctcgccaaagagcaggataaagaatccgagaaacagctgctccttcaggaggtggaaaatcacaaaaaacagatgctcagtaatcaagcctcctggcggaaggcgaaccttacatgcaagatagccatagataaccttgaaaaagccgagttactgcaggggggtgatcttttgaggcagcgcaagacaacaaaggagtcactggcacagacgtcttctactatcactgaaagcttgatgggcatctctcggatgatggcccaacaggtgcagcagagcgaggaggccatgcaatctttggtcacaagtagccgtacgattcttgacgctaatgaagagttcaaaagcatgagtggtaccattcagctcgggcgaaaactcatcaccaagtacaacagaagagagttgacggataagctcctgatattcttggcactcgcactgttcctggcaaccgttctgtatattgtgaagaagagacttttcccgtttctttag

SEQ ID NO: 226109 - DNA, 1194 bp, synthetic construct
  misc_feature 1..1194: note = Description of Artificial Sequence: Synthetic coding sequence
  source 1..1194: mol_type = other DNA
atggccccaaacggcactgcatccagcttctgtctggatagcacagcctgtaaaatcacaatcacggtcgttctcgccgtgctgatcctgatcacagttgccggaaatgtggtggtatgtctagcggtcgggctgaataggagattacgcaacttaaccaactgttttatcgtgagcctcgctatcacagaccttctgctcgggctactcgtgttgccgtttagtgcaatttatcaactctcttgcaagtggtccttcgggaaagtgttctgcaacatatacacgtctctcgacgttatgctgtgcaccgcaagtatcctaaacctatttatgatctccctggacaggtactgcgccgtaatggaccccttaagatacccagttctcgtaacccccgtcagagtggcaatctcccttgtgctaatttgggtgataagcataactctgtcttttctgtccattcacctcggttggaactcaagaaacgaaacgagcaagggcaaccacaccacttcaaaatgcaaggtccaggtaaacgaggtgtacggactggtggacggccttgtgactttctacttgccccttctgattatgtgcatcacgtattataggatttttaaggtcgcgcgtgatcaagcaaagcggattaatcatatctcaagttggaaagctgccacaattagagagcacaaagctacagtgactcttgcggcagtaatgggcgcttttatcatctgttggtttccatattttaccgcttttgtctataggggcctgagaggcgatgatgccatcaacgaggtgctggaagcaattgtgttgtggctggggtatgcaaacagtgccctcaacccaatactctacgcagcccttaaccgggatttccgcaccggataccagcagctcttctgctgtcggctggccaaccggaatagtcacaagacttcccttcgatccaacgcgagccagctctctcggacccagtctcgggaaccacgccaacaagaagagaaacctctgaaacttcaagtgtggtccggcaccgaggtgacagcacctcagggagctaccgatagaccctggctgtgcctcccagagtgctggtcagttgagctcacacactcattcattcacttattcatccacagcttcgcgaatatccaccctattccaaccacatgtcaggagctctag

SEQ ID NO: 226110 - DNA, 1173 bp, synthetic construct
  misc_feature 1..1173: note = Description of Artificial Sequence: Synthetic coding sequence
  source 1..1173: mol_type = other DNA
atgcccgataccaattctacaattaacttgagtttaagtacccgtgtgacactggcctttttcatgagcttggtggccttcgctattatgctaggcaatgccctcgttatcctggctttcgtcgtcgacaagaacctgcgacacaggtcaagctatttctttctgaatctagctattagtgacttcttcgtgggcgtaatctcaatacccttgtatatcccgcacactttgtttgagtgggacttcggaaaagagatctgtgtgttctggctgacaacagactatctgttgtgcactgctagcgtctacaatattgtcttgataagctacgaccggtatttgtcagtctccaatgccgtatcctatcggactcaacacaccggggtgctgaaaatcgttacattgatggttgcagtgtgggtactggcgtttctggtgaacggccctatgatactggtctcggagtcctggaaagatgagggcagcgagtgcgagcctggtttcttctccgaatggtacatcttagccatcacatcttttctcgaatttgtaatacccgtaatattagtcgcttattttaatatgaatatatactggagtctctggaagcgtgaccatctgtctaggtgtcaaagccaccccggattgactgctgtgtcttcaaacatctgcggacacagtttccgagggcgactctcctcacggagatcactgtcagcctcaacagaagttccagcctcattccactccgagagacagagaaggaagagttcgcttatgttttcctctcgtactaaaatgaatagtaacaccatcgcctcgaaaatggggtcctttagccagagcgactcagtggccttacaccagagggaacacgtggagctgttgcgggctcgcaggttggccaagagcttggctatactactcggcgttttcgcagtgtgctgggccccatacagcctgttcactatagtgctgtctttctactcctccgcgactggccctaagagcgtgtggtaccgtattgcattttggcttcagtggttcaattcatttgtgaatcctctgctgtatcccctatgtcataaaaggtttcagaaggcatttcttaagatcttctgcattaaaaagcagcccctgcctagccagcactcccgatctgtctctagctag

SEQ ID NO: 226111 - DNA, 909 bp, synthetic construct
  misc_feature 1..909: note = Description of Artificial Sequence: Synthetic coding sequence
  source 1..909: mol_type = other DNA
atgcccgatacaaacagcactataaacctgtctctcagtacaagggtgacactggccttttttatgagtctagttgcctttgcgatcatgctgggaaatgcactggtgatcctcgcatttgtggttgacaaaaacctgcgccataggagtagctactttttcctaaacctcgccatctctgacttcttcgtggtctcagaaagctggaaggacgaggggtcagagtgtgagccaggtttcttcagtgaatggtacatattggctatcacctcattcctggagttcgttattcctgttattcttgtggcgtacttcaacatgaatatttactggagcctctggaagcgcgaccacctgagccggtgtcagtctcatccaggcctgacagctgtgtcttctaatatctgtggtcacagctttcgcggaaggctgagctctcggaggagtctgagcgccagcaccgaagtacctgcttcatttcactccgagcggcagaggaggaagtcttcacttatgttctctagccggaccaagatgaacagcaataccatcgctagcaagatgggttcattctcacagagtgacagcgttgctcttcaccagcgtgagcacgtggagctgctccgtgccaggcgcttggctaagtccctggcgattttgctcggcgtctttgccgtctgctgggctccctacagcctgtttactattgtgctgagtttttattcttccgccaccggacctaagagtgtctggtaccgaatcgctttctggcttcaatggttcaactcctttgtcaaccctctgctgtacccgttgtgccacaaacggttccagaaggcctttttaaagatcttttgcataaagaagcaaccgctgcctagccagcactccagatcagtaagtagctag

SEQ ID NO: 226112 - DNA, 174 bp, synthetic construct
  misc_feature 1..174: note = Description of Artificial Sequence: Synthetic coding sequence
  source 1..174: mol_type = other DNA
atgaagttcttcgtttttgccctggtattggctctcatgatctctatgatctctgccgacagccacgaaaagcgccatcacgggtaccgacgtaaatttcacgaaaaacatcattcccaccgcgagttcccattttacggtgactacggatcaaattacctttatgacaattag

SEQ ID NO: 226113 - DNA, 174 bp, synthetic construct
  misc_feature 1..174: note = Description of Artificial Sequence: Synthetic coding sequence
  source 1..174: mol_type = other DNA
atgaaattcttcgtttttgctctcgtgctggccctgatgatctccatgatatcagccgactcacacgaaaagaggcatcacggatatcgcaggaaattccatgagaagcaccactcccatcgcgagttccccttctacggtgattacggctcaaactacctgtacgacaactag

SEQ ID NO: 226114 - DNA, 156 bp, synthetic construct
  misc_feature 1..156: note = Description of Artificial Sequence: Synthetic coding sequence
  source 1..156: mol_type = other DNA
atgaagttttttgtcttcgctttaatcctagcgctaatgctcagtatgaccggagcagattcacacgccaaaaggcatcacggctacaaaaggaagtttcacgagaaacaccactcacatcggggataccgcagtaattacctttacgacaattag

SEQ ID NO: 226115 - DNA, 156 bp, synthetic construct
  misc_feature 1..156: note = Description of Artificial Sequence: Synthetic coding sequence
  source 1..156: mol_type = other DNA
atgaagttcttcgtttttgcactgatcctggcactcatgctctcaatgactggcgctgactcacacgctaaacggcaccatggttataaaaggaagtttcatgaaaaacatcactcacacagggggtaccggtccaattacctgtatgacaactag

SEQ ID NO: 226116 - DNA, 1989 bp, synthetic construct
  misc_feature 1..1989: note = Description of Artificial Sequence: Synthetic coding sequence
  source 1..1989: mol_type = other DNA
atgatggaaccagaagaataccgagagcgtggtcgggagatggtggactacatttgtcaatatttgtctaccgtgcgagagaggcgcgtgacgccagatgtgcagccgggatatctgcgagcccaattgccagagtctgcacccgaggaccccgactcttgggatagcatcttcggagacattgaacgcatcataatgcctggggtggtgcattggcagtccccccacatgcatgcatattaccctgccttaactagctggccctctctgctgggcgatatgttggccgacgctattaattgtctggggtttacatgggcatcttcccctgcatgtacagaactggagatgaatgtcatggattggctggctaagatgcttgggctccccgaacatttcttacaccatcatccctcctcccaaggcggaggtgttttgcaatccacggtgtcagagagtacattgattgccctgctcgccgcaagaaagaataagatcttagaaatgaaaacctcagaaccagacgcagatgaaagctgcttaaatgcgcgtcttgtcgcgtacgcatctgaccaggcacacagttcggtggagaaagctggcctgatctctttagtcaaaatgaaatttctacctgtggacgacaacttttcgctgcgcggagaggctctgcaaaaagccatcgaagaggataaacagcgcggtctggtcccagtcttcgtgtgtgctacactagggaccaccggagtgtgcgccttcgactgcctttccgaactagggccaatttgtgccagagaggggctgtggctccatatcgacgctgcttatgctggaacagcattcctgtgtcctgagttcaggggcttcctgaagggtatcgaatacgccgattctttcacctttaatccgtcaaaatggatgatggtgcacttcgattgcacagggttttgggtcaaggacaaatacaaattgcagcaaacattttctgtcaatcccatctacctgaggcacgcaaacagcggtgtcgccacagacttcatgcattggcaaataccactgagtagaaggtttaggagtgttaaactgtggttcgtgatccgatccttcggtgtcaaaaacctgcaggcacacgttcggcacggtactgaaatggccaagtactttgagtctctggtgcggaatgacccctctttcgaaattccggcaaagcgacatctagggctggtagtattccgcctgaaaggacccaactgtctaacggagaatgttttaaaagaaattgccaaggccggtaggcttttcctcattcctgctacaattcaagacaagctaataatccggttcaccgtgactagccagttcactacaagagacgatatcttgcgggactggaaccttattagggacgccgctactctgatactaagccagcactgtacttctcaaccctctcctcgagttggtaacctaatttctcagattagaggagcgcgtgcttgggcctgcgggaccagcctccagtcagtttctggcgctggagatgaccccgtgcaggctcgaaagattattaaacagccccagcgggtgggcgctgggcctatgaagagagagaacggcctgcatctcgagacattgcttgaccctgtcgacgactgctttagtgaggaggcacccgacgccacaaaacacaagctgtcaagctttttattctcttacctgtcagtccagacaaaaaaaaaaacagtgcgtagtctctcttgtaactccgttcctgtcagcgcacagaagccactgccaaccgaggcatctgttaagaacggcggttcaagccgcgtgcggatcttctccagattccctgaagacatgatgatgttgaaaaagtcggcctttaaaaaactgatcaaattttacagcgtgccctcgttcccagaatgtagctctcagtgcggactgcagttgccttgttgccctctccaagccatggtttag

SEQ ID NO: 226117 - DNA, 2100 bp, synthetic construct
  misc_feature 1..2100: note = Description of Artificial Sequence: Synthetic coding sequence
  source 1..2100: mol_type = other DNA
atggggcatcacaggccgtggctccatgcatccgtcctttgggctggagttgcctccttgctgttgcccccagccatgacccagcagttgcggggtgacggtctcggctttagaaatcgcaacaactctactggggtcgcaggactgagcgaggaagcttcagctgagctgaggcatcatctccacagcccgcgtgatcatcctgacgagaacaaggatgtgtcaaccgagaacggacaccatttttggtctcacccagaccgtgagaaagaagacgaggacgtaagtaaagagtatgggcatctcctccctgggcacagatcgcaagaccacaaggttggtgacgagggcgtgtcaggcgaagaagttttcgcagagcatggtggccaggctcgaggacaccgaggacacggctcagaagacactgaggatagtgccgaacaccggcaccatctgccatcacatcgatcacattctcaccaagatgaggacgaagacgaagtggtgtcttctgaacaccatcaccacatcctgcggcatggccatcgcggacacgatggtgaggatgatgaaggtgaagaggaggaggaggaggaagaggaagaggaagaagccagtactgaatacggtcaccaggcgcataggcacaggggacacggcagcgaagaggatgaagatgttagtgacgggcatcatcaccacgggccttcacacagacaccaggggcatgaagaggatgatgacgatgatgacgacgacgacgacgatgacgacgatgacgacgttagtatcgagtaccggcatcaggctcaccgtcaccagggccacggaatcgaggaagatgaagatgtgtcggacggacaccaccatcgggatcctagccatagacatcgatctcacgaagaagatgacaacgatgacgatgacgtcagtaccgagtacggccaccaggcgcatcgccaccaggaccaccgtaaagaggaagtcgaggcagtgagcggagaacaccaccaccacgtccccgatcatagacatcagggccaccgggatgaagaagaagatgaggatgtcagcacagagcgctggcaccagggccctcagcacgtgcaccacggactggtagatgaagaggaggaggaggaagaaatcacggtacaatttggacattacgtggcgtcccaccaaccacgcggtcacaagagcgacgaagaagactttcaggatgagtataagaccgaggtgccccaccaccaccatcacagggtgccaagggaggaagatgaggaagtgagtgccgaattggggcaccaagccccttcacacagacagtctcaccaggatgaggagaccggacacggacaacgaggctcaatcaaggaaatgtcccatcacccaccgggacatactgtagttaaggacaggagtcacttaaggaaggacgatagcgaagaagagaaggaaaaagaagaagaccccggatctcacgaggaagacgacgagagctctgaacagggtgaaaaagggacacatcatggctccagagaccaagaggacgaagaggacgaagaggaaggacacgggctgtcactgaaccaggaagaagaggaggaagaagacaaggaggaagaagaggaggaggaggatgaggaaaggagggaggagagagccgaggttggcgctcctctctcgcctgaccattcagaagaggaagaggaggaggaagagggtctggaggaggatgagccacgctttactatcattcctaatcctctagaccggagggaggaagcaggcggagctagctctgaagaagaaagtggggaagacacaggcccacaggacgctcaggagtacggaaactatcagcccggatccctctgtgggtattgcagtttctgtaaccggtgtaccgagtgcgaaagttgtcattgcgatgaggaaaatatgggggaacattgcgatcagtgccagcactgccagttctgctatctgtgtcccctagtctgtgaaactgtgtgtgcacctgggagctacgtggactacttttccagcagtctataccaagccctggctgacatgctggagactccagaaccctag

SEQ ID NO: 226118 - DNA, 1170 bp, synthetic construct
  misc_feature 1..1170: note = Description of Artificial Sequence: Synthetic coding sequence
  source 1..1170: mol_type = other DNA
gaagacgacaatgacgatgatgacgtgtctacagagtacggacaccaagcccacagacaccaggatcataggaaagaggaggtcgaagcggtgagcggggaacaccaccatcatgtgccggaccacagacaccagggccacagggatgaggaagaagatgaggacgtcagcaccgaacgttggcaccagggtcctcagcatgtgcatcatggccttgtggatgaggaggaggaagaagaagaaatcacagtccaatttggacactatgtagccagccaccagccaagaggacacaagagcgatgaggaggattttcaggacgagtataagacagaggtgcctcaccatcaccatcacagagtccctagggaggaggatgaagaggtgtcagctgagttggggcaccaggcccctagccatcgccagagtcatcaggatgaggagaccggccacggccaaagagggagcatcaaagaaatgtcccatcaccctcctggacacaccgttgtcaaagatcggtcacaccttcggaaagatgattctgaggaagaaaaagagaaagaagaagatcctggtagccacgaggaagatgacgaatcgtcagagcagggtgagaaagggacgcaccacggtagcagggatcaggaagacgaggaggatgaggaagagggtcacggacttagtctgaaccaagaagaagaggaggaggaggacgaggaaagacgagaagaacgggcagaggtcggtgctcccctgtcccccgaccacagtgaggaagaagaagaggaagaggagggacttgaggaagatgagccaaggtttaccatcatccctaaccctctggatcgcagggaggaggctggcggtgcaagcagcgaagaagaaagtggcgaagacacggggccacaggatgcccaagagtacggcaattaccagcccggaagcctgtgtggatattgttcattttgtaatcgctgcacagagtgcgagtcttgtcattgcgacgaagagaatatgggggagcattgtgaccagtgtcaacactgccagttttgctatttgtgtcctcttgtttgcgaaacggtgtgcgcacccggatcatatgtggactacttttcctccagtctctaccaggccctcgctgatatgctcgagacgcctgaaccctag

SEQ ID NO: 226119 - DNA, 1365 bp, synthetic construct
  misc_feature 1..1365: note = Description of Artificial Sequence: Synthetic coding sequence
  source 1..1365: mol_type = other DNA
atggggcaccacagaccgtggttacacgcttccgtactctgggctggtgtcgcctccctcctgctgcccccagcgatgactcaacaactccgaggggatgggcttggattcagaaatcggaacaaggatgtcagcacggagaacggccaccacttttggagccatcctgatcgagagaaggaagacgaggacgtaagcaaggagtatggccaccttctgccgggtcaccggagtcaggaccacaaggtaggcgacgagggagtatcaggagaagaagtttttgccgagcatggtgggcaggcacggggtcaccggggacacggaagtgaagatacggaagactcagcagagcatagacatcaccttccatcccaccgaagccacagtcaccaagacgaggatgaggacgaagtcgtctcttcggaacatcaccaccatatcttgagacatggccacagaggacacgacggggaggatgacgaaggggaagaggaggaggaggaggaggaagaggaggaggaagcgtctaccgaatacggtcatcaagcccaccgccacagaggacacggatcagaagaagacgaagatgttagcgacggtcatcaccatcacggcccttcacatagacatcaaggacatgaagaagatgatgacgacgacgacgatgacgatgacgatgacgacgatgatgatgtcagtatagagtatcgccaccaggcccataggcaccaaggacatgggatcgaagaagatgaagacgtctcggatggccatcaccacagggatccgtctcaccgccaccgctcgcacgaggaagatgacaatgatgatgacgatgtgagcaccgaatatgggcaccaggcacaccgccaccaggaccaccgcaaagaagaggtggaggccgtaagtggcgaacatcatcatcatgtccccgaccacagacaccagggccaccgagatgaggaagaggatgaggacgtctcaacagagagatggcaccagggccctcagcacgtgcatcacggtctggtggacgaggaagaggaggaagaggagattactgtccagttcggacactatgtagcctcacatcagccccgtgggcacaaatcggacgaagaagactttcaggatgaatacaaaacagaggttccacaccaccaccaccatcgtgtgcccagggaggaagacgaagaagtctcagctgagctcggacaccaagccccaagtcataggcagagccaccaagacgaggagactggtcatgggcagagaggatctattaaagagatgagccaccatcctcctgggcacaccgtggttaaggacagatcccatctccggaaggatgacagcgaggaatag

SEQ ID NO: 226120 - DNA, 381 bp, synthetic construct
  misc_feature 1..381: note = Description of Artificial Sequence: Synthetic coding sequence
  source 1..381: mol_type = other DNA
atggctgacgagatagccaaagcacaagtggcaagacctggcggagacactatttttggaaagataatccgtaaggaaatcccagcaaagatcatctttgaggatgatcgctgtttagccttccacgatatcagtccccaagccccaactcatttcctggtgatcccgaagaagcacattagtcagatcagcgttgctgaagatgacgacgagagcttgttaggtcatcttatgatagtgggaaagaaatgcgccgctgacctgggcctgaataaagggtataggatggtcgtaaatgaaggctctgatgggggacaatcagtctaccacgtccacttgcatgtcctagggggacgccaaatgcattggcccccaggctag

SEQ ID NO: 226121 - DNA, 492 bp, synthetic construct
  misc_feature 1..492: note = Description of Artificial Sequence: Synthetic coding sequence
  source 1..492: mol_type = other DNA
atggccgctgctgtagtgctcgccgctgggttgagggccgctcggagagccgtcgcagccactggggtgcggggtgggcaagtccgcggtgcagctggcgtgaccgatgggaacgaggttgctaaggcacagcaggctacacctggtggcgctgcaccaacaatcttctcaagaatattggacaaaagcttaccagccgacatactgtatgaagaccagcagtgcctggtcttcagggatgtggcaccacaagccccagttcattttcttgtgatacccaagaagcctatcccacggatctcccaagcggaggaagaagaccagcagttgcttggccacctccttcttgtggctaaacagactgcaaaagccgagggtctgggcgacggatacaggttagtgataaacgacggcaaactcggcgctcagtcagtttaccatttgcacatacacgtgctcggtggaaggcagctgcaatggccacccggttag

SEQ ID NO: 226122 - DNA, 615 bp, synthetic construct
  misc_feature 1..615: note = Description of Artificial Sequence: Synthetic coding sequence
  source 1..615: mol_type = other DNA
atggcgaaagttcaggtcaacaatgtggtggtccttgataacccatcaccattttataacccgttccagttcgagattaccttcgagtgtatcgaggacctgagtgaagacctggagtggaagataatctacgtaggatcagccgagagcgaggaatatgatcaggtactggacagcgtcttggtaggacctgtccccgctggacggcatatgttcgtcttccaggcagacgctccgaacccaggtctgattcctgacgctgatgcagtgggggttactgtcgttctgattacctgcacgtacagaggccaggagtttatcagagtaggatactacgtgaataatgaatacacggaaacggagctgcgagaaaatcccccagtgaagccagatttctctaaacttcaaagaaacatcctagcgtccaatcccagagtaactcggttccacattaactgggaagataataccgagaagctggaggacgcagaatctagcaatccaaacttacagtccctgctgtctacggacgctttgccctctgcatccaaagggtggagtactagcgagaactctctcaacgttatgctggagtctcacatggactgtatgtag

SEQ ID NO: 226123 - DNA, 1329 bp, synthetic construct
  misc_feature 1..1329: note = Description of Artificial Sequence: Synthetic coding sequence
  source 1..1329: mol_type = other DNA
atggccggagaaggcgatcaacaggatgccgctcacaacatgggcaaccatctgccattgctgcctgcggagagcgaagaggaggacgaaatggaggtggaagatcaggactctaaggaggcgaagaaacccaatataatcaactttgatacctctctgcctacttcccacacttacctcggtgctgacatggaagaatttcacgggagaaccctgcacgacgacgactcctgtcaggtaataccagtgctgccacaggtcatgatgatcctgatcccaggacagacattaccactacagctgtttcacccacaggaggtgagcatggtccgcaacctgatccaaaaggacagaacattcgccgtgctcgcctactcaaatgtccaggagagggaagctcagtttgggaccaccgctgagatctacgcttacagggaggagcaggattttggaattgagatcgtaaaggtgaaagcaatcggtcggcaaagattcaaagtgttggaactgaggactcaatctgatgggatccagcaagcaaaagtgcagattttacctgaatgcgtgctgccctccacaatgagcgccgtgcagctggagtcgcttaacaaatgccaaatcttcccctccaagcctgtttctcgtgaagaccaatgctcttataagtggtggcagaaataccagaagagaaagttccactgcgcgaatttaacaagttggccacgctggttgtattccctttatgacgccgaaacactcatggaccgcattaagaaacagctgcgcgagtgggatgagaacctcaaggacgattctttacccagcaatcccatcgacttcagctatagggtggccgcttgtttacccatagatgacgttctgagaatccagctgctcaaaatcggcagtgcgatccagagactacggtgcgagctcgatattatgaacaagtgtacatctttgtgctgcaagcagtgccaggagacagaaatcacgactaaaaatgagatattttctctttcactgtgtgggccaatggcagcctacgtgaatccacacggttacgtccacgagacactgacagtttacaaagcttgcaacctgaacttgataggtcgacctagcacggagcacagctggttcccagggtatgcttggaccgtcgcacagtgcaaaatctgcgcaagccatataggttggaagtttactgctacaaaaaaggacatgtctccacagaagttttggggcctaacccggtccgcactcctgcccaccatccccgacactgaagacgagatctcgcccgataaggttatcctatgcctgtag

SEQ ID NO: 226124 - DNA, 1308 bp, synthetic construct
  misc_feature 1..1308: note = Description of Artificial Sequence: Synthetic coding sequence
  source 1..1308: mol_type = other DNA
atggcagagagagccgctctagaggagctggtgaaactgcagggggaaagagtccggggactgaaacagcagaaggccagtgccgagctcatagaagaggaagttgctaagctgttaaaactaaaagctcagctggggcctgatgaatctaagcaaaagttcgtgctaaaaacccccaagggcaccagagactacagcccacggcaaatggcagtacgggaaaaggtgttcgacgttatcatcagatgttttaaacgccacggggctgaggtgatcgacacgccagtgttcgagctcaaagacttcgacatcgctggtaatttcgaccccatgattcccgacgccgaatgccttaaaattatgtgcgaaattctttcaagcctccagatcggcgacttcttggtgaaggtgaatgatcgacgaattttagatgggatgttcgccatatgcggggtgagcgactccaaatttcgtacaatctgctcttccgtcgacaagttagataaggtgtcatgggaggaagtcaaaaacgagatggtgggtgaaaagggactggccccagaggtggccgaccggatcggggactacgtccaacagcacgggggagtcagtctagttgaacagcttctgcaggaccccaagttgtctcagaacaagcaagccctggaggggctgggggatcttaagctcctgtttgagtacttaacactcttcggcatagatgacaaaatttctttcgacctgagcctggcgagggggctcgactactacactggcgtcatttacgaggctgtgctgttgcagaccccagctcaagcaggcgaggagccgttgggcgtaggttcagtggccgcaggtggcaggtatgatgggctggtcggcatgtttgacccaaaaggcaggaaagtaccatgcgtaggcctgagcataggtgtcgaaagaatattcagcattgtggaacaacgcctggaggcccttgaggagaagataaggactactgagacacaggtgctcgtggctagtgcacagaagaaactcctagaggagcgcctgaaactggtctcggaactgtgggatgcaggcatcaaagccgaacttctgtacaagaaaaaccccaaactgctgaaccagttgcagtactgcgaagaagccggtattccactggtggcaatcataggggagcaagaactgaaagatggggtaatcaagctgcggtctgttaccagccgcgaggaggtcgacgttcgcagggaagatctcgttgaggaaattaagcggagaacaggtcagcctctctgcatttgctag

SEQ ID NO: 226125 - DNA, 1188 bp, synthetic construct
  misc_feature 1..1188: note = Description of Artificial Sequence: Synthetic coding sequence
  source 1..1188: mol_type = other DNA
atggctgaacgtgcagctctcgaagaattggtcaagctgcagggtgagagagtaagagggttaaaacagcaaaaagccagcgctgagttaatcgaggaagaagtcgctaaactcctgaagctcaaggcacaactgggaccagatgagtccaagcagaaattcgtcttaaagacccccaaggattttgatatcgctggtaacttcgatcccatgatcccagatgccgaatgtctgaaaataatgtgtgaaatcttatcttctctacagataggtgacttcctcgttaaggtgaacgatcgtaggatcctggatggcatgtttgctatctgtggggtgtcagattccaaatttaggaccatctgttcttctgtagataagctggataaagtgtcttgggaagaagttaagaatgaaatggtgggggaaaaagggcttgcacctgaggtcgccgatcggatcggagattatgtccagcagcacggcggagtgtccctggtcgaacagttgttacaagaccccaagttgagccagaataaacaggccctggaggggctgggagacctgaagttactctttgagtacttgacgctgtttggcattgacgacaaaattagcttcgacctgtctctggcccgtggcctcgactactatacgggagtcatatacgaagcagtcctattgcagacccccgctcaagcgggtgaagaacccctgggcgtcgggagcgtagcagctggcggtagatatgacgggttagtgggcatgttcgatcccaaggggaggaaggtgccctgtgtggggctgtctatcggcgtggagaggattttctctatagtcgagcagcgcctggaggcgcttgaggaaaagatacgtactacagagacacaagtcctcgttgcaagcgcccagaaaaagctgctggaggaacggctgaaactcgtgtccgagctgtgggacgccggaattaaggccgagttgctctacaaaaagaatccgaagctcctgaatcagctgcagtattgtgaggaagccggtatccccttagtggccatcattggcgagcaagaactcaaggatggtgtaattaagctgagaagcgtgaccagtagagaggaggtagacgttcgcagggaggacctggtagaggagatcaagaggaggactggacaacccctctgcatctgttag

SEQ ID NO: 226126 - DNA, 1410 bp, synthetic construct
  misc_feature 1..1410: note = Description of Artificial Sequence: Synthetic coding sequence
  source 1..1410: mol_type = other DNA
atggctgaaagggccgctcttgaggagctggtgaaactacagggtgagcgggtacggggtcttaagcaacagaaggcttcagcagagctgattgaagaggaagtcgccaagttacttaaattaaaggctcagttgggacccgatgaaagcaaacaaaaattcgtgctgaagactcccaaggaaacgctgatgggcaagtacggcgaagactccaagctgatttacgacctgaaagaccagggaggggagctgttgagccttcgttatgacctgactgtaccctttgcccgataccttgctatgaacaagttgacgaatatcaaaagataccacatcgctaaggtttacagacgggataatccagctatgaccagaggtaggtacagagagttctatcaatgtgacttcgacattgccggtaactttgacccgatgatccccgatgcagaatgcttgaagattatgtgcgaaattctctcaagcctgcagattggcgactttcttgtcaaggtcaatgacaggcgcattctcgacggtatgttcgctatctgcggcgtgagcgacagtaagtttagaacaatatgctcgagtgttgataaattggacaaggtgtcctgggaggaggtgaagaatgagatggtgggggaaaagggactcgcccctgaggtagccgaccggatcggcgattatgttcaacagcacggaggagtgtcgctcgtagagcagctattgcaggatcccaagttaagtcagaacaaacaagctctggagggcttaggagatttaaaactgctgttcgaatacctgacactgttcggaattgatgataagataagctttgacttgagcctggcccgaggtctagactactatacaggcgtgatctacgaggcagttctgcttcaaacacctgcccaggcaggagaagagccactgggcgtcggctctgttgcagctggaggtaggtacgatgggctggtcggtatgttcgaccccaagggtagaaaagtcccgtgtgttggcttgtctattggagtggaaaggattttctccattgtggagcaacgcttggaggccctggaggagaaaatcaggacaaccgaaacccaagttctagtggcctcagcccagaagaaattgttggaagaacggctcaaactggtaagtgaactgtgggacgcaggaatcaaggccgaacttctttataagaaaaaccccaaactcttgaaccagttgcagtactgcgaggaggccggtatccctcttgtggccataatcggcgaacaggagctgaaagacggcgttataaagctccggtcagtaacttctagggaagaggtggatgtcaggagggaggatctggtagaggagattaagcgacgtactgggcaacccttgtgcatctgctag

SEQ ID NO: 226127 - DNA, 945 bp, synthetic construct
  misc_feature 1..945: note = Description of Artificial Sequence: Synthetic coding sequence
  source 1..945: mol_type = other DNA
atgacccggggacgctatcgagaattctaccagtgtgactttgatatcgccggtaatttcgaccctatgatccccgacgccgaatgtctgaaaattatgtgtgagattctgagcagtctgcaaataggggatttcctagtgaaagtttcatgggaagaggttaagaatgagatggtgggcgagaagggtctggccccagaggtcgccgatcgaattggggattacgttcaacaacacggtggagtgtcattagtggaacagctcctgcaggacccaaaactcagtcagaataaacaggccctcgagggactgggagacttgaagctgctgttcgagtacttgactctcttcggcatagacgataagatctccttcgacctgagccttgctaggggattggactactatacaggggtaatctatgaggccgtgctcctgcagacccccgctcaagcaggtgaagaaccactaggagtcggcagcgtggctgccggtggcagatacgacggcctggtaggtatgtttgatccaaagggcaggaaagttccctgcgttgggctttcaatcggagtggagcgcatttttagtattgtggaacagcgactggaagcgctcgaagagaagatcaggacaacagagacacaggtactggtagcctcggctcagaaaaaactcctggaggaacggcttaagctggtttccgagctgtgggacgcaggcattaaggctgagctgctgtacaaaaagaacccgaagctcttgaaccagctacagtactgtgaagaggcgggaattccgttggtggctattattggagaacaagagctgaaagatggcgtcattaaacttcgatctgtaacaagtcgcgaggaggttgatgtaagacgcgaggatctagtggaagagattaagcggagaacagggcaacctctatgcatttgctag

SEQ ID NO: 226128 - DNA, 1530 bp, synthetic construct
  misc_feature 1..1530: note = Description of Artificial Sequence: Synthetic coding sequence
  source 1..1530: mol_type = other DNA
atggcggagcgggctgctctagaggaactagtgaagctgcagggagagagggtgcgcggtttgaagcagcagaaggcctcagccgagctcatcgaggaggaagtggccaaactgctcaagctgaaagcacagctgggccctgacgagagtaagcagaagtttgtcctgaaaactcccaagggaactagggattacagcccaaggcaaatggctgtgcgcgagaaggtgttcgacgtaataatccgttgctttaaacggcatggggcagaagtaattgatactcccgtcttcgaactgaaagagaccctgatgggcaagtatggggaggactccaagctgatatacgatcttaaagaccagggcggtgagttgttgtcccttaggtatgacttaaccgtgccctttgccagatatctggcgatgaacaagctaacaaatatcaagagataccatatagccaaggtgtatcggagagacaaccccgctatgaccaggggcaggtatcgtgagttctaccagtgcgacttcgacattgccggaaacttcgatcctatgatccccgacgcagagtgtttgaaaattatgtgcgaaatcctgtccagcctgcagatcggggatttcctggtcaaagttaacgataggcggatcttggatggtatgtttgctatatgtggcgtgtccgacagtaagtttcggaccatctgttcttctgttgataaactagataaagtttcctgggaggaggtcaagaatgagatggtcggagaaaaggggttagcacctgaggttgccgacagaataggggattatgtgcagcagcacggaggcgtgtcactggtggaacagctgttacaggacccaaaactgtcccagaacaaacaggctctggagggcctgggcgatctgaagctgctctttgaatacctgacactgttcggcatagatgataagattagtttcgatcttagcctcgcaagaggattggactactatactggggtcatttatgaagcagtcctcctccagaccccagcccaagccggagaggagcccttgggtgtagggtcagtggcggctggtggaagatatgatgggctcgtgggcatgttcgaccccaagggacgcaaggttccatgtgtgggcctcagcattggagtggagcggatcttcagcatcgtcgagcagaggttagaagccctcgaagaaaaaataagaactactgagacacaggtactcgtggcctccgcgcagaaaaagctcctggaggagagactgaaactggtaagtgaactctgggacgctggtattaaggccgaactcctgtacaaaaaaaatccgaagctactgaatcaactgcagtattgcgaggaggccggaattccgctggttgctatcattggggaacaggagttaaaggacggagttatcaaactcagatccgtgacttctagagaggaggtagacgtccgcagggaggatctggtggaggaaattaaaagaagaactggacagcccttgtgtatatgttag

SEQ ID NO: 226129 - DNA, 1323 bp, synthetic construct
  misc_feature 1..1323: note = Description of Artificial Sequence: Synthetic coding sequence
  source 1..1323: mol_type = other DNA
atggcggtgcgagagaaggtgtttgacgttatcattcgctgcttcaagcggcacggcgctgaggtgatcgatacccccgtgttcgagcttaaagagaccttgatgggcaagtatggcgaggatagcaaactaatttacgatctgaaggaccagggaggtgagcttctctcccttcggtacgaccttaccgttccttttgccagatatcttgcaatgaacaaactgaccaacatcaaaagatatcatatcgccaaggtgtacaggcgggataacccagctatgacaaggggtaggtatcgtgagttctaccaatgcgactttgatatagcaggcaacttcgatccaatgatcccagatgcggagtgtctgaagattatgtgcgagattctttcatcgttgcaaatcggtgactttttagtcaaggtgaacgaccgacggatcctggatggaatgttcgccatttgtggggtgagtgactccaagtttcgcaccatctgtagtagcgtcgacaaacttgacaaagtgtcttgggaggaggttaaaaacgaaatggtgggagagaaaggccttgctccggaggttgctgatcgcatcggcgattatgtccagcaacacggtggcgtctcactggtggaacagcttttacaggacccgaaattgtcccaaaacaaacaagccctggaggggctcggcgacttgaaactcttgttcgaatacctcaccctgttcggcattgatgataagatcagctttgacctcagcttggctcggggtttagattactacaccggggttatctatgaggcggtcctcctgcaaactcccgctcaggctggcgaagaacccctcggggtgggctccgtagctgcaggcggacggtacgatgggctggtgggtatgtttgatcccaagggaagaaaagttccgtgtgtgggactcagcataggggtcgaaaggatatttagcattgttgagcagaggttggaggctttggaagagaagattcgcacaaccgaaacccaggtgctggtggcttctgctcagaagaaattgctggaagaacggttaaagttggtgtctgagctctgggatgctggaataaaagctgaactgctctacaaaaaaaaccccaaactcctgaaccagctgcagtactgtgaggaagctgggatcccacttgtagccattatcggggagcaggaactcaaggatggagtgattaaactgagaagtgtgacaagcagggaagaagtagatgtacgcagagaggatcttgtggaagaaatcaaaaggcggacagggcaacctttatgtatctgttag

SEQ ID NO: 226130 - DNA, 867 bp, synthetic construct
  misc_feature 1..867: note = Description of Artificial Sequence: Synthetic coding sequence
  source 1..867: mol_type = other DNA
atggcagaaagggccgcactagaggaactggtcaagctgcagggtgagagggtccggggactgaaacagcagaaagcttctgccgagctgatagaagaggaggtcgcaaaactgttgaagctaaaggcccaactgggacctgacgagtccaagcagaagtttgtgcttaagacccccaagggcacacgggactacagcccaaggcagatggcggtcagagaaaaggttttcgacgttatcattcggtgttttaagcggcacggtgctgaagtaatcgatacccccgttttcgaattgaaggtgaacgacaggcgcatccttgacggcatgttcgccatctgcggcgtgagcgatagcaaatttcgcactatatgttccagtgtggataaattggataaggtgtcttgggaagaagtgaaaaatgaaatggtgggggaaaagggactcgctccagaggtggctgatagaatcggagactatgtgcagcaacacggaggagtgtcgctcgtggaacagctcctgcaggaccccaaactgtcacagaacaagcaagcattagaagggctcggggatcttaagctacttttcgagtatctgaccctgttcgggatcgatgataagatctcctttgatctgagcctggccagaggtctagactattatactggcgtaatctacgaggccgtccttcttcaaacacctgcccaggctggggaagaacccctcggtgtgggcagcgttgccgctgggggacgctatgacggcctggtcggcatgttcgatccaaaagggagaaaagtgccatgcgtcggcctctccatcggggttgagcgaatcttcagcatcgtggaacagcgattagagtag

SEQ ID NO: 226131 - DNA, 1350 bp, synthetic construct
  misc_feature 1..1350: note = Description of Artificial Sequence: Synthetic coding sequence
  source 1..1350: mol_type = other DNA
atggcagagcgagcagctctggaagaactggttaagctgcaaggagagagggtacgcggacttaaacaacagaaggcttcggccgagctgattgaggaggaggtggctaagttgctgaaacttaaagcacaactaggcccagacgagagtaagcaaaaattcgtcttgaaaacccctaaagaaaccctcatggggaaatacggggaagatagcaaactaatctatgacctgaaggatcagggaggcgagttgctgtccctcagatacgacctaaccgtcccattcgccagatatcttgccatgaataagttgacaaacataaagcggtaccacatagctaaggatttcgacatagctggcaatttcgacccaatgattcccgatgccgaatgcctgaagatcatgtgcgaaatactgagctctctccagatcggtgactttttagtgaaggtcaatgacaggcggatactggatgggatgttcgccatttgcggagtaagcgattcaaaattccgcacaatttgcagctcagttgataaactggataaggtgagttgggaagaggttaagaatgaaatggtgggagagaaagggctggctcccgaagttgccgaccggatcggagactacgtacagcaacacgggggtgtgtcactggtcgaacagctacttcaggatcctaagctgtcccaaaacaaacaggctttagagggcctgggagaccttaaactgctatttgaatatcttaccctgttcggcattgacgacaaaatctcattcgatctttccctcgcacgcggtcttgactattataccggtgtgatttacgaagcagttctgctccaaacccctgcccaggccggtgaggagccactgggcgtgggaagcgttgcagcgggaggacgctacgatggacttgtgggaatgtttgatcctaaagggagaaaagtcccttgcgtcgggctctccataggggtggaaagaattttttccattgtggagcagcggctggaggcccttgaggagaaaatccgaacaactgagactcaagtgctcgtcgcgtcggcacaaaaaaaactgcttgaggagcgcctgaagctagtgagcgagctctgggatgcagggattaaagcagaactgctatataaaaaaaacccaaagctcctcaaccagcttcagtattgcgaagaggccggaatacccctggtcgcaattatcggcgagcaggagctgaaagacggagtgatcaagttgagatccgtcacttcccgagaggaagtggatgttcgcagagaagatctcgttgaagagattaagaggagaaccggacagcccctgtgtatttgttag

SEQ ID NO: 226132 - DNA, 1470 bp, synthetic construct
  misc_feature 1..1470: note = Description of Artificial Sequence: Synthetic coding sequence
  source 1..1470: mol_type = other DNA
atggctgaacgggctgcactcgaagagctggttaaattacagggtgaacgcgtgcgcggattgaagcaacagaaggctagcgccgaactgatcgaggaagaggtggcaaagctgctcaagctgaaggctcaactgggtcctgacgagtcaaagcagaagtttgtgttgaaaacccccaagggcacacgggactactcgccacggcagatggctgtcagggagaaggtgttcgatgtcattatcaggtgtttcaaaagacacggcgctgaagtcatcgataccccagtctttgagctcaaggaaaccttgatgggaaagtatggggaggactctaagttgatttacgatcttaaggaccagggtggagagctcctgagcctgcgctacgacctgaccgtgccattcgccaggtacctggctatgaataagctgaccaacattaagcgatatcatatcgcgaaggactttgatattgccggtaatttcgaccccatgatccccgacgccgagtgcctaaaaatcatgtgtgagatcctcagtagtcttcaaatcggtgacttcctagtgaaggtgaacgacaggcggatcctggacggcatgttcgctatttgcggtgtcagcgactcaaaatttaggaccatatgttcgtcagtggacaaactggataaagtgtcttgggaggaggtcaagaatgagatggtcggggagaaaggtctcgctcctgaggttgctgacagaattggcgattatgtccagcagcacggtggagtgtccttggtagagcagctactgcaggatcctaaattgagtcagaataagcaggccctggagggcctgggcgatctcaagctgctgtttgaatacttaaccctgttcggcatcgacgacaagattagctttgacctttctttggccagaggcctcgactactatacgggagtgatttacgaggccgtgctactgcagaccccagcccaggctggggaggaaccactgggcgttggctctgtggccgcaggcggtcgctacgatggtctggtaggtatgttcgaccctaagggaagaaaggtaccctgcgtcggcctgagtattggggtggagcggattttttcaattgtggaacagcggctggaggctctagaagaaaaaattagaactaccgagacccaggtgcttgttgcctccgctcaaaaaaagctcttggaggagcggctgaaactcgtgagcgaactttgggacgcgggaatcaaggcagaactgctgtataagaagaacccaaaactcctgaaccagctccaatattgtgaggaagccggtattcccctcgtcgcaatcatcggcgagcaggaactgaaggatggggtgatcaagctgaggtctgttacctctagggaggaggtcgacgtccgcagggaggacctcgtcgaggagatcaaacgacgaacaggtcaacccctgtgcatttgctag

SEQ ID NO: 226133 - DNA, 1017 bp, synthetic construct
  misc_feature 1..1017: note = Description of Artificial Sequence: Synthetic coding sequence
  source 1..1017: mol_type = other DNA
atgatggcaatgaattcaaagcaaccattcggaatgcacccggtcctgcaagagcccaaattcagctccctccatagcggctccgaagcaatgaggagggtctgtcttcctgctcctcagcttcaaggcaacatttttggctcctttgacgagtctctgctggcgagggcggaagcactggctgccgtcgatattgtctcccatggtaagaaccaccctttcaaacccgatgccacatatcacaccatgagctctgtgccatgcacctctacttctagtaccgttccgatctcccaccctgctgcattgacatctcatccgcatcatgctgtgcaccagggacttgagggtgacctcctggagcatatttcccccaccctgtctgtttctggcctcggcgctcccgaacactcggtgatgcctgcacagatccatcctcatcatctgggcgctatggggcatttacaccaggccatgggtatgagccatccccatacagtggcccctcatagcgccatgcccgcttgcctgtcagacgtagaatcggatccaagggagctcgaagcatttgccgaacgctttaaacagcgtcggataaagctgggggtgacgcaggcagatgtgggggctgccctcgctaacttgaagattccgggagtcggcagcctgtctcagagcacgatttgcagatttgagtctctcacattgtcccataataacatgattgcactgaagcctgttctgcaagcttggcttgaagaggctgaggcagcatatagagagaaaaattctaagccggagctgttcaacggttccgagagaaaacgaaaacgcacttcgattgccgctcctgagaaaagatcattggaggcttattttgctattcagccgagaccttcttccgaaaaaatcgctgctattgccgagaagctcgatttgaagaaaaatgtggtccgagtctggttctgtaaccaacgccaaaagcagaaaaggatgaaatattccgccgttcattag

SEQ ID NO: 226134 - DNA, 1038 bp, synthetic construct
  misc_feature 1..1038: note = Description of Artificial Sequence: Synthetic coding sequence
  source 1..1038: mol_type = other DNA
atgacgctccttgaagtgccattcgcgcgataccttgccatgaataaggttaagaaaatgaaacggtaccatgtgggcaaagtatggagaagggaatcccctacgattgttcaagggcgatatagggaattttgccagtgcgattttgatatcgccggacagttcgatcccatgatccctgatgctgaatgtttgaagattatgtgcgagatactatccggcctgcagctaggagattttctgataaaaatggcgtggaaagatgtgaggcacgaaatggtagttaaaaaaggccttgctcccgaggtagcagataggataggcgattacgtgcaatgtcacgggggtgtgagcctcgtggaacagatgtttcaggatcctcgcctttcccagaataaacaggcccttgagggcttgggcgatctaaagctgctttttgaatacctgacactgtttggaatcgcagataagatcagcttcgacctgtcactcgctaggggattggactactacacaggcgtcatctatgaagctgtcctgttgcagacaccaactcaggctggggaagagccactgaacgtggggagcgtcgccgctggcggaagatacgacggtcttgtggggatgtttgatcccaaaggtcacaaggtgccctgtgtaggcctatctatcggtgtcgagcgaatcttttatatcgtggaacaaaggatgaaaacgaagggagagaaggtccgcacgacagaaacgcaagtgttcgtggctacgccccagaagaacttcctacaagagcggctgaaactaattgccgaactgtgggactccggtatcaaagccgagatgctttacaaaaacaatccaaagctgctaacccaattacattattgtgaaagtacaggtattccactcgtggtgatcattggggagcaagagctgaaggaaggagtcattaagatccgatctgtggcctccagagaggaggtcgccattaagagggaaaatttcgtggcagaaatccagaaaagactgtccgaaagctag

SEQ ID NO: 226135 - DNA, 1179 bp, synthetic construct
  misc_feature 1..1179: note = Description of Artificial Sequence: Synthetic coding sequence
  source 1..1179: mol_type = other DNA
atgcctctactggggttactgcctcgccgagcttgggctagcctcctgagccagcttctgcgccctccctgtgcctcctgtaccggagctgtgcggtgccagtcacaggtagcggaggcagtattgacctctcaactgaaagcccaccaagaaaaacctaacttcattatcaaaactccgaaagattttgatattgctggtcagtttgaccccatgatcccagatgcagagtgcctgaaaattatgtgtgagatcctgtccgggttgcagctgggcgacttcctgatcaaagtaaatgataggaggatagtcgacgggatgttcgctgtgtgcggggtcccagagtctaagtttcgcgcaatttgcagctctatcgacaagctcgacaagatggcgtggaaggatgtgaggcacgaaatggttgtcaagaaaggattagccccagaggtggctgacagaattggagattatgtgcagtgtcatggcggagtcagtctggtggaacaaatgttccaggacccaaggctatcccagaataagcaggccctcgaaggcctgggagacttaaagctgctcttcgaatacctcaccctgttcggcatcgcagacaagatctcttttgatctcagcctcgcacggggattagactactataccggagtaatctacgaagcggtcctgctacaaacacccactcaggccggtgaggagcccctcaatgtgggtagcgtggccgctggaggccgttatgacggactggtggggatgttcgatcctaagggtcacaaggtaccctgcgttggtctgagcattggggtggagcggattttttacatcgtcgagcagcgaatgaagactaaaggcgagaaggtgagaactacagaaacccaagtgttcgtagccactcctcaaaagaactttctgcaggagcggttaaaactcattgccgaactttgggactcaggcatcaaagccgaaatgttatataaaaataaccccaagctcctgacacaattgcattattgtgaatcaacaggcatccctctcgttgtcatcatcggcgagcaggagctgaaggagggggttattaaaattaggtccgtcgcatctcgcgaagaggtcgcaattaaacgcgagaattttgtggcagagatccagaaacgtctgtccgaatcctag

SEQ ID NO: 226136 - DNA, 1401 bp, synthetic construct
  misc_feature 1..1401: note = Description of Artificial Sequence: Synthetic coding sequence
  source 1..1401: mol_type = other DNA
atgcctcttctgggattactccctcggagagcctgggcatctctgctgtctcagctgctcaggccaccctgtgcatcttgcacaggcgctgtgcggtgccagagtcaagtggcggaagccgtgctcacgagtcaattaaaagcccatcaggagaaacccaacttcataatcaagactcctaaggagactctgaccgagaaatatggcgaagacagcggacttatgtatgatttgaaggaccaaggtggagagctcctgtccttgaggtatgacctcacagtccccttcgccaggtacctggctatgaacaaggtgaagaaaatgaagcgctatcacgtgggaaaagtctggcggagggagagcccaaccatagtgcagggtcggtaccgggaattctgtcagtgcgacttcgatatcgccggacagttcgatcctatgattcctgacgccgaatgcttaaagatcatgtgcgaaatcctgagcggcttgcagttgggcgatttcttaattaaagtcaacgacaggcgaattgttgatggaatgttcgcggtgtgcggcgtacccgagagcaagttcagggccatttgctcctcaatcgataagttggacaagatggcctggaaggacgtccgccacgagatggtggtgaaaaagggcttggcccctgaagtggccgaccggattggggattatgttcaatgtcacggcggagtgtcactggtcgagcagatgtttcaggatcctcggctcagccagaataaacaagctctcgaagggttaggggacctgaagcttctcttcgagtatctcactctgttcggtatcgctgataaaatcagttttgacctgtccctcgctcgagggctcgattactacacaggcgtgatttacgaggccgtgcttctgcagacaccaacccaggctggggaggagccgttgaacgtaggatccgtggcagccggtgggagatatgacggactggtcggaatgtttgacccgaaaggccataaagttccctgcgtcggattgagtatcggggtggaacgaatattctatatcgtagaacaacgaatgaagactaagggggaaaaagtccggactaccgagactcaagtgtttgtggccactccacagaagaatttccttcaagagagattaaagttgatcgcggagctttgggacagtggcatcaaggccgaaatgttgtacaagaacaaccctaagttgctgacacagctccactactgcgagagcacaggcataccattagtggttatcataggagagcaggaacttaaagaaggagtgataaagataagatccgtggcttctcgcgaggaggtggctatcaagagggaaaacttcgtggctgagattcagaaaagactctctgagtcttag

SEQ ID NO: 226137 - DNA, 1005 bp, synthetic construct
  misc_feature 1..1005: note = Description of Artificial Sequence: Synthetic coding sequence
  source 1..1005: mol_type = other DNA
atgccactcctgggcctgttacctaggcgagcgtgggctagcctgctctcacaactgttacgcccaccctgtgcaagctgtactggagccgtcaggtgccagagccaggacttcgacatcgctgggcagtttgaccccatgattcccgacgccgagtgtctgaaaattatgtgtgaaatcctatccgggcttcagctgggcgactttctgataaaaatggcatggaaggatgttcggcatgaaatggtcgtcaaaaagggtctggctcctgaagtggctgaccgaatcggagactacgtccagtgtcacgggggtgtgagtctggtcgagcagatgttccaagatcctaggttgagtcaaaacaaacaggccctggagggcctcggcgatttgaaacttctttttgaatacctgactctgttcgggatcgcagacaagattagctttgacctgtcactggcacgaggcttggattactacacgggcgtaatttatgaggcagtgttgctccagaccccaacacaggctggggaagagcccctgaacgtcggatccgtagcagctggcggacgctacgacggcctggtgggaatgtttgaccctaagggccataaggttccttgtgtcgggctctctattggagtcgaacgaattttctatattgtcgagcagaggatgaaaacaaagggcgagaaagtgaggaccacagagacgcaagtctttgtcgcaaccccacagaagaatttccttcaagaaaggctgaagctaatcgcggagctttgggactccgggatcaaagccgagatgctgtataaaaacaatccaaagctgctgacccagctgcattactgtgaaagcaccggaattcctcttgtggttattatcggagaacaggaactaaaggagggggtgatcaagattagatctgtcgcgtctagggaggaggtggccatcaaacgcgagaattttgtggcggagatacagaagcggttgtccgagtcctag

SEQ ID NO: 226138 - DNA, 1446 bp, synthetic construct
  misc_feature 1..1446: note = Description of Artificial Sequence: Synthetic coding sequence
  source 1..1446: mol_type = other DNA
atgcccttgctggggctgcttcctcggagagcctgggctagcctccttagtcaattacttcgcccaccctgtgcatcttgtactggcgcagtgcggtgtcagtcccaagggacaagagacctgagcccacaacatatggtcgtgagagaaaagatcctggatctggtcatcagctgcttcaaacgccacggcgctaagggaatggatactcccgctttcgagctcaaagaaaccctgacagaaaagtatggagaggactcaggtctaatgtacgatctgaaagatcaaggcggtgagctactctctctcagatacgatctgactgttcctttcgccaggtatctggcaatgaacaaggtaaaaaaaatgaagcgctatcatgtgggtaaggtttggagacgggagtcacctaccatcgtacaaggacggtaccgggagttttgtcagtgtgacttcgacatcgctggccaatttgatcctatgattcctgacgccgaatgcctcaaaatcatgtgcgagatcttatctggattgcagctcggagactttctcattaaagtcaatgataggagaatagtggacggtatgtttgccgtctgtggtgttcccgagagcaaatttcgcgctatctgtagctccatcgataagctggacaagatggcctggaaggacgtacgccatgaaatggtcgtgaagaaagggcttgctcccgaggttgcagatcgaattggggactacgtgcagtgtcacggaggcgtcagcctcgttgagcagatgttccaggaccctagactttcacaaaacaagcaagcccttgagggattgggggacctgaaactcctgtttgagtacctgactttgtttggaatcgccgacaagatcagcttcgatctcagcctggcacggggattggattactatactggtgttatctatgaagccgtgttgctgcagacacccacacaagcaggtgaagagccgcttaacgtcggctctgtggcggctgggggtcggtacgacgggctcgtagggatgtttgacccgaaagggcataaggtgccctgcgtcggcttaagcattggcgttgagcgaattttctatatcgtggaacaacgaatgaaaactaagggggaaaaggtcagaaccacggagactcaggtattcgttgctacgccacagaagaattttctccaggaaagattaaagttgattgctgagctgtgggatagtgggataaaggccgagatgctgtataagaacaaccctaagctcctcactcagcttcattattgcgagtctacagggatcccattggtggtgataatcggagaacaggagctgaaagaaggggtgatcaagattagaagcgttgcctcgagagaggaagtcgccatcaaaagggaaaacttcgttgctgaaatccagaaacgccttagtgagtcctag

SEQ ID NO: 226139 - DNA, 1185 bp, synthetic construct
  misc_feature 1..1185: note = Description of Artificial Sequence: Synthetic coding sequence
  source 1..1185: mol_type = other DNA
atggactctgcactgtctgatccacataatggcagcgccgaggcaggagggccaacgaactcaacgactagacccccatccacccccgagggaattgctcttgcatacggatcactgttgctgatggccttactccctatcttctttggtgctcttaggtccgtcaggtgtgcaagaggtaaaaacgcatctgacatgcctgagactatcacgtcgcgggacgcggctaggttcccaatcatcgctagctgtacactgttggggctgtacctgttctttaagattttcagccaggagtacatcaaccttcttttgtctatgtacttctttgtgctgggaatcctggccctgtctcacacgatttcacctttcatgaacaaattcttccccgcaagcttccctaaccgacagtaccaactgcttttcacacaagggagtggagaaaacaaggaggagatcattaattacgaattcgacaccaaagacctggtttgtctgggtctgagcagcatcgtgggcgtatggtatttgctgaggaagcattggatcgcaaacaatctctttggactagccttcagcctcaacggcgttgaactcttgcacctcaataacgtaagtacggggtgcattctgcttggcggactgttcatctacgatgttttttgggtgtttggcaccaacgtgatggtgaccgtggccaaatcattcgaggccccaattaaactggtgttcccacaggatctacttgagaaagggctggaggctaacaatttcgcaatgttgggattaggtgacgtggtgattcctggcattttcatcgcccttctgcttcgcttcgacatctcactgaagaagaatacacacacctatttttacacctcattcgctgcctacatctttggtcttggcctgacgatcttcatcatgcacattttcaagcatgcccaacctgcgctgctatacctggttccagcctgcataggcttcccggttctagtagcactggccaaaggcgaagtgaccgagatgttttcctacgagagctcagctgagattctaccccacacgccgcgactaacccattttcctaccgttagcggctcaccggcatccctggccgatagcatgcagcaaaaattagctggcccaaggcggaggaggcctcagaatccctctgctatgtag

SEQ ID NO: 226140 - DNA, 1134 bp, synthetic construct
  misc_feature 1..1134: note = Description of Artificial Sequence: Synthetic coding sequence
  source 1..1134: mol_type = other DNA
atggattcagccctttccgaccctcataacggatcggccgaggccggaggacctacgaacagcacaacgcgcccaccatccacacctgagggtatcgctctggcatacggaagcctgctcttgatggcattgctcccaattttcttcggcgcactacgctccgttcggtgtgctagaggaaagaatgccagtgatatgcccgagaccattacctctagggatgctgccaggtttccaatcatcgcctcgtgcacgctcctgggcctgtacctgttcttcaaaatcttcagtcaggagtacatcaatttgctgctgagcatgtacttctttgtgcttggcatcctcgctctcagtcatacgatatcacccttcatgaacaaattcttccccgcttccttccctaaccgacagtatcagctcctattcacccaggggtcaggagaaaataaggaagagataattaactatgaattcgatacgaaagacctggtatgtttgggactgagctctatcgtcggggtgtggtatctattgagaaaacactggatcgcaaataacctgttcggcctggctttctcactcaacggcgtagaacttttgcacctgaacaatgtttctacaggttgtattctgctcgggggactctttatctatgacgtattctgggtctttggcactaacgtcatggtcacagttgccaagagcttcgaggcccctatcaaactggtcttcccccaggacctgctcgaaaagggattagaggcaaataactttgccatgttgggactgggcgacgtggtgattcccggtattttcatcgcattgctgctccggtttgacatttcactgaaaaagaatacgcacacttatttttatacgtcttttgccgcttacatcttcggactcgggctcaccatttttattatgcatatcttcaagcacgcccagccagcactactctacctcgttccagcgtgtataggcttcccggtgttagtcgctctggccaagggtgaagtgacagaaatgttttcatatgaggaatcaaaccctaaggatccggcagcggttactgaatccaaagagggcacagaagccagcgcttccaagggacttgagaagaaagagaaatag

SEQ ID NO: 226141 - DNA, 1008 bp, synthetic construct
  misc_feature 1..1008: note = Description of Artificial Sequence: Synthetic coding sequence
  source 1..1008: mol_type = other DNA
atggattctgccctcagtgatcctcataacggctctgcagaggcgggtggacccacaaactctacaacacgccctccatcaacacctgagggtatcgcgcttgcatacggtagcctgttactgatggccctcctgcccatcttctttggtgcgctccgcagcgtccgctgcgcaagggggaaaaatgcctctgatatgccagaaaccatcaccagccgtgacgcagcccgatttccaattatcgcctcctgtacactattaggcctctacctctttttcaagattttctcacaagagtacattaacctgttgctgagtatgtatttcttcgtcctgggcatcttagccttgagtcatacaatcagtccgttcatgaacaagtttttcccagcctcattcccaaataggcagtaccagctcttatttacacagggatcaggggaaaataaggaggagataatcaactacgagttcgacacaaaagacctggtgtgcctcggcctgtcgtccattgtaggagtgtggtacctcctccggaaggtatttggtactaatgtgatggttaccgtcgccaagtcgttcgaggctccaatcaaattggtgttcccccaggacctgctggagaaaggcctggaggccaacaactttgccatgctcggccttggggatgtggtcatcccaggtatctttatcgccttattgctgcgcttcgatatctcattaaaaaagaacacgcatacctacttttacacctccttcgctgcttacattttcgggttggggctaacaatttttattatgcatattttcaagcacgcccaaccagctttgctctatctggtccctgcctgtatcgggttcccagttttagtggctctggctaaaggagaagtcacagagatgttttcctatgaagaatctaatccaaaagatcctgctgcagtgacagaatcaaaagagggcacagaagcctcagccagtaaaggactggaaaaaaaagaaaagtag

SEQ ID NO: 226142 - DNA, 1281 bp, synthetic construct
  misc_feature 1..1281: note = Description of Artificial Sequence: Synthetic coding sequence
  source 1..1281: mol_type = other DNA
atggactcggcactttcagatccccacaatgggtcagcggaggcagggggtcccacaaattctactactcgtcccccaagtacgcctgagggaatcgctctcgcatatggttccctactgctaatggctctgctgcccattttttttggtgcccttaggtctgtcaggtgtgcccgagggaaaaatgcctcagatatgcctgagacaattacgtcccgagatgccgctaggtttcctattatcgcttcctgcaccttactgggcctgtatctgttcttcaagatcttttcacaggaatatataaatctcctgctatctatgtacttctttgttctcggaatactggccctgagccatactatctcaccttttatgaataagtttttccctgcctcgtttcctaaccgtcaataccagcttctcttcactcaaggcagtggagagaacaaagaagaaatcatcaactatgagttcgacacaaaggaccttgtatgtttgggcctgtccagcatcgtaggcgtgtggtatcttttacgcaaacattggattgctaataacctgttcggcttggccttctccctaaatggcgtcgagttgttgcatctgaacaatgtgtctacagggtgcatcctcctggggggtctcttcatttacgacgtgttctgggtcttcggtacaaatgtaatggtgaccgtggccaaatctttcgaggccccaattaagctagtgttcccacaagatctcctggagaaggggctggaagcaaacaattttgctatgctgggcctgggagatgtcgtgatccctggaatctttatcgcactcctgctccgcttcgatattagtttaaagaaaaatactcatacatacttttatacctctttcgccgcttatatctttgggctggggctgacgatttttatcatgcacattttcaaacatgcacagccggcacttctctacctggtgcctgcgtgtatcgggtttcccgttctcgtggcacttgccaagggtgaagtcaccgaaatgttcagctatgaatccagtgctgaaattttgccacacacccccagactgactcattttcccaccgtctccggtagtcctgcctccttagccgatagcatgcagcagaaactggctgggcctcggagacgaagaccgcagaaccctagcgcgatatacgaagaatctaatccaaaagatcccgcagctgtgaccgagagtaaggaggggactgaagcatccgcgagcaagggcttggagaagaaggaaaagtag

SEQ ID NO: 226143 - DNA, 3411 bp, synthetic construct
  misc_feature 1..3411: note = Description of Artificial Sequence: Synthetic coding sequence
  source 1..3411: mol_type = other DNA
atgttttcccgtaagaaaagagagctgatgaaaaccccctctattagcaagaaaaatcgggcagggtcaccaagccctcagccttctggtgaacttcccagaaaagacggtgccgatgctgtgttcccagggccaagcctggagccaccagctgggtccagtggtgtaaaagctacggggaccttgaaacgtcctacttcactgtcgaggcatgcatctgctgcaggctttccactgtccggggcagcatcttggaccctgggcaggtcacatcgcagtcctttgacggctgctagtcccggtgaactccctaccgaaggagccggtcctgacgtggtcgaggacatatctcatttgctcgcagacgtagcccgattcgccgaagggctggagaagctaaaggaatgcgtcttgcgcgacgacttgcttgaggccagacgcccaagggctcacgaatgtttgggcgaggcactgcgagtcatgcatcagatcatatctaagtaccccctgctcaatacagtggagacgctcacagccgcaggaaccctgatagccaaggtgaaagccttccattatgagtctaacaacgaccttgaaaaacaggagttcgagaaagcgttagagacaatcgctgtcgcgttcagctctacagtctccgaattcttgatgggagaggtggacagtagcaccttgctagctgtgccgcctggtgacagctcccagagcatggaatcactgtacgggccaggatccgagggaacacccccatctcttgaggactgcgacgccggttgcctgcctgcggaggaggttgacgtcttacttcagcgctgcgaaggaggcgtggacgccgcactgctttacgccaaaaacatggctaaatatatgaaagacttaatttcctatttggaaaaacggaccaccctcgagatggaatttgctaagggtttgcaaaagattgcacacaattgcagacagagcgttatgcaggagccccatatgccgctcctctctatctactcactcgccctagaacaagatctggagttcgggcacagcatggtgcaagcagtgggtactctccagacgcagacctttatgcaacctctgactctccgacgcctggagcacgagaagagacggaaggaaattaaggaagcatggcatcgcgctcaaaggaagctgcaggaggccgaatcgaatctgagaaaggctaagcagggttacgtgcagagatgcgaagaccacgataaagctaggtttctcgtggcgaaagctgaggaggaacaggccggtagtgcacccggagctgggagcacagctacgaagacattggacaagaggcgtcgcctggaagaagaggcaaaaaataaggcggaggaggcaatggcgacttacaggacgtgcgtcgccgacgctaaaactcaaaagcaggaactggaggatactaaagtcacggccttacgacagatacaggaagtaattcgccagtcagatcagactatcaaatcggccaccatctcctattaccagatgatgcatatgcaaaccgcccctctgcccgtccatttccagatgctgtgtgaatccagtaaactgtatgaccccggacagcagtacgcatcccatgtcagacagctccagagagaccaggagccagacgtgcactatgactttgagcctcacgtgtccgccaatgcctggtctccggtcatgcgcgctaggaagagctcattcaacgtctctgacgtggctcgaccggaggcagctggatcacccccagaggagggcggatgcaccgaggggactcccgcaaaggatcaccgggctggtcgcggtcatcaggtacataaaagttggccactgtccataagcgactcagacagcgggctggaccccggtccgggtgcaggggatttcaaaaagtttgagcggacctctagctctggaactatgtcatccaccgaggagttggttgatcctgatggcggagctggagcgtcagcctttgagcaagcagatctgaacggaatgacccctgagttgccagtggctgtgccgtctggcccttttaggcatgaaggactgtcaaaagcagctcgcacgcaccggttgcgaaagctgagaacacctgcaaagtgccgcgagtgtaacagctacgtgtatttccagggggcagaatgtgaggaatgttgcctcgcctgccataagaaatgtttggagaccctggccatacaatgcgggcacaagaaactgcaaggaaggctgcagctctttggccaggattttagtcacgccgcaaggtctgcgcctgacggggttccattcatagttaagaaatgcgtttgcgagattgagagaagggccttgcgtacaaaaggtatctatagagtgaatggggtgaagaccagagttgagaaactctgtcaggcctttgaaaacggtaaggaactcgtggagctaagccaggcttcaccacacgatatctcgaatgttctgaagctgtatttgaggcagctacctgaacctctgatcagctttcgtctgtatcatgaactcgttggactcgctaaagacagcctaaaggctgaagctgaggccaaagcagcctccagaggaaggcaggatggctcagagagcgaggcagtcgccgtggccctggccggtcggctcagggaactgcttagagatttacctccggagaaccgggctagtctacagtatctcttgagacatttgcgacggattgtcgaagtggagcaagacaacaaaatgacaccaggcaatcttggaattgttttcggaccgacactgctacggcctagaccaaccgaagccacagtatctttgtcatccctcgtggactatccgcaccaagctcgggtcatagagaccctgattgtgcactacggcttagtctttgaagaagaaccggaggagacaccgggtggacaggatgagtccagcaaccaacgggctgaggtcgtggtacaggtgccctatctggaagccggagaagcagtggtctaccccctccaggaggccgctgccgacggctgtcgggagagccgagtggtgtccaacgacagcgattctgacctcgaggaagcttccgagctgctgtcaagttccgaggcatcagcactgggtcaccttagcttcctcgagcagcaacagtccgaggcatcactggaggtagcaagtggaagtcactcaggctctgaagaacagttagaggcaacggccagggaagacggcgatggggacgaagacggtcctgcacagcagcttagtggttttaatacaaatcagtcaaataacgtgctgcaagctccactccctcctatgcggctgcggggaggccgtatgacgctcggatcttgccgggaacgacaaccagagtttgtctag

SEQ ID NO: 226144 - DNA, 3393 bp, synthetic construct
  misc_feature 1..3393: note = Description of Artificial Sequence: Synthetic coding sequence
  source 1..3393: mol_type = other DNA
agttactcaccctacagggctggccgacaggggcctcagcagagaggaagagatccaggtatccaactcacagagctgccgaggaaggacggcgcagacgctgtgtttcccggacctagtctcgagccccctgccggttcctcaggcgtcaaggctaccggaactctgaagcggcctactagcctgagtcgccacgctagcgctgctggattccctttgtcaggcgctgcaagctggaccctgggccgttctcaccgctccccattgacagccgcaagcccgggagaattacccacagagggagcaggccctgacgttgtggaagacatatcccaccttctcgccgatgtggctagatttgctgagggtcttgagaagctgaaagaatgtgtgttgcgcgatgatctcctggaagcacgcaggccccgagcacatgagtgcttgggcgaagcactaagggtaatgcatcagataatttccaagtaccctctgttaaataccgttgagacactcacagctgcagggacactgattgctaaggtgaaagcgttccattacgagtcaaacaacgaccttgaaaaacaagagtttgagaaagcattggagacaatcgcggtggccttctcctccacagtttctgagttcctgatgggcgaagttgactcgtctaccttactggcggtgcctccaggggactccagtcagtcaatggagtctttgtatggacccggaagtgaaggtacccccccaagtcttgaagactgtgacgccggttgtctgcctgctgaggaggttgacgtcctattgcagagatgcgagggaggagttgatgccgcacttctgtatgctaaaaatatggccaagtatatgaaggacctgatttcatatctggagaaacgcaccacattagagatggaatttgcgaagggactccaaaaaatcgctcataactgccggcagtctgtcatgcaggaaccccatatgcctttactgtcaatctattccctggctctggagcaagacttagaatttggccattctatggtccaggcagttgggactttgcaaactcagacattcatgcaaccgctgacgctacgtaggctggaacacgagaaaaggaggaaggagattaaagaagcctggcacagagctcaaaggaaactacaggaggccgaatccaatctgcgcaaagctaagcaaggttacgtccagagatgcgaagaccatgacaaggctcgctttctggttgccaaggctgaagaagagcaggccggaagcgctcctggcgcagggtcaactgcaacaaagacattggacaagcggagacggttagaagaggaggccaagaacaaagccgaagaggccatggctacatatagaacttgcgtggcagacgctaaaacccagaagcaggagcttgaggacactaaagtgaccgcccttcgacaaattcaggaggtcatcagacagagcgatcagaccattaaatccgccacgatatcctactaccaaatgatgcacatgcagacggcacctctccccgtgcacttccaaatgctctgcgaaagtagcaaactgtatgaccccggtcagcaatatgcctcccacgtgagacagctgcagagagatcaagagccagacgtgcattacgatttcgagccccacgtctccgcaaacgcttggagtcctgtcatgagagccaggaagagtagctttaatgtgtccgatgtggccagacctgaggcagctggatcaccacctgaggaaggcggatgcacagaagggactccagccaaggatcatcgtgctggtagagggcaccaggttcataagtcatggccactttccatctccgactccgacagcggcctggaccccggacccggagccggtgatttcaaaaagtttgaacgcaccagctcctcaggaactatgtccagcacagaggagcttgtggaccccgatggcggagccggtgcgtctgcttttgagcaggcggaccttaacgggatgactccagagctgccagtggcagtcccttccggacccttcagacatgaggggctgtccaaggccgcaaggactcaccgactgagaaaattaagaactccagctaaatgcagggagtgcaattcgtacgtgtactttcagggggctgagtgcgaggaatgttgcctggcctgtcacaaaaaatgtctcgagacactggctattcagtgtggtcacaagaaactgcaggggcgacttcaacttttcggccaggactttagtcacgctgcacgctcagctcctgacggtgtgccatttatcgttaagaaatgcgtgtgtgaaatcgagcgtagggcactcaggactaaaggtatttaccgggtgaacggggttaagacgcgggtggagaaactgtgtcaagccttcgagaacggaaaggagttggtggaactctcccaggctagcccccatgacattagtaatgtgctgaagctctacctgcgtcaactcccggagcccctgatctccttcagattgtatcatgaactcgtcggattggccaaggactcgttaaaggccgaggccgaggctaaggctgcttcccgtggacgccaggacggtagtgaatcagaagctgtcgccgttgctctggcgggtagacttcgagagctgcttcgggacctgccacccgagaaccgggcttcactccagtatcttcttcgccacctgaggcggattgtggaggtagagcaggataacaaaatgacccccggaaacctcggaatcgtttttggccctaccttgctgcgccctcgccctactgaagccaccgttagtctgtctagtctggtggattacccacatcaggctcgcgtgattgaaaccttgatcgtgcactacgggctcgtcttcgaggaggagccagaggaaacgcccggaggacaggatgagagcagtaatcagagggccgaggtggttgtgcaggtgccctatctcgaggcaggcgaagcagtggtgtaccccttgcaggaagccgcagccgacggatgtcgggaaagccgagtcgtaagcaatgatagtgacagcgatctggaggaggcgtcagagctgctgtctagctctgaggccagcgctcttggccacttgagcttcttagaacagcagcagagtgaggcatccctggaagttgctagtggaagtcactctggttcagaggaacaacttgaggccacggctagggaagacggagatggagacgaggatgggcctgcccagcagctgagcgggttcaacactaatcagtcgaacaacgttcttcaagccccactgcctcctatgagactgcgaggcggaaggatgacgcttggcagctgccgggagcggcagcctgagttcgtgtag

SEQ ID NO: 226145 - DNA, 3015 bp, synthetic construct
  misc_feature 1..3015: note = Description of Artificial Sequence: Synthetic coding sequence
  source 1..3015: mol_type = other DNA
atgcaccaaattatcagtaaatatcctcttctgaacaccgtggagactcttaccgcggcaggcaccctgattgccaaagtgaaagcatttcactatgaaagtaacaatgacttggagaagcaagagttcgagaaagctctggagactattgctgtggccttcagctctactgtttctgagtttctgatgggcgaggtcgactcctctaccctgctggccgtccctcccggagactcttcccagagcatggagtccctctatggtcccggatccgagggcacaccacccagcttggaagattgcgatgcgggttgcctccctgccgaggaggtggacgtcctgctccagagatgcgaaggtggagttgatgcggctctgctgtacgctaagaacatggccaaatacatgaaggatctgatcagttacctcgagaagcgaactacactggagatggagtttgcgaaggggttacagaaaatcgctcacaactgccgccagtccgttatgcaggaacctcatatgccgttgctcagcatttattccctcgcactggagcaggacttagagttcggccactccatggtgcaagcagtcggcacactacaaacccaaaccttcatgcagccgcttacccttcgcaggctggaacatgagaagcggaggaaagagataaaggaggcatggcatagagcccagcgtaaactgcaggaggctgagtccaacctgagaaaggccaagcagggatatgttcaacgctgtgaggaccatgacaaagctcgcttcctcgtggcaaaagcggaagaagagcaggccggtagtgcccctggggcaggcagtaccgccaccaaaaccctggataaacgccgtagactggaggaggaggccaagaataaagccgaggaagccatggccacctataggacctgcgtggccgacgctaaaacgcagaaacaggagttggaggacacaaaggttactgccttgagacaaattcaagaagtgataagacaatctgaccaaaccatcaagagcgctactatttcctactatcaaatgatgcatatgcaaacggcccctctccccgtacactttcaaatgttatgcgaaagctccaaattgtacgacccaggacagcagtatgcttcccacgtacgacaacttcagagggaccaggaacctgatgtccactatgacttcgagccccatgtctcagccaacgcctggagtccggttatgagggctagaaagagctcgtttaatgtgtcggacgttgcacgaccagaagccgcaggttcaccacctgaggaaggtggctgtaccgaaggaacccccgcaaaggaccaccgaggagagtgtcctgcagggcctagggggggtcgctggctcccagctacacatcctggtcccagccccgagactccacttagccctgccggtcgcggtcatcaagtgcacaagagttggcccctgtcgatcagcgacagcgattccggcttagaccctggtcctggagctggggatttcaagaaatttgagcgcacttcctcttccggtacaatgagctctactgaagaactagtcgatcctgatggaggcgcaggggcaagtgcttttgagcaggccgacttaaatggaatgactcccgaactgccagtagccgtaccctctgggcctttccggcacgaaggactctcaaaggcagccaggacccacaggttacgtaaattaagaacccctgccaaatgtcgcgaatgtaactcatatgtgtactttcaaggcgctgaatgtgaagaatgctgtctggcatgccacaagaagtgcttggaaaccctggctattcagtgcggccataaaaaattacaaggaagactgcagcttttcggacaggatttttctcacgcagccagatctgctcctgatggcgttccgtttatagtaaagaaatgtgtgtgtgaaatcgagagacgggctttgcgtacgaagggaatttatcgcgtgaatggtgtgaagacgcgcgtggaaaaactgtgccaggcctttgagaacggcaaagaactcgttgaactctctcaagctagtcctcacgacatttcaaacgttctcaagctttacctgagacagctgcctgaacctcttataagctttcgcctgtaccatgaactcgttgggctggcgaaagacagcctgaaggccgaagccgaggcaaaggctgcttctcggggacgtcaagatgggtctgaatctgaagccgtcgccgtcgccctcgccggtagacttcgcgaactgctgcgagatttgccgcctgaaaaccgggcatcgctccagtatttactccgacacttacggagaatcgttgaagtggagcaggacaataaaatgacacctggaaatctgggtatcgtatttggtccaacgctactgaggccacggccaacggaagctaccgtgtcactttccagcctcgtggattatccccatcaagccagagtgatcgaaactctgattgtgcactatggactggtgttcgaagaagaacctgaagaaactcccggaggccaggacgagagtagcaaccaacgtgccgaagtcgtggtacaggttccttatctagaggcaggagaagccgtagtatacccattgcaggaagctgcagccgatgggtgtcgggagtcccgggttgtgagtaacgattccgacagtgatctggaagaggcctcggaactcctgtcatcatccgaggccagtgccctggggcatcttagctttctcgaacagcagcagtcagaggccagtctcgaagtggcctccggttctcattcgggcagcgaggagcagctggaagccaccgctcgtgaagacggcgatggcgatgaggatggccctgctcagcagctgtccggcttcaacactaatcagtcgaacaatgtcctccaggcaccactcccacctatgagacttcggggaggtcgcatgactctagggagttgcagagagcgtcagcctgaatttgtttag

SEQ ID NO: 226146 - DNA, 3459 bp, synthetic construct
  misc_feature 1..3459: note = Description of Artificial Sequence: Synthetic coding sequence
  source 1..3459: mol_type = other DNA
atgtcaagaggtcagcgtgtgctgaaaggcctgctggggtgggtttgtacgtggacctgggcctggcgggcacgattgggcgctcgtggctgcggactgcatgtgttatgtccaagagacctgcctttgcctcccgaagaactcccgaggaaggacggcgcagacgcggtgtttcctggaccttcactagagcctccagctggaagcagcggggttaaggccacaggaactctgaagcgccctacctcactgtctagacacgctagcgcagcaggattccctctcagcggggcagcatcctggaccctgggtcggtcccatcgatcgcccctcaccgccgcttccccaggcgagttacctaccgaaggggcaggtccagatgtggtcgaggatatcagtcatctcctcgccgacgtcgccagattcgcagaagggctcgaaaagttgaaggaatgtgtgcttcgggacgatcttttggaagcaaggcggccacgggcacacgagtgtctaggggaggccctgagggttatgcaccagattatctctaagtatcccctgctcaacaccgttgagacattgactgccgcaggaacactgatcgccaaagtgaaggcttttcattatgaaagtaataacgatctggagaagcaagagttcgagaaagcgctggaaaccatcgccgtcgccttctcatcaactgtatcagaattcctgatgggtgaggtcgatagttccaccctgttggccgtgccccctggcgattcttcgcagtcaatggagtctctgtacggcccaggatcggaggggacgcccccttctttagaggactgtgatgccggttgtttgcccgctgaggaagtcgacgtcctcttacagcggtgcgagggaggtgtggacgcggctcttttgtacgccaagaatatggcgaaatatatgaaggatttgatatcgtatttggagaagaggaccacgctggagatggagttcgcaaaaggcctgcaaaaaattgcccataactgtagacagtctgtgatgcaggaaccccacatgcccctgctctccatctattccctggccttggagcaagacctggagttcggtcacagcatggtgcaagcagtcggcacacttcagacccagacatttatgcagcctctcacgctgagacgtctcgagcatgagaagaggcgcaaagagattaaagaggcctggcatagggcccaacggaagctgcaggaggctgaatccaacctgcgcaaagcgaaacagggttatgttcaacggtgcgaagaccacgacaaagccagatttcttgtggccaaggccgaagaggagcaggccggtagcgcacccggtgctggcagcactgcaaccaagacactggacaagaggcgtcggttggaggaggaagctaagaataaagctgaggaggccatggctacatatagaacatgcgtcgctgatgcaaaaacacagaagcaggaactcgaggataccaaggtgacagcccttaggcagatacaagaggtcattcggcaaagcgaccaaactatcaagtcagccactatctcttactatcagatgatgcacatgcagacggctccattgccagttcatttccagatgctgtgtgagagctccaagttgtatgaccctggacagcagtacgcaagccatgtcaggcaactccagcgagaccaggaacccgacgttcactacgactttgaacctcacgtctcagccaacgcctggagtccagtgatgcgggctcggaaatcctccttcaatgtctcagacgtcgcaagacccgaggccgctggcagtcctccagaagaaggcggatgcaccgagggcactcccgcaaaggatcaccgtgccggaagagggcatcaagtgcataaatcgtggccgctgtcaatctccgatagcgatagtggcctcgatcctgggccaggagccggtgacttcaaaaaattcgagcgaacttctagttctgggaccatgtcatccacagaagagttagtggacccagacggcggtgccggagcaagtgcattcgaacaggcagatctgaacggcatgactcctgagctcccggttgccgtcccgtccggcccttttcgccacgaggggttgtccaaggcagcgcgtactcacagactgagaaaactgagaacccccgctaagtgccgcgagtgtaactcatacgtgtattttcagggggcagaatgcgaagagtgttgtctcgcatgccataagaaatgcttggaaacactggcaattcagtgcgggcacaagaaattgcaggggcgactgcaattattcggtcaggatttctctcatgctgcccgtagtgcacctgatggcgtgccttttatcgtcaagaagtgcgtttgtgaaattgagcgcagggcactgcgaacaaagggcatttacagagtgaatggagtgaaaacccgggtagagaaactgtgccaggcatttgagaacgggaaggagctggtcgaactctcccaagccagccctcatgacatctctaacgtgcttaaactttatctgcgacagctgcccgaacctctgatctcttttcgtctctatcatgaactggtggggttggcaaaggactctctgaaagctgaggctgaggcaaaagctgccagtagggggaggcaggacggatccgagtctgaggcagtggctgtagcacttgccggtcgcctccgagagctgttacgggacctcccacctgagaaccgggcttcccttcagtacctgttacggcatctgcggagaatcgttgaagttgagcaggataacaaaatgactcccggtaacctcggaattgtgtttggccctaccctactccggcctaggcccactgaagcgacagtcagtctctcaagtttggttgattatcctcaccaggctcgggtgatcgagacccttatcgtccattacgggttggtgttcgaagaggagcccgaggaaactccaggcggacaggatgaaagctccaatcagagggcagaagttgtcgttcaggtgccttatctggaagccggagaagccgtagtgtatcccctccaggaagcagcggctgatggttgtcgggagtcaagagtggtgtccaacgactccgactccgacctggaagaagcaagcgagctgctctcatcctcagaagctagcgcactagggcacctgtcctttctggagcagcagcagtccgaggctagtttggaggtcgcatccggaagccactcgggaagtgaggagcagctcgaggcgaccgcgagggaggacggtgatggcgacgaagatggacccgctcagcaactgtctggctttaacactaaccagtccaataatgtccttcaggcacccctgcccccaatgcgacttcggggtggccgaatgaccctcggcagctgccgagaacgccagcctgagtttgtctag

SEQ ID NO: 226147 - DNA, 3060 bp, synthetic construct
  misc_feature 1..3060: note = Description of Artificial Sequence: Synthetic coding sequence
  source 1..3060: mol_type = other DNA
atgtgcatttgtggcaccgcgcatccagttctggacgaaggccctgtgcgttgtcgcgctgggcctagagatctccttgaggccaggcgacctagagctcatgaatgtcttggcgaggccctgcgggtgatgcatcagattatctctaaatatcctctcctgaacacagttgagactcttactgccgctggcacgttgatagctaaggtgaaggcatttcactacgagagtaacaacgacctagagaaacaggaatttgagaaggctctcgagaccatcgcagtggccttctcctctacggttagcgagttcttgatgggtgaagttgattcctccacactcttggcggtccccccaggcgattcatctcagagcatggaaagtctgtacggccctggcagtgaggggacgccccctagtcttgaagattgtgatgcaggctgcctgccagctgaggaggtggacgtgctgctgcagcgctgtgaagggggagttgacgctgcactgctgtacgccaaaaatatggccaagtatatgaaagatcttattagctacctggagaaacgtaccacgctggagatggaattcgctaagggcctgcaaaagatcgcacacaactgccgtcaatccgtcatgcaggagccacatatgcctctactgtctatctactcccttgcattggagcaggatctcgagtttggacatagtatggtgcaagcggtcggcacgctacagacacagaccttcatgcagcctctgaccctgcgccgtctagagcacgagaaacgccgaaaggagattaaggaggcatggcatcgagcccagcgtaaactccaagaagcagaaagtaatctcagaaaggccaaacaggggtatgttcagcggtgcgaggatcacgacaaggcacgctttctggtcgctaaggccgaggaagaacaggcaggctccgcaccgggagccggatccacagcgactaagaccctcgataagagaagacggctggaggaggaggctaaaaacaaagccgaggaggctatggctacgtaccgcacatgtgtggccgatgccaagacccaaaagcaggagctggaggacactaaagttacagcgctccgccagattcaggaggtgattaggcagagcgaccagactatcaagtccgctactatctcttattaccaaatgatgcacatgcagacagctcctctcccggtgcattttcagatgctttgtgaaagtagcaaactgtacgaccctggccaacaatatgcttcccacgtccggcagttacagagggaccaagagcctgatgtgcattatgatttcgagccccatgtgtctgccaacgcctggagcccagtgatgagagctcggaagtccagctttaacgtgtctgacgtcgcccgacccgaagctgctggttccccaccagaagaaggtgggtgcaccgaggggacccctgccaaggaccacagagctgggaggggccaccaggtgcacaaaagctggccgctgagcatcagtgactccgatagcggtcttgatcccggtcctggggctggtgacttcaaaaaattcgagagaactagttctagcggcactatgtccagcacagaggaacttgtggaccccgatgggggagccggagcgtctgcctttgaacaggcggacttgaatggaatgacaccggagttacctgtggcagtcccaagtggcccattccggcacgaaggcttaagtaaagccgctcgcacacaccgcctgcgaaagctgagaaccccagccaagtgccgagagtgcaattcttacgtttactttcagggggctgagtgtgaggagtgctgcttagcttgtcataagaaatgccttgagacgctcgcaatccaatgcggccacaaaaagcttcagggacggcttcaactcttcgggcaggatttcagtcacgccgctcgctccgccccagacggggtgccattcattgtgaagaagtgcgtgtgcgagatcgaaaggagggcactgcggacaaaaggcatttatcgggtgaacggggtaaagacaagggtggagaagctgtgtcaggcctttgagaacggcaaagagcttgtcgagctctcacaagcttcaccgcacgacatttcaaacgtcctgaaattatacttacgccagctgcctgaacctttgatttcatttcggctgtaccacgagctggtcggtctggctaaagattcacttaaagctgaagcagaagccaaggcggcttccaggggacgccaggatggtagtgagagtgaagcagtagcggtggccctggccggtagactgagagagctgctacgggacctcccaccagaaaaccgggcatctctccagtatttgctccgacacctccgaaggatcgtggaagtcgagcaagacaacaaaatgacccccggtaacctcggtattgtgtttggacctactttgttacgccctcgacctacggaagcaacggtgtcgctctccagcctcgtcgattatccacaccaggcacgtgttatcgagaccttaatcgtgcactacgggctcgtgttcgaggaagaaccagaggagacacccggtggtcaggatgaaagcagtaaccagcgcgctgaggtggtggtgcaggttccttacctggaggctggggaagccgttgtgtatcccttgcaagaggctgcagccgacggctgtcgtgaaagtcgggtggtgtctaacgattctgactctgacttagaagaagcatccgagcttctttcaagttcagaggcctctgcactgggtcaccttagtttcctcgagcagcagcagagcgaggcctcactcgaagtggcgtctggcagccacagcggatctgaggagcagctggaggccacagcaagggaggacggtgatggcgatgaggacggtcccgcacagcaactctctggcttcaatactaaccagtctaacaacgtgcttcaggcgccacttcctcctatgcggctgagggggggaagaatgactttggggtcatgccgagagcgccagcctgagtttgtgtag

SEQ ID NO: 226148 - DNA, 2847 bp, synthetic construct
  misc_feature 1..2847: note = Description of Artificial Sequence: Synthetic coding sequence
  source 1..2847: mol_type = other DNA
atgtttagccgaaaaaaaagagaactgatgaagactccctccatcagcaaaaaaaaccgcgcaggctctccctcacctcagccgagcggagagttaccaagaaaggacggagccgacgctgtgtttcctggcccaagtctcgagccccctgcgggatcgagcggagtaaaagcaaccggcaccttgaaaagacccaccagtctgtcacgacatgcttccgctgctggatttcccctgagcggcgctgccagttggaccttaggaaggtcccaccgcagtcctcttactgcagcatccccgggtgaactgcccacagaaggagctggcccagatgtcgtggaagatatttctcatcttctggccgatgtggccaggtttgctgaagggttggaaaaactcaaggagtgtgtgctgcgggatgacttgctcgaagccagacggcctagggcgcacgaatgccttggcgaagcgctcagagtcatgcaccaaattatatccaagtaccctctactgaacacggtggagaccctgacggctgcgggtacattgattgccaaagtgaaggccttccattacgagtctaataatgaccttgagaagcaagagttcgaaaaagccctggaaacaatcgctgtggcgttcagctctacagtaagcgaatttttgatgggagaggtagattccagcaccctgttagcagtgccacctggagatagttcccagagtatggagtcgctttatgggccaggttccgagggcacgcctcctagcttggaagattgtgatgccggatgcttgccagccgaggaagtcgatgtcttgctgcaaagatgtgaggggggtgtggacgcggctctgctctatgccaaaaatatggccaaatatatgaaggatttgatctcatacctggagaagcggacaacactggagatggagtttgccaaaggccttcagaagatcgcacataactgccggcagtccgttatgcaggaaccccatatgccattgctatcaatttattccctggctttggagcaagatctggagtttggtcattctatggtgcaggctgtcggaaccctgcagacccagacgttcatgcaaccgttgaccctgagacgactcgagcacgagaaaagacgcaaggaaatcaaggaggcctggcatagggcccagcgtaagctccaggaggcagaaagcaaccttcgaaaagccaagcagggttatgtccagcgctgtgaagaccatgataaggctcgcttcttggtggccaaggctgaggaggaacaggctgggtctgcacctggggctggaagcactgccacaaagaccctcgataagcggagaaggttggaggaggaggccaaaaacaaggcagaagaagccatggctacttaccgcacctgtgtcgccgacgctaagacacagaagcaggaacttgaggatactaaggtgacggccctgagacagatccaggaagtcattaggcagtcagatcagactattaaaagcgccaccattagctactaccaaatgatgcacatgcaaacagctccactgccggtgcacttccagatgctgtgtgagagctccaagttatacgaccctggccagcaatacgcgtcacatgttcgccagcttcagagagaccaggagccagacgtccactacgacttcgaaccccatgtgagcgctaatgcctggagtcccgtgatgagagctcggaagtcatcctttaacgtcagtgatgtcgccagaccagaggccgctgggtccccgcctgaggaagggggatgcactgagggcacacccgctaaggaccaccgagcgggaaggggccatcaggtgcacaaaagttggccgctcagcatctccgattctgacagcggtctcgacccaggccctggggctggggatttcaagaagtttgaacggacctccagctccggcacaatgagctcaaccgaggagcttgttgaccctgacgggggagccggagcatcggcgttcgagcaggctgatctgaacgggatgacccccgagctacccgtggccgtgccttccggcccatttaggcacgaaggtctcagtaaagcggctcgaacccaccggctccggaaattgagaacacctgctaaatgtcgcgaatgtaattcttacgtgtactttcagggagccgaatgtgaggagtgttgtttggcatgccacaagaagtgcctcgagacactggcgatccaatgcggccataagaaactgcagggcagactacagttgttcggtcaggacttctcacacgctgcaagatccgctcccgatggagtgccgttcatcgtgaagaaatgtgtgtgcgagatcgaaaggagggctctgcgcaccaaaggtatttatcgggtgaatggggtgaagacacgcgtggagaaattatgccaggcgtttgaaaacgggaaggagctcgtggaactgagccaagcttcgccacatgatatcagtaacgtgctcaagctttatctgcgacaacttcctgagcccctgatatcttttcgcctctatcacgaactggtgggtctggctaaggacagcctgaaggcggaagcagaggccaaagccgctagtagaggtaggcaagatggaagcgagagcgaagccgtagcagtggctcttgccggtagacttagagaacttctgagagatttgcctccggagaatagggcttctttacagtacctgctccggcacttgcgaaggatagtcgaggttgagcaggacaataagatgactcccatgcgcctgaggggtggccgaatgacgttgggaagttgtagagaaaggcagccagagtttgtatag

SEQ ID NO: 226149 - DNA, 3492 bp, synthetic construct
  misc_feature 1..3492: note = Description of Artificial Sequence: Synthetic coding sequence
  source 1..3492: mol_type = other DNA
atgttttcacggaaaaagagagaactgatgaagacgccctccatctccaagaaaaaccgcgctggttcccctagtcctcagccatcaggcccacacttcatttctggagaaacagaggcagtcagcagacccgaaaatcctttcaacgaactgccatcagatcttccaaaggagttgccaaggaaagatggggctgacgccgtctttcctgggcctagcctggaaccacccgctgggtccagtggcgtaaaagccacaggcaccctcaagagaccaacaagtctcagtcgccacgcttccgctgccggattccctctgtcaggagccgcatcttggacgctcgggaggtcgcaccggagccccctcaccgctgccagtccaggagagctacctaccgaaggcgcagggccagacgtggtcgaggatatcagccacttgctggcagacgttgcacggttcgcagaggggcttgagaagctcaaggaatgcgtgctaagagatgacctactggaggccaggagacccagggcccatgagtgtctgggtgaggcccttcgggtcatgcaccagattatttcaaaatacccactcctcaatacagttgagacactgactgccgcaggtaccttgattgccaaggttaaggcttttcactatgagtccaataacgatctcgagaagcaggagtttgagaaagctcttgagactatcgccgtggcgttctctagcaccgtctccgagtttttgatgggcgaggtggattcatcgacccttctcgcggttcctccaggtgattcatcacagagtatggaatcattgtatggtccaggctctgaagggacccccccatccttggaggattgcgacgcaggatgtctgcccgctgaagaagtggatgttcttcttcagcgctgtgagggcggtgtggacgccgcactgctttatgccaaaaacatggcgaagtacatgaaagatcttattagctacttggagaaaagaactaccctggagatggagttcgcaaagggcttacagaagattgctcacaactgtaggcaaagcgtgatgcaggagccacacatgccccttctgtctatttattccctggccctggagcaggatttggaatttggccactcaatggtccaggcagtaggtaccttgcaaacacaaacattcatgcagccgctgacactcagaagactcgagcacgagaaaaggcgaaaggagattaaggaggcatggcatagggcacagcgaaaactccaggaggcagaatctaatctccgaaaggccaaacaggggtatgttcagaggtgtgaagatcacgacaaggccaggtttctggttgccaaagcggaggaggagcaggccggatccgccccaggggcaggctctacagcgacaaagactctcgataagagacgtagattagaagaggaggcaaagaacaaagctgaagaggctatggctacctacaggacatgtgtggctgacgcaaaaacacagaagcaagaattagaagataccaaagtcactgctctcaggcagatacaagaggtgatccgtcaatcggaccagacaataaagagcgctacaatttcctactatcagatgatgcacatgcagaccgccccactgccagttcattttcaaatgctgtgtgaaagcagcaagttgtacgatccgggacaacagtacgcctctcacgtacggcagcttcagagggaccaagaacccgacgttcattatgactttgagccccacgtatccgccaatgcttggagccccgtgatgagagccagaaaaagctcctttaacgtctcagacgtcgctcgcccagaggccgcaggaagtccacctgaggaagggggttgtactgagggcactcccgcaaaggaccaccgagcagggcgaggccaccaggttcacaaatcatggcccctgtcaatctcagactccgactccggccttgacccagggccaggggcaggcgactttaagaaattcgagcggacttcaagttctggcacgatgtcctcaactgaggaattagtcgaccccgacgggggagctggtgcctctgctttcgaacaggccgatctgaatggaatgacgcctgagctgcctgtggctgtcccaagcggacccttcaggcacgaagggttgtccaaagccgcacgaacccacaggctgagaaaactcagaaccccagcaaagtgtagggaatgcaattcatatgtatattttcaaggcgcagaatgcgaggagtgttgcttagcgtgtcataagaaatgtctcgagaccctcgcgatccagtgtggacacaagaagcttcagggaagactgcagttgtttggtcaggacttttcccacgctgctcgtagcgctccagacggcgtcccttttatcgtcaaaaaatgcgtctgcgagatagaacgcagggccctacggaccaaaggaatatatcgcgtgaatggtgtgaaaaccagggttgaaaaattgtgccaggcatttgaaaatggaaaggagctggtcgagctgagccaggcctcccctcacgatatctccaacgtcctaaagctctatctcagacagcttccggaaccactgataagtttcaggctgtatcacgaattagtcgggctggctaaagactcccttaaggcagaagccgaggccaaggccgcttcaagaggacgacaggatggcagtgaatccgaagcagtggccgtagcactagcaggacggctgcgggaactgttacgggatttgcccccagaaaatcgggcaagcttgcagtacctgcttaggcacctaagaagaatagttgaggtggaacaggacaacaagatgacacctggaaatctggggatagtctttggaccgacactgttgcggcctcggccaactgaagccacagtcagcctgtcatccttagtggattacccccatcaggcccgtgtcatcgagaccctgatcgtgcattacggcctagttttcgaagaagagccagaagagacccccggtggtcaggacgagagcagtaaccagagagccgaagtcgtcgttcaggtaccatacctggaagccggtgaagccgtggtgtaccctctccaggaggcagcagccgatggctgcagagaaagcagggtcgtgagtaacgactctgactcggaccttgaggaggcctctgagctgttgagcagctctgaggcatccgcactcgggcatctcagttttctagagcagcaacagtctgaagcctcactcgaggtggccagcggatctcactcggggagcgaggagcagctggaggctacagcacgggaggatggtgacggcgacgaggacggacccgcacagcagctttccgggtttaacactaaccagtctaataacgttctgcaggctcccctgccacccatgaggcttcgcggaggcaggatgactcttgggtcgtgtcgagaacgccagccggagttcgtgtag

SEQ ID NO: 226150 - DNA, 420 bp, synthetic construct
  misc_feature 1..420: note = Description of Artificial Sequence: Synthetic coding sequence
  source 1..420: mol_type = other DNA
atgagtataagcagtgcgttggctatggtcttcatgggggcaaaaggaaacactgcagcccagatgagtcaggccctctgtttttccaagattgggggagaggacggggatatccatcggggatttcagtccttgttggtggcaattaacagaacagataccgaatatgtgttgaggacagcgaacgggctttttggcgagaagtcctacgactttctgactggattcaccgattcatgtggcaaattttatcaggctactataaagcaactggatttcgtcaatgataccgagaagtctaccacccgcgtaaattcttgggtcgcggacaagaccaagggggagaacatattgctgttctacttcgataatatcttgaactccttcatcgtgtctagcctgcagaactgtcagatatag

SEQ ID NO: 226151 - DNA, 162 bp, synthetic construct
  misc_feature 1..162: note = Description of Artificial Sequence: Synthetic coding sequence
  source 1..162: mol_type = other DNA
atggagatctttatcgaggtgtttagtcattttctgctacagctcactgaactgacactgaacatgtgcttagagttaccaacagggtctcttgaaaaaagcctgatgataagctctcaggttctgcagatccccgtagctaactccaccaagcaaagatag

SEQ ID NO: 226152 - DNA, 648 bp, synthetic construct
  misc_feature 1..648: note = Description of Artificial Sequence: Synthetic coding sequence
  source 1..648: mol_type = other DNA
atgagtgagactgtgccccctgctccagctgctagtgcagcccctgaaaagcccctggccggaaaaaaagccaagaagcccgcaaaagccgctgccgcttccaagaagaaacccgctgggccttcagtgtctgagttgatcgtgcaggccgctagctccagtaaggagagagggggagtgagtctcgcagcgttgaagaaagctctggcagctgcaggctacgatgttgagaagaacaactctcgcatcaaactaggtattaaaagtctggtatcgaagggcacactggttcaaactaagggcacaggcgcatctggatcattcaaattaaataaaaaggctagctccgtcgagaccaaaccaggcgcatctaaagttgctacgaagaccaaagccaccggagcttcgaaaaagttgaagaaggcaaccggcgcatctaagaagtctgtcaaaactccaaaaaaggctaagaagccagccgcaacccgcaaatccagtaagaatccaaagaagcctaagacagtgaagcctaaaaaggtcgcaaaatcgccggctaaggcaaaagccgtcaagcccaaagcagcgaaagcaagggtgactaagcctaaaacggccaaaccaaaaaaggctgcgcctaaaaaaaaatag

SEQ ID NO: 226153 - DNA, 681 bp, synthetic construct
  misc_feature 1..681: note = Description of Artificial Sequence: Synthetic coding sequence
  source 1..681: mol_type = other DNA
atgagcgagactgctccggcagagaccgctactccggctcccgtggaaaagtctcccgcaaagaagaaggctaccaaaaaggccgcaggcgcaggcgcagcgaagagaaaagcgactgggccacctgtctctgaactgatcaccaaggctgtggcagcttccaaagagcggaatgggctttctctggccgctttaaagaaagcactggcagccggtggctatgacgtcgagaaaaacaacagtagaataaaactcggtctcaagtctctcgttagcaagggcaccttggtccaaaccaagggtactggcgctagcggaagtttcaagttgaacaaaaaagccgcatccggcgaagccaagcctaaggccaagaaagcaggggctgccaaggccaagaaacccgctggcgcaacccctaagaaggctaaaaaagccgcaggcgcaaaaaaagcggttaagaagacacccaaaaaagcaaaaaagcccgctgctgccggagtaaaaaaggttgctaagtcccccaaaaaggctaaggccgctgcgaagcctaaaaaagcaactaaatctcctgccaaacctaaggccgtgaagccaaaggctgcaaaaccgaaggcagcaaaacctaaagccgcaaaacccaaggccgctaaagccaaaaaagccgctgctaaaaagaagtag

SEQ ID NO: 226154 - DNA, 642 bp, synthetic construct
  misc_feature 1..642: note = Description of Artificial Sequence: Synthetic coding sequence
  source 1..642: mol_type = other DNA
atgtccgagactgcccctgctgccccagcagcggctcctcctgcagagaaagctccggttaagaaaaaggctgctaagaaagccggtggtacccctagaaaggcctcaggacctcctgtgagtgagctgatcacgaaggctgtagccgcaagcaaagagagatctggggtgtctcttgccgctctgaagaaagctctagctgccgcaggctacgatgtggagaaaaataattcacggatcaagctcggcctgaaatccctggtgagtaagggcacgttggtccaaactaagggcacaggcgcatctgggtcttttaagctaaacaagaaagccgcatccggcgaagctaaaccaaaggtaaagaaagccggaggcacaaagcccaaaaagccagttggcgctgctaagaagcctaaaaaggcagccggaggtgccacccctaaaaaatccgcgaagaagacgccaaaaaaagcaaaaaaacccgctgctgccaccgttaccaaaaaggtggccaaaagccctaaaaaggccaaggtggcaaaacccaagaaagcagccaaaagcgctgccaaagcagtgaagcccaaggccgctaaacccaaagtggtaaaaccaaaaaaggcagcaccgaagaaaaaatag

SEQ ID NO: 226155 - DNA, 666 bp, synthetic construct
  misc_feature 1..666: note = Description of Artificial Sequence: Synthetic coding sequence
  source 1..666: mol_type = other DNA
atgtcggagaccgccccattagctcctaccattcccgctccagccgagaaaacccctgtcaagaaaaaggctaagaaagccggtgccactgctggcaaaaggaaagccagcggaccccctgtgtcggagctcatcacaaaagccgtagctgcttccaaagagcgctcaggggtctctctcgctgcccttaagaaagccttggccgctgctgggtatgatgtagagaagaataacagccggatcaagctcggactcaagtctctggtcagcaaagggaccctcgtgcagacaaagggcacgggtgcctctgggagctttaaactgaataagaaagctgcctcgggcgaagggaaaccaaaggcaaagaaagcaggagctgcaaagcctaggaagcctgccggagcggctaagaagcctaagaaggtcgcaggggcagccacccccaagaagagtatcaagaaaacaccaaaaaaggtgaaaaagcccgctaccgctgctgggaccaaaaaagtcgcaaaatcagccaagaaagtaaagacaccccagccaaagaaggccgcaaagagccctgctaaagccaaggcccctaaacctaaggccgcaaaacccaagtctgggaagcccaaggttactaaagccaagaaagcagcacctaagaaaaagtag

SEQ ID NO: 226156 - DNA, 660 bp, synthetic construct
  misc_feature 1..660: note = Description of Artificial Sequence: Synthetic coding sequence
  source 1..660: mol_type = other DNA
atgtcagagaccgcacctgccgcacctgccgctcctgctcccgcagagaagacacctgtgaagaagaaagcccgtaaaagcgccggagctgcaaagcgaaaggctagtggaccgcctgttagtgagctcatcactaaggccgtcgcagcaagtaaggagcgctcaggagtgtctcttgctgccctcaagaaggccctggccgctgctggctatgatgtcgaaaagaacaatagtcgcattaaactcggcctaaaaagtctcgtctctaaaggcacattggttcagacgaagggcacaggtgcgtctggcagttttaaattaaataagaaggctgcctcaggagaggcgaagccaaaagccaaaaaggcgggagctgccaaggccaagaagccagctggggctgctaagaaacctaaaaaggccaccggggcagcaacaccaaagaaatccgcaaaaaagacacccaaaaaagcgaagaaacccgcagccgcagccggagccaagaaggccaagagtcccaaaaaggcaaaagccgcaaaaccaaaaaaagcaccgaagtctcccgctaaggctaaagccgtcaaaccaaaggccgctaagcccaagactgccaagcccaaagcggcaaaacccaaaaaagccgcagctaaaaaaaagtag

SEQ ID NO: 226157 - DNA, 624 bp, synthetic construct
  misc_feature 1..624: note = Description of Artificial Sequence: Synthetic coding sequence
  source 1..624: mol_type = other DNA
atgtccgagaccgttccagcggcttccgcaagtgcgggtgtcgctgccatggaaaagctcccaaccaagaaaagaggaagaaagcccgcagggttgatttctgcgtcccgcaaagttcctaatttaagcgtgtcgaagctgatcacggaggcattgtcggtctcacaagagcgcgttggaatgtctttggttgcgcttaaaaaggccctcgcggctgccggatacgatgtggaaaagaacaatagtaggattaagctttcacttaaatcccttgtgaacaaggggattttggtacagacgcgcggtaccggagcaagtggttccttcaaattgagtaaaaaggtgatacccaaatcaaccagatcaaaagcgaagaagagcgtctcagctaagacgaagaaacttgtattgtccagggactccaagtcccccaagaccgccaagacaaacaagagggcaaaaaaaccccgagcaaccacccctaagaccgtgcgctctgggaggaaagccaagggagcaaaaggcaaacagcaacagaaaagcccagtgaaggccagagcatcaaagtccaaactgactcagcaccacgaggttaatgtgaggaaggccacctccaagaagtag

SEQ ID NO: 226158 - DNA, 393 bp, synthetic construct
  misc_feature 1..393: note = Description of Artificial Sequence: Synthetic coding sequence
  source 1..393: mol_type = other DNA
atgtctggcagaggtaagcaggggggaaaagcacgcgctaaagcaaaaacccggtcgagccgtgctggcttgcagttcccggttggacgcgtgcaccgcctgcttcggaagggcaactattcagaaagggtgggggcaggggcaccagtttacttagccgctgtgctagaatatctgaccgcagagatcctggagctcgcaggcaatgcagctcgggacaacaagaagaccagaataattccacggcacctgcagctcgccatccggaacgacgaggagttgaataagttgcttggtcgtgtgacaattgctcagggcggtgtgctgccaaacatccaggctgtcttactacctaaaaaaaccgagtctcatcacaaagccaagggcaagtag

SEQ ID NO: 226159 - DNA, 393 bp, synthetic construct
  misc_feature 1..393: note = Description of Artificial Sequence: Synthetic coding sequence
  source 1..393: mol_type = other DNA
atgtccggccgtgggaaacagggaggaaaagcgcgagccaaggccaaatcccgctctagccgggctgggcttcaatttccagtcggtcgcgttcataggttgttaagaaagggtaattatgcagaacgggtgggcgcaggcgcaccagtatacctcgccgctgtgctcgagtacctgacagccgagatcctcgagttggccggtaacgctgccagagacaataagaaaactcggattatcccccgacatctgcagttagctatcagaaatgatgaggagctcaacaagcttctcggtagagttactatagcccaaggcggagtgctaccgaatattcaagctgtgcttctgccgaagaagactgagagtcatcacaaagcaaagggaaaatag

SEQ ID NO: 226160 - DNA, 393 bp, synthetic construct
  misc_feature 1..393: note = Description of Artificial Sequence: Synthetic coding sequence
  source 1..393: mol_type = other DNA
atgtctggacgcggaaagcagggagggaaggcacgagccaaggcaaaaagccgcagttctagggctggtctgcagttccctgtgggaagggtgcaccgcctgctgagaaagggcaactatgcggaaagagtgggagcgggtgcaccagtgtatctagctgccgtgctagagtaccttactgcagagatactggaactggcaggcaacgccgctagagacaacaagaagacacggattatccctcgccatcttcaactggcaattagaaatgatgaagagttgaacaaattgctcggaagggtcaccatcgcccagggtggcgtcttgccaaatatacaggcagtgctgctgcctaaaaagactgaatcacatcataaggcgaaaggaaagtag

SEQ ID NO: 226161 - DNA, 393 bp, synthetic construct
  misc_feature 1..393: note = Description of Artificial Sequence: Synthetic coding sequence
  source 1..393: mol_type = other DNA
atgtcaggcagaggcaagcaaggagggaaggctcgggcaaaagccaaaaccagatcatcccgagctgggctgcagtttccagtaggaagagtgcataggctactgcgtaagggtaactattctgagagggttggagccggagccccagtgtacttagcggctgtgctggaatacttgaccgcggaaatactggagctggccggaaatgcagccagagataataaaaaaacccgaattatacctaggcatctgcagctagctatccggaacgacgaggagctgaataaattactggggaaggtcacaattgcccaaggaggcgtactacctaacatccaggctgtcctgctgcccaagaaaaccgagtcccaccataaagcaaaaggcaaatag

SEQ ID NO: 226162 - DNA, 393 bp, synthetic construct
  misc_feature 1..393: note = Description of Artificial Sequence: Synthetic coding sequence
  source 1..393: mol_type = other DNA
atgagcggcagggggaagcaggggggaaaagccagagctaaggcgaaaacacgcagttcccgagcaggcctgcagttcccggttgggagggtgcaccgactgctgaggaaggggaactattccgaaagagttggcgcaggagcccctgtgtatctagccgctgtacttgagtacctgaccgctgaaattttggaactggccggaaacgcagctagggataataaaaagacaagaataatccccaggcatctgcagttggcgattagaaacgatgaagaactaaataagctgctgggtcgtgtcacgatcgcacaaggtggtgtactgccaaacatccaggcagtgctacttcctaaaaagaccgagagccaccacaaggctaagggaaagtag

SEQ ID NO: 226163 - DNA, 393 bp, synthetic construct
  misc_feature 1..393: note = Description of Artificial Sequence: Synthetic coding sequence
  source 1..393: mol_type = other DNA
atgtccggcaggggcaagcagggtggaaaggcacgagcaaaggctaagacccgttcgtccagagctggactccagttcccagtgggcagagtccatagactcttacggaaggggaattatgcggaaagggtgggcgctggtgcccctgtgtatctcgctgccgtgttggagtacctcacggccgagattcttgagctggctgggaacgctgctcgcgacaacaaaaaaacccgcataattcccagacacttgcagctggcaatacgcaatgatgaggagcttaacaagctgctaggaaaagtgactatcgctcagggaggggtgttgcctaacattcaagcagtgctgttacctaaaaagacggagagtcaccataaagccaaggggaaatag

SEQ ID NO: 226164 - DNA, 387 bp, synthetic construct
  misc_feature 1..387: note = Description of Artificial Sequence: Synthetic coding sequence
  source 1..387: mol_type = other DNA
atgtcggggcgaggaaaacaggggggaaaggcaagagccaaggccaaaactcggagttctcgcgctgggctgcagtttccggtaggtcgagtccataggttacttagaaaaggtaattacgcggagagggtcggggcaggcgctcctgtgtatttggccgcagtgctcgagtatctcactgcagaaatcttagagctagctggaaacgcagctagagacaataagaaaactagaattatcccaaggcatctgcagctggcaattcggaacgacgaagaattaaataaattgcttggtaaggtgacaattgctcagggcggtgtcctgccaaacatccaggctgtcctgctgcctaagaaaactgaaagtcatcataaaacgaagtag

SEQ ID NO: 226165 - DNA, 393 bp, synthetic construct
  misc_feature 1..393: note = Description of Artificial Sequence: Synthetic coding sequence
  source 1..393: mol_type = other DNA
atgtcgggccgaggaaaacaaggcggtaaagccagggccaaggccaagaccaggagctccagagccggactgcaattccccgtagggagggttcacaggctactgagaaaggggaactacgctgaacgggttggggctggggctccagtgtatctggccgctgttctcgagtacctgactgccgagattctcgagttggcaggaaatgctgcgagagataataagaagactcggataatcccccgtcatttgcagttggctatcaggaacgatgaggagctgaataagctcctcggtaaggtgaccattgcgcaaggcggagttctcccaaatattcaggcggttctgctgcctaaaaagaccgagagccaccacaaagccaagggcaaatag

SEQ ID NO: 226166 - DNA, 393 bp, synthetic construct
  misc_feature 1..393: note = Description of Artificial Sequence: Synthetic coding sequence
  source 1..393: mol_type = other DNA
atgagcgggagagggaagcagggtggtaaggccagagctaaggccaaaacgcgcagcagcagggctggattacagttccctgtgggtagggtccataggctgttacgaaagggaaattacgcagaacgcgtcggggcaggcgcacccgtctacctcgcagccgtactcgagtatctcactgccgaaatactagaactggccggaaatgccgcacgggacaacaagaagacccggatcatccctagacatcttcagctagccatacggaatgatgaggaattgaacaagctgctgggtaaggtcaccatcgcccagggcggagtgttgcccaatatccaggcagtcctgctccctaaaaaaacagagagccaccacaaggccaaaggtaaatag

SEQ ID NO: 226167 - DNA, 393 bp, synthetic construct
  misc_feature 1..393: note = Description of Artificial Sequence: Synthetic coding sequence
  source 1..393: mol_type = other DNA
atgagcggacgcggaaagcaaggaggcaaggccagggcgaaggcaaaaacaaggtcctctagagctggccttcagttccctgtcggacgtgtgcacaggctgctgcgtaagggtaattacgccgaaagggtgggggcaggggctcccgtataccttgctgccgtgcttgagtatttgaccgctgagattctggagctcgcgggtaacgcagctagggataataaaaagactcggattatccctagacacctccagctggcaatcaggaatgacgaagagcttaataagcttcttggtaaagtgaccatcgcacaggggggtgtgctgcccaatatacaggccgttctgctgccaaagaaaacagaatcacaccataaggccaagggcaaatag

SEQ ID NO: 226168 - DNA, 384 bp, synthetic construct
  misc_feature 1..384: note = Description of Artificial Sequence: Synthetic coding sequence
  source 1..384: mol_type = other DNA
atgcctgaagtctcatccaaaggtgccaccattagcaaaaagggttttaaaaaagcagtggttaaaacacagaagaaagaaggcaaaaagcggaagcgcactcgcaaggagagttattctatttacatttataaagtgctaaagcaagtgcatccagacactggcatcagctccaaagctatgagcatcatgaatagcttcgtcaccgacatctttgagcgcattgcctctgaggcatctaggttagcacattactccaaaagatccacaatctcctcacgagagatccagactgcagtcaggttattgctgcccggtgagctagccaaacacgccgtttccgaaggcacgaaggccgtcaccaagtatactagtagcaagtag

SEQ ID NO: 226169 - DNA, 381 bp, synthetic construct
  misc_feature 1..381: note = Description of Artificial Sequence: Synthetic coding sequence
  source 1..381: mol_type = other DNA
atgcccgaaccctctaaatccgcacctgcccctaaaaaagggtcaaaaaaagctatcaccaaggctcagaaaaaagatggaaaaaagaggaaacgatcacgcaaggaatcctactctatatatgtgtataaggtacttaagcaggttcaccctgacacgggtatcagctctaaagccatgggaattatgaattcgtttgtcaatgacatcttcgagaggatcgccggtgaggcctccagactggcccattacaataagcgatctaccatcaccagccgcgaaattcagacagctgttagacttctgttgccaggcgaactcgccaaacacgccgtttccgagggaaccaaggctgtgacaaagtatactagttctaaatag

SEQ ID NO: 226170 - DNA, 381 bp, synthetic construct
  misc_feature 1..381: note = Description of Artificial Sequence: Synthetic coding sequence
  source 1..381: mol_type = other DNA
atgcctgagcctgcaaaatcagcccctgctccgaagaagggcagcaaaaaagcagtgacaaaggcgcagaaaaaggacggaaagaaacggaagcgatcccgaaaggaaagctactctgtgtatgtttacaaagtcctcaaacaggtgcacccagataccggcatcagcagcaaggccatgggtattatgaatagtttcgtgaacgacatctttgagcgcatcgctggggaggcgtctcggttggcccattataacaagaggtctacaatcacatcacgggagatccagaccgcagtgcgccttcttttgcctggcgagctggctaagcacgccgtctcagaaggaacaaaagcagtaaccaagtataccagctcgaaatag

SEQ ID NO: 226171 - DNA, 381 bp, synthetic construct
  misc_feature 1..381: note = Description of Artificial Sequence: Synthetic coding sequence
  source 1..381: mol_type = other DNA
atgccagagcccgcaaagagcgcaccagccccaaaaaagggttcaaagaaagctgtgacaaaggctcaaaagaaagatgggaaaaagcgtaagaggtcacgaaaggagtcttacagcgtgtacgtttataaggtgcttaaacaggttcaccccgacacagggatcagttcaaaagcgatgggcatcatgaactcattcgtgaatgacattttcgaaagaatcgctggcgaagcgagtcggctcgcacattacaataagcgatcaacgatcactagtagggagatacaaactgccgtcaggctgctgctgcccggtgagcttgcaaaacatgctgtcagtgaggggaccaaagccgtcactaaatataccagctctaaatag

SEQ ID NO: 226172 - DNA, 381 bp, synthetic construct
  misc_feature 1..381: note = Description of Artificial Sequence: Synthetic coding sequence
  source 1..381: mol_type = other DNA
atgcccgagccaacaaaatccgcccctgctcccaaaaagggtagcaagaaggctgtgactaaagcccagaaaaaggatgggaaaaagagaaaacggagccgcaaagaaagttattctgtgtatgtgtataaggtcctgaagcaagtgcatcctgacaccggaataagttccaaggccatgggaattatgaatagcttcgtgaacgatatattcgaaagaatcgccggagaagcctctcggctggcgcactacaacaaaaggagtacaataacaagcagggagatccagactgctgtgcgcctcctgctgccaggcgagctggccaagcatgccgtgtctgaaggcacgaaggcagttactaaatacacttctagcaaatag

SEQ ID NO: 226173 - DNA, 381 bp, synthetic construct
  misc_feature 1..381: note = Description of Artificial Sequence: Synthetic coding sequence
  source 1..381: mol_type = other DNA
atgccagagcccactaagagtgcacccgcacccaagaagggttcaaaaaaagccgtgaccaaagcgcagaaaaaagacggtaaaaagaggaaacggtcgaggaaggagtcgtattcagtatacgtctacaaggtgctgaagcaggtccaccctgacacaggcatctccagcaaggccatgggaatcatgaacagtttcgttaacgacatctttgaacgtatcgctggcgaagcctcacggctggcccactacaataagcgttccaccatcacctcccgagaaatacagacagcagtgcgactgttactgccaggagagctagcaaagcacgccgtgtccgagggtaccaaagcagtcaccaagtatacaagtagtaagtag

SEQ ID NO: 226174 - DNA, 381 bp, synthetic construct
  misc_feature 1..381: note = Description of Artificial Sequence: Synthetic coding sequence
  source 1..381: mol_type = other DNA
atgccagagccagcgaagtccgctccagctcctaaaaaaggatctaagaaggccgtcacgaaggcacaaaaaaaggatggaaagaagcggaaaaggagccggaaggagagctacagcgtctatgtttacaaggtcctgaagcaggtgcatcctgatacaggcatatctagtaaagcgatggggatcatgaactcattcgtaaatgacatatttgagcgtatagcaggtgaggcctcgcgattagcgcattataataagaggtcaaccatcactagtcgcgaaatccagactgccgttagactgttattacccggagagctggccaaacatgccgttagcgaaggaacgaaagcggtcacaaagtatacgtcatccaaatag

SEQ ID NO: 226175 - DNA, 381 bp, synthetic construct
  misc_feature 1..381: note = Description of Artificial Sequence: Synthetic coding sequence
  source 1..381: mol_type = other DNA
atgcctgagccagccaagagcgcgccagcacctaagaagggttcaaagaaagctgtgacaaaagctcaaaagaaagatggcaaaaaaaggaaacgctcacggaaggagtcttacagcgtctatgtttataaagtcctcaaacaggtacatccagacaccggcatctcatccaaggccatgggtataatgaactctttcgtgaacgacatttttgagcgaatcgccggtgaagcctcccgtttggctcattataataaacgttccaccatcacctccagggagattcagaccgcagttcgtctgctgctccctggcgaactagctaaacacgcagttagtgagggcaccaaggcagtgaccaagtacactagctcaaagtag

SEQ ID NO: 226176 - DNA, 381 bp, synthetic construct
  misc_feature 1..381: note = Description of Artificial Sequence: Synthetic coding sequence
  source 1..381: mol_type = other DNA
atgcccgaacccgcaaaaagtgccccagctcctaagaaaggctcaaaaaaggctgtgactaaagcccaaaaaaaagacgggaagaaaaggaagaggtcccgcaaggagtcctacagtgtttatgtatataaagtcctgaagcaggttcacccagacaccggcatctcttcaaaggccatggggatcatgaactcctttgtcaacgatatcttcgaacggatcgccggagaagcctctagactggcgcattacaacaaaagaagcactatcacatctcgtgaaatacagactgctgtgcgcctcctgctacctggtgagttagctaagcacgcagttagcgaaggtacgaaggcggtcacaaagtatacaagctcaaagtag

SEQ ID NO: 226177 - DNA, 381 bp, synthetic construct
  misc_feature 1..381: note = Description of Artificial Sequence: Synthetic coding sequence
  source 1..381: mol_type = other DNA
atgcctgacccagccaaatctgcacccgcacctaagaagggcagtaaaaaggcagtgaccaaagcccagaaaaaggatggcaagaagcgcaaaaggagcaggaaagagagttactcagtatacgtctataaagtccttaagcaggttcaccccgacactggcatatccagcaaggcgatggggatcatgaacagctttgtgaatgacatttttgaaaggatcgcaggagaagcatcccgccttgcccactacaataaacggagcacaatcactagtagggagatccagaccgcagtgcgcctcttgcttcccggagaattagccaaacatgccgttagcgagggaactaaagccgtgaccaaatacacatcctcgaagtag

SEQ ID NO: 226178 - DNA, 381 bp, synthetic construct
  misc_feature 1..381: note = Description of Artificial Sequence: Synthetic coding sequence
  source 1..381: mol_type = other DNA
atgcccgaacctgccaaaagcgcgcctgcgccaaaaaagggcagtaaaaaagcagtgacgaaggctcaaaagaaagacggaaaaaaacgcaaacggtctcgaaaagaatcatactctgtatatgtgtataaagtattgaagcaggtccatccagataccgggatttcttctaaagctatgggcattatgaactcctttgtgaatgacatcttcgagcgaattgcaggagaagcctcgcgtttggcccattataataagagaagcactattaccagcagggagatacagacagccgtgaggcttttgttgcctggcgaacttgccaagcacgcggtgtcggaaggaaccaaggccgtgaccaaatataccagtagcaaatag

SEQ ID NO: 226179 - DNA, 381 bp, synthetic construct
  misc_feature 1..381: note = Description of Artificial Sequence: Synthetic coding sequence
  source 1..381: mol_type = other DNA
atgcccgagctggccaagagcgcacccgctcccaaaaaagggtctaaaaaagccgtgaccaaagctcagaagaaagacgggaaaaagaggaaacggagcagaaaggagtcatacagtgtctatgtgtacaaggtgctcaaacaggtccatcccgacaccggaatttcctcaaaggccatgggaatcatgaattccttcgtcaatgatattttcgagcgtattgccagtgaagccagccgactagcacattataacaagagaagcaccatcacttcccgggaaattcagacagcggtcaggttgttattgccaggtgagctggccaaacatgctgtgtctgagggaactaaggctgtgacaaagtatacatcatccaaatag

SEQ ID NO: 226180 - DNA, 381 bp, synthetic construct
  misc_feature 1..381: note = Description of Artificial Sequence: Synthetic coding sequence
  source 1..381: mol_type = other DNA
atgcccgagcccgtgaagagtgcacccgtgcctaagaagggcagcaagaaggccattaacaaggcgcagaaaaaggatggcaaaaaaagaaagaggtctcgcaaagaaagctattccgtttacgtgtacaaggtcctgaaacaggtgcatcctgataccggaatctctagcaaggcgatgggcatcatgaactcctttgtcaatgacatattcgagcgaatcgccggagaagccagccgcctggcccactacaataagcgttctacaattacctctagggagattcagaccgccgtgagattgctactacccggagagctggccaaacatgcagtatccgagggcactaaggccgttaccaagtatacatcctctaagtag

SEQ ID NO: 226181 - DNA, 381 bp, synthetic construct
  misc_feature 1..381: note = Description of Artificial Sequence: Synthetic coding sequence
  source 1..381: mol_type = other DNA
atgccggagccctcaaaaagcgcccctgcaccaaaaaagggcagtaagaaggccgtgaccaaggctcagaaaaaagatggtaagaagaggaaacgctctcgaaaagagagctattctgtgtatgtatataaagtacttaagcaggttcacccggatacaggaatatcttccaaggctatgggtataatgaacagcttcgtgaacgatatctttgagaggatagccggagaggccagtaggttagctcactacaataagcgcagcaccattaccagccgcgagatacagaccgcagtccggctcctcttaccaggcgaactggccaaacacgcagtctcggagggcacaaaagctgtgactaagtacacctcatcaaagtag

SEQ ID NO: 226182 - DNA, 381 bp, synthetic construct
  misc_feature 1..381: note = Description of Artificial Sequence: Synthetic coding sequence
  source 1..381: mol_type = other DNA
atgccggagcctagtaaatccgcccctgctccaaaaaagggcagcaagaaagccgttacgaaggctcaaaaaaaagatgggaagaaacgtaaaagaagtcgcaaggagagctatagtgtgtatgtttataaagtactcaagcaggtgcatcccgacactggtattagctccaaagccatgggtataatgaatagtttcgtcaacgacatttttgagcggatagccggagaagcaagccgactagcccactataacaaacgaagtactatcacctctcgggagatacagaccgctgtgagattactgctgcccggtgaactggccaaacacgctgtgtccgagggaaccaaggccgtgacgaaatatactagcagcaagtag

SEQ ID NO: 226183 - DNA, 381 bp, synthetic construct
  misc_feature 1..381: note = Description of Artificial Sequence: Synthetic coding sequence
  source 1..381: mol_type = other DNA
atgcccgacccagcgaagtcagctcccgcacccaagaagggctcaaagaaggctgtgacaaaggcccagaaaaaagatggcaaaaaaaggaagcgatccaggaaagaaagctattctatctacgtttacaaggtcctcaaacaggtccaccctgacacgggcatctcctctaaggcaatgggtatcatgaactccttcgttaatgatatcttcgagcggatagctggtgaggcctcacgccttgctcattacaataaacggagcacaatcacctccagagaaattcaaacagctgtccgcctcctgctccctggtgaactggccaaacatgcagtttcagagggcacgaaggctgtgaccaaatataccagtagcaaatag

SEQ ID NO: 226184 - DNA, 411 bp, synthetic construct
  misc_feature 1..411: note = Description of Artificial Sequence: Synthetic coding sequence
  source 1..411: mol_type = other DNA
atggccaggactaaacaaacagctcgaaagtccaccggcggaaaagccccacggaagcagctggctactaaagcagcgagaaagtctgctcctgcgaccggtggcgtgaagaaaccccacaggtacagaccaggtaccgtggcattgcgtgaaatcaggcgttaccagaagtccacagagctcctgatacgtaaactgcccttccaaagattggtccgggagattgcccaggacttcaagaccgacttacgcttccagagcagcgcagtgatggctctccaggaggcttgcgaagcttacctggtgggactttttgaggacaccaacctgtgcgccatccacgcaaagcgcgtcaccatcatgcctaaagatatccagctggcaaggcggattagaggagaacgtgcatag

SEQ ID NO: 226185 - DNA, 411 bp, synthetic construct
  misc_feature 1..411: note = Description of Artificial Sequence: Synthetic coding sequence
  source 1..411: mol_type = other DNA
atggcaaggaccaaacaaaccgcacggaagagtaccggaggcaaggcccctcgaaagcaattagctaccaaggcagctagaaaaagcgcccctgctaccggcggtgtgaaaaagcctcatcggtatcggcctgggaccgtggctctgcgcgagatcagaaggtaccagaagtcaaccgagttgctcatcagaaaattgcccttccaacgccttgtgagagagatcgctcaagattttaagaccgatctaagattccagtcttccgcagtgatggcattacaggaggcttgcgaagcctacctggtcggattgttcgaggacaccaatctgtgcgccattcatgccaagcgtgttaccattatgccaaaagatatccagctggcccgaaggatcagaggggaacgggcttag

SEQ ID NO: 226186 - DNA, 411 bp, synthetic construct
  misc_feature 1..411: note = Description of Artificial Sequence: Synthetic coding sequence
  source 1..411: mol_type = other DNA
atggctcgcactaaacagaccgcgaggaagagtaccggaggaaaggcaccacgaaagcagttagcaaccaaagctgcaagaaagtccgcacccgcaactggtggagttaaaaagcctcataggtacaggccaggcaccgtcgccttgcgagagatcaggcgctaccagaaaagcaccgaacttttaatccggaagctgcctttccagcgcctcgtgcgagagattgcacaggatttcaaaacagacctacggtttcaaagttcagccgtcatggcccttcaggaagcctgcgaggcatacctggtcggattgtttgaagacacaaatctttgtgccatccatgctaagcgagtcacaattatgcctaaagatattcagctggctcgacggattcgcggagagcgggcatag

SEQ ID NO: 226187 - DNA, 411 bp, synthetic construct
  misc_feature 1..411: note = Description of Artificial Sequence: Synthetic coding sequence
  source 1..411: mol_type = other DNA
atggcacgcacgaagcagacagccaggaagagcactggcggtaaggctcccaggaagcagttggctacaaaggccgcacgtaagtccgctcccgctactggtggggtcaaaaagccccatagataccgaccaggcactgtcgccttacgcgagatccggcgatatcaaaaatccacagaactgctaatcaggaaactaccttttcagagacttgtccgggagatcgcccaggacttcaagacggatcttcgatttcagagcagtgccgtgatggctctgcaagaagcttgcgaggcgtacttggtcggcctgtttgaggacactaacctgtgcgcaatacacgccaaaagggtgactattatgccaaaggacatccagctcgctaggaggatacgtggagagagggcatag

SEQ ID NO: 226188 - DNA, 411 bp, synthetic construct
  misc_feature 1..411: note = Description of Artificial Sequence: Synthetic coding sequence
  source 1..411: mol_type = other DNA
atggccagaaccaagcagacagctcgcaaatcaacagggggaaaggcccctagaaagcagctggcaacaaaggctgccagaaagagcgctccggctacagggggtgtcaaaaaaccacacagatataggcctggtactgtggccttgagagaaatccgcagataccaaaagtcaactgaactgttgattcgaaaacttcctttccaacgccttgtgcgagaaatcgctcaagacttcaagacggatctgcgattccaatcctcagctgtgatggctctgcaggaagcctgtgaagcatatctggtcggccttttcgaagatacaaatctgtgcgccatccacgccaagcgggtgaccattatgcctaaagatatacaactcgccaggcgcattcgaggggagagagcatag

SEQ ID NO: 226189 - DNA, 411 bp, synthetic construct
  misc_feature 1..411: note = Description of Artificial Sequence: Synthetic coding sequence
  source 1..411: mol_type = other DNA
atggccagaaccaaacaaactgcgagaaaatcaaccggcggtaaggctcctcggaaacagctcgctacaaaggctgccaggaaaagtgcccctgctacagggggagtgaaaaagccacaccggtaccggccaggcacagtggccctgagggagatacggagatatcagaagtccacagagctgttgattcgcaagctgcccttccaacgcctcgtgcgcgaaattgcccaagatttcaaaactgacctcagattccagtcgtccgctgttatggctcttcaagaggcttgcgaggcatacctggttggattgtttgaagacactaatctgtgtgccatccatgccaagcgagtgaccatcatgcctaaagacatccagctcgcacgcagaatacgcggagaaagagcttag

SEQ ID NO: 226190 - DNA, 411 bp, synthetic construct
  misc_feature 1..411: note = Description of Artificial Sequence: Synthetic coding sequence
  source 1..411: mol_type = other DNA
atggctcgaaccaagcaaactgcacgtaaatctactgggggaaaggccccacggaagcagctcgccacaaaggccgctcgcaaaagtgccccagcgactggcggtgtcaaaaagccccacaggtaccgaccgggtacagtggcccttcgcgaaatcaggagatatcagaagagcaccgagctactgattcggaaactcccttttcagcggctcgtgcgggaaattgcacaagactttaagactgaccttcgcttccagagctccgcagtaatggcccttcaggaagcttgtgaggcttacctagtcggacttttcgaggacactaatctgtgtgcaatccatgccaagagggtgacgattatgcccaaagatatccagcttgctaggcgaataagaggtgagcgtgcctag

SEQ ID NO: 226191 - DNA, 411 bp, synthetic construct
  misc_feature 1..411: note = Description of Artificial Sequence: Synthetic coding sequence
  source 1..411: mol_type = other DNA
atggcgagaaccaagcagaccgctcgcaagtcaaccggcggtaaagctccgagaaaacagcttgctaccaaagccgcacggaaaagtgcgccagcaactggcggtgtcaagaaaccccatagataccggccaggcaccgtggccctgagggagatcagaagataccagaaaagcactgaactgttaatccgtaagcttccattccagcgcctggtgagagagattgcacaggattttaagacagatttacgctttcagtcttcagctgtgatggctctccaggaggcctgtgaagcctacctcgtggggctgttcgaggacacaaacctgtgcgccatccacgcgaaacgcgtgacaatcatgccgaaagatatccagctggccaggcgtatccgcggagagagagcctag

SEQ ID NO: 226192 - DNA, 411 bp, synthetic construct
  misc_feature 1..411: note = Description of Artificial Sequence: Synthetic coding sequence
  source 1..411: mol_type = other DNA
atggcacgtactaagcaaacagctagaaagagtacaggcggtaaggcccctcggaagcagctggccactaaggccgcacgaaagtcagccccagcgacgggtggcgtgaaaaagccccaccgataccgtcctggaactgtcgcccttagggagatcagacgctaccagaagagcaccgagttgctcattagaaagctccccttccaaaggctggttagggaaatcgctcaggacttcaagacagacctgcgatttcaaagctcagctgtcatggctctccaagaagcttgtgaagcgtacctggtagggctttttgaggacacaaatctttgcgcaattcacgccaagagagtaacaatcatgccgaaggacattcaactggcacgcaggattagaggggagcgggcttag

SEQ ID NO: 226193 - DNA, 411 bp, synthetic construct
  misc_feature 1..411: note = Description of Artificial Sequence: Synthetic coding sequence
  source 1..411: mol_type = other DNA
atggccaggactaaacagacagcgagaaagagcacagggggaaaggcacccaggaagcagttggctaccaaggcggctaggaagtctgcccctgctacaggaggcgtcaagaagccacatcggtaccggccaggtaccgtggcccttcgggagatccgcaggtaccagaagagcacagagcttttgattcgaaaactgccttttcagcgcttagtgagggagattgctcaggatttcaagacagatctccggttccaatcttctgccgttatggccctacaggaagcatgcgaggcctaccttgtagggctgttcgaggacaccaacctatgtgcaattcacgctaaaagagtcaccattatgcctaaggatattcagttggccagaaggataaggggggaaagggcctag

SEQ ID NO: 226194 - DNA, 411 bp, synthetic construct
  misc_feature 1..411: note = Description of Artificial Sequence: Synthetic coding sequence
  source 1..411: mol_type = other DNA
atggcccgtaccaagcagaccgcacgcaaatccacaggcggtaaagctcccagaaagcagctagcaactaaagctgcgcgaaaaagtgctccggcaaccggcggagttaaaaaaccgcatcggtacagacccggtacggtcgcgctgagggagatcagacggtaccaaaaatccacggagttgctgatccgtaagctgcctttccagagactggtgagggaaatcgcgcaggacttcaagaccgacctgcgctttcagtccagcgctgtgatggcccttcaggaggcatgcgaggcatacttagtgggacttttcgaggacaccaacctttgcgctatccatgccaagcgggttaccataatgcctaaagacatacagttggccagacggatcagaggagagagggcctag

SEQ ID NO: 226195 - DNA, 339 bp, synthetic construct
  misc_feature 1..339: note = Description of Artificial Sequence: Synthetic coding sequence
  source 1..339: mol_type = other DNA
atgtccggcagaggaaaaggcggaaagggtctggccaaagccaaaacatgtagctctctacccggtctccaatttcccggtagagtccgccacctgttccggaaaggcaattattttgagcccgtaggagctggtgcacccgtgtacttacagtatcttgcagccgaaattttggagttggttggtagcgcaatccgcgacaagacacgctccatcataccgagacacttacagcttgccatccgaaatgatgaggaggtcaacaaacagctcggcaacgtcactatcgcccagggtggggtccttagtaacattcaggctgttcttctgccaaagtag

SEQ ID NO: 226196 - DNA, 312 bp, synthetic construct
  misc_feature 1..312: note = Description of Artificial Sequence: Synthetic coding sequence
  source 1..312: mol_type = other DNA
atgagcggaagaggcaaggggggaaagggtctgggtaaggggggtgcgaagagacatcggaaggtgctgcgagataatatccaaggcatcacaaaaccagccatccggcgtctggcacgccgagggggagtgaagcggatttccggactgatttacgaggagactcgcggtgtgctgaaggtttttttggagaacgtgatcagagatgccgttacatacacagagcatgcaaaacgcaaaactgtgactgctatggacgtcgtttacgccctcaaacggcagggcaggacactgtacggatttggtgggtag

SEQ ID NO: 226197 - DNA, 312 bp, synthetic construct
  misc_feature 1..312: note = Description of Artificial Sequence: Synthetic coding sequence
  source 1..312: mol_type = other DNA
atgtcgggacggggaaaggggggtaaagggttgggcaagggtggcgctaagcgccacaggaaagttctgcgggacaatattcagggcatcaccaagcccgcaatcagaagactggctcggagagggggagttaagcggatctccggcctgatctacgaggaaacacggggagtcctgaaagttttcctggaaaatgtgatcagagatgccgtgacttatacagagcatgctaagaggaagaccgtgactgccatggatgttgtgtacgctctgaaacgacagggcaggacactgtatggcttcggcggatag

SEQ ID NO: 226198 - DNA, 312 bp, synthetic construct
  misc_feature 1..312: note = Description of Artificial Sequence: Synthetic coding sequence
  source 1..312: mol_type = other DNA
atgtcgggacgtggcaaggggggaaagggcctcggcaagggaggcgcaaaacgccatcgaaaagtgctgcgggacaatatccaaggcatcaccaaaccagcgatccggcgactggctaggcgtggaggcgttaagcggatctctggtcttatctacgaagaaaccaggggagtgctgaaggtgtttcttgaaaatgtgattagagacgctgtgacatacactgaacatgcaaagagaaaaacagtcacagctatggacgtggtgtacgcccttaaacggcagggtaggactctctacggattcggcggttag

SEQ ID NO: 226199 - DNA, 312 bp, synthetic construct
  misc_feature 1..312: note = Description of Artificial Sequence: Synthetic coding sequence
  source 1..312: mol_type = other DNA
atgtcgggcaggggaaagggaggcaaaggcctggggaaaggcggagcaaagcggcacagaaaagttctcagagacaatatccagggcattacaaagcccgcaattcgccgacttgctcgaagagggggagtcaaaaggatcagcggcctgatatatgaagaaactcggggagtcttgaaggtctttctggaaaatgtgattagggatgccgtcacctacaccgagcacgcgaagaggaaaactgttactgctatggatgtggtttacgctctaaagcgccagggcaggactttgtatggattcggtggatag

SEQ ID NO: 226200 - DNA, 312 bp, synthetic construct
  misc_feature 1..312: note = Description of Artificial Sequence: Synthetic coding sequence
  source 1..312: mol_type = other DNA
atgagcggcagggggaaaggtggcaagggcctgggaaagggaggagcaaagaggcaccgcaaggtcctccgggataacatacagggaatcacgaaaccggcaatcagacgactggcccgaagggggggtgtgaaacgcatcagtggactcatctatgaagagacccgcggagtgcttaaagtcttcttggaaaatgtcatccgtgatgccgtcacttacacggagcatgccaagagaaaaactgttacagccatggacgtggtttacgcattgaagaggcagggtaggaccctgtatggatttggtggctag

SEQ ID NO: 226201 - DNA, 312 bp, synthetic construct
  misc_feature 1..312: note = Description of Artificial Sequence: Synthetic coding sequence
  source 1..312: mol_type = other DNA
atgtcgggcaggggcaagggaggtaaggggctgggcaagggtggtgctaagcggcaccgaaaagtgctccgcgataatattcagggcatcacgaagcccgctatcaggcggctggcaagacgagggggtgtgaagcggatctctggtctgatttatgaggagacaaggggcgtcttgaaagtctttctagaaaacgttataagggacgccgtcacctacacagagcatgctaaacgcaaaactgtcaccgctatggatgtagtgtatgctctaaagcgacaggggagaaccctttacggatttggtgggtag

SEQ ID NO: 226202 - DNA, 297 bp, synthetic construct
  misc_feature 1..297: note = Description of Artificial Sequence: Synthetic coding sequence
  source 1..297: mol_type = other DNA
atgtctgtgcgcggaaaagcgggtaaaggcctaggcaaaggaggcgcaaagtgtcaccggaaagtgctctccgacaatattcaggggatcacaaagtgcaccattcgacgtctcgcacggcacggtggggtgaagagaattcttggtctgatatatgaggaaactagacgcgtgttcaaggtgttcctcgaaaacgtgatatggtacgctgtcacaaacacagagcatgccaagagaaagactgtgacagctatggcggtggtttacgtcctgaagcgccaggggaggacgctctag

SEQ ID NO: 226203 - DNA, 312 bp, synthetic construct
  misc_feature 1..312: note = Description of Artificial Sequence: Synthetic coding sequence
  source 1..312: mol_type = other DNA
atgtctggacgaggtaaaggcggaaaaggcctggggaaaggaggtgctaagagacatagaaaagtgttacgagacaacatccaggggatcaccaaacctgccatcaggcgcctggcaaggagaggcggtgttaagagaatttctggcctgatctacgaggagacacgtggtgtattgaaagtttttctagagaacgtcatccgcgacgctgtgacgtacacagagcacgctaagaggaagaccgtgaccgctatggacgtggtgtacgctctgaagcgtcagggcaggacactgtacggattcgggggatag

SEQ ID NO: 226204 - DNA, 312 bp, synthetic construct
  misc_feature 1..312: note = Description of Artificial Sequence: Synthetic coding sequence
  source 1..312: mol_type = other DNA
atgtccggccgaggaaagggaggaaaagggctcggaaagggcggtgctaaaaggcatcggaaagtgctgcgggataacattcagggtatcacaaagccagccatccgaaggctggcgaggcgcggaggagttaagcggattagtggccttatttacgaggaaactaggggggttctcaaggtcttcctagaaaacgtgatccgagatgcggttacttacacggaacacgcaaagaggaagaccgtgacagcaatggatgtggtgtatgccctcaagaggcaggggcgaacactgtacggcttcggcggatag

SEQ ID NO: 226205 - DNA, 312 bp, synthetic construct
  misc_feature 1..312: note = Description of Artificial Sequence: Synthetic coding sequence
  source 1..312: mol_type = other DNA
atgagcggtcgtggcaaaggtggaaaaggactgggcaagggcggagctaaaagacaccggaaggttctgagagacaatatccagggcatcacgaaaccagcaattaggcggctcgcgaggaggggtggagtgaaaagaatttccggcctcatctatgaggagacccggggtgtactgaaagtgtttctggaaaacgtgattcgggacgccgttacctataccgagcatgcgaagcgaaaaaccgtgaccgctatggatgtcgtctacgcactgaagagacaggggagaacactgtacggtttcggtggctag

SEQ ID NO: 226206 - DNA, 312 bp, synthetic construct
  misc_feature 1..312: note = Description of Artificial Sequence: Synthetic coding sequence
  source 1..312: mol_type = other DNA
atgtccggcagagggaaagggggaaagggacttggaaagggtggtgcaaaaagacaccgaaaagtgctgcgggacaacatccaaggtataaccaagcccgctattaggcgactggctagacgaggtggcgtcaagaggatctcaggcctcatttacgaagagacacgaggcgtgctgaaggtgttcctggaaaacgtgataagagatgccgttacctatacagagcatgccaagaggaaaactgtgactgccatggacgtcgtgtacgctctgaaacggcaaggtcggaccttgtacggattcggaggatag

SEQ ID NO: 226207 - DNA, 312 bp, synthetic construct
  misc_feature 1..312: note = Description of Artificial Sequence: Synthetic coding sequence
  source 1..312: mol_type = other DNA
atgtccggacggggtaaaggtgggaaaggactgggcaaaggcggagccaagcggcataggaaagtgttgcgtgataatattcaagggattacaaagcccgcaattcgccgactggccagacgcggaggtgtcaagagaatttccgggctcatttatgaagagacacgtggcgtgctgaaggtgttcctggagaacgttataagggatgctgtgacgtatactgagcatgcaaagcgaaaaactgtcaccgcaatggacgtggtatatgctctgaaaaggcagggtaggacactgtacgggtttggcggatag

SEQ ID NO: 226208 - DNA, 312 bp, synthetic construct
  misc_feature 1..312: note = Description of Artificial Sequence: Synthetic coding sequence
  source 1..312: mol_type = other DNA
atgtcaggtcgcggtaagggtggcaaaggcctaggtaagggtggggctaaacggcacaggaaggtactcagggacaacattcagggcattaccaaacccgctatccgacggctggcgcgacgcggaggtgtgaagcggatctctggtctgatttacgaagagactaggggcgtgctgaaggtgttcttggagaatgtgattcgagacgcggtgacctatacagaacacgccaaacgtaagactgtgacagctatggatgttgtctatgccctgaagcgacaaggacgcacattgtatggattcggtggttag

SEQ ID NO: 226209 - DNA, 390 bp, synthetic construct
  misc_feature 1..390: note = Description of Artificial Sequence: Synthetic coding sequence
  source 1..390: mol_type = other DNA
atgagtggcaggggaaaacagggcggtaaggcgagggcaaaggcgaaaagccgctcttccagagccggactgcaatttcccgtagggcgtgtccaccggctccttcggaagggtaattatgcggaacgcgtgggagccggagctcccgtgtatatggctgcagtgctggaatatctcaccgctgagatcctggagctggcaggaaacgcggctcgggataataaaaaaacccggattatcccacgccacctccagctggcaatcaggaatgatgaggaactcaataaacttctcggtaaggtgaccattgcacagggaggcgtgctcccgaacattcaagccgtgctactgccaaagaagacagagtcacacaaggccaagtcaaagtag

SEQ ID NO: 226210 - DNA, 381 bp, synthetic construct
  misc_feature 1..381: note = Description of Artificial Sequence: Synthetic coding sequence
  source 1..381: mol_type = other DNA
atgcctgagccagccaagtcagcgcctgcacctaagaagggatcaaaaaaggctgtgactaaggcacagaaaaaagacggtaagaagagaaaacggagccgcaaggagtcttactctatttacgtgtataaagtattgaagcaagttcacccagataccggtattagcagtaaggcgatgggcatcatgaattcattcgtaaatgatatttttgagagaatcgcaggcgaagcctcacggctggctcactacaataagcggtccactatcacttcgagagagatccaaacagccgtgagactgctgcttcccggagagcttgccaaacatgcagtgtccgaggggaccaaagccgttacaaaatatacaagctcaaaatag

SEQ ID NO: 226211 - DNA, 411 bp, synthetic construct
  misc_feature 1..411: note = Description of Artificial Sequence: Synthetic coding sequence
  source 1..411: mol_type = other DNA
atggcccgtacgaagcaaaccgctcgaaagagcactggcggaaaggcaccacggaagcagctggcaaccaaagctgctcgcaagagcgcaccggctacagggggagtaaaaaagccacaccgctatcgacccggaacagtggcattgagagaaatccgcagataccagaagagcactgagctgttaataaggaagctcccgttccagcgactcgtcagggagatcgcacaagacttcaaaaccgaccttagatttcaatcctctgccgtgatggctcttcaggaggcttcagaggcatacttggttggactgttcgaagacactaatctctgtgccatacatgctaagcgcgttacgatcatgcccaaggacattcagctggctaggcgcattagaggcgagagagcttag

SEQ ID NO: 226212 - DNA, 411 bp, synthetic construct
  misc_feature 1..411: note = Description of Artificial Sequence: Synthetic coding sequence
  source 1..411: mol_type = other DNA
atggccagaactaagcaaaccgcccgaaaatcgaccggcggtaaggcccctcggaaacaactggctaccaaagttgccagaaagagtgcccctgccaccgggggagttaaaaaaccacacagatatagacctggaacagttgctctgcgcgaaatcaggagatatcagaaatctacagaactgttgatccggaagctgccattccagaggctgatgagagagattgcgcaggactttaagaccgatctgagattccaatcctctgctgttatggcactgcaagaagcgtgcgaatcttatctggttggactttttgaggatactaacttgtgtgtgatccacgctaagagggtgaccatcatgcctaaggatatacagctggctagaaggattcgaggagaacgggcttag

SEQ ID NO: 226213 - DNA, 684 bp, synthetic construct
  misc_feature 1..684: note = Description of Artificial Sequence: Synthetic coding sequence
  source 1..684: mol_type = other DNA
atggagggtcagtcaggccgatgtaaaattgtcgtggtaggggacgccgagtgcggaaagacagctctacttcaggtgttcgccaaggacgcataccccggttcatatgtcccaaccgtcttcgaaaactatacagctagtttcgagattgacaagcgcaggatcgaattgaatatgtgggacacctctgggagctcttattacgacaacgtgagaccattggcctatccggatagtgatgcagttctaatttgttttgatattagccggcctgaaacactagactccgttctgaagaagtggcaaggtgaaactcaggaattttgtccaaacgctaaagttgtgctggtgggctgtaagctagatatgaggacagacctggctactctgagagaactcagtaagcagcggctcatccccgtaacacatgagcagggaacagtgcttgctaagcaggtgggggctgtgagctatgtggagtgctctagccggtctagcgaaaggagcgtacgggatgtcttccatgttgcaaccgtagccagtcttggaaggggtcataggcagctacgtaggacagactcaagaaggggcatgcagaggtccgcccagcttagtggacgcccagatagaggcaacgaaggggagattcataaagacagagccaaatcatgtaacctcatgtag

SEQ ID NO: 226214 - DNA, 3114 bp, synthetic construct
  misc_feature 1..3114: note = Description of Artificial Sequence: Synthetic coding sequence
  source 1..3114: mol_type = other DNA
atgaacagccccaacgaatccgacggaatgtccggcagagaaccaagtctcgaaatactgccacggacatccctgcatagtatccctgtgacggttgaggtgaagcctgtgctcccgcgagctatgccttcttccatgggtgggggtgggggtggaagtccctcacccgtggagttgagaggagccctggtcgggagcgtggacccaaccttgagggaacaacaattgcagcaggaattgctcgcgctgaaacaacagcagcaattacagaagcagctgctgtttgccgaatttcagaagcagcacgaccatctgacacgccagcacgaagtgcagctacagaagcacctcaagcagcaacaagagatgttagcagctaagcaacagcaagagatgctggcagccaagcgccaacaggagctggaacaacagaggcagagggaacagcagcgtcaagaagagttggaaaaacaacggctcgagcagcaattgctgatcctgaggaacaaagaaaagagtaaggaatccgccatcgctagcactgaagtaaagctgcgactccaggagtttctcctttccaaatccaaagaacctaccccaggcggactgaaccattcgctcccacagcaccccaaatgttggggcgctcatcacgcctcactggatcaaagctctccacctcaaagcgggccaccaggaacgcccccaagttataagctgcctctacccggaccttacgatagccgcgacgacttccctctgaggaaaaccgcatccgagccaaatttaaaagtgcggagtaggctcaagcagaaagtggctgaacgtcgatccagccccctcttgaggaggaaggacgggacagtcatctccaccttcaagaaacgagctgtggagatcactggggcaggaccaggagcttcatcagtgtgcaactcagcccctgggtccggtccctcttctccgaactcctcccactcgaccatcgctgaaaatgggttcacaggatctgtgcctaatattccaaccgaaatgctaccacagcaccgcgctctgcctctggactcttcgcccaatcagttttctctgtacacgagtccctcactgcccaacatcagcctagggctccaggccaccgtgaccgttactaatagtcacctcacagcaagccctaaactgtcgacacagcaagaggcggaaagacaagcgctccagtcacttcgccaagggggtaccctcactggcaagttcatgagcacatcctccatacctgggtgcctgctgggagtggccctagaaggcgacggatcacctcacggccacgcttctctgctgcaacatgtccttctactggagcaagcaagacagcagtctactctgattgccgtccccctgcacggacagtccccgctggtgacgggggagagggtggctacctcaatgaggaccgtgggaaaacttccccgacatcggccactcagcagaactcagagctcccctcttccgcagagccctcaggccctccaacaactggtcatgcagcaacagcaccagcagttcctagaaaaacagaaacagcagcaactacagctgggtaaaatcctcaccaaaactggcgagttgcccagacagcccaccactcaccccgaggagactgaagaagagctgaccgagcaacaggaggtacttttgggagaaggcgcactcacaatgccgcgagagggcagcacagaatccgagtcaacccaggaggatctggaggaagaagacgaggaggacgacggggaagaggaagaggactgtattcaagtgaaggatgaagagggcgaatcaggcgcagaggagggaccagacctggaggagcctggtgcgggttataagaaactgtttagtgacgcacagcctctccagccccttcaggtatatcaggcaccactgtccctggctactgtgcctcaccaggcactcggtcggacacagtcttcccccgcagcgcctggtggcatgaagtcaccaccagatcagcccgtaaaacatctgtttactacgggacccatatctcagaagatgtacgcagtcctcccgtgcgggggtatcggggtggacagtgacactgtgtggaatgagatgcacagctctagtgctgttagaatggcagtgggatgtctgcttgagctggccttcaaggtggcagctggggagctgaagaacggcttcgccattattcggccaccaggccatcacgccgaggaaagcaccgctatgggtttttgcttctttaactctgtcgccatcaccgcgaagctcctccaacagaaactcaatgttggaaaagtcctaattgtggattgggacatccaccatgggaatggcactcagcaggctttttacaacgatccgtccgttctgtatatctccttgcatcgctacgataacggtaacttcttccctggtagtggagcccctgaagaggttggcggaggacctggagtgggttataatgtcaacgttgcctggactggcggtgttgaccctccaatcggcgatgttgagtacctaacggccttcaggacagtggttatgccaatcgcacacgagtttagtcccgatgtcgttctggtctctgcgggttttgatgccgtcgaaggccacctgagccccctcggcggatactccgttaccgcgagatgcttcgggcatttgacacggcagttgatgaccttggcaggcggacgggtggtccttgcccttgagggaggtcatgatctaaccgctatctgcgatgcctcagaagcgtgcgtctcagcactcctgagtgtggaactacagcctttggacgaggcggttctgcagcagaagcccaacatcaatgctgtggccacattggagaaagtgatcgagatccagagcaaacattggagctgcgttcagaaattcgctgctggcttgggtagaagtctaagagaagcccaagcgggtgagaccgaggaggcagaaaccgtgagcgcaatggctcttttgtctgtgggagccgagcaggctcaagcagcagcggcacgagagcactctccgagacccgctgaggagcccatggaacaagagccggctctgtag

SEQ ID NO: 226215 - DNA, 3369 bp, synthetic construct
  misc_feature 1..3369: note = Description of Artificial Sequence: Synthetic coding sequence
  source 1..3369: mol_type = other DNA
atgaatagccccaacgagtccgacggaatgtcaggcagagaaccaagcctcgagatcttgcctaggacgagtctccacagcatacctgtcaccgtggaagtcaaacctgtcctgccccgtgccatgccatcttccatggggggtgggggagggggttcaccatctccagtagagctgagaggggctctagttgggtccgtagacccgaccctgagggagcaacagttgcagcaagaactgctggcgttaaagcagcaacagcagctacaaaagcaactgttgttcgccgaattccagaaacaacacgatcacctgacgcgacaacacgaagtgcagttgcagaaacacctgaaacagcaacaggagatgctggctgccaagcagcaacaagaaatgttggcggctaagcgccagcaggagcttgagcagcagcggcagagagagcagcagcgccaagaagagctcgagaagcagcggttggagcagcagttattgattctccgaaacaaggaaaagtccaaagaaagtgcaattgccagtactgaagtcaagcttaggttacaggaatttctcttatccaaatccaaagagcctactcctggtgggctgaatcatagcttgccccaacacccaaaatgttggggcgctcatcacgcctctctggatcagagctccccaccccaatctggcccacctggcactccaccatcctacaaacttcccttgccagggccttacgacagtcgggatgacttccctctgcgaaagacagctagtgaacctaatttgaaggtgagatcgagactgaagcagaaagtggccgagcgcaggagttctcccctcctacgaaggaaagacggcacagtgatctcgaccttcaaaaagagagcagtcgagattacaggagccggacctggggcaagttccgtgtgcaactcggcccctggtagtgggccatcaagtccaaatagctcacattccaccatagcggagaacggattcacaggctccgtgcctaatattccaactgagatgcttccacagcacagggcacttcctctcgattcgtccccaaatcagttttccctgtacacttcaccttcccttcctaatattagcctggggttacaggccactgtaacagtaaccaatagccacctgactgcctcccctaagctttccactcagcaggaagcagagcgccaggccctgcaaagtctccgccagggcggaaccctgaccgggaagttcatgagcacgagcagcatacctggatgtttgctcggcgtggcgttggagggtgatggatcaccacacggccatgcctctctcctgcagcacgttctgctactcgaacaggcaagacagcagagcaccctgattgccgtgcctctgcacggacaaagcccgttggtaacaggggagagggtcgccacctcaatgagaacagtcggtaaactccctcgtcaccgccctctgtctaggacccagtcctcaccccttccgcagtcaccacaggcgctgcaacaactggttatgcagcaacaacatcagcagttcctcgaaaagcaaaaacaacagcagctacaactcggcaaaatactgacaaagacgggggaactgccaaggcagcccactacacaccccgaggagactgaagaagagctgacagagcagcaggaggtgctcctgggcgagggtgctcttacgatgccccgtgagggctctaccgagagcgaatccactcaggaagacctcgaggaggaagatgaagaagatgatggggaagaggaagaagactgcattcaagttaaggacgaggaaggagagtctggcgcagaggagggaccagatctcgaagagccaggagctgggtataaaaagctgtttagtgatgcacagcccctgcagccacttcaagtttaccaggcgcctctgtcactcgccacagttcctcatcaggccctgggacgaacccagagctcacccgcagcacctgggggaatgaaaagtcctcccgaccagcctgttaaacatctgtttactacaggcgtggtgtacgacacatttatgttgaagcaccagtgcatgtgcggcaatactcatgtccaccctgagcatgctggccgtattcagtccatttggtctaggctccaggagacaggacttctgtccaaatgcgaaaggatacggggaagaaaagcgacgctggatgagatccaaacagtgcattccgagtatcacaccctgctgtacggcacttcccctctgaaccgtcaaaaactggatagtaagaagctcctcggtccaatctcccagaagatgtatgccgtactgccttgtggaggtatcggggtggattcagacaccgtttggaacgaaatgcatagtagttccgcagttagaatggctgtcggttgccttttggaactggctttcaaagtcgccgcaggagaacttaagaatggattcgccattatccgcccaccagggcaccacgccgaggaatcaaccgcgatgggtttttgcttctttaattcagtggccatcaccgccaagttacttcagcaaaaactcaatgtcggaaaggtcctgatagttgactgggacatacaccatggaaatggcactcagcaggccttttacaacgatccttccgtgctgtatatctcactccatagatacgataatggtaatttttttcccggttcgggagcgcctgaagaagtcggtggtggacctggggttgggtataacgtgaacgtggcctggactggaggagtggacccccctattggggacgttgaatacctaaccgcgttccgaacagtcgtaatgccaatagcgcatgagttcagtccagatgtggttcttgtgtcagctggcttcgatgccgtggagggacacctgtcgcctttgggaggttattctgtaaccgccagatgcttcggacacctcactaggcagttaatgacgttggctggtggacgcgtggttttagcacttgaaggtggacacgacttgaccgccatctgtgacgcttcggaagcgtgcgtctcggccctactgagtgtggagctccaacccttggacgaggccgtgctgcagcaaaaacccaacatcaatgccgtggcgacacttgagaaagtgatagagatccagagcaagcattggagctgcgttcagaagtttgcagccggtcttggacgctctctccgcgaggcccaggctggcgaaacagaagaagccgaaaccgtgagtgctatggccctcctatccgtcggtgctgaacaggcccaagcggcagcagctagggagcacagtccgagaccagccgaggaaccgatggaacaggaacctgcactgtag

SEQ ID NO: 226216 - DNA, 1776 bp, synthetic construct
  misc_feature 1..1776: note = Description of Artificial Sequence: Synthetic coding sequence
  source 1..1776: mol_type = other DNA
atgatgtcctcacctgcccagagtaggagccctgacctgatgtggaacctggttccctgggtgctgttctgcggttgctgcagaatcttccctgatggggtggccggacgcgagcaacttcttgcacagcagaggatgcacagcatgatctcaagtgttgatgttaagtcggaagtccccgtgggtctcgagcccatcagccccctggacctgcggactgatcttagaatgatgatgcccgttgtcgaccccgtagttagagaaaagcagctccagcaggaactcctgctcatccagcaacagcagcagatccagaagcaattactgatcgccgagtttcaaaagcagcacgagaatttgactcgccaacaccaggctcagcttcaggagcatatcaaagagttgctagcgatcaagcagcagcaggaactccttgagaaagaacagaagctggaacagcagcgccaggaacaagaggtagagaggcataggagggagcagcagctgccaccacttcgtggcaaggatcgtggacgtgagcgagcggttgcttccacagaggtgaagcaaaaacttcaggagtttcttttgtccaaatctgccaccaaagatacccccacaaacggcaaaaaccactctgttagtagacatccgaaactctggtatacagccgcacaccacacaagtttggaccagagctccccacctttaagcggtaccagccccagttacaagtatacgctacctggggcacaggatgccaaagatgatttccccttgcggaaaacggagtccagtgtatcctcgtcctctcccggatctgggccttccagtccgaacaatggtcccacaggctcagtgaccgaaaatgagacatccgtcctccctcccaccccccacgctgaacagatggtctcccaacaacgaatcctcattcacgaggacagcatgaacctcctaagcctgtatactagcccctcccttcctaatatcacccttgggctgccagcagtcccttctcaactaaatgcaagcaacagtctcaaggagaaacagaagtgtgaaacacagaccctgcggcaaggggtgcccttaccgggacaatacggcggatccatccccgcttcttccagccacccacatgtcaccctggagggcaagccgcctaactcttcccatcaagctctcttacaacacctcctcttgaaggagcaaatgcgccagcagaagctgttagtggcaggcggagtgcctctacaccctcagtctcccctagcgacaaaagaacggatcagccccggaatccggggtacccataagcttcccaggcaccggcctctgaaccgaacccagtcagcccctctcccccagtcgactctcgcccagctcgtgatccagcaacagcatcagcagtttttagaaaaacagaagcagtatcagcagcaaatccacatgaacaaattgctgtctaagagtattgagcagttgaaacaacccggtagtcacctcgaggaggccgaggaagagctgcagggagaccaggccatgcaggaagatcgagcacccagcagcgggaactcaacgcggagcgattcttctgcttgcgtggatgataccctggggcaggttggcgctgtgaaagtgaaggaagagccagtggattcagacgaggacgctcagatccaggagatggagtccggcgaacaggccgcattcatgcaacaggtgatcgggaaagaccttgctcctggctttgtgatcaaggtgataatctag

SEQ ID NO: 226217 - DNA, 2772 bp, synthetic construct
  misc_feature 1..2772: note = Description of Artificial Sequence: Synthetic coding sequence
  source 1..2772: mol_type = other DNA
ctgcataagctgtcaagtctggtggacgtgaagtctgaggtccccgtcggtctggagccaatcagccctctggacttgcgcacggatctccggatgatgatgcctgtcgtcgatcctgtggtgcgtgagaagcaattgcagcaggaattgctgttgatccagcagcaacaacaaatccagaagcagcttcttatagccgagttccagaagcagcatgagaacctcactcgccagcaccaggctcaacttcaggaacacattaaagagttactggccattaaacagcagcaggaacttctggaaaaagagcaaaaacttgaacagcagcgccaggagcaggaggtcgaaagacaccggcgagagcaacagctgcccccacttcgagggaaggatagaggtcgggaaagggcagtggctagcacagaggtgaaacaaaaactgcaagaatttctactgtccaaatctgctacaaaggacacccccactaatgggaaaaatcatagtgtgtcacggcatcctaaactttggtacaccgcagctcatcacacctctctagaccagtcttctcctccattgagcggaaccagcccgtcttacaagtatacactgcccggagcacaggatgcaaaagacgacttcccactccgcaaaaccgcgagtgagcctaatctgaaggtgagatctcgcctcaaacagaaggttgccgagcggcgatcttctcctctactccggcgtaaggacggaaacgttgtaacatcgtttaagaagagaatgttcgaagttaccgaatcaagtgtaagcagctcgtcgccgggaagcgggcctagcagtccgaacaacggtcccaccgggtctgtgaccgaaaacgagactagcgtccttccacctaccccccacgccgagcagatggtgtcacagcaacgcattctcatccacgaagatagcatgaacctcctgagcctctacacctctccaagcctccccaacatcaccctgggtctgccagctgtgccctctcagcttaacgccagtaacagcctgaaggaaaaacagaagtgtgagactcagactctacggcagggggtgcctctacctggccaatatggaggtagcatccccgcttcaagcagccacccccatgtgacgctcgaaggcaaaccaccaaactcctctcatcaagcactgctacagcacctgctgttgaaagaacagatgcgacagcagaagctcctcgtggcaggtggtgtgccactgcatccgcagtctcctttggctactaaagagcgcatatcccccggaatccgcggaacccataagctcccgagacacagacccctaaaccgcacccaaagtgcacccctgcctcagtctacactggctcaactggtcatccagcaacagcaccaacagttcctcgagaaacagaaacaataccagcagcagattcacatgaacaaaccattcttggaaccgacccatactcgggctctatcagtgaggcaggcaccacttgcagcggtgggaatggacgggctggaaaagcacagactggtcagtcgcactcacagttcgcccgctgcctcagtgttgcctcatcctgctatggatagacccctccagcccggatccgctactggtatcgcttacgaccccttaatgctgaaacaccagtgcgtctgcggtaactccactacccatcccgagcacgctggccgaattcagagcatctggtctagacttcaggaaaccggcctcctcaacaaatgcgaaaggatccaggggaggaaagcttctctcgaagaaattcaactggtccacagtgagcaccactccctcctctacggaacgaatccacttgatggccagaagttggacccacgcattctgcttggagacgacagtcagaagttcttctcttccctcccttgcgggggactgggcgtcgatagtgacacaatctggaatgaacttcactctagcggagccgcacgtatggccgtcggctgtgtgatagaattagcctccaaagtcgcctccggggaactgaaaaacggatttgcggtggtgaggcctcccggtcatcatgcagaagagtccaccgcaatgggtttctgtttcttcaacagcgtggccatcactgctaagtaccttagagatcagctcaatatatccaagatcttgattgtcgatctcgacgtgcatcatggcaatgggacccagcaagccttttacgctgatccaagtattctgtacatttctctccaccggtacgatgaggggaatttcttccccggatccggggctcctaacgaggtggggaccggactgggagaggggtacaatattaatattgcctggacaggcggtcttgatccaccaatgggagacgtcgagtacctcgaagcctttcgtaccatcgtcaaacctgttgccaaagaatttgatcccgatatggtgttagtctcagctggatttgacgctctggaaggccacaccccacctctgggtggctacaaggtgacggcgaagtgttttggacaccttactaagcaactaatgacattggcagacggcagagtcgtcttggctctcgagggaggccacgatctcactgcgatttgcgatgcatctgaggcctgtgtgaacgcgctcctcggcaacgagcttgagcctctggcagaggatatcctgcaccagtcccccaatatgaatgcggtcatatccctccagaagattatcgagatccagtctatgagtttaaagttttcatag

SEQ ID NO: 226218 - DNA, 3078 bp, synthetic construct
  misc_feature 1..3078: note = Description of Artificial Sequence: Synthetic coding sequence
  source 1..3078: mol_type = other DNA
atgcacagcatgatctctagcgtggatgtcaagtccgaggtgcccgtagggctggagccaatcagtcccctcgatctgaggaccgatctccgcatgatgatgccagtggtcgacccagttgtgagggagaaacagctgcagcaggaattgttgctgattcagcaacagcagcagatccagaaacagctcttaatcgctgagttccaaaagcagcacgaaaatctgacaaggcagcatcaagcccagctgcaggagcacattaaattacagcaggagctgttagctattaagcagcaacaggagctattggagaaggagcaaaaactggagcagcagcgccaggaacaggaggtggagaggcacagacgagagcagcaattgcctccactacgcggtaaggaccgtgggagggagagagccgtggcatctacagaagtcaagcaaaagctgcaggagtttcttctcagcaaaagtgctactaaagatactcctacgaacgggaaaaaccattctgtgagtcgacatcctaaactctggtacacagcagctcaccatacctcattggaccaatcttcccccccactcagcggaaccagtccaagctataagtatacactacccggagcacaagatgccaaggacgacttccccttgcgtaaaacggagtcctccgtgtcatcctcctcaccaggctccggaccctcgagtcccaacaacggcccaacagggtcggtcaccgagaacgaaaccagcgtgctccctcccacacctcacgctgagcagatggtgtcacagcagaggattctcatccatgaggatagcatgaatctgctcagtttatataccagtccctcgctgccaaacatcaccctgggcctgcccgctgtcccctcccagctgaacgccagcaattctctgaaggagaaacagaaatgtgagacccagaccctgcggcagggagtgcccctgcccggacagtacggtgggagcataccggcatcctcgtcccatccacatgtgacccttgaggggaagcctccgaattcatcccaccaggctttgcttcaacacttactcctgaaagagcagatgcgccagcagaagttgcttgtggccggtggagttccactccacccccagtcacctctggcaacaaaagaacgcatcagtcccggaattagagggacacataagctccccagacaccgcccactcaatagaactcaatccgccccactccctcagtccaccctcgcgcagttggtgattcagcagcagcaccagcagttcttagaaaagcagaaacagtaccagcaacagattcacatgaacaaacttctgtctaagtctattgagcagctgaagcagcccggttctcacttggaggaggcagaagaagaactccagggagatcaggccatgcaagaggatcgcgctccttcttccgggaacagtaccaggtctgactcttctgcctgcgtcgatgataccctcggtcaagtcggcgctgtgaaggtgaaagaagagcccgtggacagcgatgaggacgcgcagattcaggagatggagagtggcgagcaggccgcattcatgcagcaaccatttctggagccaacccacacacgcgcattgagcgtgcgtcaggcgccactcgccgcagtgggcatggatggtctcgagaagcacagactggtctcaaggacacactccagtcccgcagcttctgtgctgccacatcctgccatggatcggcctctgcagccgggaagcgcaaccggtatagcttatgacccattaatgctgaaacatcagtgcgtatgtggaaactctactacccacccagaacatgcaggtcgtatccagtctatctggagcagactacaggagactggactgctgaacaagtgtgagaggattcagggtcgaaaggcatcactggaggaaattcagcttgtgcactctgagcaccatagcctgctgtatggcactaaccctctcgacggccagaaactggatcccagaatcctgctgggagatgattcccaaaagttcttcagctccctcccgtgtggcggattaggagtggattcggatacaatttggaatgaattgcacagcagcggagccgctcgcatggccgttggctgtgtcatcgagctggcctctaaagtcgcctccggagaacttaagaacggttttgccgtagtgcggccaccaggacatcacgcagaagagtccactgccatgggcttttgtttttttaacagcgtggcaatcaccgccaaatatttacgagaccagctgaatatatccaagattttaatcgtcgatttagatgtgcatcacggcaatgggactcaacaagccttctatgccgacccttctattctttacatttctctgcacagatacgacgaaggcaatttcttccccggaagcggtgcacctaatgaagtcggaaccggtctgggagagggctacaatatcaacattgcttggaccggaggacttgaccccccaatgggcgacgtcgagtacttggaagcgtttcggacgatagtaaagcccgtagctaaagagttcgacccagatatggtcctcgtgagcgcaggtttcgatgcactggagggccacacccctccactgggagggtataaggttacagcaaaatgctttgggcatctgaccaaacagttgatgacactggctgacggaagagtagttctggccctggaaggagggcacgacctcaccgctatctgcgacgcaagtgaggcttgtgtcaacgccctgcttggtaatgagctggaacccctagctgaggacatcctgcatcagagtcctaacatgaacgcggtaatttctctccagaaaattatcgaaatccagagcaagtattggaaaagcgttcgcatggtcgctgtgcctaggggatgcgcccttgcgggagcacagctgcaagaggaaactgagactgtgtccgcgcttgccagcttaacagttgacgtcgaacagccctttgcccaggaggattcccggacagctggagagcctatggaagaagagcctgctctgtag

SEQ ID NO: 226219 - DNA, 1773 bp, synthetic construct
  misc_feature 1..1773: note = Description of Artificial Sequence: Synthetic coding sequence
  source 1..1773: mol_type = other DNA
atgcatagcatgattagtagtgtcgacgtaaagagcgaggtgcccgtaggcttagaaccaatctcgcctcttgatctgcgcacagacctgaggatgatgatgccagttgttgaccctgttgtgcgggagaagcaactacagcaggaacttctgttaattcaacagcagcagcaaatccagaaacaattgctcattgctgagtttcaaaagcagcacgagaatctgacaagacagcaccaggcccagttgcaggaacatataaaggaactcctggccattaaacagcagcaggaactgcttgaaaaggaacagaagctggagcagcaaagacaagagcaggaagttgagcggcatcggagagagcagcagttaccgcctctgcgtgggaaagacagaggccgagaaagagcagtggcttccaccgaagttaagcaaaaactgcaggagtttttgttgtcaaagagtgcaacgaaggacacccctacaaacggcaaaaatcactctgtcagtcggcaccccaagctgtggtataccgctgcacatcatacctcactcgatcagtcatccccgccactttcgggcacaagccctagctataagtatacactaccaggcgctcaggatgctaaagacgatttccccctaagaaaaacagccagtgaaccaaacctgaaggtgcgatcacgccttaaacaaaaagtggcagagaggcggagttccccactccttcggaggaaagacggaaatgttgtcacctcatttaagaagaggatgtttgaggtcaccgagtcctcagtgtcgagctcaagtcccggatccggacccagcagccctaacaacggcccaaccggtagcgttacggagaacgagactagcgtccttccaccaactccacacgcagagcaaatggtcagccagcaacgtatattgatccatgaagattccatgaatctactaagcttgtacacaagtccctctcttcccaacatcactctggggctgcccgcagtcccttctcaattaaacgcatcaaactccctgaaagagaagcagaagtgcgaaacacagaccttaagacagggcgtccctctacccggacagtatggcggttcaattccagcgagctcctcccatcctcatgtcacccttgaagggaaaccccctaatagcagtcatcaggctttgctgcaacatctgcttctaaaggagcagatgagacagcagaagctgttggttgcagggggtgtgcccctccatccacagagcccactggctaccaaggaaagaattagccccggaatcaggggcacacacaaactccccagacacagacctctgaatcggacccagagtgccccattgcctcagtcaaccttagcccagttggtgatccagcaacagcatcagcagttcctggagaagcaaaagcagtaccagcagcagattcatatgaacaaattgctttctaaaagcatagaacagctgaaacagcctggatcacatctcgaggaagctgaggaagaactgcagggcgaccaagccatgcaggaagatagagccccaagttcaggcaactcaacaagatctgacagcagcgcttgcgtagacgatacgttgggacaggtcggagccgtgaaggtgaaggaggaacccgtcgattcagatgaagacgctcagattcaggagatggaatccggcgagcaggccgcatttatgcaacaagtcatcgggaaggatctcgcccctgggtttgtgattaaggtcattatttag

SEQ ID NO: 226220 - DNA, 1734 bp, synthetic construct
  misc_feature 1..1734: note = Description of Artificial Sequence: Synthetic coding sequence
  source 1..1734: mol_type = other DNA
atgctgcaaacgatctacgagtcagactcttgcttttctagcgatggcgtcgcgggaagagaacagctacttgcccaacagcgcatgcacagtatgatctcaagtgtggatgtgaagtccgaggtgccagttggtctcgagccaatctcccctttagacctgagaacggacctaaggatgatgatgccggtagttgatcctgtcgtgcgcgaaaaacagctgcaacaggaactattactcatccaacagcagcagcagatacaaaagcaacttctgatagccgaatttcagaaacagcacgagaatctaacccggcagcaccaggctcagttgcaggagcacattaaactgcaacaggagctgctggctatcaaacagcaacaggagcttctggagaaggaacaaaagctagaacaacagagacaggaacaggaggttgaaagacatcgccgtgagcagcaacttcccccactccgaggcaaggacagaggtagggaaagggccgtcgcttctacagaggtcaagcagaagttacaggaattcctgctgtctaagtcagcaaccaaagacacaccgaccaatggtaagaaccactccgtgtcgagacaccccaagttgtggtacaccgcggctcatcacacctcattggaccagtcctccccacccttatcagggacgtctccgagctacaaatacaccttacccggtgctcaggatgccaaagatgatttccctctacggaagactgaatccagcgtcagttctagctctcctggatccgggcctagctcccctaataacgggccaacaggctctgtgactgaaaacgaaacatcagtgttgcctccaacaccccatgcagaacagatggtcagccagcaaagaatcctgatccacgaagatagcatgaacctgctatccctttacacgtcccccagcctacccaacattactctgggcctccccgcagtcccaagccagctgaatgccagcaattctctcaaagaaaagcaaaaatgtgagacccaaacattacgacagggtgtgccattaccaggtcaatatggcggaagcatccctgccagctctagtcatccacatgttacactggagggtaaaccacccaatagctctcatcaggctttattgcaacacctcctcctaaaggaacagatgcgacagcagaaactactggttgccggtggggtacccttacacccacagtcccctcttgcaactaaggagagaatctcccctggaatcaggggaacccacaagctacccaggcaccgccctctcaacagaacccagtctgcacctttgcctcaatctaccttagctcagctggtgatccagcagcagcatcaacagtttctggagaagcagaagcagtatcagcagcaaattcacatgaataaattgctctccaaaagcatcgagcagttaaagcaacctggcagtcacctagaggaagctgaggaagagcttcagggcgaccaggctatgcaagaagaccgggctcccagctctgggaatagcacccgctctgattcgagtgcctgtgtagacgatactttgggtcaagtcggcgctgtcaaagtcaaagaggaaccggtcgatagcgacgaggacgcccaaatacaggaaatggagtctggggagcaggctgcatttatgcagcaggtgattggaaaagatctggctcccggtttcgttattaaggtcatcatttag

SEQ ID NO: 226221 - DNA, 3201 bp, synthetic construct
  misc_feature 1..3201: note = Description of Artificial Sequence: Synthetic coding sequence
  source 1..3201: mol_type = other DNA
atgcattctatgatatcaagcgtcgatgtgaagagcgaggttccagttggactagagccaattagccccttggacctccgaaccgatctgaggatgatgatgcctgtagtggatcccgttgtgcgcgagaaacagctccaacaggagctcctgcttattcaacagcagcagcagattcagaagcagctgctcatcgctgagttccagaagcagcacgaaaacttgaccagacagcaccaggcgcaacttcaggagcatatcaaggagctcttggcaattaaacagcagcaggagctgctggagaaggagcagaaacttgaacagcaacgtcaggagcaggaggtggaacgccaccggcgagaacagcaactccctcccctgaggggaaaagatcggggacgggaaagagctgtggcttccaccgaggttaagcaaaagcttcaggaatttctgctcagcaaatctgcgacaaaggatacacctacgaacggtaaaaatcatagtgtgtctcgccacccaaagctgtggtacacagcggctcatcacacaagtctggatcagtccagtccccctctaagcgggactagtcctagctataagtatacgctcccgggtgcccaggacgctaaggacgacttccctctgcgaaaaaccgcttccgagcctaatctcaaggtgagaagccgactgaagcagaaggtggccgaacggagatcttcacccctgctgaggcgcaaagatggcaatgtagtgacgagctttaaaaaacggatgtttgaagtgactgagtccagtgtgtcctcatcgagtccaggctcaggacctagttcccccaacaacgggcctaccggatccgtgacagagaacgaaactagtgtgctgccacctacacctcacgcagaacagatggtgtctcagcagaggattctgatacacgaggactcaatgaatttgctgtcgctctatacttcaccgagcctgccaaatatcacactggggctgcccgcagtcccgtcccagttgaatgctagcaacagtctaaaagaaaagcagaaatgcgaaactcagactctgcgccagggagtgcctctgcccggtcaatatggaggatctatcccggcttcgagtagtcacccacatgtgacccttgagggtaagcctccaaattctagtcaccaggcccttttgcaacatttgttgttaaaggaacagatgcggcaacagaagctgctcgtggccggaggggtgccactccatcctcagtccccactcgctaccaaggagcggatttcccccggaattcgcggaacacacaaactgccccgacatcggccactgaatcgcacccagtccgctccgctacctcagagtaccttggcccagctcgtgattcagcagcagcaccagcagttcctggagaaacaaaaacaataccaacagcagatccatatgaacaaactgttgtctaagagcattgaacaattgaaacaacccggttcgcatcttgaggaggctgaagaggaactgcaaggtgatcaggctatgcaggaagatcgcgcaccttcaagcggcaactccacacgatcggattcctccgcttgcgtggacgataccttaggccaagtgggggctgtcaaggtgaaagaggagcccgtggactctgatgaggatgcacaaatccaggagatggaaagtggtgagcaggccgcattcatgcagcagcccttcctagagcctacacatactagagccctgagcgtccgccaagccccactggctgctgtcggcatggacgggctggagaagcataggctcgtgtctaggacacattctagtccagccgcttctgtacttccccacccagccatggatagacctctgcagcccggaagcgcgaccggaatcgcgtacgatccactgatgcttaaacaccaatgcgtgtgtggcaacagtaccacgcatccagagcacgctggcagaatacaaagtatctggtctcgcctccaggagactggtctcctgaacaaatgcgaaaggatacaagggagaaaggccagcctggaggaaatccagttggtccactccgaacaccacagtctgctttacggaacaaatccgctggacggacagaagctggacccaaggattctgctgggagatgactcccagaaattctttagctcgctaccctgtgggggactgggggtcgatagtgacacaatctggaatgagctgcatagttctggggctgcgagaatggccgtaggatgcgtcattgaactggccagcaaggtggccagcggcgagctgaagaatggcttcgccgttgtgcgccctccaggccaccacgcagaagagtcaacagcaatgggattctgtttcttcaacagtgtagctattactgcaaagtacctccgcgaccagctgaacatttccaagatcctgatcgtggatcttgacgtacaccacggaaatggaactcagcaagccttttacgctgatccttccattctgtatatcagcttacaccggtacgatgaagggaatttcttccccggatccggagcacctaacgaagttggtactgggctaggggaggggtacaatatcaatatcgcctggacgggcggactcgacccacccatgggtgatgttgaatacctcgaagcctttcggaccattgttaagcctgtagcaaaagagttcgaccccgatatggtcttggtgtctgccggattcgacgccctcgagggacacacgcctccactggggggatacaaggtgaccgctaagtgttttggacacctcaccaaacaacttatgaccctggctgatggaagagttgttctggccctggaaggcggtcatgatctcacggccatctgtgatgcctccgaggcatgtgtgaatgccctcttaggaaacgagctcgaaccactggccgaagatatccttcatcaaagcccaaacatgaatgcagtgatcagtctccaaaagattattgaaatacagagtaagtattggaaatctgtaaggatggtggccgtgccaaggggttgcgccctggccggtgcccaactacaagaagagaccgaaaccgtgagtgcattagctagcttgaccgtcgacgtggagcagccatttgcacaagaagactcaagaaccgcaggtgagcccatggaggaggagccagccctctag

SEQ ID NO: 226222 - DNA, 447 bp, synthetic construct
  misc_feature 1..447: note = Description of Artificial Sequence: Synthetic coding sequence
  source 1..447: mol_type = other DNA
atgcattcaatgatcagctctgtcgacgtcaaaagcgaagtgcccgtcggccttgagcccattagccctctggacttaaggacagacctaaggatgatgatgccagtcgttgatccggtggtcagggagaagcaactacagcaagagttattgctcattcaacagcaacagcagatacagaagcagctgctgatcgctgaattccagaagcagcatgaaaacttaacacgccagcatcaggcgcagttgcaggagcacattaagctgcaacaggaactccttgccataaagcagcagcaggagctcctcgaaaaagaacaaaagctagaacagcaacggcaagagcaggaggttgagcgacatagaagagagcagcagctccctccactgcggggaaaagacaggggccgagagcgtgctgtcgcatccacagaggtgaagcagtag

SEQ ID NO: 226223 - DNA, 417 bp, synthetic construct
  misc_feature 1..417: note = Description of Artificial Sequence: Synthetic coding sequence
  source 1..417: mol_type = other DNA
atgcatagcatgatttccagcgtggacgtaaaatccgaggtgcctgttgggctggaacccattagccctctggacctgagaactgacttgaggatgatgatgcctgttgtggacccggtcgtgagagaaaagcagcttcagcaggaactcctgctgattcagcaacagcagcagattcagaaacagctcctgatcgccgaatttcagaagcagcatgaaaacttgacacggcagcaccaggcacagttacaggagcatattaagctccagcaggaattattagctattaagcaacagcaagaattgctcgaaaaggaacagaagctggagcagcaacggcaggagcaagaggtcgagcgccaccggagagagcagcaactgcctcctctgaggggcaaagatcggggacgtgagtag

SEQ ID NO: 226224 - DNA, 1767 bp, synthetic construct
  misc_feature 1..1767: note = Description of Artificial Sequence: Synthetic coding sequence
  source 1..1767: mol_type = other DNA
atgatgtcgtcaccagcgcagccagaccttatgtggaatttggtcccgtgggtacttttttgcgggtgttgccgaattttccctgatggggtcgccggacgagaacaactgctggcacagcaaagaatgcatagtatgatcagctcagtggatgtcaagtctgaagtgccagtggggctggaacctatatcccctctagatctgcgcaccgacctgagaatgatgatgccggttgtagaccctgtcgtgagggagaaacagctccagcaggaattgctgctgatacagcagcaacagcaaatacagaagcagctgttaatagctgagttccaaaagcagcacgagaatctaacaagacagcatcaggcacaactgcaggaacacattaaagaactgctggctatcaagcagcagcaggagcttctagagaaggagcagaagctggaacagcagcgtcaggagcaggaggtggagcggcatcggcgagagcagcagctgccaccgctgagagggaaagacaggggcagagaacgagctgtggcaagcaccgaggttaaacagaagctgcaggagtttctgctgtctaaaagcgcaacaaaggatacaccgacaaacggcaagaaccattccgtctcaagacaccctaagttatggtacaccgccgcacatcataccagcttggaccaaagcagtcccccactctcaggaactagcccaagttacaaatacactctgccgggagcccaggacgcaaaagatgatttccctctcagaaagaccgagagcagcgttagcagttccagccctggctccggcccatccagcccgaataatggccctacaggcagcgtaaccgagaacgagacatccgtgctaccacccaccccccatgccgagcagatggtcagtcaacaaagaatcctgatacatgaggactccatgaatttacttagtctttatacctcaccttccctccctaacatcacactggggctgcctgctgtgccgtctcagttgaatgcttctaacagtctgaaagagaaacagaagtgcgagactcagaccttgagacagggcgtccctctaccaggccaatacggcggatccattccagcctcctcttcgcatcctcatgtgactctggaaggcaaacctccaaactccagtcatcaggccctgcttcagcaccttctgttgaaggagcagatgcggcagcagaaactgctcgtggcaggcggagtgccactgcacccacagagccctctggctactaaggagcggatatcacctggcatccgtggtacgcacaagctgccccgacaccgtccgctaaaccgaacccagtctgctcccttgccccagagtacactggcacagctcgtcattcaacaacagcaccagcaatttttagaaaaacagaaacagtatcagcagcagattcatatgaacaaactcctgtctaagtccattgagcagctcaagcagcccggatcgcatctggaagaggcagaggaggaactacagggcgatcaggccatgcaggaagatagggctccgagttccggcaattccacccgctcggactccagtgcctgcgtcgacgacacgttgggacaggtgggggctgtgaaggtgaaagaggagcccgtcgatagcgacgaagacgcccagattcaggaaatggagagtggagaacaagcagcgttcatgcaacaggttatcggcaaggatcttgccccaggctttgtgataaaggttataatttag

SEQ ID NO: 226225 - DNA, 1641 bp, synthetic construct
  misc_feature 1..1641: note = Description of Artificial Sequence: Synthetic coding sequence
  source 1..1641: mol_type = other DNA
atgcactccatgatctcctccgttgatgtgaagagcgaagtccccgtgggattagaaccaatctctccccttgacctccgaaccgaccttcggatgatgatgccggtggtcgatcctgtggtgcgggaaaagcagctgcagcaggaactcttattaatccagcagcagcagcagatccagaagcagcttcttatcgccgaattccagaaacagcacgagaacctcacaaggcagcaccaggcccagctgcaagaacatataaaggaactcctcgctattaagcagcaacaggaactgctcgaaaaagaacagaagctggaacagcagcgccaggaacaggaagtagagagacatagaagggaacaacagctgccgcctcttcgcggaaaggacagagggagagagcgagcagtggccagtaccgaagtgaaacagaagctgcaagaattcctcctgtctaagtccgcaacaaaggacacccctaccaacggcaagaatcacagtgtgtctcgccacccgaagttgtggtacactgccgcacaccacacttccctcgaccaatcctcaccacccttaagtgggaccagcccttcttacaaatatacgctgccaggtgcgcaggatgcaaaggacgactttccactgcgcaagacggagtcttccgtctcttcctccagtcccggaagcggaccttcttctcctaataacggcccaacgggaagcgtcaccgagaatgagacctctgtcctcccccctacaccgcacgctgaacagatggtgtcccaacagaggatcctgatccatgaagacagtatgaaccttctgtccttgtatacgtcgcccagcttgcctaacattacattgggtctgcctgcggtacctagtcagctgaatgcctccaactccctgaaagagaagcagaagtgcgaaacccagactctgcgacaaggtgtccctctccctggtcaatacggaggatccatcccagcgtccagttcccacccacacgtgacacttgaagggaaacctcctaacagtagccaccaggctttgctccagcatctattgcttaaggagcagatgcgacagcaaaagctgcttgttgcagggggtgtgcccttgcatccacagagccctctggctaccaaagaaagaataagcccaggcatcagaggtacacataaactacctagacacagaccgctcaaccgtacccagagcgccccactgccacaaagcacactcgctcagttagtgatccaacagcagcaccagcagtttctggagaagcaaaaacagtatcagcagcaaatccatatgaataagctcctgtctaaatccattgagcagctgaagcagccaggctcccatctggaggaggctgaggaggagttacagggagatcaggcaatgcaagaagatcgggctccaagttctggaaacagcactcgctctgactcatccgcttgcgtggatgacacgctggggcaggtgggcgctgtaaaagtcaaagaagaacccgttgacagcgacgaggacgcgcagattcaggagatggagagtggagagcaagctgcatttatgcagcaggtcatcggaaaagatctcgcgccaggttttgtgataaaagtgatcatttag

SEQ ID NO: 226226 - DNA, 3036 bp, synthetic construct
  misc_feature 1..3036: note = Description of Artificial Sequence: Synthetic coding sequence
  source 1..3036: mol_type = other DNA
atgcattccatgatatccagcgtggacgtaaaatcagaggtgcctgtcggactggaacccatctcacccttggacctccgcacagacctaaggatgatgatgccagttgtagatcccgtggtcagggaaaagcagttacaacaggagctgttattaattcagcagcaacagcagatccagaaacagctgcttatcgccgagtttcagaagcagcacgagaacctgacacgacagcaccaggcgcagcttcaagaacatattaaagagctgctagccattaagcagcaacaagagctgctggagaaggaacagaagctggaacaacagagacaggagcaagaagtcgaacgtcaccggagagagcaacagctgccccctctccggggaaaggatcgaggtcgggaacgggcagtggcttccactgaggtaaaacagaaactccaggagtttctactgtcaaagagtgctactaaggacacacccaccaacgggaagaatcactccgtatctcgccaccccaaactatggtatacggcagcgcaccatacgtctctagatcagtcttcaccccctttgagcggaacttccccatcctataagtatacattgcccggtgcccaagacgccaaggacgatttccctttgagaaagacagcatctgaaccaaacctgaaggtgagatccagactcaagcagaaagtggccgagcgcaggtccagcccactccttcggaggaaggatggaaatgttgtgacatctttcaaaaagagaatgttcgaggttactgagtcttccgtgtccagtagtagtcccggatccggcccatcaagtccgaataatggcccaaccggctcagtcacagagaacgagacctctgtcctacctccaacaccacatgcagaacagatggtaagccagcaacggatccttattcacgaggactctatgaatctcctgtcattatacacttcgccatccctgcccaacatcaccctcggtttaccagcagtgcctagtcagcttaacgcctctaactcacttaaggagaagcagaagtgcgaaacgcagactcttagacagggggtccccctgccgggacaatacggtgggtccatccctgcatcatctagtcacccccacgtgacactagaagggaaaccccctaactcttcccaccaagcgctgcttcagcatctcttactcaaagagcagatgcggcagcaaaagttgctggttgccggaggggttcctctgcacccacagtcccctctggccactaaggaacgtatctctccagggatcaggggcacacacaagttgcctcggcatcgaccacttaacagaacacagtccgcgccactcccccagtctaccctcgcccagcttgttattcagcagcagcatcagcagttccttgagaagcagaagcagtaccaacagcagatccacatgaacaagttactctccaagtcaatcgagcagctcaagcagcccggatcccaccttgaagaggcagaagaagaattgcagggcgaccaggcaatgcaagaggatcgcgcaccgtccagtggaaattctactaggtcagacagtagcgcttgtgtggacgacacactgggccaggtaggagccgtaaaagtaaaggaagagcccgtggattcagacgaagatgctcagatccaggagatggagagcggagagcaggccgcattcatgcagcagcccttcttagagcccactcacactagggctctgtctgtgagacaggcgccactggcagcagtgggaatggacggtcttgagaagcatcggcttgtcagccgaacccactcatctccggctgccagcgtgttgcctcaccctgctatggatagaccactgcaaccagggtctgcaacggggatcgcctatgatcctctaatgctcaagcatcagtgcgtctgcggcaactcaacgacacatcccgagcacgccggtcgaattcagtccatatggtctagactgcaggaaacagggctcctgaacaagtgtgaaaggatccaaggtcgtaaagccagcctggaagaaatccagctggtacacagcgaacaccactccctgctgtacggaactaacccccttgacgggcagaaattggaccctagaatcctccttggggatgattcccagaagttcttttcatctctgccatgtggcggactaggagttgatagtgacaccatttggaacgaacttcacagttctggcgcagctcgcatggccgtcggatgtgtgatcgaactcgcctccaaagtcgctagcggtgagctcaagaacggattcgcagtcgtgaggcctcctggacatcacgcagaggaaagcacggctatggggttctgtttcttcaacagtgttgccataaccgccaagtatttgcgcgatcagctgaacatcagtaaaatacttattgtggatctagatgtccatcatggcaacggcacccagcaggcattctatgctgacccaagcatcctgtatatatcattgcatcgctacgacgagggcaattttttccccggaagcggcgctccaaacgaagtaggtacaggcctgggcgaaggttacaacatcaatatcgcgtggaccggcggactggacccgccaatgggcgatgtagagtatctggaagcttttcgaaccattgtcaaacccgttgctaaagagtttgacccggacatggtattggtgtccgccggattcgatgctcttgaaggacacactccccctttggggggttacaaagtgaccgcaaaatgcttcggtcatctgacaaagcaacttatgactctcgccgatgggagagttgtgcttgccctcgagggagggcacgatttgacagcaatttgtgacgcctcagaagcctgcgtaaatgcacttttagggaacgagcttgagccgcttgccgaggacattctgcatcagtctcccaacatgaatgcagtcatcagccttcaaaagatcatcgagatccagtcgatgtctttaaagttcagctag

SEQ ID NO: 226227 - DNA, 72 bp, synthetic construct
  misc_feature 1..72: note = Description of Artificial Sequence: Synthetic coding sequence
  source 1..72: mol_type = other DNA
atgcactctatgatcagcagtgtggacgtcaagtccgaggtcccagtcggactggaacctatcagtccgtag

SEQ ID NO: 226228 - DNA, 3210 bp, synthetic construct
  misc_feature 1..3210: note = Description of Artificial Sequence: Synthetic coding sequence
  source 1..3210: mol_type = other DNA
atgcacagcatgatttcttctgtcgacgtgaaaagcgaggttcccgtgggtctggagcccatatctcccctggacctgcgcactgatttgcggatgatgatgccagtagtcgaccctgtggtaagagagaagcagctgcaacaagagctcctgctgattcagcagcaacagcagattcagaagcagttattgatagcagagtttcagaaacagcatgaaaatttaaccaggcagcaccaggcccagctgcaggagcacattaagctgcagcaagagctgcttgccattaaacagcagcaagagcttctggagaaggagcagaagcttgagcagcaacgacaggagcaagaagtagaacggcaccgacgggaacagcaattaccccctctccggggaaaagataggggaagggaacgcgctgtcgccagtacggaggttaaacagaaactgcaggaattcctcctgtcaaagtccgccacaaaggacacccctacaaatggcaagaaccactcagtgtctcgacacccgaagttatggtatacagctgcacatcacacaagtctggaccagagtagccctcctttaagtggaacatcaccttcctataaatatacgctgccgggagcacaggacgctaaggacgatttcccgctacgtaagacagcgtccgaacctaatctgaaggtgcgatcacgattgaaacagaaagtagctgagcgtcggagctcccctttactcagacgtaaagacggaaatgtcgtaacaagcttcaagaaacggatgtttgaggtaacagagagttcggtctcgagttcctctcctggcagtgggccaagctcacccaacaacggcccaaccggcagcgtgaccgaaaatgaaacaagcgtcctgcctcccaccccccatgccgagcagatggtgtctcaacagcggattctgattcatgaagacagcatgaaccttctcagcctttataccagtccttccttgccaaatattacgctgggattgccggcagtaccgtcccagctgaatgccagcaatagcctgaaagaaaaacaaaagtgtgagacacaaaccttaagacagggtgtaccactgcctggacagtacggcggttccattccagcttcctcttcacacccacatgtcaccttggaggggaaaccacctaacagttctcatcaggccttgctccagcatctgcttctgaaggagcaaatgcggcagcagaaactcctggtggcaggaggagtgcctttacatcctcagagcccattagccactaaggagagaatcagcccaggaattagaggcactcataaactgcccagacatagaccgctcaaccgtacccaaagcgctcccctcccccagagtacactggctcagctcgtgatccaacagcaacaccagcagtttctcgagaaacagaagcagtaccagcagcagattcatatgaacaaactgctaagtaaatccatcgaacagctgaagcagcctggatctcatctggaggaggctgaggaagagctccaaggggaccaagcaatgcaggaggatagggcccctagctctggcaattcgacccggagcgactctagcgcatgtgtcgatgacaccttgggccaagttggcgcagtaaaggtgaaagaagagccagtggattcggacgaagatgcccagatccaggagatggaatccggggaacaggccgctttcatgcaacagcctttcttggaaccaacccacactcgggctttgtctgtgcgccaggctcctctcgcagccgttggtatggatgggctcgaaaaacaccgcctggtcagtcgcacccacagctccccggctgcctctgtcctccctcatcccgcaatggatcgacctctccagcctggaagcgcaacaggcattgcttatgaccccctgatgctcaaacaccagtgcgtatgtggaaatagcacaacacacccagaacatgccggacgtatccagtccatatggtctcgtttgcaggagacgggactgcttaacaagtgtgagcgcatacaagggaggaaagctagcctggaagagatccagctcgtgcatagcgaacatcattccctgctttacggaaccaatccacttgacggtcagaagctcgatcctcgaatcctgcttggggacgacagtcagaagtttttttcatccctcccctgtggcggactcggggtggattcggacacaatctggaacgaacttcattccagtggtgccgcacgcatggccgtcgggtgtgtgatcgagcttgctagtaaagttgcctcaggcgagctgaagaatggctttgctgtcgtgcgaccacctgggcatcatgcggaggaatctaccgccatggggttttgttttttcaactctgttgccattacagcgaaatatctgcgtgatcaactgaatatcagcaagatactgatcgtggacctcgacgtccatcatggaaatgggactcagcaggcattctatgcagatcctagtattttatatatctcacttcatagatatgacgagggaaactttttcccgggtagtggtgccccaaacgaagtgggtacggggctgggagaggggtataacattaacatcgcgtggacagggggactggatccccctatgggcgacgtggaatacctcgaggcgttcaggaccatcgtaaagccagtagccaaggaatttgatccagatatggtgctggtttccgcaggatttgacgctcttgaggggcacactccccctctgggtgggtataaggtgacagctaaatgtttcgggcaccttacgaaacagctgatgacgctcgcggacggcagggtggtcctggccctggaaggcggtcacgatctaactgcaatatgcgacgcttccgaggcttgtgtgaatgcccttctcggtaacgaactggaacctcttgccgaagacatcctgcaccaatcacctaacatgaatgctgtgatcagtctgcagaaaatcatcgagattcagagcaagtactggaagagcgtcagaatggtcgctgttccacgcggttgtgcactggcaggagcacagctccaggaggagactgaaactgtttccgcattagccagcctaaccgtggacgttgagcaaccttttgcacaggaggatagtcgcacagccggtgaacccatggaggaagagcctgcactctag

SEQ ID NO: 226229 - DNA, 1689 bp, synthetic construct
  misc_feature 1..1689: note = Description of Artificial Sequence: Synthetic coding sequence
  source 1..1689: mol_type = other DNA
atgatgatgcccgtggtagacccggtcgtgcgagaaaaacaattgcagcaagagctgttacttatacagcaacagcagcaaatccagaagcaactgctgatagccgagttccaaaagcagcatgagaatctgacaagacagcatcaggcgcagctccaggagcatatcaagctgcagcaagaattgcttgctattaaacagcaacaggagctgctggagaaggaacagaagctggagcagcaacggcaagaacaggaggtcgaaagacatcggagagaacaacagctacccccactgcgcggtaaggacagagggcgtgagcgtgctgtggcttctacggaggtgaagcagaaactacaggaatttctgctgagtaaatccgccacaaaggatacgcctacaaatgggaagaatcattcagtgagtagacaccccaagttgtggtacactgctgctcaccatacgtctcttgatcagtcttcgcccccactgtcgggtacttcaccttcttacaagtatacactgcccggtgcccaggacgctaaagatgattttcccctcaggaagacggcctccgaacctaacttaaaggtgcgcagccggctcaagcagaaggttgcagagaggaggagcagccccctgttgaggaggaaggacggcaacgtggttacctctttcaagaagcgaatgtttgaagttaccgaatcttccgtgtccagttctagcccgggatcagggccatcttcgccaaacaatggtcccactggtagtgtcaccgagaatgaaacatccgtgctgccaccaacacctcacgcagagcaaatggtttctcagcagcgcattctgatacatgaggacagcatgaacctgctcagcctgtacacatctccgagcttaccaaacattactcttggattacctgccgtgccctcccagttaaatgcaagcaatagccttaaggagaaacagaaatgtgagacccaaactctgaggcagggcgtgccactccccggacagtatgggggaagcatcccagcctcctcatcccacccgcacgtcacactcgaaggcaagcccccaaattcgtcgcaccaagcattgcttcagcatttattattaaaagaacaaatgaggcagcaaaaacttctggttgctggcggtgtgcctctccaccctcagagccccctcgctactaaagaacgcatttcacccggaattagaggaactcacaaactgcctaggcacaggcctctgaatcggacgcaatctgcccctttgccacagtccaccctggctcaactcgtcattcagcaacaacaccaacagttcctggagaaacagaaacagtatcagcaacagatccatatgaataagctcctgtccaagtcgattgagcagttaaaacagccaggttcacaccttgaagaagcagaagaagaacttcagggagaccaagccatgcaggaggacagagctccatccagcgggaactcaacacggagtgactccagcgcatgcgtcgatgacacccttgggcaggttggcgctgtgaaagttaaggaggaaccggtggatagcgatgaagacgctcagatccaggaaatggaatccggcgagcaggctgcattcatgcagcaggtgatcggtaaggacctcgctcctggattcgtcattaaagtcatcatatag

SEQ ID NO: 226230 - DNA, 1542 bp, synthetic construct
  misc_feature 1..1542: note = Description of Artificial Sequence: Synthetic coding sequence
  source 1..1542: mol_type = other DNA
atgatgatgccagtggtggatccagtggtaagggagaagcagctccaacaggaactgctgctgattcaacagcaacagcaaatacagaaacagctcctgatcgcagagttccaaaagcagcatgaaaacttgactcgtcagcatcaggcccaactccaagagcatataaaggagttgcttgccattaagcagcaacaggagctgctcgaaaaagagcagaagctggagcagcagcgacaggagcaggaagtggagcgccatcggagagaacagcagctgccaccgctgcggggaaaggaccggggacgcgaacgtgcagtggccagcacagaagtgaagcagaaactccaggagtttcttctatctaagtcagcaacaaaggacacacctactaacggtaagaaccactcggtgtccagacaccccaagctctgggccgctcaccatacctctctggaccagagcagccctcccttgagtggtacctcacccagctacaaatacactttgccgggagcccaggacgcgaaggatgacttccctctgagaaaaacggagagcagcgtgtcaagttcatcacccggatcgggaccttcaagcccgaacaatgggcctaccggatccgtaaccgagaacgagacttcagtgcttccacctacccctcacgcagagcagatggtctcacagcagcgcattctgatccatgaagacagcatgaatctgttgagcctctacactagtccaagcttacccaacatcaccctgggcttacctgccgtgccaagtcagcttaacgcctccaattcacttaaagagaaacaaaagtgcgaaacgcaaacacttcgccaaggggtacctcttccgggacagtacggcggatcaattcctgctagttcatcgcacccccatgtcaccctagagggcaaacctcccaatagcagtcatcaggctttgctgcagcatctgctgctgaaggagcagatgcgtcagcaaaaactgctggtggccggtggcgtccccctgcatccacagtcccctctcgccaccaaagaacgcatcagccctggcattaggggaacacataagctccctcggcacaggcctctgaaccgcacgcaatctgcgcctctcccacaatctacccttgcacagcttgtaattcagcagcagcaccagcagttcctcgagaagcaaaagcagtaccagcagcagattcacatgaacaagctgctgagcaagtccattgaacaactcaaacagcccggttcccacctggaagaagctgaagaagaactgcagggagatcaggcaatgcaggaagaccgcgctccatcttcggggaacagcactaggtccgattcgtcagcatgcgtcgatgacaccttgggtcaagtgggcgcagtaaaggttaaggaagagccagtggattccgacgaggatgcacaaatacaggagatggagagcggggagcaggctgccttcatgcagcaagtcataggtaaggatctggcgccaggatttgttatcaaggtaataatctag

SEQ ID NO: 226231 - DNA, 1980 bp, synthetic construct
  misc_feature 1..1980: note = Description of Artificial Sequence: Synthetic coding sequence
  source 1..1980: mol_type = other DNA
atgcgcgtcaaccatactgtgtcaacgatgctgcctacatgtatggtccaccgacagacaatgtcatgtagcggggcaggaggcatcaccgctttcgtcgccttccgcgacgtggccgtctacttcacacaggaagaatggcgcctgttgagccctgctcagcggaccttgcatcgcgaggtcatgctagagacctataatcatttggtttcattagaaatcccatccagcaagcctaagctgattgcacagctggagcggggagaggcgccatggcgcgaggagcgcaagtgtcccctggatctatgtccagagagtaaacctgagatacaactgtcccccagctgtccactgatcttctcaagccagcaagccctctcgcaacatgtgtggttgagccatctgtcacaactgtttagttcattgtgggccggaaacccccttcacctaggcaagcattatccagaggatcagaagcagcagcaagatccattttgcttctccgggaaagctgagtggattcaggaaggtgaggacagtcgactgctgtttgggagggttagcaaaaatggaacaagcaaggccctgagtagccctcctgaagaacagcagcccgctcaatctaaagaagacaacaccgtggtggacatcgggtctagtcctgagcgtcgcgcagacctggaggagactgacaaagtgttgcacggcttagaggtctccggttttggagagattaaatacgaagaatttggaccaggattcattaaggaatccaatctcctgagtctgcaaaagactcaaaccggggaaaccccttacatgtatacagaatggggtgactcgtttggtagcatgtcagtgctcatcaagaacccacggacacatagcggcggaaaaccgtacgtgtgtcgcgagtgcggcagaggttttacatggaagtcgaacctgattactcaccaaagaactcattctggcgaaaaaccatacgtgtgtaaggactgcggacgtgggttcacttggaagagcaacttgtttacccaccaacgtacacactctggcctgaaaccttatgtatgcaaagaatgtggacagagtttcagtctgaagagcaacctaatcacacaccaaagagcacataccggagaaaagccttacgtttgtcgcgagtgcgggagggggtttcggcagcattctcacttagtgagacacaagcggacacatagcggcgaaaaaccctacatttgtagggaatgtgagcaagggttctcccagaaaagccacttgattcggcacctgaggacacataccggggaaaagccctacgtttgcactgaatgtggccgacacttctcttggaagtcaaacctgaaaacgcaccagagaactcattccggtgtgaaaccatatgtttgtttggaatgcgggcaatgctttagcctgaagtctaatttgaataagcatcagagatctcacacaggtgagaagcccttcgtctgtactgagtgcggccgagggtttacgaggaagtctacattgagtacacatcagcggacacactcaggcgagaaaccgtttgtatgcgctgagtgcgggaggggttttaatgacaaatcaaccctgatcagccaccagaggactcacagtggagaaaaaccatttatgtgcagagagtgtggacgcaggttccggcagaagcccaacctttttagacataagcgggctcacagcggagctttcgtatgtcgcgaatgtggacaggggttttgcgccaagctcacactgatcaaacatcagcgggctcacgcgggaggaaaaccccacgtttgccgcgaatgcggacaaggcttctcgagacaatcccatctgatcagacatcagcgaacccatagcggggagaaaccatacatctgtcgaaaatgcgggaggggatttagccgcaagagcaatctcattaggcatcagaggacgcacagtggttag

SEQ ID NO: 226232 - DNA, 1923 bp, synthetic construct
  misc_feature 1..1923: note = Description of Artificial Sequence: Synthetic coding sequence
  source 1..1923: mol_type = other DNA
atggctacgggactgctgcgcgcaaagaaggaggcattcgttgctttcagagacgttgccgtctactttacacaagaggaatggcgtctgctgtctccggctcagcgaacactgcaccgcgaggttatgctcgagacctacaatcacctggtcagtctcgagatccccagcagcaaaccaaagctgatcgcccagctcgagcggggagaggccccatggcgggaagagcgaaaatgtccgctcgatctctgtcccgagagcaaacccgagatccagctgagtcccagttgtccactcattttcagctcacagcaggccctttcccagcacgtctggctgtcccatctgagtcaattattttcctcgctttgggcgggaaacccgctgcacctcggaaaacactatcctgaggaccaaaagcagcagcaggaccccttctgcttctctggaaaagcagagtggatccaggaaggagaggatagtcgcctgctgttcggacgtgtttctaagaacggcacctcgaaagccctgtcatcaccccctgaagagcaacaacccgcacagtcaaaagaagacaatacggtagtggacatcggcagctctcccgaacggcgagccgatttggaggagacggacaaagtgttgcacggcctggaggtgtcaggatttggggaaatcaaatacgaggaatttggacccggtttcatcaaggaatctaatctattgagtctccagaagacacagaccggagaaacaccttacatgtacacagagtggggagactcctttggcagcatgagtgtgcttattaagaaccctaggacccacagtggcggaaaaccctatgtgtgcagagaatgtgggaggggattcacctggaagtctaacttgatcactcaccaaaggacccactcaggagagaagccctacgtgtgtaaagactgtggtagagggttcacgtggaagtccaatcttttcacgcatcagaggacccacagcggcctgaaaccctacgtttgcaaagaatgtggccagtccttctctctcaagagtaacctcatcacacaccaacgggctcatactggcgaaaaaccttacgtgtgccgtgaatgcggacgaggttttcgtcagcactcacatcttgttaggcacaagaggactcatagcggagagaagccctacatatgtcgcgaatgcgaacagggattttctcagaagagccatctgattcgacacctgaggactcacaccggagagaagccatatgtctgcactgagtgtggacggcacttttcatggaagagcaatcttaagacacaccagcgcactcactctggagtaaaaccctacgtatgcctcgagtgcggccaatgcttctcgctgaagtcaaacttgaacaagcatcagcggagccatactggcgagaaaccttttgtgtgcacggaatgcggaagaggattcacacgcaaaagcaccctctccacacaccagcgtacacacagcggtgagaagccattcgtctgtgcggagtgtggacggggatttaatgataaatcaactctgatcagccaccaacgcactcactccggtgagaaaccctttatgtgtcgagagtgcggacggaggttccggcagaaacccaacctattccgccacaagcgcgctcatagtggcgcattcgtgtgtagggagtgcggacagggattctgcgccaagttaaccctgatcaaacatcagagggctcatgctggtggcaagcctcacgtctgccgagaatgtggccagggtttctcccgacagtcacatcttatcagacaccaacgcacccactcaggggagaagccttatatttgccgaaaatgcggtcgaggattctccaggaaatctaacttgattaggcatcagcgaacccattccggatag

SEQ ID NO: 226233 - DNA, 1317 bp, synthetic construct
  misc_feature 1..1317: note = Description of Artificial Sequence: Synthetic coding sequence
  source 1..1317: mol_type = other DNA
atgctggagacctacaaccacttggtttcattggagatccccagtagtaagccaaagctgatcgcccaacttgaacggggtgaggctccctggagagaggagcgtaagtgccctctggatctctgtcccgaatccaagcccgagattcagctctccccgagctgtcctctgatattcagctcccagcaggccctaagccagcacgtgtggctttcccacctgagccagctcttttcgtctctgtgggcaggcaaccctctgcaccttggtaaacactaccctgaggaccaaaaacagcaacaggatcccttctgttttagcggcaaggccgagtggattcaggaaggcgaagattctcggctgctatttgggagagtctctaaaaacggcactagcaaggccctgagtagcccgccagaggaacaacaacccgctcagtctaaggaagataacactgtggtcgatattgggtcttctcccgagaggagggccgacctagaggaaactgacaaggtgcttcacggcctggaagtttcggggtttggggaaatcaagtacgaggagtttggccctgggttcattaaggaaagcaacttgttgtctctgcaaaagtcccaccttatccgccatctgcgcacacacaccggagaaaaaccatatgtttgcacagagtgcgggcgtcatttttcctggaagtccaacctgaagacccatcagcggacccactctggggtaaagccgtacgtctgcttggagtgcgggcagtgcttctctctcaagtccaacttaaataaacaccagaggtcccacacaggagaaaagccttttgtgtgtacagagtgcggcaggggcttcaccagaaagtcaaccctttcaacgcatcagcgcactcacagcggtgaaaaacccttcgtctgtgcggaatgcgggagaggctttaatgacaaatcaaccctgatcagtcatcagcgtacacattctggagagaagcccttcatgtgtagggagtgcggcaggaggtttcgccaaaagcctaacttattccgtcacaaacgagcacactccggcgcattcgtgtgtagagagtgcgggcaggggttttgtgccaagcttactctgattaagcaccaaagagcccatgccggagggaagccccacgtctgccgtgagtgcgggcaagggtttagtaggcagtcacaccttattaggcaccagaggacccacagcggcgagaaaccctatatttgcagaaaatgcgggcgtggattttctagaaagtcaaacctgatccgccaccagcgaacccattctgggtag

SEQ ID NO: 226234 - DNA, 1797 bp, synthetic construct
  misc_feature 1..1797: note = Description of Artificial Sequence: Synthetic coding sequence
  source 1..1797: mol_type = other DNA
atgcttgagacttataatcacttagtgtctctagagatcccatcttccaaaccaaagcttatcgcccagttggagaggggggaggctccctggcgcgaagagcgcaaatgcccattggatctatgccccgagtcaaaacctgagatccaattgtcacctagctgtcccctgatcttcagctcccagcaggctctgtcccaacatgtctggttgtcccacctttcccaactcttttcctctctctgggcaggcaaccccctgcacctcggcaaacactatcctgaggatcagaagcagcagcaggaccccttttgttttagcgggaaagccgagtggattcaagaaggcgaggactcccgtttgctctttgggcgtgtttctaagaacggcacatccaaggccctgtctagcccccctgaagagcaacagcctgcccagtcaaaagaggataatacggtggtagacatcggatcgtctccggagagacgcgcagatctggaagagaccgataaggtgttgcacgggttagaggtcagcggattcggtgaaattaagtacgaggagttcgggcctggttttattaaagagtcaaatctcctctctctacaaaaaacccagactggagaaacaccttatatgtacacagagtggggggactccttcgggtccatgtccgtacttatcaagaacccgagaacccactctggaggaaaaccttacgtgtgtagagaatgcggtagaggattcacttggaagagcaatctgattacccatcaacggactcattccggcgaaaagccctacgtatgtaaggactgcggtcgtggatttacatggaaatccaatctgtttacgcatcagcgcacccactccggcttgaagccctacgtgtgcaaagaatgcggacagagcttttccctgaaaagtaacctgataacacatcagcgtgcccacactggggaaaagccatacgtatgtagagagtgtggcagaggcttccggcaacactcccacctggtgcggcacaaacgcacccatagtggagagaagccatacatctgccgcgagtgcgagcaaggattctcccaaaaaagtcaccttattaggcacttgagaacccatacaggtgagaaaccctatgtttgtaccgagtgtgggcgtcatttctcatggaagtccaatctgaaaacacaccagaggacgcatagcggagttaaaccttacgtgtgcctcgaatgcggccagtgcttctcactgaagtctaatttgaataaacatcagcggtcacacacgggtgagaagccgttcgtttgcacagagtgcgggagaggttttactcgtaagtccactctcagcacgcaccaacgcactcactccggggagaaaccgtttgtatgcgcggaatgcgggcgtggctttaacgacaagtctactctgatctctcaccaacggacccacagcggcgagaagcccttcatgtgtcgcgagtgtggcaggcgcttccgacagaagccaaatctgttccgacataagagggcccactctggtgccttcgtatgcagggaatgtggccaaggattttgcgcgaaactgaccctaataaagcatcagagagcccatgcaggcggtaaacctcacgtgtgccgagagtgtggccagggcttctccaggcagagtcacctcatccgacatcagcgcacgcactcaggggagaagccatacatctgccgcaagtgtgggcgagggtttagtcgcaagagcaatctcattagacatcagaggactcatagcggctag

SEQ ID NO: 226235 - DNA, 2190 bp, synthetic construct
  misc_feature 1..2190: note = Description of Artificial Sequence: Synthetic coding sequence
  source 1..2190: mol_type = other DNA
agctggctgggtcctgggaaagcctccttgctgcgctcattcccccatttgtgcacattgctgccagatttccgtctgcaggacccgcaacgagccccagcattccacctgtccagtgaaactcttcctttctctagaaaaagcactcaggaaacgagaaagatggctactggactgcttagggccaagaaagaggcatttgtggcattccgtgatgttgctgtgtactttacacaagaggaatggagactactctccccggctcagagaacactacaccgagaggtgatgcttgagacatataaccatctcgtgtcccttgagatcccgagtagcaaaccaaagctaatcgctcagctggaaagaggcgaggctccctggcgcgaggagcggaaatgtcctttagacctctgccctgccgagagcaagccagagatccagttatctccgtcttgtcccttgatcttctccagccagcaggccctgagccaacacgtatggctgagccacctctcacagctgtttagttccttatgggccggtaatcctctccatctgggaaagcattatccagaggatcagaagcagcagcaggacccattctgcttctctggaaaagcagagtggatccaggaaggggaagattctaggctcctgttcgggagggtcagtaagaatggaacaagtaaggcgttgtccagcccaccagaagaacagcagcccgcacagtcaaaggaggacaatactgtcgttgatatcggtagttctcccgaaaggagagcagacctggaggaaacagacaaggtgcttcacgggcttgaggtctcaggctttggggagatcaagtacgaagagtttgggccaggttttatcaaagagagtaatctgttatccctgcagaagactcagactggagagacaccatacatgtacacggagtggggagatagcttcgggagcatgtccgttttaattaagaatcccagaacccactctgggggtaagccttatgtttgtcgggagtgcggcagagggtttacctggaagagcaacctgataacccaccagagaactcacagcggcgagaaaccctacgtgtgcaaggattgcggacgcggttttacgtggaagtcaaacctgttcactcatcagagaacccatagtggtcttaaaccctatgtgtgcaaggagtgcggtcaatctttctccttgaaaagcaatctgatcacacatcaacgagcccatacaggtgagaaaccatacgtgtgtagggagtgtggaaggggcttccgccagcattctcatttagtgcggcataaacgcactcattcaggggaaaagccgtatatctgccgcgagtgtgaacaaggtttcagccagaagagccacttgatccgacacttgagaacccacaccggagagaagccatacgtgtgtacagaatgtggtcggcacttttcctggaagtccaaccttaaaacccatcagcgtacgcatagcggtgtgaaaccatatgtctgcttagaatgcggccaatgtttctccctcaagtccaacctgaataagcaccagaggtcacataccggcgaaaagccgttcgtctgcaccgagtgcgggcgtgggttcactcggaaaagcaccctgtcaactcaccagagaacccattctggagaaaagccattcgtgtgcgctgagtgtggtcggggtttcaatgataaaagcacgcttattagccaccagcgaacacactccggcgagaagcccttcatgtgtcgagaatgcggcagaaggttcagacagaaaccgaatctgtttcgtcataaacgggcacacagcggggcttttgtttgtagggagtgcggccagggattttgcgccaagctcactttgataaaacatcagcgggctcatggagggtcattgatgtgcgcaggctcagtaggtaaggccctggccggatcccatacatccctggacactcgcggtcatattcaggaacgttccctgatctttgctgaatcagtggatggggctcttgtgggatcaccaacattgtccgatataagaggccacacccaggatcgcaacttcatgtgtattggtaatgtggtgcagcctttggctcgatcccatacctcttccgatacccggggacatacccagtgttgcggatttttctctcactgctag

SEQ ID NO: 226236 - DNA, 1161 bp, synthetic construct
  misc_feature 1..1161: note = Description of Artificial Sequence: Synthetic coding sequence
  source 1..1161: mol_type = other DNA
atgtataccgagtggggcgactcctttggtagtatgtcagtcctcattaagaatccaagaacccactctggcggtaagccgtatgtttgccgagaatgtgggagagggttcacctggaagtcaaacctgattacccaccagcggacacactccggcgagaaaccttacgtctgtaaggattgcggccgtggttttacatggaagagcaacttgttcacccatcagcggacccattccggacttaaaccttacgtgtgcaaggaatgcggccagtcattttctcttaagagtaatttgatcacccaccagcgcgcacacactggagagaaaccttacgtgtgtcgagagtgcgggagaggatttagacagcacagccatctggtgcggcacaaaagaacccactctggggaaaagccgtatatatgccgagaatgtgaacaaggattcagtcaaaaatcacacctgatcaggcatctccgaacccataccggggagaaaccctacgtctgtacagaatgcggccgtcacttctcttggaaatcaaacttgaaaacccatcagaggactcattctggagtcaagccctacgtttgcttggagtgtggacagtgcttctctcttaaatctaatctgaacaaacaccagagatctcacaccggggaaaagcctttcgtgtgtactgagtgcggaaggggctttacgaggaagtccaccctgtctactcaccagagaacacacagcggtgagaagccttttgtgtgcgcagaatgcggacggggattcaacgacaagtcaaccctgatcagccaccaacgtacacattccggggagaaaccttttatgtgtcgcgaatgtggccgtcgcttccgacagaagccaaatttatttcggcacaagagggcccacagcggtgcctttgtctgccgagagtgcgggcagggattctgtgccaagctgacactgatcaagcatcaacgagcccacgcgggaggtaagccacatgtgtgccgggagtgcggccaaggcttttcgagacagtcccatctgatccgccaccagcgaactcattctggagagaaaccctacatttgccggaaatgtggtagagggttctcccggaagagtaatttaattcgccaccagcgtacccactccggatag

SEQ ID NO: 226237 - DNA, 612 bp, synthetic construct
  misc_feature 1..612: note = Description of Artificial Sequence: Synthetic coding sequence
  source 1..612: mol_type = other DNA
atgggtggaagtctgcgagtggcagtcttgggcgcacctggcgttggcaaaaccgctataattcggcaatttctgtttggggactaccctgagaggcacaggccgactgacgggcctagactctatcgaccagccgtgctgttagacggcgcagtttacgaccttagcatcagggacggtgatgtggccggaccaggctcctctcctggcggtccagaggagtggccagatgccaaggattggtccctgcaagatacagacgcctttgttctggtatacgacatctgctccccagactctttcgattacgtcaaggctcttcggcagcgcattgccgagacccgacccgctggtgcacccgaggctcccatcctggtagtgggaaacaaacgggaccgtcagcgtttgcgttttggtccgaggcgggctctggcagcccttgtgaggcgcggatggagatgtggctatttggaatgctcagctaaatacaactggcatgtgctgcgactctttcgtgagctcttacggtgtgcactggtccgggctcggcctgcacatcccgctctccgactgcaaggagcacttcatcccgctaggtgttccctgatgtag

SEQ ID NO: 226238 - DNA, 1479 bp, synthetic construct
  misc_feature 1..1479: note = Description of Artificial Sequence: Synthetic coding sequence
  source 1..1479: mol_type = other DNA
atggatttgctcaaggctattacgtcacccttagcggcaggtagcaaaccttcgaagaagactggcgaaaagtcaagtggcagcagcagtcattccgaaagcaagaaggagcatcatcgcaagaaggtttctggcagttccggcgagctccctcttgaagacggcggatctcataaatccaagaaaatgaagcctctctacgtgaacacagagacacttactcttagggaacccgacgggcttaagatgaagcttatcctctctccgaaggagaagggatcaagctctgtggatgaggagtcctttcagtaccccagtcagcaagcaaccgtcaaaaaatcaagcaagaagtctgctagagatgagcagggcgctctgctgctaggccacgagctccaatccttcctgaagacggctcggaagaaacacaagagttccagtgatgcccatagctcgccagggccagaaggctgtggaagcgacgcttcccagttcgcagagagccattccgctaatctggatctgtcaggcctagagcccattctcgttgaatcggacagtagctccggtggcgaactggaggctggtgagttggtcattgacgattcctatcgtgaaatcaaaaagaaaaaaaaatctaaaaagagcaagaaaaaaaaagacaaagaaaagcataaggagaagagacactccaaaagcaagagaagcttgggcctgagcgcagtgccggtgggagaggtgacagtgacaagcggaccccctcctagcattccctacgccggagccgctgccccaccactccccctgcccggtctccacactgacgggcactctgaaaagaagaagaagaaggaggaaaaggataaggagagagagaggggggagaaacctaaaaaaaaaaacatgtcagcctaccaggtgttttgtaaagagtaccgcgtgacaattgtggcggatcaccccggaatcgacttcggcgaactttcaaaaaagcttgcagaagtgtggaagcagctgcccgaaaaagataagctcatttggaagcaaaaagcacagtacctgcagcacaagcagaataaggctgaagctacgacggttaagcgaaaagcctcatccagtgaggggagcatgaaagtcaaggcgagcagcgtcggcgtgctgagcccacagaagaaatcacctcccaccaccatgttactgcctgcctcacccgctaaagcacctgagaccgaacctattgatgttgctgctcatttacaattgcttggagagagccttagcctaatcggtcatcgcctccaggagacagaggggatggtcgccgtgtcaggctccctgagcgtattgctcgattccataatttgtgccctgggaccccttgcttgcctgactacccagcttcccgaactgaacggctgtccaaaacaggttttaagcaatacccttgataacatagcgtacattatgcccggtttgtag

SEQ ID NO: 226239 - DNA, 1896 bp, synthetic construct
  misc_feature 1..1896: note = Description of Artificial Sequence: Synthetic coding sequence
  source 1..1896: mol_type = other DNA
atggtgagcaagctgagtcagctccaaacagagctgctggctgctcttttggaaagcgggctttctaaagaagccttgattcaggcactcggtgagcctggcccttatctgctggccggtgaagggcctctagataaaggcgagagctgcggcggaggtaggggcgaacttgcagagctcccgaacggtctgggcgaaacaagaggctcagaggatgagaccgatgacgatggagaggactttacacctcctatcctcaaagaactggagaacctgagcccagaagaggcagctcaccagaaagcagtggtggagactcttctacaggaggatccgtggagggtcgctaagatggtgaagagctacctgcagcagcataatataccacagagggaagttgttgataccaccgggctgaaccagagccatcttagtcagcacttgaataaaggcacacccatgaagacacagaaacgggctgccttgtacacatggtatgtgcgcaaacagcgggaggtggcccaacaatttactcatgctggacagggcggtttgattgaggagccaacaggcgatgagctgcctactaagaagggtcggaggaaccggtttaagtggggtcccgcaagccagcagatcctgttccaggcgtacgaacggcagaaaaatccctctaaggaggagcgggaaacactcgtagaggagtgtaaccgggctgagtgcatccaaaggggcgtgtctccttctcaggcgcagggacttggaagcaacctggtgacagaggtacgagtttataattggtttgccaataggcgaaaagaggaagcattcaggcataagttggccatggatacctactctggcccacctcctgggcctgggccaggcccagccctgcctgcccacagctcccccggattgccaccacccgcactgagtcctagcaaagttcatggagtcaggtatggccagcctgcaacatccgagaccgcggaggttccttctagtagcgggggacctttagtaacagtaagcacccccttacaccaagtctctccaactgggctagagcccagtcactccctactgagcactgaggccaagcttgtcagcgccgcaggcggtcctctgccgccagtgtcaaccctaaccgctctccattccttagagcagaccagcccaggactcaatcagcagccgcagaacctgatcatggctagccttcccggtgtgatgacaatagggcctggggaacccgcatccctgggcccaacgttcacgaatacgggcgcttccactcttgtgattggacttgcgtccacgcaggctcagagcgtcccagtcattaactctatgggctcatcgctcactaccctgcaaccggtccaattctcccagcccctgcacccctcctaccaacagcctctgatgcctcctgtacagtcccacgtgacacaaagtcccttcatggccacaatggcccagctccagagcccccacgcactgtatagccataagccagaggtggctcagtacacccacacaggtctgctcccgcagaccatgctaatcactgatactaccaatctgagcgcactggcctccctgacccccaccaagcaagtgttcacctcagacacggaagcgagcagtgagtccggcctgcatacacccgctagtcaggcgactacgcttcacgtcccctctcaagaccctgctagcatccagcatttgcaaccagcacaccgcctgtccgcaagccctaccgtaagtagcagctccctcgtactctatcaatcttccgatagctccaatggtcaatcccacctcttgccatccaatcattccgttatcgaaacctttatatctactcagatggcttcatcaagtcaatag

SEQ ID NO: 226240 - DNA, 1719 bp, synthetic construct
  misc_feature 1..1719: note = Description of Artificial Sequence: Synthetic coding sequence
  source 1..1719: mol_type = other DNA
atggtttctaagctgtcgcagctgcagaccgagctgcttgccgctcttctcgagagtgggttatccaaggaggcactgatccaggcactgggcgaaccaggaccatatctcctcgctggagaagggcctcttgataagggagagtcatgcggaggagggcgaggggaactagctgaactgcccaatggcctgggcgagacccgaggctcagaggacgaaacggatgatgatggagaggactttactccccctatcctaaaggagcttgagaacctatcccccgaggaggctgctcaccagaaagcagtggtggaaaccctccttcaggaggacccctggagagttgccaaaatggtcaagagctacctacagcagcataacataccgcagcgagaggtggtggatacaaccggactgaatcagagtcatctatctcagcacttgaacaagggcaccccaatgaaaacgcaaaagagagcagccctttacacatggtacgtacggaagcagagggaagttgctcagcaatttacgcatgcgggacaggggggacttattgaggagcccaccggagacgagctgcctactaagaagggccgaagaaaccgtttcaaatgggggccagcatctcagcagattctgttccaagcctacgaaagacagaagaatccgtctaaggaggaacgagaaactctggtggaggagtgtaacagggccgaatgcatccagcggggtgtctctccttcacaggcccagggtctcggctccaatcttgtgaccgaagtgcgcgtctataactggttcgctaatcgcagaaaagaggaagcctttcgccataaactggccatggacacgtattccgggcctccccctggacccggtcctggtcccgctcttcccgctcatagcagcccaggccttcccccacctgcactgtcacccagtaaggtgcacggggtgcgttatgggcagccggcaacatccgaaaccgccgaagtgcccagcagtagtggcggacctctggtgaccgtcagcactcccttacaccaggtgagccctaccgggctagaaccaagccactcactgctttcaactgaggccaaattggtttctgcggctggcggtcccctgcctcccgtctctacccttaccgccctgcattcactggagcaaacaagcccagggctgaaccagcagcctcagaatttaatcatggcgagccttcccggtgtgatgactatcgggccaggcgagcctgcaagcctgggccctacctttactaatactggtgcttcgactctcgtaatcggcctcgcctccacccaagcccagtccgtgccagtgatcaacagcatggggtcttcactcactacccttcagcccgtccagttctcacaaccacttcatccctcgtatcagcagcccctcatgcccccagtgcaatcccacgtgacacagagcccttttatggcaaccatggcacagcttcaatctccacacggagaacgtcctgtccctcacaccgcgggtgacgacgatagaggctggctgtcgatggatgctggagaacgtggagcttggcaggctctgcagagcgcttgtgtcagtgggacttcagtatttccttactctagtaacggtcagagccacctgctcccaagtaaccattcggtgatcgaaacttttattagtacgcagatggcatcaagcagtcagtag

SEQ ID NO: 226241 - DNA, 1566 bp, synthetic construct
  misc_feature 1..1566: note = Description of Artificial Sequence: Synthetic coding sequence
  source 1..1566: mol_type = other DNA
atggtgtctaagctgtctcagctccagaccgagctgctcgccgctctccttgagtcaggcttgagcaaggaggcattgattcaggctttgggcgagccgggaccctacctcctggcaggtgaaggcccactcgacaaaggagagagttgtggcggtgggcgaggggagctcgcggagctgcctaacggcctaggagagacaaggggtagtgaggatgagacagacgacgatggcgaggactttactccacccattctgaaagagctcgagaatctgtcacccgaggaggcggcacaccaaaaggctgtggtagagacgctgctacaagaagacccatggcgggtggccaaaatggtgaagtcatatctccagcagcataacattccacagcgggaggttgtggatacgaccggattgaatcaatcacatctcagtcagcatctgaataagggaactcctatgaaaacccagaagcgtgccgctctctatacttggtacgtgcgtaaacagcgggaggtggcccaacaatttacccacgcgggacagggagggctgatcgaggagcctaccggcgatgaactgccaactaagaagggcaggcgtaaccggttcaagtggggccctgcatcccagcagatattgttccaggcatatgagaggcagaagaacccctctaaggaggaaagggagactctggtagaagagtgtaatcgggcagaatgtattcagagaggagtttctccttctcaggcacaaggcttaggctcaaacttggtcacagaggtcagagtgtacaattggtttgcaaataggaggaaagaggaggcatttcggcataagctcgcgatggatacgtattcagggccaccaccaggacccggaccaggaccagcgctgcccgctcacagttctcccggattgcctcctccggcactgtcacccagcaaagtgcatggcgtgcggtacggccagcccgcaaccagcgagaccgctgaagtgccttccagtagcggcggaccactggtaacggtgtccacacccctgcaccaggtgtcacctacaggccttgaacccagccatagtctcctgtcaacagaggccaaactggtaagtgccgcagggggacctctgccacctgtttctaccctcacggcgctccacagccttgagcagacatcgcctggactcaaccaacaaccacaaaacttgatcatggcttccctgcccggagttatgactattgggccaggtgaaccagccagtcttggcccaacgtttactaatacaggggcttccacactcgttattgggaagctcgtcggtatggggggacatctgggcggaagactcatgggccaacctcagaacccgggagcaggaagggctacaggcacccattctttcatccaccaacatgtgttcattcaatgcctgctctggacaagtcattgtgccacaagtgtgatccccggagactcaagtaatggccagagtcacctgttaccttcgaatcatagcgtcatcgagactttcatctccacgcagatggcctctagctcccagtag

SEQ ID NO: 226242 - DNA, 1572 bp, synthetic construct
  misc_feature 1..1572: note = Description of Artificial Sequence: Synthetic coding sequence
  source 1..1572: mol_type = other DNA
atggttagcaagctgtcacaactgcagactgaactgctagccgcacttctggagagcggtctctcgaaagaggcactgatccaagccctcggcgaacccggaccttatcttctggctggggaaggccctttagacaaaggcgaatcgtgtgggggagggagaggggagctcgcagaactccctaatggcctgggggagacgcgtggatccgaagacgaaaccgacgatgatggggaggatttcacgcctcccatcctgaaggaactcgagaacctgtccccggaagaagccgctcaccagaaagctgtggtcgagacgctgttgcaggaggacccctggcgagtcgcaaagatggttaaaagctacttacagcagcacaatatcccacaacgagaagtggtagacaccaccgggttgaaccagtctcacttatcccagcatcttaacaagggaactccaatgaaaactcagaaacgggcagctctgtatacgtggtacgttaggaaacagcgtgaggtggcccagcagttcacccacgccggtcagggagggctcattgaagaaccaacaggggatgaactgcctacaaagaaaggtcgcagaaacaggtttaagtggggccctgcctcacagcagatcttgttccaggcctatgaaagacagaaaaacccttcgaaagaggagcgcgaaaccctggtcgaggaatgcaatagagcggaatgtattcaaagaggcgtatcaccatctcaggcccagggactcgggtccaacctcgtcacagaggtctctgcagccggtgggccactcccacccgtctcgacgctgactgctctgcactctctggaacagacttctcccggactaaatcagcagccacagaatctgataatggcatcgcttccaggggtgatgaccatcggccctggtgagcctgctagccttggcccaactttcacaaatacaggggcatctacgctggtcattggcctggcttctactcaagctcagagcgttcccgtgattaacagtatggggagcagtcttactaccctgcagcctgtgcagttctcccaacccctgcatcccagttaccagcagccattgatgccacccgtgcagtcccacgttactcagtcccctttcatggcgacaatggctcagctgcaaagccctcacgctctgtactcccataagccagaggtcgcccaatatacccataccggcctgctcccccagactatgctcatcaccgacactactaatctgtccgctttggccagccttacacctaccaagcaagtttttaccagcgacaccgaggcttccagcgaatccggactgcacaccccagcatctcaagctacaaccctccacgtgccgtcccaagaccccgcttcaatccagcacctgcagccagcacatcgattgtcagcaagtcctacggtttcgtcttcttcactagtgttataccagagctctgactcaagcaatgggcagtctcatctgctaccctccaaccatagtgtgatagagacctttatctctacccaaatggcctctagctcccaatag

SEQ ID NO: 226243 - DNA, 1812 bp, synthetic construct
  misc_feature 1..1812: note = Description of Artificial Sequence: Synthetic coding sequence
  source 1..1812: mol_type = other DNA
atggtaagcaaattgtcacaactgcagacggagttgctggcagctcttctggagagcggactgtcaaaagaggcacttatccaggcactgggggagccaggcccttatctcctggcaggcgagggaccattagataaaggggaaagctgtggcggagggcgaggcgagctggctgagctgccaaacgggcttggtgaaaccagggggtccgaggacgaaactgacgacgacggcgaagattttacacccccaattttgaaggagctggagaacctgtccccagaggaggctgcacaccagaaggctgtggtggagactctactgcaggaggatccgtggcgggtcgcaaagatggttaaatcctacctgcagcagcataacatccctcagcgggaggtggtcgacaccacagggctgaatcaatcgcacctctcacagcacttaaataagggtacccccatgaaaactcagaagagagctgcgttgtacacatggtacgtaagaaagcaacgggaagtggcccagcagtttacacatgcagggcaaggtgggctgatcgaagagccaaccggagatgagctgccgacgaagaaaggcaggcgcaaccgctttaaatgggggcctgcttctcagcagatcttgtttcaggcctatgagaggcagaaaaatccttcaaaggaggaacgcgagaccctcgtggaagaatgtaatcgggctgagtgtattcagagaggagtgtccccgtctcaggcccaaggcctgggatcaaacctggtcaccgaagtccgagtgtacaattggtttgcaaatcgcaggaaggaagaagcctttaggcacaaactcgccatggacacttatagcggccctcctccagggccaggccctgggcctgcactgcccgcacatagctctcctggtttacccccacctgctttaagcccatctaaggttcacggcgtcagatatggtcagccggcaacctccgaaacagcggaagtgccctcttcatcgggcggacccctggtcactgtttctactcccctgcaccaagtgtcccctaccggcctggagcccagtcacagcttactgtctacagaggcaaaattggtgtctgccgctggcggaccacttccgccagtcagtacactgacagcactgcactctcttgagcaaacctcaccaggcctcaatcagcagccacaaaacttgattatggcctctcttccgggagtgatgaccatcggtcctggcgagcctgcttcattagggcctactttcacgaatacgggcgcatctaccttagtcatagggctcgctagtacccaggcacagtcagtaccagtcattaatagcatgggatcctccttaacgacactgcagccagtgcagttttctcagccattgcacccctcctaccaacaacctcttatgccaccggtgcagtctcatgtcacacagtctcctttcatggcgacgatggcccaacttcagagtccgcacgccctgtattctcacaagccggaagttgcacagtacacacatacagggctgcttccacagactatgttgataaccgataccactaatttgagcgccctggcttctctgactccaacaaagcaggtctttacaagcgacactgaggctagctccgagtctggactgcacacacctgccagccaggcaaccactctccacgtcccttcccaggaccctgcctccattcagcacctccagccagcccacaggttgtctgcatccccgactgtttcatccagttcactggtgttataccaatccctcggattatag

SEQ ID NO: 226244 - DNA, 837 bp, synthetic construct
  misc_feature 1..837: note = Description of Artificial Sequence: Synthetic coding sequence
  source 1..837: mol_type = other DNA
atggtctccaagctcagccagctgcagacagagttgctggcagccctcctcgagtctgggctgagcaaagaagccctcatacaggctttgggagaaccgggtccctatctgttggctggagaaggcccactagacaagggtgagagctgcggtggcggacggggtgagttggccgagctacccaacgggttgggcgagacaaggggctctgaagatgagactgatgacgatggtgaagacttcacacccccaattcttaaggagctggagaatctcagcccagaggaagccgctcaccagaaggcagttgtggaaaccctactgcaagaggacccctggcgggtggcaaaaatggtcaagtcttaccttcaacaacataacatcccccagcgggaagtcgtggatacaacaggcttgaatcaatctcatctgtcacaacacctgaacaaggggacacctatgaagacccaaaagagagctgctctttacacttggtatgtcagaaagcaacgcgaggttgcacagcgacgcaacgccagccgggaaggatgtcctcaccacaggcaccgcggatgggccccaacaagcagcagaaggtgcgtctctactactggactgcctactggggctaaaaagaaacctagcggtaccagctggccctggacacgtacagccggtccccctcaagggcaggctagagatctgcgttgccctctgactgcaccgttggcttgtctgcatctccccagtcctccggtgagatctaccgtttgtgccatggactctctccgccctgtaaggcttcagaagtacccccaggcagccgctgtcccttag

SEQ ID NO: 226245 - DNA, 360 bp, synthetic construct
  misc_feature 1..360: note = Description of Artificial Sequence: Synthetic coding sequence
  source 1..360: mol_type = other DNA
atggttagtaagctgtcacaacttcagacagagcttctggccgctctgctcgaaagtggactgagcaaggaagccctgatccaggctctcggagaaccagggccttacctccttgccggtgagggcccattggataaaggtgagagttgcggcggtggaagaggagaacttgccgagctgcctaatggcctcggagaaacgagaggtagcgaagacgagactgacgacgacggggaggactttacaccgcctattctgaaggaactggagaacctgtcacccgaagaggccgctcaccagaaggccgttgtggagactttactgcaggtacatccttgccgcgctggccgagccgactag

SEQ ID NO: 226246 - DNA, 1989 bp, synthetic construct
  misc_feature 1..1989: note = Description of Artificial Sequence: Synthetic coding sequence
  source 1..1989: mol_type = other DNA
atggtatctaagctctcccagctgcagactgagctgttagccgctttactcgagagcgggctgagcaaagaggccctgattcaggccctgggtgaaccaggcccttaccttctggcaggggaaggaccactggacaaaggcgaatcttgtggcggtgggagaggcgaactagctgagctgcccaacgggctgggagaaacccgcggaagcgaggatgaaaccgatgatgacggtgaagattttactcctcccatactcaaggagctcgagaacctgagccccgaggaagctgctcatcagaaagcagtcgtggaaacactcctgcaggaagacccttggcgagtcgccaaaatggtgaaaagctatctacagcagcacaacatcccacagagggaggtagtggacacaactgggctcaaccaatcccacttatcccagcacctgaacaagggcactccaatgaaaacacagaaaagagccgctctctatacttggtacgtcagaaagcaacgggaggtggcacagcagttcacccatgctggtcaaggcggtctcatcgaagaaccaactggggatgaactccctaccaagaagggcaggcgcaacagattcaagtggggaccagcctctcagcagattctgttccaggcttacgagaggcaaaagaatccctctaaagaagagcgggaaacccttgtggaagagtgtaatagagccgagtgtatccagagaggagtgagcccgagccaggcgcaaggacttggcagcaacctcgtcaccgaagtgcgagtctacaattggtttgcaaacagacgcaaggaagaggcttttcgccacaaactcgctatggacacatacagcggccctccgccaggcccaggacccggtcccgcactgcctgcgcacagctcccccggattgccccctcctgccctgtctccatctaaggtccatggcgtgaggtacggccagcccgctaccagcgaaaccgccgaggtgcccagctcttctggagggcctcttgtaaccgtgtcaactccccttcaccaggtgtcccctactggcttagaaccatcccactcactgctgtcgacagaggctaaactggtgtctgcagccggagggccactccccccagttagtaccttaacggccttgcattctctggagcagacttcacccggtctcaaccagcagccacagaatctcatcatggcctctctgccgggagtcatgacaatcggtcctggcgagccagccagcctgggacccacttttactaataccggggcttctactttagtgatcgggctggcttccacacaggctcagagtgttccagtgatcaacagcatggggagcagcttaaccacactccagccagtgcagttcagccagccattacatccgtcatatcagcagccccttatgccacctgtgcagagccatgtgacgcagagcccttttatggccacaatggcccaactgcaatcaccacacgccttgtactcccataagcccgaagtggcacagtacacccacaccggccttctaccccagaccatgctgatcacagatacaactaacctcagtgctctggcttctctaacacccacaaagcaggttaggagcaggcccgctggacctcctctagcttgtgatcgcgcaccacatcctcatatccccagggcacaggaggcagcattacttccgcaggtgttcaccagcgacacagaggccagttcagagtctgggcttcacacacccgcaagtcaggcaacaacgttgcatgttccttcccaggaccctgctagcatacagcacctgcagccagctcatagactgtctgcctccccaaccgtgtcttccagctcgctggtcctgtatcaaagctccgatagcagtaatggccaatcacacttactgccatccaaccactcagtgatcgagacattcatctcgacacagatggcctcctctagccagtag

SEQ ID NO: 226247 - DNA, 744 bp, synthetic construct
  misc_feature 1..744: note = Description of Artificial Sequence: Synthetic coding sequence
  source 1..744: mol_type = other DNA
atggtaagtaagctgagtcaacttcagaccgaattgcttgctgccttgctggagtctggcctaagtaaagaggcgctgatccaggcactcggggaaccaggcccttatttgcttgccggagagggacctttagacaagggagagagctgtggtggagggaggggcgagctggccgagcttcccaacggcctcggcgagactcgagggagtgaagacgagaccgacgacgacggcgaggatttcaccccacccattctgaaggagctcgagaacctgtctcccgaggaagctgcccaccagaaggcggtggttgagaccctccttcaagaggacccctggcgggtggcgaagatggttaagtcttatctgcaacagcataatataccccagcgtgaagtcgtggacaccactggcctgaatcagtcccacttaagccagcatctgaacaagggtactccaatgaaaacccaaaaacgggctgccctgtatacttggtatgtgcgaaaacagagggaggtggctcagcagtttacccacgctggccagggtggactcatcgaagaaccgacaggcgatgaactgcccactaagaaagggcgtcgcaatcggttcaagtggggacctgcctctcagcagatactgttccaagcctacgagcgacagaaaaatccctcgaaggaagagcgtgagaccttagtcgaagaatgcaataggtgcgcactctggacagcttgcgaccagtag

SEQ ID NO: 226248 - DNA, 1359 bp, synthetic construct
  misc_feature 1..1359: note = Description of Artificial Sequence: Synthetic coding sequence
  source 1..1359: mol_type = other DNA
atggtgtcgaagctctctcaacttcagactgagctgctcgccgctttgctcgagagcggcctctcaaaagaggcactgatccaggccctgggtgaacccggaccctatcttctagcaggcgagggaccactggataagggggagtcatgtggagggggacgcggtgaacttgccgagctacctaacggtctgggtgaaacccgcggtagtgaagatgagaccgatgacgacggcgaggatttcactcctcccattttaaaggaacttgaaaacctctcccctgaggaggcagcccaccagaaagccgtcgtggagacgcttctgcaggaggatccctggcgcgtggctaagatggtgaaatcatacctgcagcagcacaatattccccagcgggaagttgtggacaccaccggactgaaccaatcacatctcagtcaacatcttaataagggcacccccatgaagacccagaaacgtgccgctctctatacatggtacgttagaaagcagcgagaggtcgctcagcagttcacccatgcaggacagggtggactgatcgaggagcctaccggcgacgaactccctaccaagaaggggaggagaaatcggttcaagtgggggccagcatcccagcagaccagcccgggtctcaaccagcagccccagaacctgatcatggccagcctacctggcgtgatgactatcgggccaggggagcccgcaagcctaggaccaacctttaccaacactggcgctagcactctggtgattggtctggcctccacccaggcgcagtcggtccccgtcatcaatagtatggggagctctctgaccacattacagccggtgcagttctcgcagccgcttcacccctcctaccagcaacctttgatgcctccagtccagtcccatgtcacccagtctcccttcatggccacaatggctcagctgcaatctccacacgccctgtactctcataagccagaggtggcccagtacacacacactggcctgctgccccagacaatgctgattaccgataccacgaatctgagcgctctggcctctctgactccaacgaagcaagtcttcacatctgatacagaagctagttccgagtctgggctgcacacacctgctagtcaggctacaactctgcatgtgcctagccaggatccagcgagtatccagcatctgcaaccggcacaccggctgtctgctagcccgacagtaagcagttcgtctctggtgctgtaccagtcctcagattcctcaaacgggcagtcacatctgctgccttcaaatcactcagtaatcgaaactttcatatcaactcagatggctagctcatcccagtag

SEQ ID NO: 226249 - DNA, 1212 bp, synthetic construct
  misc_feature 1..1212: note = Description of Artificial Sequence: Synthetic coding sequence
  source 1..1212: mol_type = other DNA
atggtcaaaagctatctacaacaacacaacatacctcagcgagaagtcgttgatacaactggactgaaccagagtcatctgtcacaacacctgaacaaaggcacccccatgaaaacccagaagagggccgctttgtatacatggtacgttagaaagcaacgagaggtggcacaacagttcacccatgccggtcaaggaggactgattgaggagcctaccggagatgagctgccaacaaaaaagggaaggcgtaatcgctttaagtggggacccgctagtcagcagattctgtttcaggcatacgaaaggcagaagaatccctctaaggaggaaagagaaaccctggtcgaggagtgtaaccgcgcagaatgcattcaaagaggcgtctcgcccagtcaggcccaggggctgggaagtaatctggtaacagaagtccgtgtgtacaattggttcgccaaccggaggaaagaggaagcttttcggcataaactcgccatggacacatacagcgggccaccaccgggaccagggccaggcccagccctacccgctcacagcagcccagggctcccccctccggcacttagtcccagtaaagttcacggggtaagatacggacagccggcaactagcgaaaccgccgaggtcccttctagcagtgggggacccctggtgaccgtcagcactcctctgcaccaggtaagccctactggcttagagccctctcactcactgctttcaaccgaggccaaactcgtctctgcagcgggaggtcctttacctccggtgagcactctcacagctctgcactcgttggaacagacctcccccggactaaatcagcaaccacagaacctcatcatggcctcactacctggagttatgacgatcggcccaggtgagccagcttccttgggccctacttttaccaatactggtgccagtaccctagttatcggtaaactggtggggatgggtggacacctcggaggaaggctgatggggcagcctcaaaacccgggagccggaagagctactgggacccacagtttcattcatacgacgtgtatttacccggtaccaaccctcgatcaatccctttgctacatctccgatacgtgggtgaatcagacggaccagaatctctccaacagctcaagagaggccggaactaagcataacacttctattttatggtacttgagacggtag

SEQ ID NO: 226250 - DNA, 1185 bp, synthetic construct
  misc_feature 1..1185: note = Description of Artificial Sequence: Synthetic coding sequence
  source 1..1185: mol_type = other DNA
atggtcagcaagctgagccagctccagaccgagttgctcgctgctctactggagtccggcctttccaaggaggcgctgatacaagcactgggagaaccagggccatacctgctagctggagagggacccttagacaagggggaaagttgtggtggcggtcggggtgaactcgcagaattgcccaacgggctgggagaaacgagggggagcgaggacgagacagacgacgatggtgaagatttcacaccacctattctcaaggaactggagaatctgagtcctgaggaggccgcacaccagaaggcggttgttgagacactgctgcaggaggatccctggagggtcgcaaagatggtgaagtcctacctgcagcagcacaacattccccaacgcgaagtggtggacacaacagggctcaaccagagtcatctgagccagcatttgaacaagggtactcccatgaaaacgcagaaaagagcagccctgtatacatggtatgtacgtaaacagcgcgaagtggcccagcaatttactcacgcaggccagggcggtctaattgaggaacccacaggagacgagctccctaccaaaaagggcaggagaaatagattcaagtgggggcctgcgtcccagcagatactgtttcaggcctacgagagacagaagaaccccagcaaagaagagagggagactctggtggaagagtgcaacagggcagagtgtatccagcggggagtgagcccttcgcaggcccaaggcttgggttcaaatctggttaccgaagtgagagtgtataattggttcgccaatcgtcggaaggaggaagccttccgacacaaactggccatggacacatacagcggtccaccaccaggtccgggaccaggccctgcgttgcccgcacactcctcgcccggactgccacctcctgcactcagcccttccaaggttcacggggtgaggtacggacagcccgctacgagcgagacagcagaagttcctagctctagtggaggacctcttgtgacggtgtcaacacccttgcatcaggtgtcccccacagggctggagcccagtcactcgctgctgtccactgaagcgaagcttgtgagtgccgctgggggaccacttcccccagcagcctgtagccagccagggagagtcgcgagactttttaacttctag

SEQ ID NO: 226251 - DNA, 1917 bp, synthetic construct
  misc_feature 1..1917: note = Description of Artificial Sequence: Synthetic coding sequence
  source 1..1917: mol_type = other DNA
atggtttctaaactttcccagctacagactgagctcctcgctgccctacttgaatcaggactttctaaggaagccttgatccaagcattgggcgaacccggtccatatttactggccggtgaggggccacttgataagggggaatcctgcggaggcggaaggggagagctggctgagctgccaaacggcctgggagagacacggggtagcgaggatgagactgacgatgacggcgaggactttacaccccctatcctgaaggagctggagaacctctcacccgaggaagcggctcaccagaaagcggtggttgagaccttactacaggaagacccatggcgcgtggctaagatggtgaagtcttatctgcagcagcacaacattcctcagagagaggtggtggacacaacagggcttaatcagtcacacttaagccagcacctgaacaagggtacacctatgaaaacccagaagcgggcagccctatacacctggtatgtgcgcaaacagagggaggtggcccagcagtttacacatgccggtcaggggggattgattgaggagccaaccggggacgagctgcctactaaaaaaggtcggcgaaaccggtttaaatggggaccagcatcacagcagatcctatttcaggcttatgagcgacaaaagaatccctctaaggaggaacgagaaacccttgtagaggaatgcaatcgtgccgagtgcatacagagaggcgtgtctccgagtcaagcccaagggctgggatctaacctggttacggaggtgagagtctacaactggtttgcaaatcggaggaaagaggaagcgtttagacacaagctggccatggacacgtactccggcccacctccaggcccaggtcctggacccgctctacccgctcacagtagccccggtttgccaccccctgcactctcacccagtaaggtccacggtgtccggtacgggcaaccggctacctccgagacagctgaggtgccatcaagcagtggtgggcctctggtgaccgtgtccacgcccttgcaccaagtgtctcctaccgggctcgagccttcacatagtctcctctctactgaggcaaaactggtctccgctgccggtggacccctgccccctgtatctaccctgaccgccctgcactctctggaacagacgtcaccgggtctgaatcagcagcctcaaaacctcatcatggcctcgctgccaggggtaatgactatcggacccggtgaaccagccagcctgggcccaaccttcacaaacactggagcttcaaccctggttataggcttagcgtcaactcaagcgcagtctgtgcccgtaataaatagcatggggagttctcttactaccctacagcccgtccagtttagccaaccccttcacccttcctatcagcaaccgctgatgccacccgtccagtcccatgtgacgcagtcaccctttatggccacaatggcccagctgcagtctccacacgccctttacagccacaagcctgaggttgcccaatatacccataccggcctactcccgcagaccatgctcataaccgacacaacaaaccttagcgccctcgcttcccttacccctaccaagcaggaggcagctctcttgccccaggttttcaccagcgacacagaagctagtagcgagtctgggctgcatactccggcatcgcaggcaacaaccttgcacgtgccctcccaggaccctgccagtattcaacatctacagcccgcacacaggctgtcagctagccccactgtttccagttcaagcctggtgctgtatcagtcctcagattcatccaatgggcaatcgcatcttctgccttcaaatcactccgtaatagagactttcataagcactcagatggcatcttcatcacagtag

SEQ ID NO: 226252 - DNA, 1416 bp, synthetic construct
  misc_feature 1..1416: note = Description of Artificial Sequence: Synthetic coding sequence
  source 1..1416: mol_type = other DNA
atggtatctaaactgtctcagttgcaaacagagctacttgccgctcttttagagtccggcctcagtaaggaggccttaattcaggcccttggagagccaggtccttacctgttagccggtgaggggccactggacaagggtgaatcttgcggagggggtaggggtgaactggcagagctccccaatggcctgggagagactagaggtagcgaggacgaaaccgacgatgatggtgaggactttacccctcccatcctcaaggagcttgaaaacctgtcaccagaagaggcagctcaccaaaaagcagtagttgaaacccttctgcaagaggacccgtggagggtggccaagatggtaaagtcctacctccagcagcacaatatccctcagcgcgaagttgtggacactacaggtctcaatcagtcacacctgtctcagcacctaaataaaggtactcccatgaaaacccaaaagagggccgctctttatacctggtatgtcagaaaacaacgagaagtcgcgcagcagttcacgcatgctggccaggggggactgattgaggagccgacaggggatgaactgccgaccaaaaaaggcaggaggaaccggtttaaatgggggccagcttctcagcagatattgttccaggcttacgagagacaaaaaaacccaagtaaagaggaaagagagaccctggtggaagagtgtaaccgagccgagtgcatccagaggggggtctccccatcccaggcccagggtctcggcagcaacctcgttactgaggtacgagtgtacaattggttcgcgaacagaaggaaagaagaggcatttcgtcataagttggctatggacacatactctggtccgccaccgggaccgggaccagggcctgccctcccagcccattcatcacccggactcccccctcccgctctctccccctctaaggtccacggcgtgagatatggacagccggcaacttccgagacagccgaggttcccagttcctccggcggtccattagtcacagtatctacacccttacaccaggtgagcccaacaggtctggagccatctcatagcctgctgtctaccgaggccaaacttgtgtcagccgcaggtggcccacttcccccagtctcaaccttaacagctcttcacagcctggaacagacctcaccgggtctgaaccaacaacctcagaacctgattatggcttctttgcccggagtgatgaccatcggtccaggggaacctgcctcacttggcccaaccttcacaaacacgggtgcttccacactggtaattggactggcatccacccaggcccagtctgtgcctgtgatcaattcaatgggctctagcctcacgacacttcagcccgtgcagtttagccagcagggacctagctcctag

SEQ ID NO: 226253 - DNA, 1359 bp, synthetic construct
  misc_feature 1..1359: note = Description of Artificial Sequence: Synthetic coding sequence
  source 1..1359: mol_type = other DNA
atggtgagcaagctgtctcagctgcagaccgagttgttggcagctctgttggaaagcggcctatcaaaagaggccctgatacaggctcttggcgagcctggtccctatctgctcgcaggtgaggggcctcttgataagggagagtcctgtggaggcggacgcggtgaactcgccgagctgcctaatggcctgggggagacccgaggaagtgaagacgagaccgacgacgatggcgaagactttacgccacccatcctgaaggaattggaaaaccttagccctgaggaagcggctcaccaaaaagccgtggtagagacgctgctgcaggaggatccttggagagtagcgaagatggtaaagagctatctgcaacagcacaacataccccaacgtgaggtggtggataccactggactgaaccaatcgcatctgtcgcaacacctaaacaaaggaacacctatgaaaactcagaaacgtgcggctctgtatacatggtacgtgagaaagcaacgagaggtcgcgcagcagtttacgcacgcaggccagggtggactgatcgaggagccaaccggagatgagcttccaacaaaaaaagggagacgtaacagatttaaatgggggccagccagccagcagattctcttccaagcgtacgagaggcagaagaacccttctaaagaggaaagggaaacacttgtggaagagtgtaatagagcagagtgtatacaaaggggagtgtctcctagtcaggcacaggggctggggtcaaacttagtcacagaagtccgggtatataattggttcgccaatagaaggaaggaggaagcgttcagacacaaacttgccatggatacatactctggccctcctccgggacctggccctggtccagcactgcccgcacacagctcccctggattacccccacctgcactgagtccctccaaggtgcacggcgtgcgttatgggcagcctgctacctcggagaccgccgaggtgccgtcaagttctggcggtccactcgtgaccgtctccaccccattgcatcaggtctctccaacagggcttgagccttcccattcactgctgagcactgaggcgaaattggtatctgcggcaggagggcctttgcccccagtgtccacacttaccgcccttcactctctagaacaaacgtctccgggtctgaaccagcagccccaaaacctgattatggcgtctttgccgggagttatgactatcgggccaggcgagcccgcaagcttagggcctacttttacaaatacaggcgcttccacacttccactattcggagctggggtggcagagctcacgcggcagcagggacccagtagctag

SEQ ID NO: 226254 - DNA, 1071 bp, synthetic construct
  misc_feature 1..1071: note = Description of Artificial Sequence: Synthetic coding sequence
  source 1..1071: mol_type = other DNA
taatggctggtcgggttttggggcggtagtgggtgcaaggagtttggcctgtgcttgccagctggccgacaaacccaacccaccaggtggggcaggaggctggcttggtggacaagggctgcatggccatgtgggagccgggcaatggtctcaaaactttctcaactgcagacagagctgctggctgccctgttggagagtgggctaagtaaggaggccctgatccaggccctcggcgagcctggcccatacctgctggcaggcgaaggacctctggataagggagagtcctgcgggggtggccgtggcgagctggcagaactgcccaatggcttaggggagacacggggttcagaggacgagactgacgacgatggcgaagattttacgccccctatccttaaggagctggaaaacctatcgccagaggaggccgcacatcagaaggccgtggttgagactttgttgcaggaggacccttggcgggtagctaagatggtcaaatcttacctccagcagcataacatcccccaacgagaggtggttgacaccactggcctgaatcagtcacacctctcacagcacctgaataaagggaccccaatgaagacgcagaagcgggctgctctgtacacctggtatgttaggaagcagagagaagtggcacaacagtttacccacgctggccaggggggattgatcgaagagccaactggggacgaactgccaacaaagaaggggagaaggaataggtttaaatggggacctgcaagtcagcagattctgttccaggcttacgagaggcagaaaaatccttctaaagaggagagagaaaccttagttgaggaatgtaaccgggcagaatgcattcagaggggagtttccccaagccagccacaacccgcagagtaccgcagccaggctgggttaagtagctggggtcctcctcctccctgccagcaccctgactcaaccgcccagctgggcgcagatatccctcgccctcagccagcagctcccgaaccccaccacggtctcacttcctggggccatgatcaccgcgcttggtag

SEQ ID NO: 226255 - DNA, 2247 bp, synthetic construct
  misc_feature 1..2247: note = Description of Artificial Sequence: Synthetic coding sequence
  source 1..2247: mol_type = other DNA
atgctcggtactctgagggctatggagggagaagacgtcgaagacgaccagctgctgcagaaattgcgggcatcccgcaggcgcttccagcgcagaatgcagagattgattgagaagtataatcagccatttgaagacacccccgtggttcagatggcgacattgacttacgagacaccccagggcctgaggatatgggggggacgcttgatcaaggagcgtaatgagggggaaattcaagattcatcaatgaaacctgctgatagaacagacgggtccgttcaggctgctgcctggggccctgaactgccctctcatcgtaccgtgttgggcgctgactcgaagtccggcgaggtcgacgccacatcagaccaggaagaaagcgtcgcgtgggctctggcccctgccgtgccccagtcccccctgaagaacgagctccggcgtaaatacttgacacaagttgacattcttcttcagggcgcagaatactttgagtgtgctgggaacagagctggtagagacgtgagagtcactccgctgccatctctcgcgtctcccgctgttcccgctccaggctattgttccaggatcagtcgcaaaagcccaggcgaccccgcaaaacccgcaagctcaccaagagagtgggaccctttacacccatcttccactgatatggccttggtcccccgtaatgactccctctccctccaggaaacctcctcaagctccttcctgagcagccagccgtttgaggacgatgacatctgcaacgttaccataagcgacctctacgcagggatgttgcatagcatgtccagattactatccactaaacccagttccataattagcactaagacgttcatcatgcagaactggaacagccggaggaggcacagatataaaagccgcatgaacaagacttactgcaagggcgctcgcagatctcagaggagttccaaggagaacttcattccctgcagtgagccagtcaagggcacaggggcactgagagactgtaagaacgtcttggacgtcagctgcagaaaaaccgggctgaagctggaaaaggcctttctggaggtgaatcgtccacagatccataagctggacccttcatggaaggaaaggaaagtcacaccgagcaagtattcgtcccttatctattttgactcttctgccacctataatctagacgaggaaaatcggttccgaaccctgaaatggctcattagccctgtgaaaattgtcagccggccaaccatacggcaaggtcatggcgagaatcgccagcgcgaaatagaaattcgctttgaccagctgcaccgggaatactgcctgtccccaaggaaccagccgagaaggatgtgtctgcccgactcttgggctatgaatatgtatcgcggtggcccagcatcaccagggggtctgcagggtcttgagaccagaagactctctctgccctctagcaaagccaaggcaaagtctctgtccgaagcttttgaaaacctcggaaaaaggtctcttgaagctgggcgttgcctgcctaaaagcgactcatcgtcctctctcccgaagaccaacccgacccatagcgctacccgaccccaacagaccagcgatctgcacgtccaaggaaattcttctggcatcttccggaaaagtgtgtccccctcaaaaaccttgtcagtgcccgacaaggaagttcctggccacggtaggaatcgttatgatgagatcaaggaggagtttgataagctgcatcagaaatattgtctgaaaagccctggacagatgaccgtgcccctctgtatcggagtcagcacggataaggccagtatggaggtgaggtaccagactgaggggttcctcggtaaactgaaccctgatccccactttcaagggtttcagaagctgcccagttcaccacttgggtgccgcaaatctctgttggggtcgacagctatagaggcaccgtcgtccacctgcgtggctcgggctatcacacgcgacggcacccgcgatcaccaattccctgccaaacggcctcggttgagcgagccccagggttcaggcagacaggggaacagtttgggtgcttcggacggagtcgataacaccgtgcgtcctggtgaccaggggtcatcttcacaaccaaattcagaggaaagaggggaaaacacctcctataggatggaggaaaaatcagacttcatgctagaaaaattggaaaccaagtctgtgtag

SEQ ID NO: 226256 - DNA, 2085 bp, synthetic construct
  misc_feature 1..2085: note = Description of Artificial Sequence: Synthetic coding sequence
  source 1..2085: mol_type = other DNA
atgctaggcaccctgcgtgctatggagggggaggatgttgaagacgatcaacttctgcagaaactgagagcgtcccgtagaagattccagcggcgaatgcagagactaatcgagaagtacaatcaaccttttgaagacactcccgttgtacaaatggccacgctgacatacgaaactcctcaaggcttgaggatttggggcggtagattaataaaggagcgcaatgagggagagatacagcctgcggttcctcagtcacctctcaagaatgagctacggagaaaatatctgacccaggttgacatcctattacagggggcagagtacttcgagtgtgccggaaatagggccggacgggacgtaagagtcacaccactgccgagtctggccagccccgctgtgcccgctcccggatattgctctcgcattagccggaagagcccaggcgatccagcgaagccggctagtagcccccgtgagtgggatccactgcaccccagctccaccgatatggcactcgtgccacgtaacgacagcctgtcacttcaggagacttcatcctcatcctttctgtcgagtcagcctttcgaggatgacgatatctgtaatgtcacaatttccgatctgtatgcaggcatgctgcacagtatgtccaggcttctgagcaccaaacctagtagcattatctcaacaaagacgttcatcatgcagaattggaacagcaggcggaggcatcgctataagagtcgaatgaataagacttattgtaagggagcacggcgatcccagaggtcatctaaggagaacttcatcccctgtagtgagcccgtgaaaggtaccggcgctctccgcgattgcaaaaatgttctggacgtcagctgcagaaagactggcttgaagctggaaaaggccttcctcgaggtgaaccgcccacaaattcataagctagacccctcctggaaggaaagaaaggtgaccccgtctaagtactcttcccttatttatttcgactcaagcgccacttacaatttagacgaagagaaccgttttcgcacactgaaatggctaatcagtccagtcaaaatcgtgtcacgccctacaatcagacaagggcacggggaaaaccggcagcgcgaaatcgagattaggtttgaccagctgcaccgcgagtattgtcttagccccaggaatcagccacggcgaatgtgtctccccgacagctgggctatgaatatgtatcgcggaggtccagcctcaccagggggacttcagggcctagaaactaggagactaagcctaccctcttctaaagcgaaggccaagtcattgtctgaggcctttgaaaatttgggaaagcgaagtttagaggccggtagatgcctgcccaagtcagactcttcctcctccttacctaagacaaatcctactcatagcgcaacgaggcctcagcaaacatctgatctccacgtacaaggcaactcctcgggtatctttcgcaagtcagtaagccccagcaagacccttagtgtccccgataaagaagtgcccggacacggcaggaacaggtatgatgagattaaggaagaatttgacaaactgcatcagaagtattgcctgaagtcacccggacagatgacagttcccctttgtatcggtgtgagtactgataaggcatccatggaggtgcggtaccagactgaaggattcttgggcaaactcaatccggatccgcatttccagggctttcaaaaactgccatcatctccgctgggatgtaggaaatctctcctcgggtcaactgccattgaagctccatcatcaacctgcgtagcccgagctatcaccagggatggtacaagggaccaccaatttcctgcaaagcggcctagattatcagagccccagggttcaggcaggcagggtaattcactcggcgcatccgatggcgtcgataataccgttagacctggcgatcaggggtctagctctcagcctaactctgaggaacgaggcgaaaacacaagctatagaatggaggagaagagcgatttcatgctggagaagctggagactaaaagcgtgtag

SEQ ID NO: 226257 - DNA, 1992 bp, synthetic construct
  misc_feature 1..1992: note = Description of Artificial Sequence: Synthetic coding sequence
  source 1..1992: mol_type = other DNA
atgttgggtactctgcgcgcaatggaaggagaggacgtggaagacgatcagctgctccaaaagctacgagcaagcagacgaaggtttcaaagaagaatgcagcgtctaatcgaaaaatacaatcagccattcgaggacactccagtcgttcagatggccactctaacgtatgagacccctcaggggctccgcatctggggcggtcgtctcatcaaggaacgcaacgagggcgaaattcagtgcgctggcaaccgtgcaggcagggatgtgcgcgtgacccctctgccatccctcgcatctcctgccgtgccagccccagggtactgtagcaggatctcacggaagtccccaggggaccccgcaaaaccagcaagctccccccgagagtgggaccctcttcacccctcaagtacggacatggccctcgttcctcggaacgactcgctgtccttgcaggagacttcctctagttctttcctgtcaagccaacccttcgaagatgatgacatttgcaacgtcactatatctgacctatacgccggaatgctccattcaatgtcccggctcctgagcactaaaccgtcaagtatcatctcgactaagacctttataatgcagaactggaactccaggcgccgacacagatacaaatccaggatgaataaaacttactgcaagggggcaagaagatcccagaggtcttcaaaagagaacttcattccgtgtagcgaacccgtgaagggcaccggggctctccgcgactgcaaaaatgttctggatgtttcctgtcggaaaaccggattgaaactggagaaggcctttctggaagtcaataggccgcagattcacaagcttgatccaagttggaaagagcgcaaggtcactcctagtaagtactccagtctcatatactttgattcaagcgccacttacaatctggatgaggaaaaccgctttcgcaccctaaagtggctgatttcgcctgtaaagatcgtgtcccgtccgaccatcaggcaaggacacggggagaataggcaaagggaaatcgagatccgctttgatcaattgcaccgcgagtactgtctctctccaaggaaccagccacgacgcatgtgtctgcctgattcttgggctatgaacatgtacagaggaggcccagcctctcccggaggcctacagggcctcgaaacacggaggctgagcctgccaagtagcaaagccaaggcgaagagcctgagtgaggcctttgagaatctgggcaaacggagtctcgaagccggacgctgcttaccaaagagtgactcgtccagtagcctgccaaaaaccaatccaacacactccgctacgaggcctcagcagacaagcgatcttcacgtgcagggaaactcttctggaatatttcgaaagagcgtttccccatctaagacactgagtgtgcctgacaaagaggtgccaggtcacgggagaaaccgctacgacgaaatcaaagaggaattcgacaagcttcaccagaagtactgtctgaagtctccaggtcagatgacagtgcctctgtgcatcggcgtgtctactgacaaagcctctatggaggtccgatatcagactgaaggctttctcggtaaactgaatcctgatccacacttccagggtttccagaaattaccctcatcccccttaggatgccggaaaagcttgctcggatctacggccatcgaggcaccatccagtacttgtgtcgccagggcaataacgagggacggaacccgagatcaccagtttccggctaaaaggccacgcctctctgaaccgcaagggtctggacggcaaggtaattcactgggtgccagtgatggcgtggataacactgtgaggcctggcgaccagggctcttcatcccaacccaatagcgaggagcgaggggagaacacgagttataggatggaagagaagagcgatttcatgctcgaaaagctcgagactaagagtgtgtag

SEQ ID NO: 226258 - DNA, 2181 bp, synthetic construct
  misc_feature 1..2181: note = Description of Artificial Sequence: Synthetic coding sequence
  source 1..2181: mol_type = other DNA
atggaagaccgcctgcacatggacaatgggctggtccctcaaaaaatagtgtctgtacatcttcaagatagtacactgaaggaggtcaaggaccaggtgtccaataaacaggcccagattcttgaacctaaaccagaacctagcctggaaatcaaacctgagcaggacgggatggagcatgtggggagggacgatcccaaagcccttggggaagaaccaaagcaaaggagaggcagcgcatccggcagcgaacctgccggagactccgacaggggcggtggaccagtggagcactaccatctgcacctgtcaagttgccacgagtgtcttgagttggaaaatagcacaatcgaatcggtgaagttcgcatcggcagagaatattccagaccttccctacgactacagctcctccctcgagagtgtggcagatgaaaccagccccgaaagagaagggaggagagtcaatctaaccggaaaagctccaaacatcttactgtacgtggggtcagactcccaggaggcgctgggcagattccacgaggtgcggtcagtgctggccgactgtgtggacatcgattcttacatactgtatcaccttctggaggactcagctcttcgcgatccgtggaccgataattgtttgctgcttgtgatagcgactcgggagagcatccctgaagacctctatcagaaattcatggcttatctgtctcagggagggaaagtgcttggccttagcagtagctttacattcggtggcttccaggtcacaagtaagggcgctctacataaaacagtgcagaatttagtgttttctaaagccgatcagagtgaagtgaagctttccgtcttaagttcagggtgcagataccaggaaggcccagtgagactctcaccaggcaggctgcagggtcacctcgagaacgaggataaagatcggatgatagtgcacgtgcctttcggtactagggggggtgaagctgtgttgtgccaggtgcacctggaactgccacctagcagtaacatcgtgcaaactcctgaggatttcaacctcctgaagagctctaatttccggagatatgaagttttgagagagatcctcaccaccctcggactttcatgtgacatgaaacaggtgcccgcactcaccccgctgtatctgctgtctgccgcagaggaaattcgggacccgctgatgcagtggcttggtaaacacgtggacagcgaaggggaaatcaagagcggtcagctgagtctccgatttgtttcctcctacgtcagcgaagttgagatcacaccctcttgtatccccgtggtgacaaacatggaggccttttcaagtgagcatttcaacctggagatatacaggcagaacctgcagaccaagcagcttggaaaggtgatcctgtttgctgaagtgaccccaacaactatgcggttactggacggcctgatgttccagacgcctcaggaaatgggtctaatcgtgatcgccgcaaggcagacagaaggaaagggacgcggaggcaatgtttggctgtcccccgtgggctgtgccctctccacactgctcatctccattcctcttagaagccaattgggccaaaggattccctttgttcagcacctcatgagcgttgccgtggtggaggccgtgcgatcaatacctgaataccaagacatcaacctgcgagtgaagtggcccaatgacatctattactccgacctcatgaaaattggcggagtcctggtcaactctacgctgatgggcgagacattttatatcctgattggttgtggcttcaacgtgacaaactccaatccaacaatctgcatcaatgacttaatcacagagtataataagcaacacaaagcagagctcaagccattgagggctgattatcttatcgcccgagtggtcactgtgttagaaaagcttattaaggagttccaggacaagggccctaactcagtgctccccctgtattatcggtactgggtgcattcagggcagcaggtccacctggggagtgcggaaggccctaaggtctcgatcgtcggactcgatgattctggattcctccaggttcaccaagagggaggagaagttgttaccgtgcatcccgacggtaactcctttgatatgctacgcaatttgatactgccaaaaaggcggtag

SEQ ID NO: 226259 - DNA, 2181 bp, synthetic construct
  misc_feature 1..2181: note = Description of Artificial Sequence: Synthetic coding sequence
  source 1..2181: mol_type = other DNA
atggaagaccggcttcatatggacaacgggctggtaccacagaaaatcgtgagcgtgcacctccaggattctactctgaaggaggtcaaggatcaagtgtcaaataagcaggcccagatcttggagcccaaacctgagccaagtctggaaattaagcctgagcaggatggaatggagcacgtaggtcgggacgatccaaaggcccttggggaggaacccaaacagcggaggggatccgcctcagggagtgaaccagcaggggacagtgacagagggggaggcccagtggagcattaccacctccacctgtctagctgtcacgagtgccttgagctcgaaaattcaactatcgagtctgtaaagttcgcaagcgccgagaacatccccgacctgccctacgactattccagttctctcgagagcgtggccgacgagacaagccctgagcgcgagggcaggcgtgttaatctgacaggtaaggcacccaatatcctgctctacgtggggagcgacagccaagaagcgctgggacgatttcatgaggtaagatccgtgctggctgattgcgtggacattgactcttatatcctgtaccatctcctggaggactctgccctccgggacccctggacagacaattgtctgctgctggttatcgcaacaagggagagcattcctgaagacttatatcagaagttcatggcctatctgtcccagggcggaaaggttttaggactgtcgtcttcctttacattcggaggcttccaggtaacgagcaagggagcactgcataaaacagtccagaacctggtgttctccaaggctgaccagtctgaggtgaaattgagtgtgctttcctcgggctgccgttaccaagagggacctgttcgattgtcccctggccgtttgcagggtcacctcgagaatgaggataaagacagaatgattgtccacgtgcccttcggaactcgcggtggagaggctgtcttgtgccaggtacatctcgagctaccccctagttcgaacatagtgcagacccctgaagatttcaatcttctgaagtcctccaacttccgtagatacgaagttctcagggaaatcctaacaaccctgggactctcttgtgatatgaaacaggtgcctgccttgactcctctgtacctccttagcgccgctgaagagatccgcgacccgctgatgcagtggctggggaagcatgtggactccgagggagagattaaatcagggcagctgtctctgaggtttgtgagcagttatgtctcagaggtagagataacacccagctgcattccggtggtgacaaatatggaggcctttagctcggaacatttcaacctcgaaatctatcgccaaaacctccagacaaagcagcttggaaaagtcattttgttcgccgaggttactcctaccactatgcgactgctagatggcctgatgttccaaactcctcaggagatggggctgatcgtcattgctgcacgacagaccgagggcaagggaagaggcggtaatgtgtggctatctcctgtgggatgcgcattaagtactctgctgatttcaattcctctgcgttcacagcttggccagaggattccttttgtccagcacctcatgtcggtcgcggtggtagaggctgtcaggagcatcccggagtaccaggacatcaacctgagagtgaagtggccaaacgatatttactacagtgatctgatgaagattggcggagtgctggtaaactcaaccctaatgggcgagactttttatattctgatcggttgcggattcaacgtcaccaattccaacccaactatctgcattaacgatttgattacggaatacaacaaacaacacaaagccgaactgaagcccctccgggctgactacctcattgcgagagtggtgacggtgctggagaagctgataaaagaattccaggataaaggacctaactccgtgcttcccctctattataggtattgggtccatagcggccagcaggttcatctcgggtccgccgagggtccaaaggtgagcattgtaggtctggacgattcaggcttcctccaggtgcatcaagagggaggcgaggtggtcactgttcaccctgacggcaattctttcgatatgctacgcaatttgattctgccaaaaagacgatag

SEQ ID NO: 226260 - DNA, 264 bp, synthetic construct
  misc_feature 1..264: note = Description of Artificial Sequence: Synthetic coding sequence
  source 1..264: mol_type = other DNA
atggaggaccgtttgcatatggacaatgggttggtgcctcagaagatagtaagcgtccacctccaggacagtacgctgaaggaagtgaaggaccaggtgagcaataaacaggcacagatactagagccgaagccagaaccctctcttgagataaagccggagcaggacgggatggagcacgtgggcagggacgatcctaaagcactgggggaggaacccaaacagcgtcgaggcagtgcctccgggagtgaaccagctggatag

SEQ ID NO: 226261 - DNA, 234 bp, synthetic construct
  misc_feature 1..234: note = Description of Artificial Sequence: Synthetic coding sequence
  source 1..234: mol_type = other DNA
atggaggaccgcctgcacatggataatgggctggtcccccaaaagatagtttcagtgcacctgcaggactccacccttaaagaagtgaaggaccaagtaagcaataagcaggcacagatcctcgagcctaaacccgagccatcccttgaaattaagcccgaacaagatggcatggagcacgtaggaagggacgatcctaaagccctgggggaagagccaaagcagaggagatag

SEQ ID NO: 226262 - DNA, 279 bp, synthetic construct
  misc_feature 1..279: note = Description of Artificial Sequence: Synthetic coding sequence
  source 1..279: mol_type = other DNA
atggaagaccgcctgcatatggacaacggactggtgccacagaaaatcgtttccgtgcatctacaagattctacactcaaagaagtcaaggatcaggtatctaacaagcaagctcagatccttgaacccaagccagaaccctccttggagatcaagcctgaacaggacgggatggagcacgtgggacgagacgaccctaaggcactgggcgaagaacctaagcagcgacgtggctcagcctctggatctgagcccgcaggcgattccgaccggggatag

SEQ ID NO: 226263 - DNA, 807 bp, synthetic construct
  misc_feature 1..807: note = Description of Artificial Sequence: Synthetic coding sequence
  source 1..807: mol_type = other DNA
atgggtttgtccccgtccgctcctgcggtggccgtccaggcttccaacgctagcgccagtcccccatccgggtgtccaatgcacgaaggcaagatgaagggttgcccagtgaacactgaaccaagtggacccacctgtgaaaaaaagacctactcagtccccgctcaccaggagcgagcctatgaatacgtagaatgtccaattcggggaacagccgctgagaataaagagaaccttgatccatcaaacctgatgccacctcctaatcagacgccagcaccagaccagcctttcgcccttagcactgtccgggaggaaagttccatccccagagctgacagcgagaagaagtgggtgtacccaagtgagcagatgttttggaatgccatgctgaaaaagggttggaagtggaaggacgaggacatttcgcagaaagatatgtataacatcatccgcatccacaatcagaacaacgagcaggcctggaaggagattctgaagtgggaagccctccatgcggcagagtgcccctgtgggccatcactgattaggtttgggggtaaggccaaagagtattctcccagggcacgcatccgtagctggatggggtatgaactgccttttgatagacatgactggattatcaatcgctgtggaacagaagtccggtatgtcatcgattactatgatgggggagaagtcaacaaggattaccagttcaccattttggacgtccgtccggcattagacagtctgtctgccgtatgggaccggatgaaggtggcctggtggagatggacctcatag

SEQ ID NO: 226264 - DNA, 807 bp, synthetic construct
  misc_feature 1..807: note = Description of Artificial Sequence: Synthetic coding sequence
  source 1..807: mol_type = other DNA
atgggcctgagcccaagcgctccagcggtggctgtccaggcttctaatgcttcagcaagcccaccttctgggtgtcccatgcacgaggggaagatgaagggttgccccgttaacacagaacccagcggcccaacttgcgagaagaaaacgtattctgtccctgcccaccaggaacgtgcctatgaatatgtcgagtgccccattcgcggaacggccgcagaaaataaggaaaatctagaccctagcaatctgatgcctccccctaatcaaacccccgctccggaccagccttttgccttgtccacagtgcgcgaggagagtagtattccgagagcagattctgagaagaagtgggtctacccgtccgagcagatgttttggaacgcaatgcttaagaaggggtggaagtggaaggacgaagacatctcccagaaagatatgtataacatcatacgtattcacaatcaaaataatgaacaggcctggaaggagatcttgaagtgggaggcgctccatgccgctgagtgcccatgtggcccttccttgattagattcggaggtaaagccaaggaatattctccaagagcaaggatccgcagctggatgggttatgagcttccgtttgacaggcacgattggattattaacagatgtggcaccgaggttagatatgtgattgactattacgacggaggcgaggtgaacaaggattatcagtttacaatactggacgtgcggcctgcgctcgattctttgagcgctgtatgggacaggatgaaagtcgcttggtggcgatggacctcctag

SEQ ID NO: 226265 - DNA, 807 bp, synthetic construct
  misc_feature 1..807: note = Description of Artificial Sequence: Synthetic coding sequence
  source 1..807: mol_type = other DNA
atggggttgtctccctcagcacctgccgtggctgtgcaggcgtccaacgcctcagctagccctccaagtggatgcccaatgcatgaaggtaagatgaaaggatgcccggtcaacaccgagccatcaggcccaacctgtgaaaagaaaacatacagtgtgcccgctcaccaggaaagagcgtacgagtatgtggagtgtcccatccggggtaccgccgcagaaaataaagaaaatctggatcctagtaatttaatgccaccacccaaccagacacccgcacctgaccaaccttttgccctttctaccgtgcgagaggaatcatccatcccacgcgctgacagcgagaaaaagtgggtttatccctctgaacaaatgttttggaatgcaatgctgaaaaaaggatggaaatggaaagacgaagatatctctcaaaaagatatgtacaacatcattcgaattcataaccagaataatgagcaggcttggaaggagatcctaaagtgggaagctctgcacgccgcagaatgcccctgcggaccaagtttgatccggttcggcggaaaagctaaggagtacagcccaagagcccgaattcggtcatggatgggctatgagttgcccttcgacagacacgattggattataaatcgatgcggcaccgaagtgcgatacgtgatcgattattatgatggtggagaggtgaacaaggactatcagtttaccattctggatgtgaggccggcactggattcactgtctgcagtgtgggacaggatgaaggtggcatggtggcgatggacatcttag

SEQ ID NO: 226266 - DNA, 1008 bp, synthetic construct
  misc_feature 1..1008: note = Description of Artificial Sequence: Synthetic coding sequence
  source 1..1008: mol_type = other DNA
atggacaatgccaggatgaactccttcctggagtatcccatcctctccagcggcgatagcgggacctgctccgctcgggcataccctagcgaccatcgcatcaccacattccaaagctgtgcggtgtccgcaaacagctgcggaggtgacgatcgatttctcgtcgggcgtggagtgcaaatcggctctccgcaccaccatcaccaccaccaccaccgacacccccagcctgccacatatcagactagcggcaaccttggagtgtcttattcacactcctcatgtggtccaagctatggtagccagaattttagcgctccgtattctccatacgcgctgaatcaggaggctgatgtctcagggggttaccctcagtgcgctccagctgtctattctggcaatttgtcctctcctatggtccaacatcatcaccaccaccaaggttacgccggaggggctgtaggatctccacagtacatccatcacagctatggccaagagcatcaaagtctcgctttggctacatacaacaactccctgtcacctctccacgctagccatcaggaagcctgtcgttcacccgcttcggagacctcaagccccgcacaaacctttgactggatgaaagtgaagcgcaaccctcctaagacagggaaagtgggggaatacggatatcttgggcagccaaatgccgtccggacaaattttacgaccaagcagctcactgagctggagaaggagtttcactttaacaagtatctcaccagagcacgacgggttgaaatagctgcttcgcttcagttgaatgagacccaagtcaagatctggttccagaataggagaatgaaacagaaaaagcgagagaaggagggcctgttgccgatctcacccgcaactcctcctggaaatgacgaaaaggcggaggagtctagcgaaaaatcctcctctagcccatgcgtgccttcccccggatcctcaacctcggacaccctgacaacctcccactag

SEQ ID NO: 226267 - DNA, 414 bp, synthetic construct
  misc_feature 1..414: note = Description of Artificial Sequence: Synthetic coding sequence
  source 1..414: mol_type = other DNA
atggacaatgcccgaatgaacagctttctcgagtaccctattctgtctagtggcgattcaggaacctgctcggcgcgtgcatacccatccgatcataggattaccacctttcagtcttgcgccgtctctgcaaatagctgtggaggcgatgatcgcttccttgtgggtcgtggagtgcagattggctccccccatcatcaccaccatcaccatcaccgacacccacagccagcgacttatcaaacctctggtaatcttggtgtttcgtatagccacagttcatgcgggccaagctacggttcacaaaactttagcgctccatacagcccttatgccctcaatcaggaggccgaccccccacgttccctgtctcttccacgcattggtgacatcttctctagtgccgacttctag

SEQ ID NO: 226268 - DNA, 1233 bp, synthetic construct
  misc_feature 1..1233: note = Description of Artificial Sequence: Synthetic coding sequence
  source 1..1233: mol_type = other DNA
atgtctgccaggaaaggctatttactcccatccccaaattatccgacgacgatgagctgcagcgagtcgcctgctgcgaattcatttttagtggactctctgatttcgagtggcaggggggaagccggaggaggcggaggaggtgctggaggcggtggtggagggggttattacgctcacgggggagtgtatttacccccagcagccgatttaccgtatgggctgcaatcttgcggcttattcccgacattgggaggcaaacggaatgaggcagcctctcctggatctgggggagggggaggcggactgggtcccggagctcacggttatgggccatcacctatagatctatggctcgatgccccaagaagctgtcgtatggagccacccgacggccctccgccacctccccagcagcaaccccctcccccacctcagccgcctcagcccgctccacaggctactagctgcagctttgcccaaaatatcaaggaggagtcctcctattgtttgtacgattcagccgacaaatgccctaaggtgtcagcaaccgcagccgagttagcccctttccctagagggccaccacctgatggctgtgctttgggcacgtctagtggagtgcctgttcctgggtatttccggctgagccaggcatatggcacggcaaagggatacggtagtggaggtggtggagcccaacagttgggggctggcccatttcctgcacagccacccggacgcggttttgatctgcccccagccctggcgagcggatccgccgacgccgctagaaaagagagggcacttgacagccctcccccacctaccttagcctgtggatccggaggagggagtcagggagacgaagaggctcatgcatcatctagcgctgcagaggagttgtcacctgctccctctgaaagttctaaagcaagcccagagaaggattctttgggaaattccaagggagaaaacgccgcaaactggctcaccgcgaaaagtggtcgtaaaaagagatgcccgtacactaaacatcagacactggaattggagaaggaattcctcttcaatatgtatttgacacgggaacgacgtctcgaaatatctcgctccgtgcacctgactgaccgccaggtgaaaatctggttccagaaccgccgtatgaagctcaaaaagatgaatagagagaatcgaatcagggagctgacagctaatttcaatttcagctag

SEQ ID NO: 226269 - DNA, 609 bp, synthetic construct
  misc_feature 1..609: note = Description of Artificial Sequence: Synthetic coding sequence
  source 1..609: mol_type = other DNA
atgtcttgtagcgaatcccctgccgcaaactcatttctggtagattcactgatctcaagcggcagaggtgaggctggtgggggagggggaggtgccggaggcggaggaggcggtggatattacgcccacggtggggtctacctgcctcccgctgccgatctgccttacggtctgcagagctgtgggcttttccctacgcttggtggtaagcgtaacgaagcagcctctccaggttccggaggcggagggggtggcctcggtcctggtgctcatggctatgggccaagtccaatagatctctggctagacgctccacgatcatgccggcgtagggctgctactcggggatggcctgtgcctagagccgctcctggcgctcgcttccggtcacctgcacgggcaagcctgcgcctcggacggtgtggtcctgagggggcatcccctcggttcgccgctgctccacatgcaggcctgaggcagcgaaggggcttagccggaagaagaggaggcgcaagggtggtcttaggccgaggtggggcactcccaggtcctttccgcgagcagcagtctctcgctggagaggggttccctggccaattccaacggtag

SEQ ID NO: 226270 - DNA, 285 bp, synthetic construct
  misc_feature 1..285: note = Description of Artificial Sequence: Synthetic coding sequence
  source 1..285: mol_type = other DNA
atgtgtcagggaaactccaaaggcgaaaatgcagcgaattggctcacagcaaaatctggcagaaaaaagcggtgtccatatactaaacaccaaactctagagctggagaaggaatttcttttcaacatgtacctgaccagggagcggagacttgagatcagccggagtgtccacctgactgatcgtcaggtcaaaatctggttccaaaatagacggatgaagctgaagaagatgaaccgcgaaaaccggatcagggaattaacggcaaattttaatttttcttag

SEQ ID NO: 226271 - DNA, 942 bp, synthetic construct
  misc_feature 1..942: note = Description of Artificial Sequence: Synthetic coding sequence
  source 1..942: mol_type = other DNA
atggatttcgatgaaagagggccatgttcgagcaacatgtatctgccgagctgtacttattacgtgagtggccctgatttcagctcactgccttcctttctccctcagacaccttcctctcgaccaatgacctattcctactccagcaacctcccccaggtgcaacccgtgcgagaggtcacgttcagggaatatgcaatcgagccggcaactaaatggcaccccaggggcaacctcgcccattgttattctgcggaggaactggtacatcgtgactgcttgcaggctcccagcgccgctggtgtccctggagacgttctggccaagagctccgctaatgtgtatcatcaccccaccccggcagtatcctccaacttttactctacagtcgggagaaatggggtcttgccccaggcattcgaccaattttttgaaaccgcctacggcacaccagagaacctggcttcctctgactacccaggcgacaagtctgctgagaaggggcctccggctgccaccgcgacaagcgccgctgccgcagccgctgccacaggtgcgcctgccactagttccagtgacagcggtggtggcggtggctgtagagaaacagctgcggcagccgaagagaaagagaggcgccgtagaccagagtctagctcaagtcctgagagctcttccgggcacacggaggataaggccggaggatcctcaggacaacgaactaggaagaaacggtgtccgtataccaaatatcagatcagagaattagagagggagtttttcttctcagtgtatattaataaagagaagaggctgcagctgtctagaatgttaaacctgaccgatcgccaggtgaaaatctggtttcagaatcggagaatgaaggaaaagaaaatcaatcgcgatcgacttcagtattattcagctaaccccctgctctag

SEQ ID NO: 226272 - DNA, 918 bp, synthetic construct
  misc_feature 1..918: note = Description of Artificial Sequence: Synthetic coding sequence
  source 1..918: mol_type = other DNA
atggctagagaagacagtgtcaagtgtctgcggtgtttactgtacgccttgaacctgctgttctggctgatgtctatatcagtcctcgccgtctccgcttggatgagggactacctaaataatgtcttgacccttacagctgagacccgcgtggaagaagcagtcatcttgacctatttcccagtcgtccatccagttatgattgctgtctgctgcttcctcattatagtgggcatgttgggttactgtggaactgtaaagaggaatttgctcttactggcctggtattttggttccttgctcgtgatattctgcgtcgaactggcctgcggagtgtggacatacgagcaggagctaatggttcccgtgcagtggtcagacatggtaacactaaaggcgcgtatgacgaattacggcctccctagatacaggtggcttacccatgcgtggaatttcttccagcgcgagttcaagtgctgcggagtcgtgtactttaccgattggctggaaatgaccgagatggattggcctccagacagctgctgtgtccgagagttccctggttgtagcaagcaggcacaccaagaagatctttccgacctgtatcaagagggatgcggaaagaagatgtacagttttctccggggtacaaagcaacttcaggttcttcgattcctgggaattagcattggtgttacccaaatcctagccatgatactgacaataacactgctctgggcgctgtactacgaccgtcgcgagcccggaacagatcagatgatgagtttgaagaacgacaattcacagcacctcagctgtccgtccgtcgaactgctgaaaccctccttgagcaggatttttgagcacacatctatggcaaactcgtttaatacccactttgagatggaagagttatag

SEQ ID NO: 226273 - DNA, 489 bp, synthetic construct
  misc_feature 1..489: note = Description of Artificial Sequence: Synthetic coding sequence
  source 1..489: mol_type = other DNA
atggggctggagaccgagaaggctgacgtgcaattgtttatggatgacgacagttactctcatcattccggactggagtatgctgaccccgagaagttcgccgatagtgaccaggacagagatccgcataggctgaattctcacctgaaattggggttcgaggatgtgattgctgaacccgtaactacccattcgtttgacaaggtttggatatgtagccacgccttgttcgagataagcaagtatgtgatgtacaaatttctaaccgtctttttggctatcccgctggcctttatcgctggcattttatttgcaacactgagctgtttgcacatatggatcctgatgcctttcgtgaaaacgtgcctgatggtgctcccatctgttcagacaatctggaaaagtgtcacagatgtcatcatcgcccctttgtgtactagcgtggggaggtgtttcagcagcgtctcattgcagctctctcaggactag

SEQ ID NO: 226274 - DNA, 963 bp, synthetic construct
  misc_feature 1..963: note = Description of Artificial Sequence: Synthetic coding sequence
  source 1..963: mol_type = other DNA
atgactatgagctcattcctgataaactcaaactacatcgagcccaagttccccccattcgaggaatacgcgcagcatagcggttcaggtggcgcagatggcggacctggcggaggtccaggctaccaacagccccctgcacctccgactcagcaccttcctcttcagcaacctcagctgccacacgccggtgggggtagagagccaaccgcttcttattacgctcccaggactgctagggaacctgcttaccctgccgctgctctgtaccccgctcacggagcggctgacaccgcttacccctacgggtatcgaggtggcgcaagccccggaagaccccctcagcctgagcaacctcccgctcaagccaagggcccagcccatgggctgcacgcctcccatgtcctacaaccacagttaccaccccctttgcagcctagagccgttccgccagccgctcccaggagatgcgaagcagcccctgccacccccggtgtgcccgctggcggttcagcgcctgcgtgcccgctactgctggccgataagagcccacttggccttaagggtaaggagcccgttgtctacccatggatgaagaagattcacgtttccgccgtcaaccctagttataatggaggagagcccaaaaggtctaggaccgcttatacgaggcagcaggtgctcgaattggagaaggagttccatttcaatcgttatcttaccaggagaaggcgtattgaaattgcacacacactgtgtctgtctgagcggcaggtgaagatatggttccagaaccgaagaatgaaatggaagaaagaccacaagttgcctaacaccaagatgcggagcagcaattctgcctcagcctcagccggaccacctggaaaagcccagacacagtcaccacacctgcatccacatccccatccctcaacttcaacccccgtcccctcatctatctag

SEQ ID NO: 226275 - DNA, 963 bp, synthetic construct
  misc_feature 1..963: note = Description of Artificial Sequence: Synthetic coding sequence
  source 1..963: mol_type = other DNA
atgacaatgagctctttccttatcaattctaattatattgagcccaagtttcccccttttgaagagtatgcgcagcactctggtagcggaggggctgatggtgggccaggcggaggacctgggtaccagcagcctcctgcccctcctacccaacatctgccgttgcaacagccccagctgcctcacgcaggagggggacgcgagccaacggcttcttattatgctcctcggacggcgagagagcccgcatacccagccgctgcgctctaccccgctcatggcgcagcagatactgcctacccttatgggtatagaggaggagcctcccccggaaggccccctcagcccgagcaaccgcctgcgcaagccaagggcccagcccacggcttacatgctagtcatgtgctccagccacagttacctcccccacttcagcctcgcgcagtccccccagcagctccccgaagatgcgaagctgcgccagccaccccaggcgtccctgcgggtggatcagcaccagcatgcccactccttttggcagacaaatctcctttaggactaaaaggaaaagagcctgtggtttacccttggatgaagaagattcatgtaagtgccgtcaacccctcttataacggcggagagccaaagcggagtcgcaccgcgtacactaggcagcaggtcttagagcttgaaaaagagtttcatttcaaccgctatctcactaggagacgacggatagaaatcgcccacacactgtgcttgagtgaacgccaggtcaagatctggtttcagaacaggcggatgaaatggaagaaggaccataagctaccaaacaccaaaatgcgctccagtaattcggcttccgcatccgccggacccccaggaaaagctcagacacaatccccccatctccatccgcatcctcacccaagtacttcaactcctgtgccttcaagcatttag

SEQ ID NO: 226276 - DNA, 1140 bp, synthetic construct
  misc_feature 1..1140: note = Description of Artificial Sequence: Synthetic coding sequence
  source 1..1140: mol_type = other DNA
atgctgaaacggtgtgggaggcgcctccttctggctctcgccggtgctctcttggcttgtctgctcgttctgactgcagatcctcctccaccacccctgcccgctgagagaggaaggcgtgctctgagatcactggcaggcccagccggagctgctccggctcctggactgggggctgcagcagccgcaccaggtgctttagtgagagatgtgcattctctgagtgagtacttctccctcctcacccgggcacggagggatgccggaccccctcccggagctgcgccaaggccagccgatgggcaccccagacctctggcggagcccctggcccctagggacgtgttcattgcagtgaagaccactaagaagtttcatcgtgcacgcctcgatctccttcttgaaacatggatcagtagacacaaggagatgaccttcatcttcacggatggcgaggatgaagcattggctcggcatacaggcaatgttgtgatcacgaactgctcggctgctcattctcggcaggcattgagttgtaagatggccgtggaatatgacaggttcattgaatctggtaggaagtggttttgtcacgttgatgatgataattatgttaacctgagagctcttctcagactgctggctagttatccacacactcgggatgtgtacgtaggaaagccctcgcttgaccgcccaatccaggcgatggagcgagtttctgagaataaggtgagacctgttcatttctggtttgctacaggaggggctggcttttgcataagtagagggctagcactgaaaatgtctccctgggctagtggcggacacttcatgaacacggctgagcggatcagattacctgacgactgcaccatcggctacattgtggaagcactgctcggtgttccccttatacggtctggcctgtttcactcacacctcgaaaatctccagcaggtgccaactagcgaactacatgaacaagtaactctctcttacgggatgttcgaaaacaaacgaaacgcggtccatgtgaaaggccctttttccgtcgaggccgacccaagcagattcagaagcatccattgccatctctatcccgacaccccatggtgccctcggaccgctatcttctag

SEQ ID NO: 226277 - DNA, 813 bp, synthetic construct
  misc_feature 1..813: note = Description of Artificial Sequence: Synthetic coding sequence
  source 1..813: mol_type = other DNA
atgtccagttactttgtgaattcattttgcggccgttatccaaacgggccagattatcagctccacaactacggagaccattcctccgtgtccgaacagttcagagatagtgccagtatgcatagtgggaggtatgggtatggatataatggcatggacctcagcgtaggcagaagtggctccggacatttcgggtcgggtgaacgggctcggtcatatgcagcctcggcgtcagccgcaccagccgaacctcgctattctcagcccgctacctctacacacagtcctcaacctgaccccttgccctgttccgctgttgcgccaagtccagggagcgatagccatcatggcggtaagaactctctgtcaaacagttcaggtgcatcagcagatgccggaagtacccatatatcttcccgagaaggcgttggcacggcttccggtgctgaggaggatgcacccgcatcctccgaacaagctagtgcccaatctgagcctagccccgcaccccctgcacagccacagatttacccctggatgcgcaagttacatattagccatgataacatcggcggtccggaaggcaagagagctcgcacagcttacacccggtatcagacactggagctggagaaggagtttcatttcaatcgctacctcacaaggagaagacgcattgaaatagctcatgccttatgtctcagtgagcgacagatcaaaatttggtttcaaaacaggaggatgaagtggaagaaagacaacaagttgaaatccatgtccatggcagccgctgggggagcgtttcgtccttag

SEQ ID NO: 226278 - DNA, 693 bp, synthetic construct
  misc_feature 1..693: note = Description of Artificial Sequence: Synthetic coding sequence
  source 1..693: mol_type = other DNA
atgtcaagctcctattatgtgaacgccctgttctctaaatacacagctggagccagcctgttccagaatgctgagccgacttcatgctcattcgcaccaaattctcagaggtctggatacggggctggcgcaggagccttcgcttctacggtaccaggtctctataacgtgaattcgcccctgtaccagtctcccttcgcctccggttacggcctgggggctgatgcttacggcaatcttccttgcgcaagttacgaccagaatattcccggtctgtgtagcgatttggccaagggagcctgtgataagactgacgagggggctctgcatggtgcggcagaggccaattttcggatttatccatggatgagatcatcaggacccgatcgaaaaaggggcagacagacctatacgcggtaccaaacccttgagctagaaaaagagttccactttaatcgatatctgacccgccgtaggcggatcgagatcgcgcatgcactctgtctgacagagcgacagatcaagatctggttccagaaccgcagaatgaaatggaagaaggaacacaaagatgagggacccaccgccgcagcagcacccgagggggctgtgccctcagccgcagcaaccgcggcagcagacaaagccgacgaagaagatgacgacgaggaggaggaggacgaggaagaatag

SEQ ID NO: 226279 - DNA, 93 bp, synthetic construct
  misc_feature 1..93: note = Description of Artificial Sequence: Synthetic coding sequence
  source 1..93: mol_type = other DNA
atgagctccagttactacgtaaacgccttattttctaaatataccgcgggtgcctccctcttccagaacgctgaacctacatcttgctcctag

SEQ ID NO: 226280 - DNA, 792 bp, synthetic construct
  misc_feature 1..792: note = Description of Artificial Sequence: Synthetic coding sequence
  source 1..792: mol_type = other DNA
catcattggggaggcaactactacgttgactcatttcttctgggcgctgatgccgctgacgaactcagcgtgggaatgcgccgaggtccatggcctcccagacaagccgcaaccttggccgaacatcccgacttttccccgtgtagttttcaatcaaaagctacagtgtttggcgcaagctggaacccagtacatagagcccctaccttatatccggtgtaccatcaccaccaccatcacccctacgtacacccacaggcacctgttgcagccgcagctcccgacggtcgatatatgcgaagttggcttgagcctacccctggggctttgtccttcgcgggattgcctagctctcgcccttacggtattaaacccgagcccctgtccgctcgcaggggagattgcccgaccctcgacacccatactctgtctctgacagactatgcttgcgggagcccaccggtggatcgcgaaaagcagccctccgagggggctttctctgaaaacaatgcagaaaacgagtctggaggagacaagccccctattgaccctaacaatcccgcagccaactggctccatgctagaagtactcgtaaaaagcggtgcccatacactaagcatcagaccttggaactggagaaggaattcctgttcaacatgtatttgacccgcgacaggcgctatgaagtggcgcgactgcttaatctgacagaacggcaagttaagatctggtttcagaatagacggatgaagatgaagaaaatcaacaaagacagggctaaggatgagtag

SEQ ID NO: 226281 - DNA, 819 bp, synthetic construct
  misc_feature 1..819: note = Description of Artificial Sequence: Synthetic coding sequence
  source 1..819: mol_type = other DNA
atggcgacaactggcgctcttggaaattactacgtagacagcttcctgctcggagcagacgccgctgatgagttgagtgtggggaggtacgctcctggtactctgggacagcccccacgacaggccgctaccctggcggagcaccctgattttagcccctgctcgttccagtctaaagccacagtcttcggagcctcatggaaccctgtgcacgccgcaggggctaatgccgttcctgccgcagtgtatcaccaccaccaccatcatccttacgtgcaccctcaggccccagtagcggcagctgcccctgacggccgatacatgcgctcttggctggaaccaacacctggagctctgagctttgccggattgccctcttctcgaccatatggtattaaacctgaaccactgtctgcacggaggggtgattgtcccacgctcgacacccacacgctgagtttgaccgattacgcctgcggaagtcctcctgtggatcgggaaaaacagcctagcgaaggggctttttcggagaataatgccgaaaatgagtcaggcggagacaagcctccaattgatccaaataaccctgctgctaactggttgcacgctaggtcaactaggaagaaaagatgcccctatacgaagcatcaaacacttgaattggaaaaggagtttctgttcaatatgtacctgactagggaccggagatacgaagtggcacggctcctgaacttgaccgagcggcaggttaagatatggtttcaaaaccgacgtatgaaaatgaagaagataaataaggatcgagccaaggatgagtag

SEQ ID NO: 226282 - DNA, 591 bp, synthetic construct
  misc_feature 1..591: note = Description of Artificial Sequence: Synthetic coding sequence
  source 1..591: mol_type = other DNA
atggccggattcagtccctggcggcgtaggcagcgtcgtcggagacggagacggagagcccgacagagccgggcagcacccgaactcgtcggggatctgggtagtttcctgctcctggggtcaacattcctgagtaccgccagacattgcttcattacttcagtggagattgtgtccaggtatctgtgcgctcgtggcagcggtcgggcagggcatcatggcccaggacgtgcacgccctgccgtggccacttctgcttttccagcccaagagccacgtgtctttctccgatctgcactgcctgcgggacggttaagcccctcaacaacacacctacatcttgttaccgcagataacccggctgccaactggctgcacgcgaggagtacccgcaaaaaacggtgtccttatacaaagcatcagacactggagctggagaaggaatttctcttcaatatgtacctgacgcgggaccgacgatacgaggtcgccagattgctcaacctgacggagcgccaggttaaaatctggtttcagaaccgcaggatgaagatgaaaaaaatcaacaaggatagggccaaggatgaatag

SEQ ID NO: 226283 - DNA, 906 bp, synthetic construct
  misc_feature 1..906: note = Description of Artificial Sequence: Synthetic coding sequence
  source 1..906: mol_type = other DNA
atggattacaatcgcatgaattcatttctcgaataccccctctgcaaccgagggccatccgcctatagcgcacactctgcccctacttcttttcctccgtctagcgcacaagccgtggattcttacgcctccgaaggcagatacggaggtggactgtctagtccggcattccagcagaattccggatacccagctcagcagcctccctcaactctgggggtcccattccccagcagcgcacctagtggctatgccccagctgcctgttcaccgtcttatgggcctagccagtactaccccctcggccagagtgagggagatggaggctactttcatccctcctcttatggcgcacaactcggaggattgtctgacggctatggggcaggcggagcgggtcccggtccataccctccacaacaccctccatacggcaacgagcagactgcctcattcgcgcctgcctatgccgacttattgtcagaagacaaagagaccccctgcccctcagagcctaatacaccaacggcaagaacattcgactggatgaaagtcaaaagaaatcctcccaaaactgcgaaggtatcagagccaggccttggctctccatccggcctgaggaccaacttcaccacacgtcagctgacggagctcgagaaagaatttcactttaacaagtatctgagccgagcaagacgcgtagagatagctgccacactggagttaaacgagacacaggtgaagatctggttccagaaccggcgaatgaagcaaaaaaagagagaaagagaagaaggacgtgtccctccagctccaccagggtgtcccaaggaagctgcaggtgatgccagtgaccaatccacatgtactagccctgaagctagccctagttctgtaacatcctag

SEQ ID NO: 226284 - DNA, 855 bp, synthetic construct
  misc_feature 1..855: note = Description of Artificial Sequence: Synthetic coding sequence
  source 1..855: mol_type = other DNA
atggaacccggaaattacgccaccttggatggggctaaggatatcgagggccttctgggcgcaggtgggggtcggaacctagtagcacactcccctctgacatcccaccctgcggctcctaccctgatgcccgcagtgaactatgccccactggacctccccggatcagctgaaccacctaagcaatgtcacccttgccccggtgtgcctcagggaactagccctgcccctgtcccgtatggctactttggaggagggtactactcctgtcgcgtgtctagaagttcactgaagccatgcgcccaggccgcaacactcgcagcctatcccgctgaaacccctaccgccggtgaggaatatccgtccagaccaacggaatttgccttctaccctggctatcccggtacataccaaccaatggcctcatacttggacgtgagtgttgtgcagactttgggtgctcccggagaacccagacacgacagcctgctgcctgtggactcctaccagtcgtgggcactagccggtggttggaatagccagatgtgctgccagggggaacagaatccacccggtcccttctggaaggcggcatttgcggactccagtggccagcatcctcctgatgcgtgtgctttccgcagagggaggaaaaagcgaatcccctacagtaagggtcagctgcgtgagcttgagagagaatacgctgcgaacaaattcattacgaaagacaagcgcagaaaaatctcggccgctacctcactgtctgagcggcagattacaatctggtttcagaaccgccgagtgaaagagaagaaggttcttgctaaagttaaaaactctgcaactccctag

SEQ ID NO: 226285 - DNA, 531 bp, synthetic construct
  misc_feature 1..531: note = Description of Artificial Sequence: Synthetic coding sequence
  source 1..531: mol_type = other DNA
ccgagatgcccacctggccctcgtgtgccactcgacgagagggaggagatcagacaagagacgcagccaatcagacacgtgtcattttcaggacgactgaggcgttcgggaggagtcgggagccccgctgacggccttggcagacgtttggtagccgctggacaggcggctcacgggctgcaccaacacgcagccgctggcactggtgagttccattttaacaagtatctgtgtaggccaaggcgcgtggagatcgcagcccttctggatctcaccgaacgccaggtcaaagtctggtttcaaaatagaaggatgaaacacaagaggcaaacacagcatcgtgaacccccagacggcgaacctgcgtgtcccggagctctcgaggatatttgcgatcccgcagaggagcctgctgcatctcccggaggacctcttgccggaggcgtggggagcctgctttcgcccgctggaggtggagcgggtgggcttaaacgcggaccacccgctttctctaggtcactgagaggttag

SEQ ID NO: 226286 - DNA, 1071 bp, synthetic construct
  misc_feature 1..1071: note = Description of Artificial Sequence: Synthetic coding sequence
  source 1..1071: mol_type = other DNA
atgaacttcgagttcgagagggaaatcggattcatcaacagccagccgagcctcgccgagtgtctgactagtttccctgctgtgcttgagaccttccagacctctagcattaaggaaagcaccctgattcctccacctcccccttttgagcagacatttccctccctacagccgggagcctcaaccttgcagagacccagaagccagaagcgcgctgaagatggccctgctctgccaccccctccaccaccacctctccccgcagctccaccagccccagagtttccctggatgaaggaaaagaaaagcgccaaaaagccctcacaatccgccacttccccgtccccggcagctagcgccgttcccgcaagtggcgtgggcagtcctgctgatgggctgggactgcctgaggcaggagggggtggcgctcgcaggcttaggaccgcttataccaatactcagttactggagttggagaaagaattccatttcaataagtatctatgccgaccacggagagtggaaatagccgctctactggatctcaccgagcggcaggtgaaagtgtggtttcaaaaccggagaatgaagcacaaacggcagacccaacacagggagcctcctgacggagaacccgcttgcccaggtgccctcgaagacatctgcgacccggcagaggaacccgctgcctccccaggtgggccttcagcaagccgagcggcttgggaagcttgctgccaccccccagaggtagtgcccggagccttgagtgcagacccccgtcctctggctgtgagactcgagggggctggagccagctctcctggctgcgccctgagaggagccggtggactggaacccggacccttgccagaggacgtttttagcggtcgacaggactcgccatttctccctgacctgaacttcttcgccgctgattcttgtctccagttgtccggtgggctttcaccatctttacagggctctctggacagcccagtgcccttctcagaggaagagcttgatttcttcacatctacgctgtgtgccatcgatctgcagttcccctag

SEQ ID NO: 226287 - DNA, 1296 bp, synthetic construct
  misc_feature 1..1296: note = Description of Artificial Sequence: Synthetic coding sequence
  source 1..1296: mol_type = other DNA
atgcagaaggcgacatactatgataatgcagctgcggcattgtttggaggatactcatcatatcccggatccaatgggtttgggtttgacgtgccacctcagccaccattccaggctgctacccacctcgagggcgactatcagagaagcgcttgtagtctccagtccctgggcaacgctgctccccatgctaagtcgaaggagctgaatggttcatgtatgaggccaggactcgcccctgaaccgttaagtgcaccacccggaagcccccctccttctgcagctccaacgagcgcaaccagcaatagtagcaacggaggcggtccatctaagtccggacctcctaagtgcggacccggaaccaattcaaccctgaccaaacaaatcttcccttggatgaaagagagcagacagacttccaaactgaagaacaacagcccaggaacagccgagggctgtggtggtggtggagggggaggtggaggcggaggctccggtggctcaggagggggaggagggggtgggggaggcggtgacaaatctcccccaggatccgctgcctccaaacgagctaggaccgcctatacttccgcccaacttgtggaactcgagaaggagttccacttcaacagatatctctgtaggcctcggcgagtggagatggctaacctcctaaatctatccgaacggcaaatcaaaatttggtttcagaaccgcaggatgaaatataagaaggatcaaaaagctaaagggctggcttcttcaagcggcggaccgagtccagctggatcccccccacagcccatgcagtctaccgccggatttatgaatgctcttcacagcatgacaccctcgtacgaatccccctctccaccggctttcggaaaagcccaccagaacgcttatgctctgccaagcaattatcaaccccctcttaaaggctgtggggctccgcagaagtacccaccaacgcccgctcccgagtacgagcctcatgtgctgcaggcgaacgggggtgcttatgggacccctaccatgcagggatcaccagtgtacgtgggtgggggtgggtatgccgaccctctacccccaccagcaggtccatccttgtatggcctgaaccacctgtcgcatcatccaagcgggaatctggactacaacggcgctccccctatggcaccctcgcagcatcacggcccttgtgagccacatcctacttataccgatctcagtagtcaccacgctccacctccacagggcaggatccaggaagctccaaagctgacccacctgtag

SEQ ID NO: 226288 - DNA, 900 bp, synthetic construct
  misc_feature 1..900: note = Description of Artificial Sequence: Synthetic coding sequence
  source 1..900: mol_type = other DNA
atgaaagaaagccgacagacaagcaagctgaagaacaatagtcctggtacggcagaggggtgcggaggcggaggcggtgggggaggcggtgggggatcagggggatctggcggtgggggaggcggtggagggggtggggacaaatcgcctcccggaagtgccgcaagcaaacgtgctcggaccgcttataccagcgcccaactcgtggaattggaaaaggaattccatttcaatcggtacctgtgccgtcctcgtagagtcgagatggctaatctgttaaatttatctgagagacaaatcaaaatttggtttcagaataggaggatgaagtataagaaggaccagaaagcaaaaggtctggcctcatccagtggcggtccctcccccgctggctcgccaccccagccaatgcaatccacggccggttttatgaatgcactgcattcaatgaccccttcatacgagtctccgtcgccccctgcttttggcaaagcacaccagaacgcctacgcccttccttccaactaccagccacccttgaagggctgcggtgcccctcagaagtacccccctacgccagcacctgaatacgaaccccatgtgcttcaggccaatggcggagcatacgggaccccaacgatgcaggggtcccctgtctacgtgggcggtggaggttacgccgatccactccctccacctgctgggccatcactttatggcctcaatcacctgtctcatcatccttccggaaatttggattataatggagcacccccaatggctccctcccagcaccatggtccatgtgagcctcaccccacatataccgatctttcatctcatcatgcaccccctccacaggggagaattcaagaggctcccaagctaacccatctttag

SEQ ID NO: 226289 - DNA, 1296 bp, synthetic construct
  misc_feature 1..1296: note = Description of Artificial Sequence: Synthetic coding sequence
  source 1..1296: mol_type = other DNA
atgcagaaggctacttattatgacaatgctgctgccgcattattcggaggctactcaagctacccaggcagtaacggtttcggcttcgatgtcccacctcagcccccattccaggcggcaacccatctggagggcgactatcagcggtcggcctgttcactgcaatctctcggtaacgctgcaccccatgccaaatccaaagaactgaatgggtcgtgcatgcgccctggcctggcccctgaacctcttagcgcccctccaggatctccacccccaagcgcagcccctactagtgctacatctaattcctctaacggcggaggtccttccaagtccggcccaccaaaatgtggcccaggcaccaatagcactctgaccaagcagattttcccttggatgaaggagtctagacaaacatctaagctgaaaaacaattcacctggaaccgccgaaggctgcggcggtggagggggtggcggagggggaggtggcagcgggggatccggcggaggaggtggaggaggtggtggaggggataaatcccctccaggtagcgctgcctccaaacgggctcggaccgcttacacgagtgcccaattggtggaattggagaaggaattccacttcaatagatacctctgccggccacgtagggtcgaaatggccaatctgctgaatctgtctgaacgtcagatcaaaatctggtttcagaacaggagaatgaagtacaaaaaagatcagaaggcaaaagggctggccagctcctcaggcggaccctcacccgctggctcccctccgcagcccatgcagtccacagccggtttcatgaacgcactccactccatgacgcctagctacgaaagtccaagtcctcccgcatttgggaaagcccaccagaacgcatacgctcttccatctaattaccagcctccgctgaaggggtgcggcgcaccccagaagtatccgcctactcctgccccagaatacgaacctcatgtgctccaagccaatgggggtgcttacggcacaccgactatgcagggctctcctgtctacgtgggcggaggcggatatgccgatccacttcctccccctgccggaccctctctctacggacttaatcacctgagtcaccacccctctggcaacctcgattacaatggggctcccccaatggcgccatcccagcaccacggaccctgtgagcctcacccaacgtataccgacctctccagccatcacgccccacctcctcagggcaggatccaggaagcgccaaagttaacccacttgtag

SEQ ID NO: 226290 - DNA, 1077 bp, synthetic construct
  misc_feature 1..1077: note = Description of Artificial Sequence: Synthetic coding sequence
  source 1..1077: mol_type = other DNA
atgagaccaggacttgcgcctgagcccctttccgccccacctggaagcccacccccatcagcggcaccgacgtctgccacaagcaattcttccaacgggggaggcccttccaagtccggcccacccaaatgtgggcctggtacaaacagcacgctaacaaaacaaatcttcccctggatgaaggaatctcgtcagacatccaagctcaaaaataacagccccggaacggccgaaggctgtggcggtggcggtggcggtgggggagggggtgggagtggcggaagcggcggaggagggggtggcggaggcggaggggacaagagccctccaggttccgcagcaagcaagcgtgcacgcacagcctacacatctgcgcagctggtggagttagaaaaagagtttcatttcaataggtatctgtgtaggcctaggagagtcgagatggccaaccttctgaacctgtcagaacgacagattaaaatatggttccaaaacagaaggatgaaatataagaaggaccaaaaagcaaaaggcttggcgtctagcagtggcggacctagcccagccggtagcccgccacaacccatgcaaagtacagcagggtttatgaacgcccttcattctatgacacctagttatgaatctccgtctcccccagcattcgggaaagcgcaccagaacgcctacgccttaccatccaactatcaaccaccactgaaagggtgcggggcaccacagaagtacccacccacaccggctccagagtatgaacctcacgtgctgcaggcaaatggtggggcttacggtacacctaccatgcagggctcccccgtctacgtgggaggcggtgggtacgcagacccattgccgcctccggcagggccaagtctgtatggcctcaaccacctcagtcaccaccctagcggcaatctggattataatggagcccctccaatggcgcctagtcaacaccatggaccctgcgagccacatccaacttacacggatctgagtagccaccacgccccaccacctcaagggaggatacaggaggcacctaagctcacacacctgtag

SEQ ID NO: 226291 - DNA, 1296 bp, synthetic construct
  misc_feature 1..1296: note = Description of Artificial Sequence: Synthetic coding sequence
  source 1..1296: mol_type = other DNA
atgcaaaaagccacatactacgacaacgccgcagctgccctttttgggggttactcgagctaccctgggtcaaatggctttggctttgatgttcctccccagccaccctttcaggcggcaactcacctagagggcgattatcaaaggtccgcgtgctcgcttcagtcgctagggaatgccgctccacatgctaaatcaaaagagttgaacgggagctgtatgcgaccagggctagccccagagcccctgtcagctccacccggaagccctcccccttccgccgctcctacttccgcgacctccaatagcagcaacgggggtggaccatctaaatccggccctccaaagtgtggcccagggaccaattctacgctgacaaaacaaatatttccctggatgaaagaaagccgacagaccagcaagctcaaaaacaactcccccggaaccgctgaggggtgtggcggtggcggaggcggaggaggcggaggcggaagcggcggaagtggcggtggaggagggggtggtggaggaggggacaaatctcctccgggttcggcagctagcaagagggccaggacagcctatacctcagcccagctcgtggagctggagaaggaatttcactttaatcggtacctatgtaggcctagacgtgtggaaatggccaacctcctgaacctgtcagaacggcagattaaaatctggtttcagaatcggcgtatgaagtataaaaaagaccaaaaggcgaaggggctcgcatctagtagcggcggaccctccccagctggttcaccaccccagcctatgcagtccaccgctggtttcatgaatgcattgcattcgatgactccctcatacgagtccccctctccccctgctttcggtaaggcacaccagaacgcctatgctttgcctagcaattatcaaccccctctgaaaggctgcggggctccccagaaataccccccaacacctgcaccagagtacgaaccccatgtcctgcaagctaatgggggagcgtacggaacacctactatgcaaggctccccagtctacgtcggcggaggaggttatgccgatcctcttcccccacctgcagggcctagtttatatggattaaatcacttatcccatcacccgtcggggaatctagattacaatggcgctccacccatggccccatctcagcaccacggcccttgcgagccgcatcccacctacaccgacttgtcctctcaccatgctcctccccctcagggacggatacaggaggcgcctaaactcacacatctgtag

SEQ ID NO: 226292 - DNA, 900 bp, synthetic construct
  misc_feature 1..900: note = Description of Artificial Sequence: Synthetic coding sequence
  source 1..900: mol_type = other DNA
atgaaggaaagtcgacagacgagcaaactgaaaaacaattcacctggaaccgctgagggctgcggcggtggcggaggaggaggcggaggcggaggctctggcggaagtgggggaggtgggggaggcggaggcggtggcgacaagagtccccctggatccgcagctagcaaacgtgccagaacagcttacactagcgcacagctggtggagctggaaaaagagtttcattttaaccgttacctgtgcagacctcggagagtggagatggctaacctactaaacctgtcagagagacagatcaagatttggttccaaaacaggcgcatgaagtataaaaaggaccagaaagctaagggcctcgcatccagctcagggggaccatctccagccggttcaccgccacagcctatgcaaagtacagccggattcatgaacgccctccactcaatgacgccctcatacgaatcccctagtcccccagcttttggcaaggcacatcagaatgcctatgctcttccttcaaattatcaacctccactcaaggggtgcggcgcaccccaaaaatatcctcctactcctgctcctgagtacgaaccgcacgtcttgcaggcaaatggcggagcttatgggacacctaccatgcagggcagccctgtctacgtcggaggtggcggttacgccgatcctcttccaccaccagcgggaccctctctatacggtctcaatcatctgagtcaccatccctcaggtaatcttgactacaatggggctccaccaatggccccttcacagcaccacggcccatgcgaaccgcacccaacttacacagatttatcttcccaccacgctcctccacctcagggacgcattcaagaggccccaaagctcacgcatctgtag

SEQ ID NO: 226293 - DNA, 1077 bp, synthetic construct
  misc_feature 1..1077: note = Description of Artificial Sequence: Synthetic coding sequence
  source 1..1077: mol_type = other DNA
atgaggcctgggctggcgcctgagccactcagtgctccccctggctcacctcctcccagcgccgcacctacttccgccacttctaactcaagcaacggaggtgggccttccaagtcagggcctcctaaatgtgggcctggaactaattctacactcacaaaacagattttcccatggatgaaggagtctcggcagaccagcaagcttaaaaacaattcacctggcacagccgaggggtgcggaggcggaggcggagggggagggggaggaggcagcggcggatctggaggtggtgggggaggaggcggtggcggtgacaaatctccacccggatccgccgcatctaaacgggcacgaaccgcctacaccagtgcacagctggttgaactggagaaggaattccacttcaaccgctatctttgcaggccgaggcgagtggaaatggccaatctcttgaatctgtcagaaaggcaaattaagatctggttccagaataggcgtatgaaatacaaaaaagatcagaaagctaaagggcttgcctcatcatccggtggaccaagtcctgccggaagtccccctcagcctatgcagagcaccgcaggcttcatgaacgcactccattccatgactccttcctacgaaagtccctccccaccagctttcggaaaggcccaccagaacgcttatgccttacccagcaactaccaaccacccctaaagggctgcggggctcctcaaaagtatcccccaacgcctgctcctgaatatgagcctcacgtactccaggctaacggaggtgcctatgggactcctaccatgcagggaagcccagtgtatgtggggggagggggatacgccgatcccctgcctccacctgctgggccatcactgtatggtctgaatcatttgtcgcatcacccttctgggaacctggattacaacggagccccaccgatggccccttcccaacaccacggtccatgcgaaccgcacccaacatatacagacctgtcctcccatcatgctccaccacctcagggacgtatacaggaagcccctaagctcacccatctgtag

SEQ ID NO: 226294 - DNA, 1296 bp, synthetic construct
  misc_feature 1..1296: note = Description of Artificial Sequence: Synthetic coding sequence
  source 1..1296: mol_type = other DNA
atgcaaaaggccacttattacgacaatgccgcagcagcgctgtttgggggatatagctcgtatccaggtagcaacggattcggatttgatgttccccctcaaccgccttttcaggcggcaacacatctcgagggagactaccagcgcagtgcatgcagccttcagagtcttggtaatgcagcgccacacgccaagtctaaagagctaaatgggtcatgcatgaggccaggtttggccccagagccactttctgcaccgcctggctccccccctcccagcgcagccccaaccagtgccacatccaatagcagtaatggtggcggaccatcaaaaagtggcccacctaagtgcggccctggcacgaactctacactgacaaaacaaatttttccttggatgaaagaaagtagacagaccagtaaacttaagaataacagtcccggaactgccgagggatgcggcggaggagggggagggggtggaggaggaggcagcgggggtagtggcggtggaggaggtggcggaggtggaggcgataaaagtcctccgggaagcgcagcctcaaaacgagcccgtaccgcctacacctctgcccaattagtggaactggagaaggagttccacttcaatcgctatctgtgcaggccgaggcgagtggagatggccaacttgctgaacctttctgagcggcagatcaagatttggtttcagaatagaagaatgaagtataaaaaggatcagaaggcaaaagggctggccagttcgagtggcggtccatcacctgcagggagccctccacagcctatgcagtccactgccggttttatgaacgctctgcactctatgactccttcctatgaaagccccagccctcccgcattcggcaaagcccaccagaacgcatacgccctcccgtccaattaccagccaccacttaagggctgcggcgcaccccagaaatatccacccactccagcccctgaatatgagccccatgtgctgcaggccaacggtggagcgtacggcacccccacgatgcaggggtcaccggtgtacgtagggggtggcggttacgctgatcccctccctccccctgctggaccgagcttatacggactcaatcacctctcccatcaccctagtggcaacctcgactacaatggcgcaccacctatggccccttcacagcaccatggaccctgtgagccacatcccacctacacagacctgagctcccaccatgcacctcccccacaggggagaatccaagaagcgcctaaattgacacacttatag

SEQ ID NO: 226295 - DNA, 756 bp, synthetic construct
  misc_feature 1..756: note = Description of Artificial Sequence: Synthetic coding sequence
  source 1..756: mol_type = other DNA
atggccatgtccagcttcttaatcaactcaaattatgtcgatccgaagtttccaccttgcgaggagtattcccaatcggactatctgcccagcgaccatagccctgggtactatgccggaggtcagaggcgggagtcatccttccaacccgaggccggattcggaagacgcgctgcctgtaccgtgcagcgatatgccgcttgccgagacccaggtccaccgccacctccccctcctcctcctccacctcccccaccacccggactgtctcccagggcccctgcccctccacctgccggagcccttcttcctgaaccaggacagcgctgcgaagcggtatccagcagtccacctccacccccttgtgcacaaaatcccctccacccaagtcccagtcactctgcatgtaaggaacccgtggtgtacccttggatgcgaaaagtgcacgtgtctacagtcaaccctaattatgctgggggagagccaaaaagatcaaggaccgcatacactagacaacaggttctcgaactggaaaaggaatttcattacaaccgctatctgacccgtagacggagggtggagatcgctcacgctctatgcctgtcagaaagacagataaaaatttggtttcagaatcggaggatgaagtggaaaaaggatcacaagttacccaacacgaaaatccgttctggaggagccgcagggtccgcgggtggacccccaggtcgcccaaacggtgggccacgcgcactctag

SEQ ID NO: 226296 - DNA, 810 bp, synthetic construct
  misc_feature 1..810: note = Description of Artificial Sequence: Synthetic coding sequence
  source 1..810: mol_type = other DNA
atgtcaagttatttcgttaacagcttttcagggcgttatcctaacggccctgattaccagcttctgaattatggctccggttcgagtctatccggcagttatcgcgatccggctgccatgcacactggcagttatggatataattataatggcatggacctgagcgtgaatagaagctcggcttcctcttctcacttcggcgcagttggagaaagctcaagggcctttcccgctcctgcccaagaacccagattccgacaggccgctagctcttgctctttaagctctccagaatccttgccatgtactaacggggacagtcacggggcaaagccctctgcttcctccccttctgaccaggcaacctccgcctcttcttcggctaacttcactgagatcgatgaagcaagtgcatcctccgagcccgaagaggccgcaagccagttgagctctccaagtttggccagagcacagcctgagcctatggcaacatctaccgcggctcctgaaggccagactccacagatctttccatggatgagaaagttgcatataagccacgatatgacaggtcccgacggcaaacgagccagaacagcctacacgcggtatcaaacactcgaactagaaaaggaatttcattttaatcggtacctgacccgacgcaggcgcattgagatcgcccacgctctttgcctttcagagcggcaaattaagatctggttccaaaatcgacggatgaaatggaagaaagacaacaagcttaagagtatgagtctcgcaactgcgggaagcgccttccagccttag

SEQ ID NO: 226297 - DNA, 1179 bp, synthetic construct
  misc_feature 1..1179: note = Description of Artificial Sequence: Synthetic coding sequence
  source 1..1179: mol_type = other DNA
atggccgctcttcgccagcctcaggtagccgaattgctcgctgaagcacgacgggctttccgcgaagagttcggcgctgaacccgaacttgccgtgagcgctcccggtagggtgaacctgatcggtgagcataccgattataaccagggactggtccttccaatggctctggagcttatgaccgttctcgtcggctcaccccgaaaggatggactggtgagcctgcttacaacaagtgaaggggctgacgaacctcaacgccttcagtttcccctgccgacagcacagcgatctttggagccgggaacaccgcgttgggccaattacgtcaaaggtgttatccagtattatcccgctgcacctctaccaggtttctctgccgtggtggtatctagtgtccctctgggcggtgggctgtcctcctctgctagcctcgaggtcgcaacatatacatttttgcaacagctgtgccctgactccgggacaatcgctgcacgcgcacaggtctgccagcaggctgagcattccttcgccggaatgccctgcggtatcatggatcagtttatatccctcatggggcagaaaggccacgctctactgattgactgccggagcctcgagacctctcttgtgcctttatcagatcctaagctggcagtcctcatcacaaatagcaatgttaggcacagcctggcctcctctgagtatccagtacggaggaggcagtgtgaggaggttgctcgagcgctgggcaaggagagcctgcgcgaagtgcagctggaggaactcgaggctgcacgtgatttggtgtcaaaggagggcttcaggcgggctagacacgtcgtaggcgaaattcggaggacagctcaggccgctgcggctttgcggaggggagattaccgagcatttggcagactcatggtcgaatcccatagatctctaagggacgactacgaggtttcatgtcccgagcttgaccagcttgtcgaggctgctctcgccgttcctggggtgtacggcagtcgtatgaccggaggcggtttcggcggatgtaccgtgacattactcgaagccagcgctgcccctcacgcgatgcggcacattcaggagcattatggaggtaccgcaactttttaccttagccaggcagctgacggtgccaaggtgctgtgtttatag

SEQ ID NO: 226298 - DNA, 675 bp, synthetic construct
  misc_feature 1..675: note = Description of Artificial Sequence: Synthetic coding sequence
  source 1..675: mol_type = other DNA
atgagtagctactttgtcaattcaacattcccagtgactctcgcctccggtcaggagtcctttctggggcagctcccactgtatagctctggatatgctgaccccctgagacattacccagctccctatggcccaggcccaggccaagacaaaggcttcgccacttcaagctactaccctccagctgggggaggctatggaagagcggctccatgtgactacggcccagccccagcattttatagagagaaagagagtgcttgcgctctgtccggcgctgacgagcaaccgccttttcatcccgaacctcgcaagtctgattgcgcacaagacaagagcgtctttggcgagacagaggagcagaagtgtagtacccctgtgtacccatggatgcagcgcatgaactcctgcaattcctcgtcttttggcccatctggacgcagaggccgtcagacctatacaaggtaccaaacactcgagctcgagaaggagttccattacaaccgttacctgaccaggcgcaggagaattgaaattgctcatgcactctgcctcacagaaagacagataaagatctggttccagaaccgtcggatgaagtggaagaaggaaagcaaactgctctccgccagccaactgtccgctgaagaggaagaagaaaagcaggccgagtag

SEQ ID NO: 226299 - DNA, 654 bp, synthetic construct
  misc_feature 1..654: note = Description of Artificial Sequence: Synthetic coding sequence
  source 1..654: mol_type = other DNA
atgagctccctctactacgccaacaccttgttttcaaagtatcccgcaagcagctcggtgtttgctacgggcgctttcccagagcagacctcctgcgcctttgcctccaacccacaacgtccagggtacggggcaggctccggcgctagctttgctgcctccatgcagggactgtaccccggaggcggaggcatggccggtcagtccgcagccggtgtctacgccgctggctacgggctcgagcctagctcttttaacatgcattgtgccccttttgaacagaatcttagcggagtgtgtccaggggacagtgcaaaggcagcaggagccaaggagcagagggactccgacctcgcagctgagtccaatttcaggatatacccttggatgcgtagctctggcaccgatcgcaaaaggggccgtcaaacgtacactaggtatcagaccctcgagctcgaaaaagaattccactataatcggtatcttactagacggagacggattgaaatcgcccataccctttgtctgacagaaagacaaattaagatttggttccagaatcggagaatgaaatggaagaaggaaaacaagacagctgggcctggcaccaccggacaggatcgggctgaagctgaagaagaggaagaagaatag

SEQ ID NO: 226300 - DNA, 87 bp, synthetic construct
  misc_feature 1..87: note = Description of Artificial Sequence: Synthetic coding sequence
  source 1..87: mol_type = other DNA
atgaagtggaagaaggaaaacaaaacagccggaccaggcactaccggccaagacagggccgaagccgaggaagaagaggaagagtag

SEQ ID NO: 226301 - DNA, 732 bp, synthetic construct
  misc_feature 1..732: note = Description of Artificial Sequence: Synthetic coding sequence
  source 1..732: mol_type = other DNA
atgtcgtcctatttcgtaaattccctgtttagcaaatacaagaccggggagtcactcagacctaattattacgattgcggattcgcccaggacttgggaggacggcctacagtggtatatggcccttccagcggtggatcattccagcatcccagtcaaatacaggagttttaccatggacccagtagcttgtccaccgctccttatcagcagaatccctgtgcagtggcttgtcatggggatcccggaaacttttacggatacgatccgcttcaaagacagagtttgtttggcgctcaggatcccgatctggttcagtatgctgattgcaaactggccgctgcctctggtttgggtgaggaggctgaaggctccgaacagagccctagcccaactcagctatttccatggatgcgcccacaagctgcggcaggtcgcagaaggggaagacagacttatagccggtatcaaactctcgagctcgagaaagaatttctgtttaatccgtatttgacccgtaagcgacgcatcgaagtgagccatgcgcttggcctcaccgagcgacaagtgaaaatatggtttcagaatagacgcatgaagtggaagaaggaaaacaacaaggataagttccctagctccaagtgcgagcaggaggaacttgagaaacagaaacttgagagagcgcctgaagccgcagatgagggcgacgcccagaaaggggacaaaaagtag

SEQ ID NO: 226302 - DNA, 753 bp, synthetic construct
  misc_feature 1..753: note = Description of Artificial Sequence: Synthetic coding sequence
  source 1..753: mol_type = other DNA
atgagtatcagcggcactctctcaagctactatgtggacagtatcatttctcacgagtcggaggatgctccgcctgctaagttccctagcggccagtatgccagcagtagacagcctggccacgccgagcatctcgaattcccttcttgcagtttccagcccaaagcccctgtcttcggtgctagctgggcccctcttagtcctcacgcctcaggctctctgccatctgtctaccatccatatattcagccgcaaggggtgcctcctgctgagtccagatacctgcgcacctggctggaaccagcccctagaggtgaggctgctcctggccaggggcaggccgctgtaaaggccgagccactcctgggcgcaccaggcgagctgttgaaacagggcactcctgagtatagcctcgagacctctgccggtcgagaggccgtgttatctaaccaacgtcccggttacggagacaataagatctgcgaggggagcgaggacaaagagcggccagaccaaactaatccgagtgcgaactggcttcatgccagaagcagtagaaagaagagatgcccttacacaaagtaccagaccctcgaactcgagaaagagtttttatttaacatgtacctcacccgggataggagacacgaggtggccagattgttaaacctctccgagcgccaggtcaaaatctggttccagaatcgacggatgaagatgaagaaaatgaataaagaacagggtaaggagtag

SEQ ID NO: 226303 - DNA, 387 bp, synthetic construct
  misc_feature 1..387: note = Description of Artificial Sequence: Synthetic coding sequence
  source 1..387: mol_type = other DNA
atgtcgatttctgggactctgagctcatactacgttgattccatcatttcacacgaaagcgaggatgccccacctgctaagtttcctagtggccaatatgctagcagtagacagcctggtcacgctgagcatctggaattcccatcatgctcatttcaaccgaaggcccctgttttcggagctagctgggcaccgttgagcccccacgcatctgggtcactgccatccgtgtatcacccctacatacagccccaaggtgttccgccagcagagtcacgctacctaaggacctggttggagccagccccacgagggggagctgcgcagacaggtcatgccagagtgcagtttggtaatttcggaggacagggaggacgcgctgtatag

SEQ ID NO: 226304 - DNA, 1029 bp, synthetic construct
  misc_feature 1..1029: note = Description of Artificial Sequence: Synthetic coding sequence
  source 1..1029: mol_type = other DNA
atgacctgtccacgcaacgttacacccaactcctatgccgagccactggctgcacctggcggtggcgagcgctattctcggagtgcaggcatgtacatgcagtcaggatcagatttcaactgcggtgttatgcgcggatgcggtctcgctccatctctctcgaagagggatgaaggaagctcccccagcctggccctgaacacttatcctagttacctctcccaattagatagctggggagacccaaaagccgcttaccgtctggagcagccagttggccgacccctgtcctcttgtagctatcccccttctgtgaaggaggaaaatgtctgctgtatgtatagcgctgaaaaacgtgccaagtcagggccagaagccgctctgtactcacaccctctcccagagtcatgtttgggcgagcatgaagtgccagtaccatcctactaccgcgctagcccaagttacagtgccctggacaagaccccacactgcagcggagctaacgattttgaagcccctttcgaacaaagggcgagtctgaaccctagagctgaacacctcgagtcgccacagctggggggaaaggtgtccttcccagagacccccaagtccgacagccagacaccgtcccctaacgagattaaaacagagcagagcctggctgggccaaaaggatcccctagcgagtccgagaaagaacgggctaaagccgcagacagctcaccagacacttcagataatgaagccaaggaggagattaaagcggagaacacaaccggcaattggcttacagctaagagtgggcgaaagaagaggtgcccatataccaaacaccagaccctggagcttgagaaggagttcttgttcaatatgtacttgacgcgggaaagaagacttgagatttctaagacgattaatctgaccgatagacaagtcaaaatctggttccagaatcggaggatgaagctcaaaaaaatgaatcgcgagaacagaattagagaactgactagcaactttaattttacatag

SEQ ID NO: 226305 - DNA, 915 bp, synthetic construct
  misc_feature 1..915: note = Description of Artificial Sequence: Synthetic coding sequence
  source 1..915: mol_type = other DNA
atgtttaattctgttaacttgggtaacttctgtagcccctcgcgcaaagagagaggcgctgacttcggggagcgagggtcctgtgcatctaacttgtacctgccatcttgcacctactacatgcccgaattcagcacagttagcagctttttgccgcaggcaccctctaggcagatctcttacccctatagcgcccaggttcctccggtgagggaggtcagctacgggcttgagccaagtgggaagtggcatcacagaaattcgtactctagttgttatgctgccgcagacgaactgatgcaccgcgaatgcctgcctccttccactgtgaccgagatccttatgaaaaatgaggggtcctatgggggacaccatcaccctagcgcaccacacgctacccctgccggattctatagcagtgttaataagaactcagtactgccacaggctttcgataggttttttgataatgcttattgtgggggaggtgacccgcctgcggaaccaccatgctccgggaagggtgaggctaaaggcgaaccagaggctccccctgccagcgggctcgcatcccgggcagaggcgggagcggaggcggaagcagaagaagagaatactaacccatcatcatctggcagtgcacatagcgtcgccaaggaacctgccaaaggggctgcgcctaacgctccacgcacacgtaaaaagcgctgcccttactccaaattccagattcgcgagttggagcgggagttcttctttaacgtgtacatcaataaggagaaaaggttgcagctaagccgcatgctcaatttaactgaccgtcaagttaagatatggttccagaatcgccgtatgaaagagaagaaactcagtcgggataggctgcagtatttctctgggaatcccctgctctag

SEQ ID NO: 226306 - DNA, 849 bp, synthetic construct
  misc_feature 1..849: note = Description of Artificial Sequence: Synthetic coding sequence
  source 1..849: mol_type = other DNA
atgggggaacacaacttgcttaatccaggctttgtggggcctctcgtaaatattcatacaggagatacgttttacttccccaatttcagggcatctggcgcacaactgcccggattgcctagtctgtcctatccccgtcgggataacgtttgttcactgagttggccgagcgctgagccttgcaatggttacccccagccatatctcggatctcctgtgtctctgaatccacctttcgggcgaacctgcgaacttgcacgagtggaagacgggaaaggctattacagagaaccttgtgctgaggggggagggggtggtctgaagcgagaggagcggggtagggatcctggggctggcccaggcgctgctctgttgcctctggagccgtccgggccacctgctctggggtttaagtacgattacgctgctggagggggaggaggtgacgggggtggaggggctgggcctccccacgatccacccagctgccaaagcctcgaatcagattcctcatcctctctgctgaacgaaggcaacaagggagccggagctggggacccaggttcactggtgagtccactgaatcccggaggagggctgtctgcgagcggcgctccatggtatcctatcaacagcagaagtcggaagaagaggaagccttattctaaactccaactagccgagctcgaaggcgagttcctggtgaacgagtttattaccaggcagcggaggcgggaactctcagatagattaaatttatcagaccaacaagttaaaatctggttccagaataggaggatgaagaaaaagcgcttgttgctcagagaacaagccctgtccttcttttag

SEQ ID NO: 226307 - DNA, 993 bp, synthetic construct
  misc_feature 1..993: note = Description of Artificial Sequence: Synthetic coding sequence
  source 1..993: mol_type = other DNA
atgacaaccagtctgctactacacccacgctggcccgagagtctgatgtacgtgtacgaagattctgcagctgagtccgggatcgggggtggcggagggggaggaggcggaggcaccggcggagcgggaggcggatgcagtggtgcatcaccgggaaaagctccatcgatggacgggttggggtcatcatgtcctgcctcccactgcagggatttactcccgcatccagtgttggggcgacccccagcccctcttggcgctccacagggcgctgtctatacggacatcccagccccagaagctgcgcgacagtgtgccccaccccctgctcctcccacctcctccagtgccacgctgggttacgggtacccttttggcggatcctactacgggtgccggcttagccataatgtgaacttgcagcagaaaccctgcgcctaccaccctggggacaaatatccggagccttccggtgccctcccgggagatgacctctcttccagagccaaggaattcgccttttacccatcatttgcctcttcgtatcaagcgatgccgggatatctagacgtaagcgtggtgccgggaattagcggacaccctgaaccaagacacgacgcccttatccccgtcgaaggctatcagcactgggcactgagcaatggttgggactctcaagtttactgctctaaggagcagtcccagagcgctcatctgtggaagtccccctttcctgacgtggtgcccctccaacctgaggtgtcgtcgtacaggagggggagaaagaagcgggtaccctacaccaaagtgcagctgaaagaactggagaaagaatatgcagccagcaagtttattacaaaagaaaagcggagacgtatatccgctactacaaatctgtctgaacgccaagtcacgatatggttccagaacagaagagttaaggaaaaaaaggtggtcagtaaaagtaaggccccacacctacatagtacatag

SEQ ID NO: 226308 - DNA, 795 bp, synthetic construct
  misc_feature 1..795: note = Description of Artificial Sequence: Synthetic coding sequence
  source 1..795: mol_type = other DNA
atgatcatgtcttcctatctgatggatagcaactatatcgatcctaaattcccaccttgcgaggagtactcccagaactcatatatacccgagcactcccccgagtactacggcagaactcgcgagagcggcttccagcatcatcatcaggagttgtacccaccgcctccacctagacccagttatcctgaacgtcagtattcatgtacaagcctgcaggggcctggaaactcgagggggcatggcccagcccaagccggacaccaccacccggagaagtcccagagcctttgcgaacccgcacctcttagcggggcttcagcctctccctcccctgcgccaccagcgtgttcccagccagctcccgaccatccgagcagcgctgccagcaagcaaccgattgtctatccctggatgaagaagatccatgtgtccactgtcaaccccaactacaacggaggcgaaccaaagcggtctagaacagcatacaccaggcagcaagttctggaactcgaaaaggagtttcattataatcgctacttgaccagacgcagacggatagaaatcgctcactccctgtgtctgtcggagagacagatcaaaatatggttccagaatcgcaggatgaaatggaaaaaggaccataggctgccaaacacaaaggtgcgctcagctcccccagctggggctgccccaagtacgctctccgccgcaacccccggaaccagtgaagaccactctcagtctgctaccccacccgagcagcagagggcagaagacataacaaggctgtag

SEQ ID NO: 226309 - DNA, 795 bp, synthetic construct
  misc_feature 1..795: note = Description of Artificial Sequence: Synthetic coding sequence
  source 1..795: mol_type = other DNA
atgataatgagttcttatctaatggacagcaattatatcgatccgaagttcccgccttgtgaagagtactcacagaactcttacatccccgaacactcaccggagtactacggtaggacaagagagtccggattccaacaccatcatcaggagctttatcctccgccacctcctcggccatcataccctgaaagacaatattcatgtaccagcctgcagggacctggtaatagtcgcggtcatggtcccgctcaggcaggccaccaccaccctgaaaagtcacaatccctatgcgaacctgcacctctgagcggagcttccgcttctcccagccctgcccctcccgcttgttcgcagcctgccccagaccatcctagttcagctgcatccaagcaaccgattgtttacccctggatgaaaaagatccacgtgtctaccgtgaatccaaattacaacggcggtgagcccaagcggtctcggacagcctacactcgtcagcaggtcctcgagctggagaaggaattccattacaatcgctatctgacacgcagacggcgaattgagatagcccactccctgtgtctgagtgaacgccagatcaaaatatggttccaaaatcgacgaatgaagtggaaaaaagatcacagactgccaaataccaaggtccgctctgcgcctccagctggggctgcaccgtccactctgtcagctgcaactcctgggacatcagaggaccactcacaaagcgcgacgccccctgagcagcagagagccgaggatatcacccgcctgtag

SEQ ID NO: 226310 - DNA, 669 bp, synthetic construct
  misc_feature 1..669: note = Description of Artificial Sequence: Synthetic coding sequence
  source 1..669: mol_type = other DNA
atgtctagctatgttgccaactctttttacaaacagtcccctaatattcctgcatacaatatgcagacgtgcggaaactacggatctgcgtccgaagttcaggcctctaggtactgttatgggggtctcgatctgtcaattaccttcccaccacctgcccctagcaactccttacatggtgttgatatggccgcaaacccacgcgctcaccccgatcggcctgcatgttccgcagccgctgccccaggacacgcccctgggagggacgaggccgcacccctcaatcccggtatgtattcacagaaagcggctcggccagcgctggaggagcgtgccaaatcttctggagagattaaagaagaacaggcacagaccgggcaacccgctgggttgagtcaacccccagcaccaccacaaatctacccatggatgacaaaactacatatgagccatgagaccgacggcaaacggagccgcaccagttacacaagataccagacactggagctggaaaaagagtttcatttcaatcgctacctgactaggcgccgaagaattgaaatcgccaacaatttgtgtctaaacgagcgtcaaatcaagatttggttccaaaatagaagaatgaagtggaaaaaagatagcaaaatgaagagcaaggaagccctgtag

SEQ ID NO: 226311 - DNA, 708 bp, synthetic construct
  misc_feature 1..708: note = Description of Artificial Sequence: Synthetic coding sequence
  source 1..708: mol_type = other DNA
atgaatagctacttcactaatccgagtctgagctgtcatttggccggtggccaggacgtactgccaaatgtcgcgctaaactctacagcctacgatccagtacggcatttcagcacttacggggcagcagttgcccagaatcgtatctattcaacacccttctatagcccccaagagaatgtggtgttttcatcttcaagaggtccatatgactatgggagcaactctttttaccaggaaaaggacatgctctccaactgtcgacaaaataccttgggccataacacacagaccagtatcgcccaggatttctcctccgaacaaggtaggacggcacctcaggaccagaaggcttctattcagatatacccatggatgcagcgcatgaatagccactccggcgtgggctatggcgcagatagaagacgtggccgtcagatctacagccgatatcagactctcgagcttgaaaaagaattccactttaatcgataccttactcgccgaaggaggatagagatcgccaacgcactctgtctgactgagcggcagataaagatctggtttcagaatcgccgaatgaagtggaaaaaggaatctaacctgacctctacactcagcggcggaggagggggagctactgcggattccctgggaggcaaggaggagaagcgcgaggagaccgaagaggagaagcaaaaggagtag

SEQ ID NO: 226312 - DNA, 462 bp, synthetic construct
  misc_feature 1..462: note = Description of Artificial Sequence: Synthetic coding sequence
  source 1..462: mol_type = other DNA
atgctgtccaattgtcgccagaacacccttgggcacaacacgcagacgagtatcgcccaggacttcagttcagagcaaggcagaaccgctccacaggatcagaaggcatcaattcagatctacccttggatgcagcggatgaattcgcattctggagtcggttacggtgcagacagaaggcgcggaaggcagatatactctcggtaccagaccttggaactggagaaagagttccatttcaaccggtatctaactcgtcgaaggagaatagagatagcgaacgctctgtgcctcaccgagcggcagatcaaaatctggtttcagaacaggcgtatgaagtggaaaaaggagtccaacctgacgagcaccctgtccggcggaggcggtggagctacggctgacagcttaggcggaaaggaggagaagcgcgaggaaacagaggaggaaaagcaaaaagaatag

SEQ ID NO: 226313 - DNA, 159 bp, synthetic construct
  misc_feature 1..159: note = Description of Artificial Sequence: Synthetic coding sequence
  source 1..159: mol_type = other DNA
atgttgtcaaactgtagacagaacactttgggacacaatactcagacttcaatcgctcaagactttagctccgagcaagggaggactgcccctcaagaccagaaagcctcaatccagatttacccatggatgcagagaatgaactcccactcaggctag

SEQ ID NO: 226314 - DNA, 216 bp, synthetic construct
  misc_feature 1..216: note = Description of Artificial Sequence: Synthetic coding sequence
  source 1..216: mol_type = other DNA
atgctgtctaattgcaggcaaaataccctcggtcacaatacacaaacgtccatcgcacaggattttagctctgagcagggcaggacagctccgcaagatcagaaagcgtccatacaaatctacccttggatgcaaagaatgaactcccacagtgtgtgcttcgtgcccggatctctaggggtggggtacggcgcagacaggcggcgtggacgttag

SEQ ID NO: 226315 - DNA, 729 bp, synthetic construct
  misc_feature 1..729: note = Description of Artificial Sequence: Synthetic coding sequence
  source 1..729: mol_type = other DNA
atgagtagctacttcgtaaaccctttgttctctaagtacaaggctggtgagtctcttgaacccgcatactatgactgccgctttcctcagagcgttggacgatcacacgctctggtctacgggccaggcggaagtgcccctgggtttcagcatgccagccaccatgtgcaggatttttttcaccatggaacttctggcataagcaattctggctatcagcaaaacccttgttctctgagttgccacggagacgcgtcaaagttctacggctacgaggccctccctcgtcagagcttgtacggcgctcagcaagaggcatcagtcgtgcagtatccagactgcaagtctagtgcaaatactaactcttccgagggccagggccacctaaatcaaaatagctctcccagcctcatgtttccctggatgagacctcacgcaccagggcgaagaagtggtagacaaacatatagtaggtatcagactctcgagttagaaaaagagttccttttcaacccctacctgacccgaaagcggcgaatcgaagtgtcccatgctctgggtctgactgaaagacaagtcaagatttggtttcaaaatagaagaatgaaatggaagaaagaaaacaataaggacaagctgcctggcgcaagagatgaggagaaagtggaagaagagggtaacgaggaagaggagaaagaggaagaggagaaggaggaaaataaagactag

SEQ ID NO: 226316 - DNA, 783 bp, synthetic construct
  misc_feature 1..783: note = Description of Artificial Sequence: Synthetic coding sequence
  source 1..783: mol_type = other DNA
atgtctgccactgggcctatttccaactattatgtcgactcgttaatctcacatgataacgaggacttgttggccagcagattccctgccaccggagctcatcccgctgccgctaggccctcaggacttgtacccgactgtagtgactttccatcttgttcattcgcccctaagccagccgtattttccacttcctgggcccctgttcctagccagagcagcgtggtgtaccacccatacgggcctcagccccatctgggcgctgatacccgctatatgcgcacttggctggagccactgtctggcgcagttagtttcccctccttcccagccggaggacgtcactacgctctcaaacccgacgcctacccaggacggagggccgattgcggacccggagaagggaggagttatcccgattatatgtatggaagcccaggggagctgagggaccgcgcaccacaaaccttgcccagtccggaagccgacgcactggcaggatctaaacacaaagaggagaaggctgatctcgatccttctaacccagttgctaattggatacatgctcggagcacccgcaagaaacgatgtccttacactaaatatcagacgttagaattagaaaaagagtttttgttcaatatgtatctcacacgggataggcgctacgaggtcgcacgcgtcttaaacctaacggagcggcaggtgaaaatatggtttcagaataggagaatgaagatgaaaaagatgaataaggagaaaactgacaaggagcagtcatag

SEQ ID NO: 226317 - DNA, 783 bp, synthetic construct
  misc_feature 1..783: note = Description of Artificial Sequence: Synthetic coding sequence
  source 1..783: mol_type = other DNA
atgtctgcaacaggtcctataagcaattactatgtggacagcctaatcagtcacgacaatgaagacctccttgcttctcgtttcccagcaacaggagctcaccctgccgctgccaggccctccggattagtccccgactgtagtgattttccaagctgctctttcgctccaaagccagctgtattcagcaccagttgggctcccgtaccatcccaaagcagtgtagtctatcacccatatgggcctcaacctcatctcggagctgacacgaggtacatgcgaacttggctcgagccattaagcggagcggtttctttccctagcttccctgcaggtgggaggcattatgccctcaaacctgacgcttatccagggaggagggcagattgtggacccggagaaggccgatcctatcctgactacatgtacgggtccccaggcgaactgagggacagggccccacagactctccccagtcctgaagcagatgcactggctgggagcaaacacaaggaagaaaaggccgatctggacccatctaatcccgttgctaactggattcacgcaagatctaccaggaagaaaagatgtccgtacacaaaataccaaacactcgaactcgaaaaggagttcctctttaatatgtacttaacaagggacaggagatacgaagtggcacgagtcctcaacctgactgagcgtcaggtaaagatttggttccagaatcgcagaatgaagatgaaaaaaatgaacaaggaaaagaccgataaagagcaaagctag

SEQ ID NO: 226318 - DNA, 987 bp, synthetic construct
  misc_feature 1..987: note = Description of Artificial Sequence: Synthetic coding sequence
  source 1..987: mol_type = other DNA
atgtccagttatctggaatatgtgagttgctcctcatccgggggagtagggggagacgtgctctctctggccccaaagttctgcaggtctgacgccagaccagttgctctccagcctgcattcccactgggtaacggggacggcgcttttgttagttgtttacctcttgctgccgctcgtcccagcccctcaccgccagccgcacctgcaagacctagcgtacctcctccggcagcccctcagtacgcacagtgcacgctggaaggcgcttatgaaccaggagcagcccctgcagctgctgctggcggagccgattacggatttctcggttccgggccagcctacgattttccaggggtgcttggtagggccgcagatgatgggggatcgcacgttcactacgctacaagtgctgtcttctccggaggcggaagtttcctgctcagtgggcaggtggactacgcagcatttggggagcctggtcccttccctgcatgcctgaaggcatccgccgacggacatccgggagcatttcagacggcctcccccgctcctggtacatatccaaaatcagtcagccctgcctccggacttcctgctgcattctccactttcgagtggatgaaggtgaagagaaacgcttccaagaaaggcaagctggcggagtatggggcagcttctcctagcagtgctatcagaacaaacttttccacaaagcaactgacagagctcgaaaaagagtttcatttcaacaaatacctcacaagggcccgtcgcatagagattgctaactgcctacaccttaacgacacacaggtgaaaatctggtttcagaacaggcgcatgaagcagaagaaaagggaaagggagggcttgctggcaaccgccattcccgtcgcaccactgcagctgcccctgtccggcacaacgcccacaaagtttatcaagaatcccggatctcccagccagagccaggagccatcctag

SEQ ID NO: 226319 - DNA, 630 bp, synthetic construct
  misc_feature 1..630: note = Description of Artificial Sequence: Synthetic coding sequence
  source 1..630: mol_type = other DNA
ctggaaagggccgctcgcgtggagagggccggtggggctgcacaaacagccgctgtgcttctctccctttgtcccgctccctattctgggccaggactcagaccccacctggcattcgcccctgggcgaccccgagcagctgtccgtacagcgagcggacgggctcccgttcgggctgtgcatccaggaggtgggctgcgtacttggtgccgtacttgtcgcggttcttgggggagaggccttcgcctgcccggtgttcgagctggggtccgactccctgggagagccggagccggagggccatttcccgcttgcctgaaagcctctgctgacggccatcctggtgcgtttcagacagcaagtcctgccccaggcacctatcccaagagcgtgagtccggcatctggtcttcctgctgccttctcaacatttgaatggatgaaagtgaagagaaacgctagcaaaaaggacagcggtttggggtttgttgaggagacccggagccgagcgaatagtatggagagtgcatcctccacagatagcgaaaatgtgcccggaattgaaaagatatccggcagaagttctccctggaatttctcgtggcagacccgcagagtgtggggcaggtag

SEQ ID NO: 226320 - DNA, 1023 bp, synthetic construct
  misc_feature 1..1023: note = Description of Artificial Sequence: Synthetic coding sequence
  source 1..1023: mol_type = other DNA
atgtcatttcctaacagcagtcccgctgcaaacactttcctggttgattctctcatcagcgcatgcaggtccgatagcttttattcatccagcgcttctatgtatatgccacccccaagtgctgacatgggtacctatgggatgcaaacatgcggacttctaccttctttggctaagcgcgaggtgaaccatcagaatatggggatgaacgtgcacccttacatcccccaggtggactcctggaccgatcccaataggtcttgcagaattgagcaaccagtgacacagcaggtgccaacatgcagcttcacgaccaatatcaaagaagagtctaattgttgcatgtattccgacaagaggaacaaactcatcagcgccgaggtgccttcttatcagcgcctggtgcctgagtcctgccccgtggagaatccagaagtgccagttcccggatatttccggctttctcaaacgtatgcaaccggaaagacacaagaatataacaactcccccgaaggatccagcacagtgatgctgcagctaaaccctagaggcgctgctaaaccacagctctcagcggcacagctgcagatggagaagaaaatgaacgagcctgtgagtgggcaggagccgactaaagtgtctcaggtggaatcacccgaggcgaaagggggactgccagaggaacggtcttgcctagccgaagttagcgtctcatctcctgaggtgcaagagaaggaaagtaaagaagagatcaaatcagacactccaacctctaactggctcacagcaaaatcaggccgtaaaaaacgctgtccctacacaaagcaccagaccttggaattggagaaggaattcttattcaatatgtacctgacaagggagagacggttggagattagcaaatcagtgaacctgactgacagacaagttaagatctggtttcagaaccgccgtatgaaactgaagaaaatgtcgagggagaaccggattcgggaacttacagccaatcttacattcagctag

SEQ ID NO: 226321 - DNA, 1017 bp, synthetic construct
  misc_feature 1..1017: note = Description of Artificial Sequence: Synthetic coding sequence
  source 1..1017: mol_type = other DNA
atgaacgattttgacgaatgcggccagtccgccgctagcatgtaccttcctgggtgtgcatattatgttgcgccatcggacttcgcctccaagccctccttcctgtcacagccctcttcatgtcagatgacgttcccgtatagttccaacctcgctccccatgtgcagccagttagggaggttgcgtttagggactacggattggaaagagccaagtggccatatcgcggaggaggaggaggaggaagtgccggtggcggatcgtccggaggagggccaggcggagggggaggcggagcgggtggttatgcaccctactacgccgctgctgccgcagctgccgcagcagcggcagccgctgaagaagccgcaatgcagcgcgagctgctgccaccagctggccgtcgaccagatgtgctctttaaagcccctgaaccagtctgcgctgcacctggtccccctcacggcccagcgggagcagccagcaatttttacagcgccgtgggtaggaatggcattctgccccaggggttcgatcagttttatgaagccgcacccggtcccccttttgccggtcctcaaccaccacccccaccagcccctccccagcctgagggggcagctgacaagggagatcccagaactggcgctggaggtggcggtggcagcccgtgtacaaaagccactccgggatccgaaccgaagggggctgctgaaggctccggcggtgacggagaggggcctcccggtgaagcaggcgcagagaaaagctcctccgctgtggctccgcagcgctcacggaagaagcggtgcccctataccaagtaccagattcgggaactcgagagggaattctttttcaatgtctacatcaacaaggagaaaaggctgcagctcagccggatgttaaacctgacggataggcaagtcaaaatctggtttcaaaaccggaggatgaaggaaaaaaagctcaatagagaccgattgcaatacttcacgggcaatccgctgttctag

SEQ ID NO: 226322 - DNA, 480 bp, synthetic construct
  misc_feature 1..480: note = Description of Artificial Sequence: Synthetic coding sequence
  source 1..480: mol_type = other DNA
atgtatctgcccggatgcgcctattacgtagctcctagcgatttcgctagcaagccctcctttctgagccagccatcttcctgtcagatgacctttccttactctagcaacctggcccctggaggaggttccccctgtacaaaggctacccccggatcagaacctaaaggcgctgccgagggaagtggaggggatggggaaggccctcctggggaggcaggcgcagaaaagagctcctccgccgttgcaccccagcgcagtaggaagaagcgctgcccctacacgaagtaccagatccgggaattggaacgggagttctttttcaacgtgtacatcaacaaggagaagcgtctccagctctccaggatgctaaaccttactgaccggcaggtcaaaatctggttccagaacaggaggatgaaagaaaagaaactaaatcgagataggctccagtactttactggtaaccctctattttag

SEQ ID NO: 226323 - DNA, 813 bp, synthetic construct
  misc_feature 1..813: note = Description of Artificial Sequence: Synthetic coding sequence
  source 1..813: mol_type = other DNA
atgtgcgagcgctccctttaccgcgctggttatgtgggatctctgttaaatctccagtccccggatagtttctatttctccaacctgcgaccaaatggcggacagttggccgctctgcccccaatttcttacccccgaggggctcttccatgggcggctacccccgcttcatgcgcccctgctcaacccgcaggggctacggcctttggcggattctcccagccatatttagcgggatccgggcctttgggcctccagccccctacagcaaaagacggaccggaggaacaggcaaaattctacgctccggaggctgccgctggaccagaagaaaggggccgtactcggccttctttcgctcccgagtcgtccctggcaccagctgtcgcagccttgaaggccgcaaaatacgattatgctggggtcggacgggctacaccaggatccactactcttttgcagggcgcaccttgtgcccctggtttcaaggatgatactaaaggaccgctcaatcttaacatgacagtccaggccgctggtgtcgcttcctgtcttcggccttctttaccagatgggctcccttggggcgcagccccaggccgtgccagaaagaaacggaagccttatacaaaacagcagatcgcagaacttgagaatgaattcctggtgaatgaattcataaaccggcagaagaggaaagagctgagtaatcgattgaatctgagtgaccagcaggtcaagatctggttccaaaatcgcaggatgaagaagaagagagtggtcctacgtgaacaagccctcgctctatactag

SEQ ID NO: 226324 - DNA, 1299 bp, synthetic construct
  misc_feature 1..1299: note = Description of Artificial Sequence: Synthetic coding sequence
  source 1..1299: mol_type = other DNA
atgctgttcgagcagggtcagcaggctctagaactgcctgaatgcacaatgcagaaggccgcatattacgagaatcctggtctcttcggcggatacggttatagtaagaccacagacacttacggatattcaactcctcatcagccctacccgcctcctgccgctgcgtccagcttggacaccgactatcctggctccgcttgcagcattcagtcctcagcaccactcagggctccagcccacaaaggtgccgagttgaacggcagctgtatgcggccaggcactggcaacagtcaagggggtggagggggtagtcagccccctggtttaaattccgagcagcagccccctcaacccccaccaccaccccctacgctgccaccctcgtctcccactaacccagggggaggggtgccagccaagaagccgaaaggaggcccaaacgcttccagctcttcggcaaccatcagcaaacagatctttccgtggatgaaggaaagccggcagaacagcaaacagaagaactcatgcgctaccgccggagagtcctgcgaggataagtcacctccaggacctgcaagtaaaagagtgcggacagcctatacgagcgcccagctggtggagctggagaaggaattccattttaaccggtacctctgccgccctaggcgggtcgaaatggcaaacctcctgaacctgactgaaagacagataaaaatatggttccaaaatcgaagaatgaagtacaaaaaggatcaaaaggctaaagggattctgcactccccggcttcccagtcgcccgagcggagtccccctttggggggagccgcagggcacgtagcctactccggacaactcccacctgtgcccggtctggcgtacgacgccccaagcccacccgcatttgcgaagagccaacccaatatgtacggcctcgcggcttacacggctccgttgagctcctgtctgccgcaacagaaaagatacgccgctccagagttcgaacctcatccaatggcttcaaatggaggcggatttgcttcggccaatctgcaaggcagccccgtctatgtaggcggtaatttcgttgagtcaatggctccagctagcgggcctgtgttcaacttagggcacctaagccatccaagctcagccagcgtggattattcttgcgcagcgcagatccctggcaaccaccaccacggaccatgcgacccacacccgacctacacggatctgagtgcccatcactcatcgcagggtcggctccccgaggctccgaaactgacacacctttag

SEQ ID NO: 226325 - DNA, 1299 bp, synthetic construct
  misc_feature 1..1299: note = Description of Artificial Sequence: Synthetic coding sequence
  source 1..1299: mol_type = other DNA
atgctctttgaacaaggacagcaggccctcgagctgccagagtgcacaatgcagaaagcggcatattacgaaaaccccggactgtttgggggatatggttattccaaaacgacggacacatatggatattcgaccccccatcagccatatccacctcctgcggctgcgtctagtctggacacagattatccaggctccgcatgctccattcaaagcagcgcacccctgagagcgccagcacacaaaggggcagagttaaatgggagttgtatgcgtccaggtacagggaacagccaaggtgggggtggaggaagccagccacctggcttgaactctgaacagcagccccctcagccccctccacccccacccaccctgccaccaagttcacccaccaatcccggtggcggtgtgcccgctaagaagcccaaagggggtcccaacgcatcttcatcatcagctaccatctcgaagcagatcttcccctggatgaaggaatctcggcagaacagcaaacagaagaacagctgcgctacagccggagagagctgcgaggataaatccccacccggaccggcttcaaagcgagtgcgcactgcttatacttctgctcagcttgtcgagctcgagaaagaattccactttaaccgatacctctgccgccctcgcagagtcgagatggctaatctgcttaacctgaccgaacgacagatcaaaatctggttccagaatcgaaggatgaagtacaagaaggaccagaaagcgaaaggtatccttcacagcccagctagccagtctccagagagatctccaccattaggcggagccgcagggcatgtggcttactcagggcagttgccccctgtacctggactggcctatgatgccccatccccacccgcattcgcaaagtcacagcctaacatgtatggattggctgcctatacggctcctttgtcctcttgtctcccacagcagaagcggtacgctgcacccgaatttgagccacatccaatggcttccaacggcggtgggtttgccagcgccaatctgcagggctcccctgtttacgtcgggggtaacttcgtggaatcgatggccccagcgagcgggcctgtgtttaacctgggacacctcagccacccatcctcagcctcagttgactattcctgcgccgcacagatccccggaaatcaccaccacgggccttgtgatcctcaccccacatacacagatttatcggcacatcactctagccagggtagactgcctgaggcccctaagctcacccacctgtag

SEQ ID NO: 226326 - DNA, 303 bp, synthetic construct
  misc_feature 1..303: note = Description of Artificial Sequence: Synthetic coding sequence
  source 1..303: mol_type = other DNA
atgttgttcgagcagggtcaacaggccttggagcttccagagtgtaccatgcagaaagctgcatattacgaaaaccctgggttgtttggaggatatggatactctaaaactactgacacctacggctactctactccccaccaaccttaccccccaccagccgcagcaagctctctcgacaccgactatcccggtagtgcttgctcgatccagtcaagtgccccactccgagctcccgctcataaaggagccgagctgaacggcagctgtatgaggccgggaacggggaattcccaaggatag

SEQ ID NO: 226327 - DNA, 1299 bp, synthetic construct
  misc_feature 1..1299: note = Description of Artificial Sequence: Synthetic coding sequence
  source 1..1299: mol_type = other DNA
atgctctttgaacaaggacagcaggcccttgaacttcctgaatgcactatgcagaaggctgcctactacgaaaaccccggtctgtttggcggttacggatactctaagactactgatacctacggctatagcactcctcaccagccgtatccccctccggcagcagccagctccctggacaccgattaccccggatcagcttgcagcatccagtcttctgcgcctctgcgggctccggctcataagggtgcagagttgaatggcagttgtatgagaccaggaaccggcaatagccagggaggcggtggaggcagccagccaccaggcctgaatagcgaacaacagccaccccagccaccacccccacccccaactttaccgccttcaagtcccacaaaccctggtgggggtgtccccgctaagaagccaaaagggggacccaatgcgtcttctagtagcgcaactattagcaagcagatttttccgtggatgaaggagtctcgtcaaaactcaaaacaaaaaaattcttgtgcaacggcaggagaatcctgcgaggataagagtccgcctgggcctgcatccaagcgcgtacgtacagcctatactagcgctcagctggtcgaactcgagaaagaatttcattttaatcgatatctttgccggccaaggcgagtcgaaatggccaacctcctgaaccttaccgagagacaaatcaaaatctggtttcagaacaggcgaatgaagtacaagaaagaccagaaggctaagggcattctgcactccccagccagccagagccccgagaggtctccacctctaggcggagccgctggccacgtagcatattccggccagctgcctccggttcccggactcgcgtacgacgcccctagccctcccgcatttgcgaaaagccagccaaacatgtatggcctggctgcatacaccgccccactctcttcctgcctgccgcagcagaagcgttacgccgctcctgaattcgagcctcaccccatggcatcaaatggtggcggattcgcctcagccaacttgcaggggtctccggtatatgtggggggtaactttgtggagtcgatggctccagccagcggcccagtctttaacctcggccaccttagccatccatcctccgctagtgttgactacagttgtgctgctcagattccaggcaatcatcaccacggaccatgtgatccccatcccacatacactgaccttagtgcccatcactcgagccagggtcgcttgcctgaggcacctaaactcacacacctctag

SEQ ID NO: 226328 - DNA, 768 bp, synthetic construct
  misc_feature 1..768: note = Description of Artificial Sequence: Synthetic coding sequence
  source 1..768: mol_type = other DNA
atggtgatgtcctcgtacatggtgaattcaaaatacgtagaccccaagtttcctccctgtgaggagtacctgcagggtggctatctgggggagcagggggcagattactacgggggtggggcacagggcgctgacttccaaccaccaggcctgtatcctagacccgattttggcgagcagcctttcggaggcagcggacccggacctgggagcgccctgcctgcaagggggcacggccaggaacctggcggtccaggagggcattatgccgctccgggagaaccctgtcctgcaccccctgcacctcctcctgccccactccccggtgccagggcgtattcgcagtcagaccccaaacagcctccatccgggacagctctgaagcagccggcagtagtgtatccatggatgaagaaggttcacgttaactcggtgaatcccaactacacaggcggtgagccaaaacgctccaggactgcttacactcgccagcaggttttggaactggagaaggaattccattttaaccgctatttgactcggaggcgaagaattgagatcgcccacaccctctgcctcagcgagagacagataaagatttggtttcaaaacagaagaatgaaatggaaaaaggatcataaattgccgaacacaaagggacgtagcagctcctcgagctcttcctcttcctgcagtagcagcgtcgccccttcacaacatctgcaacccatggcgaaagaccaccataccgatctcaccaccctgtag

SEQ ID NO: 226329 - DNA, 873 bp, synthetic construct
  misc_feature 1..873: note = Description of Artificial Sequence: Synthetic coding sequence
  source 1..873: mol_type = other DNA
atgtctagttacttcgtgaatcccttatatagcaaatacaaggccgcagcggcagctgcagctgccgcaggcgaagctattaacccaacatactacgattgtcattttgccccagaagtaggcggaagacacgcggctgccgctgccgcactgcagctgtacggcaactcggcagccggattcccacacgctcctccgcaggctcacgcccatccccacccttcacctccaccctcagggactggctgtgggggacgcgaaggacgtggacaggaatacttccatccagggggaggatcccccgcagctgcctaccaggccgctccccctccaccgcctcacccgcctccaccccctcccccacctccatgcggcggtatcgcctgccacggggaaccggcaaaattctatggatatgacaacctccagaggcagccaattttcacaacccagcaggaagctgagctggtacagtacccagattgcaaaagctcaagcggaaacatcggggaggatcccgaccacctgaatcagtcatcaagcccatcacagatgtttccctggatgaggcctcaggccgctccagggcgaaggcggggtcggcaaacctactctcgctttcagaccctcgagctggagaaggaattcttgtttaatccatacctgaccaggaagcggaggatagaggtttcgcacgccctcgctctcaccgagcgccaggtcaagatctggttccagaaccggcgtatgaagtggaaaaaggagaacaacaaagataagtttcctgtgagccgtcaagaggtgaaggacggtgaaactaagaaggaggctcaagaactggaggaggatcgtgccgaggggcttaccaattag

SEQ ID NO: 226330 - DNA, 870 bp, synthetic construct
  misc_feature 1..870: note = Description of Artificial Sequence: Synthetic coding sequence
  source 1..870: mol_type = other DNA
atgagcagctactttgtgaatccactgtattccaaatataaggccgcagcagccgcagccgctgccgctggggaagccattaacccaacatattatgactgtcactttgcccctgaggtcgggggtcggcacgcagccgctgctgcagctctccaactttacgggaactcagcagccggtttccctcatgcccctccacaggcccacgctcatccacacccttcaccacccccatcagggaccgggtgtggcggtagagaaggacgcggtcaagagtacttccaccccggagggggatctcctgcggcagcgtatcaggcagcgccaccgccacctcctcacccccctcctcctccccctccccctccatgcggcggaatcgcatgtcatggcgagcctgcgaagttttatgggtatgacaacctgcagcggcagccaatctttaccacccagcaagaagctgagttggtacagtaccccgattgtaagtctagtagcggaaatattggggaagatccagaccacctgaaccaatcctcctcaccgagtcagatgttcccctggatgcgcccacaggcgccagggaggagacgtggtcgacaaacatactccagattccagacactcgagctggaaaaagaattcctctttaacccctacctgaccaggaaacgtagaatagaggtcagtcacgcccttgccctgacagagagacaggtgaagatctggttccagaaccggcgaatgaagtggaaaaaggagaataacaaagacaagttcccggtgtcacgacaggaggtcaaggacggcgagaccaagaaagaggcccaagaacttgaggaggacagggcggaaggcctgacgaactag

SEQ ID NO: 226331 - DNA, 870 bp, synthetic construct
  misc_feature 1..870: note = Description of Artificial Sequence: Synthetic coding sequence
  source 1..870: mol_type = other DNA
atgtcatcttatttcgtgaaccccctgtactctaagtataaggcggcagcggcagcagccgctgccgctggcgaagccattaatccgacctactacgactgccactttgctccagaagtggggggtcggcatgccgcagccgcagccgctctgcagctctacggtaattcggccgctggcttccctcatgctccccctcaggcacatgcccatcctcaccccagcccgccaccctccggaacaggctgcggtggcagggagggaagggggcaggaatacttccaccccggtggcggaagccccgctgccgcttaccaggctgccccacctcctcctccccatccaccaccccctccaccccctccaccatgcggcggtatcgcctgccacggcgagcccgcaaaattttacggctacgacaatctccagaggcaaccaatcttcacaacgcaacaggaggccgagctagtccagtacccggactgcaagtcaagtagtgggaacattggggaggaccccgatcatctgaaccagtcgagctctccatctcaaatgtttccgtggatgaggcctcaggccccagggcgacggagagggaggcaaacatactcccgatttcagactctggagctggagaaagaatttttgtttaatccctatctcacccgcaagcgcaggatcgaagtatcacacgctctagcactaactgagagacaggtcaagatctggtttcagaacaggaggatgaagtggaagaaggagaacaacaaagacaagttccctgtctccaggcaggaggtgaaagacggtgaaactaagaaggaagctcaggaactcgaggaagatagagcagaaggcctgaccaactag

SEQ ID NO: 226332 - DNA, 321 bp, synthetic construct
  misc_feature 1..321: note = Description of Artificial Sequence: Synthetic coding sequence
  source 1..321: mol_type = other DNA
atgttcccctggatgaggccacaggccgcacccggtcgccgacgagggagacaaacatactcccggtttcaaaccctcgagctcgaaaaggagtttctgttcaatccctacttaacccgcaaacgaagaatcgaagtgtctcacgctctcgctctgaccgagcggcaagtaaagatctggttccaaaaccgcaggatgaaatggaaaaaggagaacaacaaggataaatttcccgtgtctcgtcaggaagtcaaggatggggaaacaaagaaagaggcccaagaactggaggaggaccgggctgagggcctcactaactag

SEQ ID NO: 226333 - DNA, 1059 bp, synthetic construct
  misc_feature 1..1059: note = Description of Artificial Sequence: Synthetic coding sequence
  source 1..1059: mol_type = other DNA
atgcttggcggttccgcgggacggctcaagatgtcctctagcggcactctgtcaaactattacgtagactcactcatcggccacgagggggatgaggtgttcgccgctcgcttcggtccccctggccctggcgcacagggacgaccagcaggggtggctgacggcccagccgctaccgcagccgagttcgcaagctgctcgttcgctcctagatctgccgtgttcagcgcttcatggagcgccgtccctagccaaccccctgcagcagccgcaatgagcggcttataccacccctatgtgcctcccccacccttagccgcttcagcctccgagccaggaagatacgtgcggagttggatggaacccctgcccggttttcccggaggggctggcggtggcggaggtggtgggggagggggacctggtaggggtccatccccgggtccttctggtccagctaacggcagacattatggaatcaagcctgaaacccgcgctgcgccagccccagctacagccgcaagcacaacaagctcatcatccaccagcctttcttcaagcagcaaaagaactgagtgcagcgtggcccgtgagtctcagggctcttctggccctgagttctcttgcaactctttcctccaggagaaagctgcggctgctaccggaggcacagggccaggtgccggtatcggggctgcaaccggcactggcggttcatcagagccctccgcctgttccgaccacccaatccctgggtgttcactgaaggaagaggagaaacagcactcccaaccgcagcaacagcagttggatcctaacaatcccgcagcaaattggatccatgcaaggtctactcgaaagaaacgttgtccatataccaagtatcagacattagaacttgaaaaagagtttctctttaacatgtatttgacacgtgaccgcagatacgaggttgcgagaattctcaacttaacggagcggcaagtgaagatttggttccagaatcggaggatgaagatgaagaaaatgagcaaagagaagtgcccaaaaggggactag

SEQ ID NO: 226334 - DNA, 2757 bp, synthetic construct
  misc_feature 1..2757: note = Description of Artificial Sequence: Synthetic coding sequence
  source 1..2757: mol_type = other DNA
ctgcagcccgtgtacgagagcatggcctctcatgtccaggttttctcaccacatactctgcagagctcagcattttgtagcgtgaaaaaactgaaaattgaaccctcctccaattgggacatgactggttacggctcgcattccaaagtgtactcccagagtaagaacattcctctatcacaacctgctaccactacagtttccacgagcctacccgtgcccaaccctagcctaccttacgaacagactattgtgtttcctgggagcactggccacattgttgtgacttcagccagcagcactagtgtgaccgggcaagttctgggcggaccccataacttgatgagacgctccacagtctcgctgttggatacctaccaaaagtgtggtctcaaacggaaaagcgaagagatagagaacaccagcagtgtccagatcatcgaggagcatccgccaatgattcagaacaacgcgtcaggagccactgtcgccacagcaacgacctctacggcaaccagcaagaatagtgggtcaaattcagaaggtgattatcagctggtacagcacgaagtgctctgcagcatgacaaatacctatgaggtgttggagtttttgggccgtgggacctttgggcaggtggtcaaatgttggaagagggggactaatgagatcgtggctatcaagatccttaagaaccatccatcctacgccaggcagggtcagatagaggtctccattctcgctcgcctatctaccgagagtgcggatgattataacttcgtccgtgcttacgagtgctttcaacacaagaaccatacctgtttggttttcgagatgttggaacagaatctttatgatttcctcaagcagaataaatttagcccccttccactcaagtacatccgacctgtcctgcagcaggtagccaccgccctgatgaagctcaaaagccttggactaattcacgccgacctgaagcctgaaaacattatgcttgtggacccgagcaggcagccttaccgtgtgaaggtcatcgactttggtagcgccagtcatgttagcaaggcggtctgtagcacttacctgcaaagtagatactatcgggcacctgagatcatcctgggcctacccttttgcgaggccatcgacatgtggtcactcggctgtgtgatcgccgagttgttcctcggatggcctttgtatccaggcgcttcggagtacgaccagatacggtatattagccagactcaaggactgcccgcagaatacctcctgagtgctgggacaaagaccacgcgcttttttaacagggatactgacagcccctacccgctatggaggctgaaaaccccagatgaccacgaagccgaaaccggcatcaagtctaaagaagcgcgtaaatacatttttaattgcctagatgatatggctcaggttaatatgacgacagacttagagggcagcgacatgcttgtcgagaaggccgaccggagggaattcatcgatctattaaagaaaatgttgacgatagacgccgataagcggattaccccaattgagacgcttaaccacccgttcgttactatgacacacctgctggactttccccacagcacccacgtgaagagctgctttcaaaacatggaaatttgcaaacgtcgtgtaaatatgtatgatacagttaaccagagcaaaaccccttttattacacacgtggcgccatctacctccacaaatctgactatgacctttaacaaccagctgactaccgttcacaatcaagctccctcctcaactagtgctactatttcccttgcaaatcctgaggtgagcatcctcaattatccctccacgctttatcagccatccgccgcatcaatggccgcagttgcccagcgttctatgccccttcagactggtacagcccagatatgcgccagaccagacccatttcagcaagccctgatcgtttgcccccctggcttccagggcctacaagctagtccctccaagcatgctggatacagtgtgcgaatggagaacgccgttccgatcgtgacgcaagctcccggtgcccaacccctgcagatacagcccggactcctggcacagcaagcatggcccagcggcacgcaacagatccttttaccgcctgcatggcaacaactgacaggagtggccacacacaccagcgtgcaacatgctactgtaattcccgagaccatggcaggtacccaacagctggcagattggaggaatacccatgcgcatggctcccattataaccccatcatgcaacaacctgccctgttgaccggccacgtgacgctgcccgctgcacaacccttgaacgttggtgtagctcatgtgatgcggcagcagcccacctctaccaccagctcccgcaaaagcaagcaacatcagtcatcccagcgcaagaacgtgatatcttgcgttactgtgcatgactctccttactcggacagctcgagcaacacaagcccctactccgtgcagcaacgtgcaggccacaacaacgcgaatgcattcgatacaaagggatcgctggaaaaccactgtaccgggaatccacgaacaattatagtgccacccttgaagacccaggccagcgaagtgctggtggagtgcgatagtttagtcccaggcaatctgggtccgggtcagggcagaaatctttccttagagtctggattccctgcctttctgctgcttgaaatgctcctgtacggctcctag

SEQ ID NO: 226335 - DNA, 3596 bp, synthetic construct
  misc_feature 1..3596: note = Description of Artificial Sequence: Synthetic coding sequence
  source 1..3596: mol_type = other DNA
atggcgccagtatacgaggggatggctagccacgtgcaagtcttcagccctcataccctgcagagttccgcgttttgctcagttaaaaagctaaaaatagagccttcctctaattgggatatgactggttacggatctcattctaaagtgtactcccagagcaagaacatccccctgagtcagccagccactaccacggtgagcacatcgctgcctgtgcctaatcccagcctgccttacgagcagaccatcgtctttccgggatcaacaggacatatcgtggtaactagcgctagcagcacatctgtcacgggccaggtgctgggaggcccacataacctcatgcgccgttccacggtttctctcctggatacctaccaaaagtgtggactgaagcggaaaagcgaggaaatagagaatacgagttctgtgcagatcattgaagaacatcccccaatgatccaaaataatgcctccggagcaacagtcgcaacagctaccaccagtaccgctaccagcaaaaatagcgggagtaacagcgaaggcgactatcagctcgtgcagcatgaggtgttgtgcagtatgacgaatacctacgaagttctggagtttctggggcgaggcacctttgggcaagtcgtaaagtgttggaagaggggaacaaacgagatcgtggcgataaagatcctgaaaaatcatccttcttacgccagacagggtcagatcgaagtctccatcctggcacgactgagtactgagtcagcagatgactataatttcgtgagagcctatgagtgttttcagcacaagaatcacacttgtctcgtatttgagatgctggagcaaaacctctatgattttcttaagcagaacaaattctcccctctgcccctcaagtacattagaccggttctacagcaagtagcgaccgccttaatgaagctaaagagcctgggtctgatccatgccgacctgaaaccggaaaacatcatgttagtcgatcctagccggcaaccatacagggtaaaggtcatcgattttggatccgcgagccatgtcagtaaagccgtgtgcagcacgtacctccagtcaaggtactatagagctcccgagatcattctgggcctgcccttttgtgaggccatcgatatgtggtccctaggctgcgtgattgctgaattattcctcggatggcctctatatcccggagccagcgaatatgatcaaatccgctacatttcacagacacaagggctcccagccgaatatcttctgtcggccggaacgaaaacaacacgcttttttaaccgggataccgactctccctacccactgtggcgtctgaaaactcccgacgatcacgaagcagaaacgggcattaaatccaaggaagccagaaaatacatcttcaattgccttgacgacatggcacaggttaacatgaccaccgatctcgaggggtccgacatgctggtggagaaggctgatcgacgagaattcatcgacttgttgaaaaaaatgcttaccattgacgctgacaagcgcataacccccattgagacactgaaccaccccttcgtgactatgacccatttgcttgattttccgcactccacacatgtcaaatcttgtttccagaatatggagatttgcaaaagacgggtgaacatgtatgatacagttaaccagtccaaaaccccctttattactcatgttgcaccttccacctctactaacctcactatgactttcaacaaccaacttacaacggttcataatcaggcgccaagctcaaccagtgctaccatttccttggcgaatccggaggtgtccatcctgaactaccccagtaccttatatcagcccagcgctgcctccatggccgctgtggcccaacgtagtatgcctttgcagacaggaactgcgcagatatgtgcgaggcccgacccctttcaacaggctcttatcgtatgccctccaggcttccaaggtctccaggcctctccctcaaagcatgccggatactctgtgcgcatggagaacgctgtgcctatagtgactcaggctcccggtgcccaaccactgcagattcagcctggtttactggcccaacaagcttggccctcagggactcagcagattctactcccccctgcgtggcagcagctgacaggagttgcaacgcacacatctgtgcaacacgccactgttatccctgaaacaatggccggtacacagcaactcgcagactggcgcaatacacatgcgcacggcagccactacaaccctatcatgcagcagcccgctctacttactggacacgtgacacttcccgctgcccagccactgaacgttggtgtggcccacgtcatgcgacagcagcctacaagtacaacttcaagccggaagtctaaacagcatcagtctagcgtccggaacgtgtctacctgcgaggtctcaagtagccaggcaatctccagccctcaaagaagtaaaagggtgaaagagaacacaccccctagatgcgccatggtacattctagccctgcgtgcagtacctctgtgacttgcggctggggggatgtggcgagcagcacaacgcgggaacgccagaggcaaaccatagtgatacctgacacaccaagccctactgtgtctgttattaccatctccagtgatacagacgaagaggaagaacagaagcatgcacctactagcacagtcagcaagcagcgtaaaaatgtgatttcctgcgtgacggtgcacgatagcccgtatagcgacagctccagcaatacctcgccctattcagtgcagcaaagagcaggacataataatgcaaatgccttcgacactaaggggagtctggaaaatcactgcacagggaatccgcgaacgatcatcgtcccacccctgaagactcaggctagcgaggttctagtcgagtgcgacagcctcgtgcccgtgaatacttcacatcacagttcctcatacaagtccaaaagctctagcaatgtgactagcacaagtggacactcttccggaagtagctccggagctatcacctataggcagcagcgccctggcccacacttccagcagcagcagccattgaacctgtcccaggcacagcaacatatcacaacagaccggactggatcgcatcgccgacaacaggcctacattacccctacgatggcacaagccccttatagcttcccccataacagcccgagtcatggaaccgtccatccacacctggcagcggcagcagcagccgcacacctgcctacccagccacatttgtatacatatactgcccctgccgcactgggttctacagggacggtagctcacctggtggcttctcaaggtagcgcgaggcacaccgtgcagcatactgcgtatcctgctagcatcgttcatcaggtgcccgtgagcatgggccctcgtgtgctcccttcacccaccatccaccccagtcaataccccgctcagtttgcccaccagacttacataagtgcctcccccgcttcaacagtgtatacgggatacccattgtctcccgctaaggtgaaccagtacccatacatcta

SEQ ID NO: 226336 - DNA, 3516 bp, synthetic construct
  misc_feature 1..3516: note = Description of Artificial Sequence: Synthetic coding sequence
  source 1..3516: mol_type = other DNA
atggccccagtctatgagggtatggcttctcacgtgcaggtgtttagccctcataccctgcagtccagcgcgttctgctccgtgaagaagctgaagatagagcctagtagcaactgggacatgactggctacggttcccactctaaggtctatagccagtcgaaaaacattcccctaagccagccagcaactacaaccgtcagcacttctctgccggtcccaaatccgagcctgccttacgaacaaactatcgtgtttccgggaagcacgggacacattgtggttaccagtgcttcctccacctctgtcacaggccaggtactcggtggaccgcataatctaatgcgacgttccaccgtctccctcctggatacataccaaaaatgtggtctcaagcgcaaaagtgaagaaattgagaacacatccagcgtgcagatcatagaggaacatcccccaatgatccagaacaatgcatccggcgcaactgtggctacagcaaccaccagcacggctaccagtaagaactccggcagtaactcagaaggggactatcagctcgtgcagcatgaagtcctgtgttctatgactaacacctatgaagtgctagagtttctggggagggggacattcggacaggtggtgaagtgctggaagagaggcaccaatgagattgttgcgatcaaaatcctgaaaaatcatccttcttatgcccgtcaaggccagattgaggtatcaatccttgctaggctatccactgaatctgcagacgattataacttcgtgcgggcttacgaatgtttccagcataagaaccacacttgccttgtgtttgaaatgctcgagcaaaatctctacgatttccttaaacagaacaagttctcccccttgcccttgaaatacatacgccctgtgctgcagcaggtcgctacagccctcatgaaactgaagtcgcttggcctcatccacgcagacctaaagcccgagaacataatgcttgtggatccctccaggcagccgtaccgcgtgaaagtaattgacttcggcagcgccagtcatgtttcaaaagctgtgtgttctacatacctgcagtctagatattatcgagctcctgaaattatcctgggactgcctttctgcgaggcaatcgatatgtggtctctgggctgtgtgattgcagagttgttcttggggtggcccttgtaccccggtgctagcgagtacgatcagatcagatatataagccagacgcaggggttgccagccgaatatctgttgagcgcaggcaccaagaccaccaggttcttcaaccgggatacagattcaccttacccactatggcggctgaagactccagatgaccatgaggctgagaccggtattaaaagtaaagaagccagaaagtatatattcaactgtctcgatgacatggcccaggttaacatgactaccgatctcgaaggctctgacatgctggtcgagaaggccgaccgccgagagtttattgacctactaaagaaaatgttaaccattgatgctgataaaagaatcacacccattgaaaccttgaaccatccattcgtgacgatgacacacttgttagactttccccattccacacacgtgaaaagctgctttcagaacatggagatctgtaagcggagagtgaatatgtacgacaccgtcaatcagagtaagacacccttcatcacgcatgtcgccccatctacctctacgaaccttaccatgacctttaataaccagctgactactgtccataaccagccttccgctgccagcatggcagcagtggcccaaaggagcatgcccttgcagaccgggaccgcccagatttgcgccagaccagacccctttcaacaagctctgatcgtgtgtcccccaggtttccagggactccaggcatcaccatcaaagcacgcgggttactccgtgcggatggagaatgcggtacccatagtgacgcaggcacccggagctcagcctctgcagatccagcctggtttacttgcccagcaggcttggccgagcggcacccagcagatattgctgcctcctgcgtggcagcagctgaccggggtggctacccacacgagcgtgcaacacgccactgtcatccctgaaaccatggcgggtacccagcagcttgccgactggaggaatactcacgcccacggatcacactataatccaattatgcagcagcccgcactacttacaggacatgtcacactgccagctgctcaaccactgaatgttggtgtggcccacgttatgcgccaacagcccacctcgaccacgtctagcagaaaatctaagcaacatcaatcctccgtacgcaacgtttcgacttgtgaggtcagttcatcgcaggccattagttcaccgcaaagatcaaaacgagtgaaggaaaacacaccacccaggtgcgcaatggtacactcctcgccagcctgtagtacaagcgtgacatgcggctggggggatgtggccagcagcactacgagggagagacaaaggcagacaatcgtcattccagacaccccctccccgaccgtcagcgtcattactatctctagcgacactgacgaagaagaggagcagaagcacgccccaaccagcacggtgagcaaacagagaaagaatgtgatctcctgtgtcacagttcacgactctccctattctgattcctcaagcaatacatcaccctactctgtgcagcagagagccggacataacaacgcaaatgcattcgataccaagggatctttggagaatcactgtaccgggaacccgcgtacgattatagtgcccccattgaagactcaggcaagcgaggtcctggtggaatgcgattccctcgtaccggtgaacacatcacatcattcatcctcatataagtcaaaaagcagcagcaatgtgacttccaccagcggccacagttctggaagtagctcaggagcaatcacctatcgccagcagagacccggaccacacttccagcagcaacagcccctgaacctctcccaggcccagcaacacatcacaactgaccggacgggctcccataggcgtcaacaggcctatatcacacctactatggctcaggcgccttattcgtttccgcataactccccgagtcatggaaccgtgcatccccacttggcggctgccgctgctgccgcacatttacctactcagccacacttgtacacctacaccgcccctgctgcccttgggagcacagggacagtggcccacctggttgcctctcagggctcggccaggcatactgtacagcacacagcgtatccggcatccatcgttcatcaggtaccggtgagtatgggacccagggtcctgccatcgcccaccatacacccttcccagtatccagctcagttcgcccaccagacttatatctctgcctccccggcttccactgtttataccggctaccctttaagccctgccaaagtgaaccagtacccctacatttag

SEQ ID NO: 226337 - DNA, 3648 bp, synthetic construct
  misc_feature 1..3648: note = Description of Artificial Sequence: Synthetic coding sequence
  source 1..3648: mol_type = other DNA
atggcatcacaggtcttggtctacccgccttacgtgtatcagacacaatcctctgccttttgttccgtcaagaagctgaaggtcgagccgtcgtcgtgtgtctttcaggaacgtaattatcctaggacgtatgtgaatgggagaaacttcgggaacagtcacccacctaccaaggggagcgcatttcagaccaaaattcctttcaatcggccacgcggacacaactttagtttgcagacctcggctgtagtgttgaagaatacagcaggcgctactaaggttatcgcggctcaggcccagcaggctcatgttcaggccccacagattggagcctggcgtaacaggctgcattttcttgaaggtccacaacgatgtggtctgaagaggaagtccgaggaactagacaaccactcctccgcaatgcagatcgtggacgaattgagtatcctaccagcaatgcttcagaccaatatgggcaacccagtaacagtggtcacggctacaacgggatctaagcagaactgtacaactggcgagggcgattaccagctcgtgcaacacgaggttttgtgctcaatgaaaaacacatacgaggtgctcgatttcctgggcaggggaacgtttggacaggtggtgaagtgttggaagcggggtaccaatgaaatcgtggccatcaagattctgaaaaatcatccgtcgtacgcccgacaaggccagatcgaagtcagcatcctggcacgactaagcactgaaaacgccgatgaatacaactttgttcgggcttacgaatgctttcagcacaggaatcatacatgccttgtgttcgaaatgctcgagcagaacttatacgactttctcaaacagaacaaattttctcccctgccccttaaagtcatacgtccaattcttcaacaagtggccacagcactaaaaaaactgaagagcctggggctcatccatgccgacctcaagccagagaacatcatgcttgtggacccagttcgacagccctacagggttaaagtgatagacttcgggagtgcctcccacgtcagcaaaaccgtatgttctacctacctacagagtcgctactatcgcgcaccagaaatcattttgggactccccttctgcgaggccatagatatgtggtccctgggctgcgtaatcgcagagttgtttctggggtggccattgtaccctggagcgctcgagtacgaccagatccggtacataagccagacccaaggcctcccaggggagcagctcctgaatgttgggaccaagagcactaggttcttttgtaaggagaccgacatgagccattccgggtggaggttaaagacattggaggagcatgaggccgagacggggatgaaaagcaaagaagccagaaaatacatcttcaacagcctagatgacgtggcccacgtaaatactgtcatggatctggaaggctccgatttactcgccgagaaggctgatcgccgagagtttgtttccctcctcaagaaaatgctcctgatcgatgccgatcttcggattacgccggcagagaccttgaatcacccattcgtcaatatgaaacacttgctcgacttcccccattcaaatcacgtgaagtcctgcttccacatcatggatatctgcaaaagccacttaaactcatgtgatactaataatcataacaaaacctccttactcaggccagtcgccagctcttccactgccaccctaacagctaattttaccaaaatcggcaccctccgcagccaggctctgactacatctgctcactctgttgtgcatcacggcatccccttgcaggctggaacagcccagttcgggtgcggggacgcatttcagcagaccctgatcatttgtcctccagcgatacaaggaatccccgctacccacgggaagcctacaagttactcaatccgggtggataataccgtgccacttgttacccaggcccctgctgtccagcccctgcaaatccggccaggcgtcttatcccagacatggtccggtagaacacagcagatgttggttccagcgtggcagcaagttacccctctagcccctgctacaactacgctgacaagtgagtccgttgcgggttctcatcgtctaggggattggggcaagatgatctcttgctccaaccactataactctgtgatgccacagccattgctgacaaaccagattaccctgagcgctccgcaacccgtctctgtaggcatagcacacgtcgtttggcctcagcccgcaacaactaagaaaaataagcaatgtcaaaataggggaatattggtgaagttaatggaatgggaacccggtcgcgaggagatcaatgcattcagttggagtaacagcctgcagaacacaaatattccccattcggcatttatctctcccaagattataaatggcaaggacgtggaggaagtaagttgcatcgagacccaagacaaccagaattcagagggcgaggcacgaaactgttgtgagacatcgatcaggcaggactcagatagctctgtgtcagataaacagagacaaactattatcatcgctgactcaccgtccccagccgtgtccgtgataacaatcagcagtgacactgacgaggaggagacctctcagcggcacagtctgagggagtgtaagggctctcttgattgcgaagcgtgtcagagtactctgaatattgatagaatgtgcagtttgtccagtcccgactcaaccctgagcacttcctcctccggtcagagcagcccctctccttgcaagagacctaacagcatgtcggacgaggagcaggaatcttcttgcgataccgtcgacgggagtcctacaagcgactctagcggccatgattccccatttgccgagtcaacctttgtggaagacacccatgagaacaccgaacttgtctcaagcgctgatacagaaacgaaacctgcggtctgcagcgtcgtggtgccacctgtagagctagaaaatggcctgaacgctgacgaacacatggccaacactgactcgatatgccagcccttaattaaaggtagaagcgcccctggaagactgaatcaaccctctgctgtcggtacccgacagcagaaactaactagtgctttccagcagcagcacctgaatttcagccaggtccagcactttggttctggccaccaggagtggaacggtaacttcgggcacagacgccagcaggcttatatcccgacgtctgtgacatccaatccattcacattgtcccatggctctccgaatcacaccgccgttcacgcacaccttgccggaaacacgcacctgggcggacagcccacactgctgccctatccctctagtgcaactctcagctctgctgcacctgtggcccatctcctggcctcgccatgcacaagtagaccgatgctccagcatcccacgtacaatatatcgcacccatctggcatcgtccaccaggtgccagtgggcttaaatcccagactgctgccaagtcccaccatccaccagactcagtacaagcccatattccctcctcactcctatatcgctgcctctcccgcatacactggatttccgctctcccccactaaactcagccagtatccctatatgtag

SEQ ID NO: 226338 - DNA, 3585 bp, synthetic construct
  misc_feature 1..3585: note = Description of Artificial Sequence: Synthetic coding sequence
  source 1..3585: mol_type = other DNA
atggcctcccaggtattagtctacccaccatacgtataccagacacagtcctcagccttttgctcagtgaagaaattgaaggtggagccctcttcgtgtgtcttccaggagcgtaattaccccaggacctacgtgaatggcaggaactttggcaactcccatcccccaacaaagggatctgccttccaaactaagatcccattcaaccgaccacgaggtcataacttcagcctccagaccagtgcggtggtgcttaagaacaccgccggagctaccaaggtgattgccgcacaggcgcagcaggcacacgtccaagcccctcagataggcgcttggaggaaccgcctgcatttcctcgaaggtccccaacgctgtggactgaaaagaaaaagcgaagagttggacaatcactcaagcgctatgcaaatcgttgacgaattgtcaatactcccggcaatgttacaaacgaacatggggaatccagtgaccgtggttacagctacaactggttccaagcagaactgtaccacaggagagggcgactatcagctggtccagcatgaggtgctatgttccatgaaaaatacctatgaggtgctggacttcttgggcaggggaaccttcgggcaagtggtgaagtgctggaaaaggggtaccaatgagatcgtggccataaaaattcttaagaatcaccctagctatgccagacaaggccagatcgaagtctccatcttagcaagactctccacggaaaacgcggatgagtacaacttcgtgagagcctacgaatgctttcagcatcgtaatcatacatgcttagtattcgagatgctggagcagaatctgtacgatttccttaagcagaacaagttcagccctctgcccctcaaggtcatacggcctatcctgcagcaggtggccacagctctaaagaagcttaaaagcctcggcctgatccatgccgacctcaagcccgagaatatcatgctggtagacccagtgagacagccctaccgagtaaaagtgattgacttcggttcggcctcacacgtttctaaaaccgtctgttcaacctacctgcagtctcgatattaccgcgcaccggaaataatattaggactccccttctgtgaagctatcgacatgtggtctctgggctgtgtgattgcagaattatttctgggctggcccctgtatccgggtgccctggagtatgaccagatccgatacatatcgcagacccagggcctgcctggtgaacaactgttgaatgtgggtacaaagtctactagattcttttgtaaagagacggatatgagtcattcaggctggagactgaaaacacttgaggaacatgaggcagagaccgggatgaaatccaaagaggccagaaagtacatattcaatagcctggacgatgtcgctcacgtcaacacagtgatggatttggagggcagcgatctcttagccgaaaaggctgatagaagggagtttgtgtcactgctcaagaagatgctgctgatcgatgctgatttgcgaatcacccctgcagaaacactgaatcacccattcgtgaacatgaagcatcttctggattttcctcacagcaaccatgtgaaaagctgcttccacatcatggacatttgcaaatcccaccttaactcctgtgacacgaacaaccataacaaaaccagcctgctccggcctgtggccagcagttccaccgcaacattgactgcaaattttaccaaaatcgggactctgaggagtcaggcactcactacgtcagcgcattctgtcgtccatcacgggatcccactgcaggcaggcacggctcaattcggctgtggagacgcatttcaacagacgttgatcatttgtccacctgctattcaaggcatacccgcaacccatggcaagcctaccagctattccatccgtgtggataatacagtgccactagtgacgcaggcgccagcggtccaacccctgcagatccgcccaggcgtgctgtcccaaacctggtcggggcgaacacagcagatgctggtgccagcctggcagcaggtgactcctctagcgccagcgaccacaaccttgaccagtgagtcagtcgcaggctcccacagactaggcgactggggaaagatgatctcgtgtagcaaccattacaactccgttatgccccagcctctcttgactaatcagattaccttatccgccccacagcctgtgtccgtaggcatcgctcacgtggtctggccacaacctgctaccacaaagaaaaataagcagtgccagaatcgaagcaacagtctccagaacactaacattccccactccgcttttatctcgcccaaaatcatcaacgggaaagacgttgaagaagtctcatgcattgaaactcaggataatcagaattcagagggggaagccaggaactgttgtgaaaccagtatccggcaggactccgactcctctgtgagcgacaagcagcggcaaacgattatcatcgccgactccccatctcccgcagtatctgtgataactatctcaagcgacaccgacgaggaagagaccagccagcgccatagcttacgtgaatgcaaaggatccctagactgcgaagcttgtcagtccaccttgaatatagatcggatgtgctctctctcaagtcccgattccactctctccacctccagtagcgggcaaagcagcccgtccccctgtaagcgccctaattccatgagcgatgaagagcaagaatcaagttgcgacactgtagacggatccccaacctccgactcctctgggcatgattcaccttttgcggagtcaacctttgtcgaagacactcatgaaaatactgagctggtctcaagtgcagacactgaaacaaaacccgcagtgtgcagcgttgttgtgccacctgtggagctggagaacggactgaacgcggatgagcacatggccaatactgactctatttgccagcccctcatcaaagggcgaagtgccccaggccgtttgaatcagccttctgcagtgggaactcgacagcagaaattgacatcagcctttcagcagcagcaccttaatttctcacaagtgcagcattttggatccggccaccaggaatggaatgggaacttcgggcatcggagacagcaggcatatattcctacaagcgtgacaagtaatcctttcactctgtcgcacggctcccctaatcacactgccgtccatgcccatctggccggtaatacccatctggggggacagcccaccttattaccatatcccagctccgccactttgagcagtgctgcaccagtggctcatctcctggcgtcaccctgcacttctcgaccgatgttacaacacccaacttacaacatttcacatccctcagggattgtccaccaggtgccagtgggtttaaatcctaggctgctaccatcaccgactattcaccaaacccagtacaagccaatcttcccaccccacagttatatcgccgctagtcccgcatataccggtttcccactctccccgacaaaacttagtcagtacccctacatgtag

SEQ ID NO: 226339 - DNA, 3585 bp, synthetic construct
  misc_feature 1..3585: note = Description of Artificial Sequence: Synthetic coding sequence
  source 1..3585: mol_type = other DNA
atggcttctcaggttctggtctatcctccctatgtttaccagacgcagtcaagcgcgttctgttcggttaagaaactgaaagtagagccttcttcttgtgtattccaggagagaaattacccaagaacgtatgttaatgggagaaacttcggtaacagtcacccaccaaccaaaggttctgcctttcagacaaagatcccatttaatcgcccaagggggcataacttcagcttgcaaactagtgcagttgtccttaagaatacagctggggctactaaggtgatcgctgctcaggcccagcaggcccacgtccaggccccacagattggagcatggcgcaacaggcttcattttctagagggtccacaacgctgtgggttgaaacggaaatccgaagagttagataatcactccagcgcaatgcaaattgtggacgagctgtctattctgcccgctatgcttcagacaaacatgggtaaccccgtaaccgtagtgacagctaccaccgggagcaaacagaactgtacaaccggagagggagactaccagctcgtccagcacgaggttttgtgcagcatgaaaaacacctatgaagtactggacttccttgggagaggtacctttgggcaggtggtcaagtgttggaagaggggaacaaacgagatcgtcgcaattaaaattctgaaaaatcacccaagttacgcgagacaggggcagattgaggtgtccatactggccagactctccactgaaaacgccgacgaatacaacttcgtgagggcttacgagtgctttcaacaccggaatcatacttgcctagtattcgaaatgctggaacaaaatctgtatgattttctaaaacagaataagttttcccccctgcctcttaaggtcattaggccaatcttgcagcaggttgctactgcgctgaagaagctgaaatcgctgggactcattcatgcagacttgaagcccgagaatattatgctcgtggaccccgttcgccagccctaccgtgttaaagtaattgatttcggaagcgccagtcatgtgtctaaaaccgtatgttcgacctaccttcaatcacgatattaccgagccccagagattattctgggattaccattctgtgaagcaatcgacatgtggagcctcggctgtgtgatagcagagcttttcttgggttggcctctctaccctggtgcattggaatacgatcaaatccgctatatatcccagacgcaaggactgcctggtgagcaactcttgaatgtggggaccaaaagcacccgattcttctgtaaagaaactgacatgtcacacagcgggtggaggctgaagacactcgaggagcacgaggccgagacagggatgaagagcaaggaggcccgtaagtatatctttaatagtctagacgacgtggcccacgtgaacaccgtgatggaccttgaaggatctgatctcctggctgagaaagcagacagacgagagtttgtgagcctactgaaaaaaatgctccttatcgatgccgacctcagaataactcccgcagagacactgaatcatccattcgttaatatgaaacacttgctcgatttcccgcactctaatcatgtgaagtcctgttttcacattatggatatctgtaaatcacacctgaactcttgcgataccaacaaccataacaaaacctctcttcttaggcccgtggcaagttcctccaccgccacgcttactgcaaatttcaccaagattgggactcttagatcccaggccctgacaacctccgcccactctgtggtccaccacgggatcccactgcaggctggtacagcccagtttgggtgcggggatgccttccagcagacccttatcatttgcccacccgcaattcagggcatccctgcaacacatggtaagcctacatcatactctatcagggtagataacacggtgccacttgtcactcaggcaccggcagtgcagcctttacagattaggcctggagttctcagccagacatggtccggccgtactcaacagatgttagttcccgcttggcagcaagtgaccccgctggcgccagctacgaccacgctgacctccgagagtgtggcagggtcccaccgactgggcgactggggtaaaatgattagctgttctaatcattacaactccgtgatgccccagcccttactgacaaatcagattactctgagtgccccacagcctgtaagcgtcggcattgcccacgtagtctggcctcagccagccactaccaagaagaataagcagtgccagaaccgctcaaatagtctgcagaacactaacataccgcactctgccttcatttcaccaaaaataataaatggcaaagatgtcgaggaggtgtcctgcattgaaacccaggataaccaaaattccgaaggcgaggcacgcaactgctgtgagacatcaattagacaggacagcgacagctctgtgtctgacaagcagaggcaaaccattatcatcgcagatagcccaagccccgcagtatctgttattaccatcagctccgataccgacgaagaagagacctcacagagacacagtctgcgggaatgtaaaggaagcctagactgcgaggcctgtcaatccacactgaatattgaccgcatgtgcagtctgtctagtccagacagcactcttagcacctccagctcaggacaatcctcccccagtccgtgtaagcgcccaaatagtatgtccgatgaagaacaggaatctagttgtgatactgtggatggttctccaacatcggacagctccggtcatgatagcccatttgctgaatctacctttgtggaagacacccacgaaaacactgagctcgtgtcttccgccgacaccgagaccaagccagccgtctgcagcgtcgttgtgccacccgtcgaactagaaaatggccttaatgcagatgagcacatggcgaatacagattctatctgccagcccctgatcaaaggtcgcagcgctccaggacgtctaaaccagccgtctgctgtggggacgcgacagcagaagctcacttccgcttttcagcaacagcatctgaacttttcccaggttcagcatttcggttcaggacaccaggaatggaacggtaattttggacaccgccgacagcaggcctatattccaacaagcgtgacgagcaatcctttcacactgtctcatggttccccaaaccacactgctgtgcatgctcatcttgccggtaacacacacctgggcggtcagcctacactgctgccataccccagctcagcaaccttatcttcagcagccccagtggctcatttgcttgcctccccttgcacatcaaggcccatgctccagcaccccacatacaacatatctcaccctagtggcatcgtgcaccaggtaccagtcgggctcaatccgcgtctgctcccatcccccaccatccatcagactcagtataagcccattttccctcctcacagttatattgcagcatcacctgcctatacaggcttccccctgagcccaactaagctttcccagtacccctatatgtag

SEQ ID NO: 226340 - DNA, 3585 bp, synthetic construct
  misc_feature 1..3585: note = Description of Artificial Sequence: Synthetic coding sequence
  source 1..3585: mol_type = other DNA
atggcttctcaagttctcgtttatccaccttatgtgtatcagacacagtcaagtgcattctgtagcgtgaagaaattaaaggtggaaccaagttcttgcgtattccaggagcgcaactaccccaggacctacgtgaatggtaggaacttcggcaattcacatccacccacaaagggctctgcgttccagacaaagatcccgttcaaccgaccacgcggacataatttctccctccaaacatccgccgtcgtgctgaagaacactgcgggtgcaaccaaggttatcgctgctcaggctcaacaggcacacgtacaagctccccaaatcggggcttggaggaaccggctccatttccttgagggccctcaaaggtgcgggctaaaaaggaaatccgaggagcttgataaccacagcagcgcaatgcaaatcgttgacgagctgtcaatcctgcctgccatgctgcagactaatatgggcaatccagtgaccgttgtaaccgcaaccactgggtcaaagcagaactgcactactggcgaaggggactatcagctggtacaacatgaagtgctatgctccatgaagaacacttatgaggtgcttgatttcttgggtagagggacattcggacaggtcgtgaagtgctggaaaagagggaccaacgagatcgtcgcgatcaagatattgaagaatcatccaagttacgcccgacagggccaaatagaggtttccattctggccaggctctcaacagagaatgcggacgaatacaattttgtaagagcttatgaatgcttccaacatcgcaatcacacttgtctggtgtttgagatgttggaacagaatctctacgactttttaaagcagaacaaattttcacccctccctttgaaagtgatccggccaatactgcagcaggtcgcaaccgccctcaagaagctaaagagtttaggactgatccacgccgacctgaagcctgaaaatatcatgctggtggacccagtgcggcagccttatcgggtcaaggtgatcgacttcggaagcgcatctcacgtctccaaaaccgtgtgttctacatacctccagtcaaggtattacagggcccctgagattatattgggtttgcccttctgcgaagcaattgatatgtggtctctcgggtgcgtgatcgccgaactattccttgggtggccactgtacccgggagccctggaatatgatcagatccgatacataagccaaactcagggactgccaggagagcagctcctgaacgtgggcacgaagagtaccagatttttctgcaaagagaccgacatgagccattctggctggaggctgaaaacactggaggagcatgaggcagaaaccggaatgaagtccaaggaagccaggaaatatattttcaattctctggatgacgtggcccacgtgaataccgtgatggacctggagggatccgacttgctggcagagaaggctgacagaagggaattcgtgtctctgctgaagaagatgctcctgattgatgcagaccttagaataaccccagctgagaccctgaatcaccctttcgtgaacatgaaacacctactcgactttccccattctaatcacgtaaagtcctgtttccacattatggacatttgcaaatctcatctcaactcatgtgacaccaacaatcataataaaacgagcctgctgcgccctgttgcatcctccagcaccgctacgttgactgccaactttaccaagatcggaaccctgaggtctcaggccctcaccacttccgcgcactccgtggtacatcacggcataccgctgcaggcaggaaccgcccagtttggctgcggtgacgccttccagcaaacgctcatcatctgccctccagccatccaaggaatcccagctacgcacggaaaaccaacatcctatagcatccgcgtggataataccgtaccgctggtcactcaggctcccgctgtccaacctctgcagataagaccaggtgttctgtctcagacttggtcaggtaggacccagcagatgttagtaccggcttggcaacaagtcacccccttggcgccagccacgactaccttgacaagtgagtctgttgccggaagccacagactcggcgactggggcaagatgattagctgttctaaccattacaatagtgtaatgccgcagccgctgttaacaaaccagatcaccttgtcagcaccccaacccgtgagcgtgggaattgctcacgttgtatggccacagcccgctaccacaaaaaagaataagcaatgtcagaatcgaagtaattcactgcagaacactaatataccacactctgcattcatcagtccaaaaattattaacggtaaggacgtggaagaggtttcatgtattgagacacaagacaaccagaatagcgagggcgaagccaggaactgctgtgaaacctccatccgtcaggatagtgattcatccgtgtctgacaagcaacgccaaacaataattattgctgattccccatcacctgccgtcagcgtaatcacaatctcttccgatactgacgaggaagagacatcccagcgacatagtctacgcgaatgtaaggggtctctggattgtgaagcctgccaaagcaccctgaacatagacaggatgtgttccctgtctagcccagactctaccttgagcacctcatccagtggacagtccagtccttcgccttgcaaacgccctaacagcatgtccgacgaagaacaagagagttcttgtgataccgtggatgggagcccaacctcagattcctctgggcatgactcacccttcgcagagtcgacatttgtggaagatacccatgagaatacggagctggtgtcgagcgccgacactgaaacaaagcctgctgtttgcagcgtcgtggttcctcccgtggagctggaaaacggcctcaatgcagatgagcacatggccaacaccgactcaatctgccagcctctgatcaaaggcaggagcgcacccggtaggctgaaccaacctagtgcagtcggaactaggcaacagaagttgacctctgccttccaacagcaacacctgaatttctctcaggttcaacacttcggttcagggcaccaagagtggaacggcaactttggccatcgcagacagcaagcctacatccccacatccgtgacgagtaaccccttcactttgtcccacgggagtccaaatcacacagccgtacacgctcacctcgcaggaaacactcatctggggggacagccgactttgctcccttacccttcctcagcaactctatcttccgccgcacctgtcgcgcatctgcttgccagcccctgtaccagcaggccaatgttacagcatcccacatacaacatctcccatcccagcgggattgtgcaccaggtgccggtaggccttaatccccgacttctgccatccccgacgatccatcaaacacagtacaagcccatctttccgccacactcttacattgctgcatcaccagcatacaccggctttcccctctcccctacaaagttaagccaatatccttacatgtag

SEQ ID NO: 226341 - DNA, 231 bp, synthetic construct
  misc_feature 1..231: note = Description of Artificial Sequence: Synthetic coding sequence
  source 1..231: mol_type = other DNA
atggcatcccaggtgctggtgtatccaccgtacgtgtatcaaacacaaagttcagcattctgctctgttaagaaattgaaagtggaaccttccagctgtgtgttccaggagagaaactatcctagaacctatgtgaacggcaggaatttcggcaacagccacccacccaccaaaggtagcgcctttcagaccaagataccgtttaacagaccccgtggccataatttttag

SEQ ID NO: 226342 - DNA, 1851 bp, synthetic construct
  misc_feature 1..1851: note = Description of Artificial Sequence: Synthetic coding sequence
  source 1..1851: mol_type = other DNA
atgtctacgatccaatctgaaacagactgctacgacatcatagaagtcctgggaaagggaacgttcggcgaggttgccaaaggctggcgtagatcaacaggcgaaatggtggcaatcaagatcctgaagaacgacgcttaccgcaacaggattattaaaaatgagttgaagcttttgcattgcatgcgcggattagaccccgaagaagcccacgtgattagattccttgaattcttccacgatgctctcaagttctacttggtgttcgaacttctcgaacagaacttgtttgagtttcagaaagaaaataactttgcaccattgccagctagacatatccgcaccgtgaccttgcaggtgcttaccgctcttgcgaggctgaaggagctggccattatccacgctgacttgaagccggaaaatattatgctggtggatcaaaccaggtgtccatttcgcgtgaaggtgatcgactttgggagcgctagtatattttctgaggtcagatatgtgaaagaaccctacatccagtcaaggttctatcgggcaccagaaatcttactggggctgccattctgtgaaaaggtagacgtgtggagccttggctgcgttatggccgaactgcaccttggttggcctctataccccggaaacaacgagtacgatcaagtgcgctacatttgtgaaacccagggtctgcctaagccgcatctcttgcatgcggcatgcaaagcccaccatttttttaagagaaatccgcaccccgatgccgctaacccatggcagctaaagtccagcgcagattatctggcagaaactaaggtccgcccacttgaacgaaggaagtacatgttgaagagtctcgaccagattgagaccgttaatggtgggtctgtagcttcccgcttgaccttccccgatagagaagcattagccgaacacgcggatctgaaaagtatggtagaactgatcaagaggatgctcacttgggagagccacgaacgcatcagtccttctgcagcgctccggcatccgtttgtctctatgcaacagctgcgttcagcgcacgaaacaactcactactatcaattgagtctgcgatcatataggttgtccctccaggtggagggcaaaccccctaccccggtggtggccgctgaggacggcaccccatactactgcctagctgaggagaaggaagcagccggaatgggaagtgttgccggaagctcgccctttttcagggaggaaaaggccccagggatgcagcgggcaattgaccagttggatgatctgtccttacaggaagccggacacgggctgtggggtgagacatgcacaaatgccgtgagtgacatgatggttcccttgaaggctgctattaccggtcaccacgttcctgacagcggacccgagccgatcctcgctttctactctagccgcctggctgggaggcacaaggctcgaaagccacccgctgggagcaaatcggactccaatttcagtaatttaatccgtctgagccaggtgtcacctgaagatgaccggccatgtagaggaagttcctgggaggaaggcgagcatctgggggcttcagctgagcctctcgccattctgcagagagatgaagacggccctaatatagataacatgaccatggaggcagagcggcctgatccagagctgtttgacccgtctagttgtcccggtgagtggctatccgagcctgattgcactctggagtccgtgaggggtcctagagctcagggtttacctccaaggcgtagccaccagcatggtccacctagaggggctacatccttcctgcagcacgtgacaggacatcactag

SEQ ID NO: 226343 - DNA, 1746 bp, synthetic construct
  misc_feature 1..1746: note = Description of Artificial Sequence: Synthetic coding sequence
  source 1..1746: mol_type = other DNA
atggtggccatcaaaattcttaagaatgacgcctacaggaacagaataataaagaacgaactaaaactgctgcactgcatgagagggctcgaccccgaggaagctcacgtgattcgattcctggagtttttccacgatgccttgaaattttatctggtcttcgaactgcttgagcagaacctctttgagttccagaaggagaacaatttcgcccctctgcctgctaggcatattaggactgtcactcttcaagtactcaccgctcttgccaggctgaaagaactggctataatacatgccgacctgaagcccgaaaatatcatgctcgtggaccaaaccagatgtccctttcgcgtgaaagtaatagattttggaagcgcaagcattttctcagaggtccgatacgttaaggaaccatacattcagagcaggttttatagagctcccgagatcctcttgggcctgccattttgcgagaaagtcgacgtgtggtcccttggctgcgtgatggccgagctccacctcggttggccgctttacccagggaataatgagtacgaccaggttagatacatttgcgagactcaggggctcccaaagcctcacttgttgcacgccgcatgcaaggctcaccatttcttcaagaggaatccacatcctgacgcggctaacccctggcagctgaagagctctgccgactatctcgcggagacaaaagtgcgtcccctcgagaggaggaaatatatgctgaagagcctggatcagattgaaacagtgaacggaggctccgttgccagcaggttgaccttcccagatcgtgaggctctcgctgagcatgcggatctcaagtctatggttgagctgataaaaagaatgcttacttgggagtctcacgaacgcatcagccccagcgccgctctgcgtcacccatttgtgtcaatgcagcagctgcggtcagcccacgagactacccactattatcagctttcgctaagaagctaccggctttcactccaggtggagggcaaaccgccaactcccgtagtggcagccgaagacggcacaccttattattgtttggccgaggaaaaggaggcagccggaatgggatcagtggccggatcatctccttttttccgcgaagagaaggcaccaggcatgcagcgcgctattgatcagctcgatgatctgtccctccaggaggccggacatggactgtggggcgagacttgcacaaacgccgtctccgatatgatggtgcccctcaaggccgctattaccggacatcacgtgccagatagcggaccagagcctatcttagccttctactcatcaagattggcgggacggcataaagcaaggaagccacctgcgggttccaaaagcgacagtaattttagcaatctcattcgcctgtcacaggtttccccggaggacgaccggccttgtcggggatcatcatgggaggaaggggagcacctgggagcgtccgccgaacctcttgccattttacagagagatgaggatgggcctaatatcgacaatatgactatggaggcagaacgccctgatcccgagctctttgacccaagctcatgcccaggcgagtggctctcagagccagattgcactctggaaagcgtccgcggtccacgtgctcaaggacttcctcccaggagaagtcatcagcacggtcctcccagaggagccacatctttccttcagcacgtgaccggccatcactag

SEQ ID NO: 226344 - DNA, 675 bp, synthetic construct
  misc_feature 1..675: note = Description of Artificial Sequence: Synthetic coding sequence
  source 1..675: mol_type = other DNA
atgggtgaacagccgatctttagcactcgagctcacgtgttccagatcgacccgaatactaagaagaattgggtgccaacttccaaacatgccgtgaccgtgtcttatttttacgactcaacccgaaatgtgtatcgcatcattagtctggatggatccaaagccattattaacagtactatcacgcccaacatgacgtttaccaagaccagccagaagtttggccagtgggccgacagtagggccaacacagtctatggtctcggctttagttcagaacaccatctgtcgaaggtgaccgaactcgagtgcgtttcaagtcaggcgaatgctgtgcacacccataaaaccgaactgaatcagaccatccaagagcttgaagagactttgaagttgaaggaagaggaaatagaaagactgaagcaggaaattgataatgccagagagctgcaggaacagagagactcattgactcagaaactgcaggaggtggaaatccgcaataaagatcttgaggggcagctttctgacctggagcagagactggaaaagtcacaaaacgaacaggaggctttcagaaacaatctgaaaactctcttagagattcttgatggtaaaattttcgagttaactgagctcagagacaatctcgccaagctgctggagtgttcttag

SEQ ID NO: 226345 - DNA, 1065 bp, synthetic construct
  misc_feature 1..1065: note = Description of Artificial Sequence: Synthetic coding sequence
  source 1..1065: mol_type = other DNA
atgggagagcagccgattttctcgacaagagcacacgtgtttcagatagacccgaatacaaagaagaactgggtgcccaccagcaagcatgccgtcactgtgtcatacttctacgactcaacccggaacgtgtaccggattatttcactcgatggcagcaaggccattatcaattcgaccattacccctaacatgaccttcacgaagacatctcaaaagtttggtcagtgggcagacagtagagcgaacaccgtgtacggcctcggcttctcttctgagcatcacctttctaagtttgcggaaaaatttcaggagtttaaggaggctgccaggctggcaaaggagaaaagccaggagaaaatggaactgacaagcacccctagtcaagaatccgcgggaggcgacctgcagtctcctctgacaccagaatctattaacggcaccgacgatgaacgcacccccgacgtgacacagaacagcgagcctagagcagagccaactcagaatgctctgccgttctcacactcctcggctatttccaagcactgggaggcggagttggcaactctcaaaggcaacaatgctaagctaaccgctgcacttctggagagcacagcaaatgtgaaacagtggaaacagcaactggcggcatatcaggaagaagcagagaggttgcataaaagagtgaccgagctcgagtgcgtgtcttcccaggcgaacgctgtgcacacacacaaaacagaacttaaccagacaattcaagaattggaagagaccctgaagctgaaggaagaggagatcgagaggctcaagcaggaaatcgacaatgctcgcgaactgcaagaacagagggatagtctcacccaaaagctgcaggaggtcgagatccgaaataaggatctagaaggccaactgtcagatcttgaacagagactggagaagtcacaaaacgaacaggaggcttttcgaaataaccttaagaccctgttggaaattctcgacggcaagattttcgaactaaccgagttacgagataatcttgccaagttactggaatgctcatag

SEQ ID NO: 226346 - DNA, 534 bp, synthetic construct
  misc_feature 1..534: note = Description of Artificial Sequence: Synthetic coding sequence
  source 1..534: mol_type = other DNA
atgggggagcagcctatcttcagtacgcgcgcacacgtgtttcagattgaccccaacacaaagaaaaactgggtacctaccagtaaacacgccgttacagtttcttacttttatgactccacgcgaaacgtttatcggatcatctctctcgacggaagcaaagcaattatcaactcaaccataacccccaacatgacattcactaaaaccagtcagaagttcggccagtgggccgacagtcgggcaaacaccgtctacggtttagggttttctagcgaacaccatctgtcaaagttcgccgagaaatttcaggagtttaaagaggccgcacggttagctaaagaaaaatcacaggagaaaatggaactgacttcaacccctagtcaagaatcggcaggcggagatctgcagtccccactgacaccggaatccataaacgggacagacgacgagagaacacctgatgtcactcagaatagcgaacctcgtgccgagcccactcagaatgctctgcccttctctcatagaaaatag

SEQ ID NO: 226347 - DNA, 543 bp, synthetic construct
  misc_feature 1..543: note = Description of Artificial Sequence: Synthetic coding sequence
  source 1..543: mol_type = other DNA
atgggatctgccataagtaagcactgggaggccgagcttgccacactgaaaggaaacaacgcaaagctaaccgccgctttgctggagtctaccgcgaacgtgaagcagtggaaacagcaactagctgcataccaggaagaggccgagcgccttcacaaacgcgtcacagaactggagtgcgtctccagtcaggcaaatgccgtgcatactcacaagacagagttgaaccagacaatacaggaacttgaggaaacattaaaacttaaggaggaagagatcgaacggctgaagcaggagatcgacaacgctagggagctgcaggagcaaagagactcactaacacagaagctgcaagaggtagagatccgaaacaaggacttagaggggcagctgtccgacctagaacagagactggagaagagccagaatgagcaagaggcattccgcaataacttgaaaacactattagagatcctggatgggaagatctttgagctgaccgaattaagggacaatctggccaagctgctggagtgcagctag

SEQ ID NO: 226348 - DNA, 1065 bp, synthetic construct
  misc_feature 1..1065: note = Description of Artificial Sequence: Synthetic coding sequence
  source 1..1065: mol_type = other DNA
atgggcgaacagccaatttttacgactcgagcacatgtatttcagatcgaccctaacactaaaaaaaactggatgcctgctagtaagcaggcagtaaccgtgtcctatttttatgacgtgactagaaactcttatcggatcatatcagtagatggcgctaaggtcataatcaactcaacaattaccccaaatatgactttcactaaaacctcacaaaaattcggccagtgggctgacagccgcgcaaatacagtgtttggtttgggattctcctctgagcagcagcttacgaaatttgctgagaaattccaagaagtgaaagaggccgcaaagattgctaaggacaaaacacaggaaaagatagagaccagctccaatcactctcaggagtccggccgagagactccaagcagcacgcaggctagctcagtaaatggcacagacgacgagaaggcgtctcacgcaggccctgctaacacccacctgaagtctgagaacgacaagttgaaaatcgccttaacacagagtgcagcaaatgtgaagaagtgggaaatcgagttgcagaccctcagagagagtaatgctcgtttgaccaccgctttacaggaatccgctgctagcgttgagcaatggaagcgtcagttcagcatctgtagggacgagaatgataggctgaggaataaaattgatgaactagaggagcaatgcagcgaaataaatagagagaaagagaaaaatacccagctcaaaagacggatagaggaactggaagcggaactgagggagaaggagaccgaactcaaagatttacgcaaacagtccgagattatcccccaactgatgtccgaatgcgagtacgtgtccgaaaaattagaagccgcagagagggacaaccagaatctggaggataaggtgagatctctgaaaacagacatcgaggagtcaaaataccggcaacggcatcttaaagtggagctgaaatctttcctagaggtgctggacggcaagattgatgatctccacgattttcggagaggtctctcaaaattgggtaccgacaactag

SEQ ID NO: 226349 - DNA, 867 bp, synthetic construct
  misc_feature 1..867: note = Description of Artificial Sequence: Synthetic coding sequence
  source 1..867: mol_type = other DNA
atgggcgaacagcccatctttactactcgagcccatgttttccagatcgatccgaacaccaagaagaactggatgcccgctagcaagcaggctgtgacagtctcttacttctacgacgtcacacgtaatagctacaggataatttcagtggatggcgctaaagtgatcatcaacagcactatcactccgaatatgacctttaccaagactagccagaagttcgggcagtgggcagactctcgggcaaatacggtgttcggtctgggcttctccagcgagcagcaactcacgaagtttgctgaaaaattccaggaggtgaaagaggcggcaaagatagctaaagataagacacaggagaagatcgagacctcttcaaatcatagccaggcttcctcagtaaatggcacggatgacgagaaagcttcccatgccggtcctgctaacacccacctcaagtccgaaaatgataaattgaaaatcgccctaacacaatcagctgccaacgtgaagaacgagattaatcgggaaaaagaaaaaaatacacaattaaaacgcaggattgaggagctggaagcagagttacgggagaaagagacagagctcaaagacctgcgaaaacagtctgagatcattccacagttgatgagcgaatgtgaatacgttagtgaaaagctcgaagcagccgagcgcgacaatcagaatttagaagataaggttaggagtcttaaaaccgacatcgaagagtccaaataccggcaacgccatttaaaagtggaactcaaatccttcttagaggttttggatggcaaaatagatgatttacacgacttcaggcggggtttatcaaagttaggcaccgacaattag

SEQ ID NO: 226350 - DNA, 900 bp, synthetic construct
  misc_feature 1..900: note = Description of Artificial Sequence: Synthetic coding sequence
  source 1..900: mol_type = other DNA
atgggcgagcaacccatctttaccactagagcgcacgtttttcaaatcgatccgaataccaagaaaaattggatgcccgctagcaagcaggccgttaccgtctcctacttctacgatgtgactaggaacagttataggatcatatccgttgatggcgcaaaggttattatcaatagcacaatcaccccaaatatgaccttcaccaagacaagccaaaagttcggccagtgggccgactcacgtgccaatactgtttttggactcggtttttcctcagagcagcaactgaccaaattcgcggaaaaattccaggaggttaaggaagctgccaagatcgccaaagataaaacccaggagaaaattgaaacctcaagtaaccattcccaagagtccggacgcgaaacacctagctctacacaggccagctcagttaacgggacggacgatgaaaaagccagccatgcgggaccagccaatacccacttgaagtccgagaatgacaagctgaaaatcgcactcactcagagcgcggctaacgtaaagaatgagatcaatagggagaaggaaaagaacacccaactgaagcggaggatcgaagagctggaagctgaattaagagaaaaagaaaccgagctcaaggacctgaggaagcaaagtgaaatcatccctcagctgatgagcgagtgtgagtatgtgtctgagaaactggaggcagcggagagagataatcaaaacctggaggataaagtacgttccttaaaaacagatatcgaggagtccaaatacagacaacgccatttgaaggtggaactgaagtcctttctggaagtattggacgggaagatcgatgacctgcatgatttcaggagaggtctgtccaaactgggcacagacaattag

SEQ ID NO: 226351 - DNA, 1032 bp, synthetic construct
  misc_feature 1..1032: note = Description of Artificial Sequence: Synthetic coding sequence
  source 1..1032: mol_type = other DNA
atgggggagcagcctatattcacgacacgcgctcacgtgttccaaatcgatcctaatacaaaaaaaaattggatgcctgcttccaagcaggctgtgactgtctcttacttttatgatgtcacacgaaactcatataggatcatcagcgttgatggtgccaaggtgatcatcaattccacgattacccctaacatgacattcaccaaaacatcgcagaagttcggacaatgggctgattcgagagctaacacagtttttgggctgggcttcagctctgaacagcagcttaccaagttcgccgagaagtttcaggaggtgaaggaggccgcaaaaattgccaaggacaaaactcaggaaaaaattgaaacgtcttctaaccacagccaggcctctagcgttaatggcaccgacgatgaaaaagcctcacacgcgggaccggcaaacacacatctgaagagtgagaacgacaagctgaaaattgccctgacccagagcgccgctaatgtcaaaaagtgggaaatcgagcttcagaccctgagggagtccaatgccagactcacaacagccttgcaggaaagtgccgcttcagtggaacagtggaaaaggcagttttcaatctgcagggacgaaaacgatcgcctgagaaacaagatcgacgagctggaagagcaatgcagcgagatcaatcgcgaaaaagagaagaatacccagttgaaacggaggatcgaagaactggaggccgagctcagggagaaagagacagaacttaaggatctgagaaaacagtcagagattattccacaactaatgtccgagtgcgagtatgtctccgagaagttggaagcagccgaacgagataaccagaaccttgaagacaaggtgcgttctctcaagacagacattgaggagtccaaataccggcaaaggcatctaaaagtggagctcaaaagcttcttagaggtgctggacggtaagatcgatgaccttcacgactttcgcagaggcctgtccaagctgggaacagataactag

SEQ ID NO: 226352 - DNA, 15 bp, synthetic construct
  misc_feature 1..15: note = Description of Artificial Sequence: Synthetic coding sequence
  source 1..15: mol_type = other DNA
tgaacagacaactag

SEQ ID NO: 226353 - DNA, 4176 bp, synthetic construct
  misc_feature 1..4176: note = Description of Artificial Sequence: Synthetic coding sequence
  source 1..4176: mol_type = other DNA
atggcggttgagggatctactatcacaagtaggatcaaaaatttgctgaggagtccctctattaagctgcggagaagcaaggcgggtaacagaagggaagacctgtcgtccaaagtcaccctggagaaggtcctgggaatcactgtgtccggcggaagaggactagcttgcgacccgcgtagcggactcgttgcttacccagccggatgcgtggtggtgctcttcaatcctcggaagcataagcagcatcacattttaaactccagtcgcaagaccattactgccctcgcattctcacccgacggaaagtacttagtcaccggagaatctggacatatgccagccgttagggtgtgggacgtcgcggaacattctcaggtggccgagcttcaggagcacaagtatggagttgcatgcgtcgcattctcaccgagcgccaagtacatcgtgtccgtaggctatcagcatgatatgatcgtgaacgtgtgggcctggaagaagaacatcgtggttgcgtcaaacaaagtttcttcccgtgttaccgccgtcagctttagcgaggactgcagttatttcgtgacagcgggtaaccggcacatcaaattctggtacctcgacgattccaagacttcgaaagtgaatgctacagtgcccttgttgggacgcagcggactgctcggcgaattgcgcaacaacttgttcactgacgtggcttgtggtcggggaaaaaaggccgattctaccttctgcatcacctcatcaggcctgctctgtgagttctccgaccggaggctactcgataaatgggtggaactgcgggtgtatcccgaagttaaagattctaatcaggcatgcctccctccttcaagcttcatcacttgttccagcgataacaccatacgactatggaacaccgaaagcagcggagttcacggctctaccctgcacagaaatattctgtcctccgatctcattaagatcatttatgttgacgggaatacccaggctctgctcgataccgagctgcctggaggtgataaagctgacgccagtcttctggatccacgtgtgggtatccggtcagtgtgcgtgtcaccgaatggccagcatctggcatccggtgaccgtatgggaactctccgggtccacgagctgcagtctctgagcgagatgttgaaagtggaggctcatgacagcgagatcttgtgcctcgaatatagtaaacccgacacagggcttaagctgctcgcctcagcctccagggacagactcatccacgttcttgatgcaggccgagaatactctctgcagcagacgttggatgaacactcatcatctatcacagccgtgaagttcgccgcatccgacgggcaggtgagaatgatttcttgtggcgctgataagtccatctatttcagaacagctcagaagagcggcgacggggtccaatttactaggacacatcatgtcgtgcggaagacgactctgtatgacatggatgtcgagcctagctggaagtacactgctatcggatgccaggacagaaatatacgcatcttcaacatatcatctggcaaacagaagaagcttttcaaaggcagccagggggaagatggcactctcattaaggtccagacagacccatctggcatatacatcgccacttcctgttcagacaaaaatctttctatttttgacttttcctcaggcgagtgcgtagctaccatgttcggccattccgagattgtgacaggcatgaagttctccaatgattgtaagcacctgatatctgtgtcgggggactcttgcatttttgtatggcggctaagtagtgagatgactatttctatgaggcaaaggctggccgagctgcggcagcgacagcggggtgggaagcagcagggaccctcttcacctcaaagagccagcggcccaaaccgccaccaagctccatcgatgctgagcccaggacctgctttgagcagcgactcagacaaagaaggcgaggatgaaggcacagaggaagaattgcctgcccttcccgtcttagcaaaatcgacaaaaaaagcattggccagtgtgccctcccctgctcttcctagaagccttagccactgggagatgagccgggcacaggagtcagttggctttctcgacccagcgccagccgctaatccaggccctagacggagaggacgctgggtccagcccggagtggaactatcggtgcggtctatgctagacctgcgacagttagaaaccctggctccctcattacaagacccgagtcaggactcattggctataatccctagtggtccacgcaaacacggccaggaggcccttgaaacatctcttacttcccaaaacgagaaaccaccccgtccccaggcatcccaaccctgctcctatccccatattatccgtctattaagtcaagaagaaggggtttttgctcaggaccttgaacccgctccaatagaggacgggatcgtgtatccagaaccctccgataatcccaccatggataccagcgagtttcaggttcaggctccggctcgcggaacattgggacgtgtttaccccggttcaaggtctagtgaaaaacactcccctgattccgcctgtagtgttgactattcgtcttcttgcctgagctcccctgaacacccaacagaagattcagagagtactgagcctttatccgtggacggcatctctagcgatttggaggaacctgctgagggagacgaagaggaagaggaggaggagggaggcatggggccttatggactgcaggagggcagtcctcagacccccgatcaggagcagttcctcaagcagcatttcgagactctggccagtggggcagctcccggagccccagtgcaggtgccagaacgttcggagtccaggtccatctcctcccggtttctgttgcaggtgcagacgagaccccttcgtgagcctagtcctagcagttcttccttggcactgatgtctaggcccgctcaggtccctcaagcatccggcgaacaacctcggggaaacggagccaatccacccggtgcccctcctgaagtggaaccctccagcggtaatcctagcccccagcaggcagcctcagtgctactgcccagatgcagactcaatccagactctagctgggctccaaagagggtggccacagcgagtcccttttctggtttgcagaaagcccagagtgtccactccctggtgccgcaggagaggcatgaagcgtccctccaagccccttcaccaggcgctctcctaagccgcgagatagaagcccaggacggtcttgggagcctgccaccagccgacggaagaccaagcaggccccacagttaccagaatccaacaacgagtagcatggctaagattagcaggagcattagcgtcggagagaatttaggactggtggctgagccacaggcccatgctcccatcagggtctcgcccctgagcaaactcgcgttacccagcagggcccacctcgtgttggatatacctaagcccctgcctgacaggccaactctcgccgcattctcacctgtcacaaaggggcgtgcccctggagaagccgaaaaacccggatttccagtggggttaggcaaagcccactccaccacggaacgttgggcttgcttaggagagggcacgacgcccaagcctagaactgaatgccaggcccaccctggtccttcaagcccctgtgcccaacagttaccggtttctagtctcttccaaggcccagaaaatctacagcctccccctccggagaagacccctaaccccatggagtgcacaaagcccggtgcagcattatcacaggactccgaacctgccgtgtccctcgaacaatgcgaacagttggtcgccgagctacgaggatctgtaagacaagcagttaggttgtaccatagtgttgccggatgtaagatgccaagcgccgagcagagcagaatagcgcaacttcttcgagacaccttcagttctgttcgccaggagctggaagctgttgcgggagccgtgttgtccagccccggttcatcgcctggggcagtaggcgctgaacagacccaggccttgcttgagcagtacagtgagctgcttttaagagcggtggaacggcgtatggaacggaaattgtag

SEQ ID NO: 226354 - DNA, 1077 bp, synthetic construct
  misc_feature 1..1077: note = Description of Artificial Sequence: Synthetic coding sequence
  source 1..1077: mol_type = other DNA
atgtccacagccagagagcagcccatcttctcgacgcgggctcatgtattccagattgatccagctaccaagaggaactggattcccgctgggaagcatgcactcacagtatcttatttctacgacgccacaaggaacgtttacaggatcatctccataggcggagccaaggcaatcatcaactctactgtgactcccaatatgacctttactaaaacaagtcaaaagtttggacaatgggccgattctagggccaacactgtgtatggcctcggctttgccagtgagcaacacctcacgcagttcgctgagaaatttcaggaggtgaaggaggcagctagactggccagggaaaagtcccaggatggaggtgagctcacatcccctgccctgggacttgcctcgcaccaagtgccccctagccctcttgttagcgctaatggccctggagaggagaaactgtttcgcagccagagcgccgacgcgcctggacctacagagcgtgaacggctcaaaaaaatgctctccgaagggtccgtgggtgaagtgcagtgggaagccgaattcttcgccctccaggactcaaacaataagttggcgggtgccctgcgcgaagccaacgccgctgccgcacagtggcgccagcagctagaagcgcaacgagctgaagctgagaggctgaggcagcgcgttgccgagctggaggcccaggctgcctcagaagtcacccccaccggcgaaaaggaggggctaggacaaggacagagcctggaacagctcgaggctcttgtccagacaaaagatcaggaaattcagacactcaagagtcagaccggcggtcctagggaagctttagaggccgctgagcgggaggaaacgcaacaaaaagttcagactcgcaacgctgagctggaacaccaattacgggcaatggagagaagtctggaggaggccagggccgagagagagagggctcgagccgaagtagggagggcagcccagctgcttgacgtgagtctgtttgagctgtctgagctgagagagggcctggccagacttgctgaagcagctccttag

SEQ ID NO: 226355 - DNA, 438 bp, synthetic construct
  misc_feature 1..438: note = Description of Artificial Sequence: Synthetic coding sequence
  source 1..438: mol_type = other DNA
atgtccaccgcaagagaacagccaatcttctctaccagggcgcatgtttttcagattgacccggcaaccaaaagaaactggattcctgctggtaagcacgcattgacggtttcctatttttacgatgctactcgaaacgtgtaccggatcatatccattgggggagcaaaagccattattaattccactgtcacccccaacatgacatttacaaaaacttcccagaagttcggacagtgggctgacagccgcgctaataccgtatacgggctgggattcgcttcggagcagcatcttacccagttcgctgagaaatttcaggaggttaaagaagccgcacggctggcaagagagaagtctcaggatggttggggcggaccccaatctgctttggttgtcgggtctttcggtgctgtattcgagcttctgatcgtctag

SEQ ID NO: 226356 - DNA, 1086 bp, synthetic construct
  misc_feature 1..1086: note = Description of Artificial Sequence: Synthetic coding sequence
  source 1..1086: mol_type = other DNA
atgtctacagccagggaacagccgatcttctcaacccgggctcatgtcttccagattgaccccgctactaaaagaaactggattccggcagggaagcacgctctgactgtcagctacttttacgatgctacgcgcaatgtgtacagaataatttcaatcggcggagctaaagctattatcaactccacagtgacacccaacatgaccttcacgaagacatcgcagaagttcgggcagtgggccgatagtcgcgctaacacagtgtacggcttgggctttgctagtgagcagcatctgactcagttcgccgaaaaatttcaagaggtaaaggaggcggcacggcttgcccgtgagaagtctcaggatggaggagagcttacctctccagcattaggcctcgcatcccatcaggtgcctccgtctccccttgtctcagcaaacggtccaggagaagagaagttattcagatcccagtccgcagatgctccgggacctaccgaaagagaacggctgaagaagatgctttccgaaggctctgttggagaagttcaatgggaggcagagtttttcgccttgcaagacagcaataacaagttggccggagctctgagggaggcaaacgcagcggcagctcaatggagacagcaactcgaggcccaaagggcggaggcagaaagactgcgacaacgcgtcgcggaactcgaggcacaggcagcatccgaggtgacccctactggcgaaaaggagggcctgggccagggtcagtcactggaacagctggaagctctagtacagacaaaagatcaagaaatccagaccttaaaaagccaaacagggggtccaagagaggcccttgaggccgcagaacgcgaggaaactcagcaaaaggtgcaggacctggaaacccggaatgccgaactggagcatcagttacgagcaatggagagatccctggaggaagctcgagccgaaagggagcgcgcaagggcagaggtgggacgcgctgcccagctcctcgatgtgagcctctttgaactaagtgaattgcgcgaaggcctggcccgtctagcggaggcggctccctag

SEQ ID NO: 226357 - DNA, 1077 bp, synthetic construct
  misc_feature 1..1077: note = Description of Artificial Sequence: Synthetic coding sequence
  source 1..1077: mol_type = other DNA
atgtctaccgcacgggaacaaccaatcttctctacacgtgcccatgtgttccaaatcgatcctgctacaaaaaggaactggattcctgccggtaagcacgcccttacggtgagttacttctacgatgctaccaggaatgtctataggattatctctattggtggagcaaaagccattatcaacagtactgtcaccccgaacatgaccttcacaaagacatcgcagaagtttggtcagtgggccgattcccgggcaaacaccgtctacgggctggggttcgcaagtgagcagcatctgacccagtttgctgagaaatttcaggaggtcaaggaggccgctagactggcacgcgagaagtcccaggatggcggagagctgacttcccccgcacttggtcttgccagccatcaggtgccgcctagtcctttagtttctgcaaacggacccggagaagagaagctgttccggagccagtctgccgatgccccaggaccaaccgaacgcgagcggctgaagaagatgctctcagaagggtccgtgggggaggttcaatgggaggctgaattcttcgccctgcaggatagcaacaacaagctggcaggcgcactcagggaagctaatgccgcagcagcccaatggcgacagcagctggaagcacagagggctgaagctgagcggttacggcaacgcgttgctgaactcgaagcacaggctgcctccgaggtgacccccaccggcgagaaggaaggcctgggacaaggtcaatccctggaacaactcgaagcactagtgcaaactaaggatcaagaaattcaaaccctgaagtcccagaccgggggaccccgtgaggccctggaggctgcagaacgcgaagagacgcagcagaaggtccagactagaaatgcggagctcgagcaccagttacgagccatggaacgttctcttgaggaggccagagccgaacgggaaagagcaagagcagaagtgggacgagccgctcagttacttgatgtatcactttttgagctctctgagctcagggaaggtcttgcacgactcgccgaagcagccccttag

SEQ ID NO: 226358 - DNA, 1086 bp, synthetic construct
  misc_feature 1..1086: note = Description of Artificial Sequence: Synthetic coding sequence
  source 1..1086: mol_type = other DNA
atgagcacagccagggagcaacctatcttttcaacacgcgctcatgtctttcagattgatccggcaaccaagcggaattggattccagccggaaagcatgcactaacagtgtcctatttttatgatgcaacccgcaacgtttaccgtattatctctattggaggcgcaaaggcgattatcaatagcacagtcactccgaatatgactttcacgaaaacctcccagaagtttggacagtgggctgatagccgagccaatactgtttacggcctgggattcgcctctgaacagcatctgactcagtttgccgagaaattccaggaggttaaggaagccgcacgccttgctagagaaaaatctcaggacggcggagaactgacatcacccgcattgggcctggcctcccaccaggtgccaccatcgccattggtgtccgccaatggaccaggtgaggagaagttgtttcgcagccagagcgccgacgctccgggacctaccgagagggagcggttaaaaaaaatgctgtcggagggttcggtgggcgaggttcagtgggaagccgaatttttcgctctgcaggattccaacaacaagctcgcgggtgcgctgagggaagctaacgccgctgcggcacaatggcggcagcagctggaggcccagcgcgctgaggcggagcgacttcgccaacgagtggcagagctcgaagcacaggcagcaagtgaagtgacgccaacaggcgagaaggaggggttaggacaaggccagagcctggaacaattggaagccttggtgcagacaaaggatcaggagatccagacacttaagagtcagacaggcggtccacgagaagccttagaagccgcagaacgagaggagacccagcagaaggtgcaagatctggagacgaggaacgccgaactggaacaccagcttcgggctatggagcggtccctggaagaagccagggccgagagggagcgagccagagcagaagtcggcagggcagcacagttgctcgatgtcagtttgttcgagttatctgaactccgggaaggtttggcaagattagctgaagccgctccttag

SEQ ID NO: 226359 - DNA, 1086 bp, synthetic construct
  misc_feature 1..1086: note = Description of Artificial Sequence: Synthetic coding sequence
  source 1..1086: mol_type = other DNA
atgagcacagcacgagagcagccaatcttttcgaccagggcccatgtgtttcagatcgatccagcaaccaaacgcaactggattccagccggaaagcatgcactcaccgtttcatatttttacgatgccactaggaacgtgtataggatcattagcatcggtggcgcaaaggctataatcaatagcacagtgacccccaacatgacgttcaccaagacctcccagaaattcggccaatgggccgatagccgagcgaatacggtttacgggctaggatttgcatcggagcagcacttgacacaattcgctgaaaaatttcaggaggtgaaggaagcggcaaggctggcccgagaaaagagtcaggatgggggtgaactcactagtcctgctctcggcttagcctcacaccaggtgccaccgagtcctttggtcagcgctaacgggccaggggaagagaaactcttccgttcccagagcgccgacgcccctggtccaaccgagcgtgaaaggctcaaaaagatgctgtccgagggttccgtaggtgaagttcagtgggaggcagagttttttgccctgcaggactccaataataagcttgccggagcccttagggaggctaacgccgcagctgcccagtggcgccagcagcttgaggcccaaagggccgaggctgagcgtctcaggcaacgggtcgcggagctggaggcccaggcagcctctgaagtgacacccactggcgaaaaggagggactcggacagggccagtcgctggaacagctggaagccttggtgcagactaaggatcaggaaatccagactctcaagtcccagaccggtggtcctcgggaagccctggaggcagctgaaagagaagagacacaacagaaggtgcaggacttggagacccggaacgcagagctggagcaccagttacgcgcaatggaaaggtccctggaagaagcaagagccgagcgcgaaagagcccgtgctgaggttggacgagccgctcagctcctagacgtgtctctgtttgaactgtccgagttgcgtgagggcctggcgagattggctgaagctgcaccgtag

SEQ ID NO: 226360 - DNA, 978 bp, synthetic construct
  misc_feature 1..978: note = Description of Artificial Sequence: Synthetic coding sequence
  source 1..978: mol_type = other DNA
atgtctacggcccgagagcaacccattttctctactcgggctcatgtgtttcagatcgaccccgcaaccaaacggaattggatacctgctggcaaacatgccctgaccgtaagctatttctatgatgctacacggaacgtgtacagaatcatttccatagggggtgcaaaagctatcattaactcaaccgtgactcctaacatgacattcaccaagaccagtcagaagtttgggcagtgggctgactcaagggctaacacagtctacggtctggggtttgcttctgaacagcatctgactcaggtcccgccatccccactggtctctgccaacgggccaggcgaggagaagcttttccggtcccaatcggccgacgctcccggaccgacagaaagagagagactgaagaagatgttgagcgagggctccgtcggcgaggtccagtgggaagccgagtttttcgctcttcaggattctaacaacaagttagcaggagcattacgcgaggctaatgccgcagctgctcagtggcggcagcagctcgaagctcagagggctgaggcggaaagactgaggcaacgcgtggccgaattggaggcgcaggccgcttccgaggtcactccaaccggagagaaggaggggttgggacaggggcagtccctcgagcaactcgaagctctcgtgcagaccaaggatcaggagatccagactctgaaaagtcagaccggaggtccaagggaagccctggaggcagctgaacgcgaggagacgcagcagaaggtccaggacctggaaaccaggaacgccgaactagagcatcagctgcgcgctatggaaaggtccttagaagaggccagagccgagagggaaagagccagagccgaggtggggagagctgcccaactacttgacgtgtcattgttcgagctgtccgagctgagggagggcctggcgaggctagcggaggcggcaccctag

SEQ ID NO: 226361 - DNA, 1176 bp, synthetic construct
  misc_feature 1..1176: note = Description of Artificial Sequence: Synthetic coding sequence
  source 1..1176: mol_type = other DNA
atggagtctgaaaccgaacctgaacccgtgaccctactggtcaagtcgcctaaccagcggcacagggatctggagctgtccggcgatagaggatggagcgtgggccacctcaaagcacatctgagccgcgtgtacccagaacggccacggcctgaggatcaacgcctgatttactccggaaaactgttactggaccaccaatgcctgagagatcttctaccaaagcaggaaaagcgtcatgtgctgcacctggtgtgtaacgttaagtccccgtccaagatgccagaaatcaacgcgaaagtggctgaaagcacggaagagccagcaggctctaatagaggacagtacccggaggactcatcatcagacggcttgaggcagcgtgaggttctccgtaatctgtcaagccccggatgggaaaacattagtcgtcctgaggctgcccagcaggctttccagggactgggacccggtttttcaggatacacgccctacggctggttgcagttgagttggtttcagcagatctacgcacggcagtattacatgcagtacctggccgcaacagccgcaagtggggcatttgttcccccaccgtcagcccaggaaatccctgtcgtgtccgccccagctcccgcacccatacataaccagttcccagccgagaatcagcccgcaaaccagaacgccgctccccaagtggtcgttaatccaggcgctaaccaaaatctgcggatgaatgcccagggaggccctatcgtcgaggaggatgatgagattaaccgcgattggctggactggacttacagtgctgccacattctccgtgttcctcagtatcctgtacttctattcatcactatcgcgcttcctgatggtgatgggcgctactgtagtgatgtacctgcaccacgtcggctggtttcccttcaggcccagacccgtccagaatttccccaacgacgggcctccacctgatgtggtgaaccaggaccccaataacaacctgcaggaaggcaccgaccccgagaccgaggatcctaaccacttgcctcctgacagggacgtgttagacggcgaacagacctccccgtcctttatgtccacagcttggctggtcttcaagacattctttgcttccctcctgcccgagggtccaccagccattgccaactag

SEQ ID NO: 226362 - DNA, 699 bp, synthetic construct
  misc_feature 1..699: note = Description of Artificial Sequence: Synthetic coding sequence
  source 1..699: mol_type = other DNA
atggagtctgaaacggaaccagaacccgtaacgctgcttgttaaaagtccgaaccagagacaccgggatctagagttgtctggagatcggggttggagtgtcgggcatttaaaagcacacctctccagggtctatcccgagaggcctcgacctgaagatcaaagactcatctactctggaaagttgctgcttgaccaccagtgcctccgggatcttctcccaaaggagaagcgtcatgtgctccatttagtgtgcaacgtcaagtctccttcaaaaatgccggaaatcaacgcgaaagttgccgagtctactgaagagccagccggaagcaataggggtcaatacccagaggactccagcagtgacgggcttagacagcgcgaggtcctccgcaacctctctagcccagggtgggaaaatatctccaggcaccatgtaggttggtttccattccggccacggcctgtccagaattttcctaacgatggccctcctcccgatgtggtcaaccaagatcctaacaacaatctacaggaaggaaccgaccctgagactgaagatcctaaccacctgcctccagaccgggacgttttagacggtgaacagacctctccaagcttcatgtccactgcttggttagtgtttaagactttcttcgcctccttattgccagaaggaccacctgctatcgcaaattag

SEQ ID NO: 226363 - DNA, 1101 bp, synthetic construct
  misc_feature 1..1101: note = Description of Artificial Sequence: Synthetic coding sequence
  source 1..1101: mol_type = other DNA
atggaatccgagactgaaccagaacctgtcacgctgctggtgaagagtcccaatcagcgccaccgcgacctcgaactgagcggcgacagagggtggtctgtcggccaccttaaggcacacttaagcagagtctacccagaacggcctcggcctgaagatcagcgactgatctactcagggaagttactgcttgatcatcagtgcctgagagacttgcttcctaaggtggccgagagcaccgaggagccagctgggtccaaccgcggtcagtacccggaggacagcagttctgatggtctcaggcagcgggaagtgctgcggaatcttagcagccccggatgggaaaacatttctaggcctgaagcagcccagcaagcattccaagggctgggtcctggcttttcggggtacactccgtatggatggctacaactgtcgtggttccagcagatttatgcgcgtcaatattacatgcagtatctagcagctaccgccgcaagcggagcatttgtccctcccccatcagcacaggaaatcccggtcgtgtcagctcctgcaccagcaccaattcataaccaatttcctgctgagaatcagcctgcaaaccagaatgccgctccgcaggtggtagtgaatccaggcgcaaatcagaacttgcgaatgaacgctcaggggggaccaatagtggaggaagatgacgaaataaaccgggattggctggactggacctattcagctgccacgttcagcgtgttcttgtctatcctatacttctactctagcctgagccgcttcttgatggtgatgggggcaacggttgtgatgtatcttcaccatgtcggctggttcccatttcgccctcgacctgttcagaattttcctaatgatggccctccaccggatgttgttaatcaggatcctaataacaacctccaggaaggcaccgaccccgagactgaggatccaaaccatcttccccctgaccgcgatgtgctggacggagaacaaacctctccatccttcatgtccactgcttggttggtcttcaaaaccttttttgcctctcttctaccggaaggccctccggctatagctaattag

SEQ ID NO: 226364 - DNA, 1173 bp, synthetic construct
  misc_feature 1..1173: note = Description of Artificial Sequence: Synthetic coding sequence
  source 1..1173: mol_type = other DNA
atggagtccgagacagaacccgagccagtgactttactggtcaaatctccgaatcagagacacagagacttggaactgtccggtgatcggggatggtcagtaggtcacctgaaggctcatctgtccagggtctaccccgagcggcctcgccctgaggaccagcgcctcatttatagtggaaagttgctgttggatcatcagtgcctgagagatctcttaccgaaggaaaagcggcatgttctgcatctcgtgtgtaatgtgaagtctcctagtaaaatgcccgaaatcaacgcgaaggtggcagaatctacggaggagcccgcaggaagtaaccggggacagtatccagaagatagctcatctgacggactgcggcagcgagaagtcttacgaaatttgtcaagccccggatgggagaacatttcacgccctgaggccgcacagcaggctttccaggggctcggacctgggttcagtggctataccccatacggatggctccaactttcctggttccaacagatatatgccaggcagtattacatgcagtatctagccgctacagcagccagtggcgctttcgtaccacctccgtcagcccaagagatccctgtggtatccgctcccgctcctgccccaatacacaatcaattcccagctgagaatcaacccgcaaatcagaacgctgctccacaggtggttgtcaatccgggtgctaaccaaaacctccgcatgaatgcccaggggggtcccatcgtggaggaggatgatgagattaatagggattggctggactggacctacagtgccgctacgttctccgtgttcctgagcattttatatttttactcaagcctatccaggttcctgatggtcatgggggcaactgtcgtcatgtacctccaccacgtgggctggttcccattcagaccccgtcctgttcagaattttcctaacgatggcccaccaccagacgtcgtcaatcaggaccctaacaacaacctgcaggagggcactgatccggagaccgaagatcccaatcaccttccccctgatcgcgacgtgctcgacggcgagcaaacatcccccagcttcatgagcaccgcatggctggtgtttaaaaccttcttcgcgtctctgctgcctgaaggccctcctgctattgccaactag

SEQ ID NO: 226365 - DNA, 1338 bp, synthetic construct
  misc_feature 1..1338: note = Description of Artificial Sequence: Synthetic coding sequence
  source 1..1338: mol_type = other DNA
atggccgagctgaaatacatatcaggtttcggtaatgaatgttcttcagaggacccacggtgcccaggaagcctgccagagggccagaataatccccaagtttgtccatacaacctctacgccgagcagctgtcaggaagcgcgtttacttgtcccagatccaccaataaaaggtcctggctgtatcggattttgccttctgtgtcccataagcccttcgaaagtattgacgaagggcaggtgacacataattgggacgaagtcgacccagaccctaatcaattacgctggaagccttttgaaatccctaaagcttcacagaagaaggtggattttgtgagcgggctgcacacactatgtggggctggggatatcaagagtaataacggactggctatacacatctttctatgtaacacatccatggagaataggtgtttctacaattctgatggcgacttcttaatcgtgcctcagaaaggcaacttgcttatttatacggaatttggtaagatgctagtgcaaccaaacgaaatttgcgtcattcagcgtggcatgaggttttctattgacgtttttgaggagacgcggggatatattctggaggtgtacggagttcacttcgaacttcctgatttgggcccaatcggtgccaatggcctcgctaatccacgagacttcttaattcctatcgcctggtatgaagacagacaggttcctgggggttataccgttattaacaaataccagggcaaactgtttgctgccaagcaagacgtttcaccatttaacgttgtcgcttggcacggcaattataccccttacaagtataacctgaagaacttcatggtgataaattccgtggccttcgaccacgccgacccatcaatttttaccgttctgaccgccaaatcagtgaggccaggcgttgcgatagcagattttgttatctttccacctaggtggggggtggccgacaaaaccttccggcctccctattatcaccgaaattgcatgtcagaatttatgggccttatccgcggacattatgaagcaaagcaggggggattcctacccggaggcggaagcctccattccacaatgacgccccacgggcctgacgcggactgctttgaaaaagcttccaaggtgaagctcgcacccgagcgaattgctgatggtacgatggccttcatgttcgaaagctccctgtccctggccgttacaaaatggggactgaaagctagccggtgcctggatgagaattaccataaatgttgggagcctttaaaaagtcactttacccctaacagtcggaatccagctgaacctaactag

SEQ ID NO: 226366 - DNA, 2187 bp, synthetic construct
  misc_feature 1..2187: note = Description of Artificial Sequence: Synthetic coding sequence
  source 1..2187: mol_type = other DNA
atggaagaaacccagccacctccacagcctaaacttcccctgtgtgattctctaatgatttggcttcagactttcaacactgcctctccttgtcaggacgtgaagcagcttactagcggtgtcgccatggcgcaggtgctccaccagatcgacgccgcttggttcaacgaaagctggctcagccgaataaaggaggacgtcggcgacaactggaggatcaaggcctccaacgtcaagaaggtcctgcaggggattatgagctactaccacgagtttcttggacagcaaatttccgaggctctgatccccgacctgaaccagataactgaatgttccgacccagtcgaactcgggagattgctgcagttgatccttggatgcgccattaattgcgagaagaaacaggaacacattcaaaatattatgactctggaggaatcggttcagcacgttgtgatgactgcaatccaggaacttatgtccaaggagattctgagtagtcccccaaacgatgcggtgggcgagctggaacagcagttgaagcgggctttggaggagctgcaggaggcgctggccgagaaagaagagctccggcagcggtgtgaagagctagacatgcaggtgaccactttgcaggacgagaagaatagtctggttagtgagaacgaaatgatgaacgagaagctggaccaattggacggttcattcgacgatcctaatactgtggtcgcaaagaaatacttccacgcccagttgcaactggagcagttacaggaagagaattttcggttggaggctgcgaaagacgactatcgagtgcactgcgaggagctggaaaagcagcttatcgaatttcagcaccgcaacgatgagttgactagcctggcagaggagaccagagcacttaaggacgagatcgatgtactcagagccacctctgacaaggccaacaagcttgaatctacagtagaaatctacaggcaaaaactgcaagatctcaacgacctgagaaaacaggtcaagacattacaagagaccaacatgatgtacatgcacaacactgtgagtctcgaggaagagctgaagaaggcaaacgcagcacgcacacaattagaaacatataaacgtcaggttcaagatttacatgtcaaactgtcctcagagagcaagagagcagacacattggctttcgaaatgaaaaggctggaggagaaacacgaagccctccttaaagagaaggaacgcctcatcgaacagcgcgacactttaaaagaaaccaacgaagaactacgctgttctcaggtgcaacaggaccatttaaatcagactgacgcctcagctacgaaaagctacgagaacctggctgccgagattatgccagttgagtatcgagaagtcttcatccggctccagcatgaaaataagatgctaaggctgcaacaagagggttctgagaacgagcggatagaagaactgcaagagcagctggaacagaagcatagaaagatgaacgagctggagacggagcagaggctatcaaaagagcggatccgcgagctccaacagcagatcgaggatctgcaaaagagcctgcaggagcagggctccaagagcgaaggagagagctccagtaaactgaaacagaaattagaagctcatatggagaaactaactgaggtccatgaggagctccaaaaaaagcaggagcttatagaggacctgcagccagatataaaccagaatgtgcagaagatcaacgagctcgaggccgctctgcagaaaaaggacgaggacatgaaggctatggaggaaagatataaaatgtatctggagaaagcgagaaatgttatcaagacattagaccccaaacttaacccagctagcgctgaaatcatgctcctgcggaagcaacttgcagaaaaagagcgtcgcatcgagattttagagtcggagtgcaaggtggctaagttcagggactatgaagagaagctcatcgtcagcgcttggtacaacaagagtctagccttccaaaaactgggtatggagagtagattggtctctggtgggggtgcctgctcagacacaggggcatgcacgcctgcacggagttttctcgctcaacaaagacacatcacaaataccagacgcaacctatcggtcaaggttcctgcgactacgagcgactag

SEQ ID NO: 226367 - DNA, 2061 bp, synthetic construct
  misc_feature 1..2061: note = Description of Artificial Sequence: Synthetic coding sequence
  source 1..2061: mol_type = other DNA
atggctcaggtgctgcatcaaattgacgccgcatggtttaacgagtcctggttgagcagaattaaggaggatgtcggggacaattggcgcattaaagctagcaacgtgaagaaagttctccaggggattatgagttattatcatgagtttctggggcagcaaatttcagaggcgctgattccggacctaaatcaaatcactgaatgcagcgatcccgttgagctgggacgcctcctgcagctgatccttgggtgcgctatcaactgcgagaaaaaacaagagcacatccagaatatcatgactcttgaagagtctgtccaacacgtggtcatgactgctattcaagaactcatgtcgaaggagatcctttccagtcctcctaatgatgcggtgggagaacttgagcaacagttgaaaagagctcttgaagagctgcaagaggctctggccgaaaaagaggaacttagacagagatgcgaggaactggacatgcaggttacaacattgcaggacgagaagaactcccttgtgtctgagaacgaaatgatgaacgagaagttagaccaattggatggctcgttcgatgacccaaacaccgtggttgccaaaaagtacttccatgcccagctgcagctggagcagctccaggaagagaacttccgattagaggccgcaaaggatgactacagggtgcactgtgaggaacttgagaaacaactgatcgagttccagcacaggaacgatgaactaacatcactggctgaggagacccgcgcactcaaagacgagatcgatgtcctgcgtgctacatccgataaggccaataagttggaaagcactgttgagatctatcggcagaaactgcaggatttaaatgacctccggaagcaggtgaagactctccaggagacaaatatgatgtatatgcacaacacggtgtctcttgaggaggaactgaagaaagccaatgcagccagaacacagttagaaacatacaaacgccaggtgcaggacctgcatgtgaaactgagtagcgagtcaaaaagggcggacactctggcattcgaaatgaagcgcctggaggagaagcacgaagctctgttgaaagagaaggagagactcatcgaacagcgggacacactcaaagagaccaatgaagaattacgatgctctcaggtccagcaggaccacctcaaccaaactgacgcaagcgcaaccaagtcctatgagaacctcgcggctgaaatcatgcctgtggaataccgggaggtgtttattcgtctgcaacacgagaataagatgctgagattacagcaggagggcagtgagaatgaaagaatcgaagaacttcaggagcagctggagcagaagcacaggaaaatgaatgaactggagacagagcagcggctctcaaaagaaagaatccgagagctacagcagcaaattgaggacctccaaaagtctctgcaggagcagggatccaaatctgaaggagagagctcgtcaaagctaaaacagaagctggaagctcatatggaaaaactaaccgaggttcacgaagagttgcagaagaagcaagaattaattgaggatctccagccagacattaaccaaaatgtgcagaagattaacgaactggaggctgctttgcagaagaaggacgaggacatgaaggcgatggaggaacggtataagatgtatcttgagaaagccagaaatgtaatcaagacactggatcctaaactgaaccccgcttcagcggaaattatgctccttaggaagcaactggctgagaaagaacgcaggattgaaattctggagtccgaatgcaaagtcgcaaagttccgcgattatgaggaaaaattgatcgtaagcgcatggtacaataaaagcctggccttccagaaactgggcatggagtctaggctcgtatccggcggaggggcttgctcagatactggagcttgcactcctgcacgttcttttctcgcacaacagcgccatattacaaacacacgcagaaatctgtccgtaaaggtcccggcaacgacgtctgattag

SEQ ID NO: 226368 - DNA, 414 bp, synthetic construct
  misc_feature 1..414: note = Description of Artificial Sequence: Synthetic coding sequence
  source 1..414: mol_type = other DNA
atggaagaaacgcagccccctccacagcccaaacttcccctctgtgatagcctgatgatatggctgcaaacatttaacacggcaagcccttgccaggacgtcaagcagttaacttcgggggtggccatggctcaagtactgcaccagattgatgccgcatggttcaatgagagctggctctctaggattaaggaagacgtcggagacaattggcgaattaaggcctcgaatgtgaagaaggtgcttcaggggattatgagctattaccacgagttccttgggcagcagattagtgaagccctcattccagacctgaaccagatcaccgaatgttcggaccccgttgagctcggcaggctcctacagctcatcctgggttgcgccatcaactgtgagaagaagcaggaacactag

SEQ ID NO: 226369 - DNA, 2154 bp, synthetic construct
  misc_feature 1..2154: note = Description of Artificial Sequence: Synthetic coding sequence
  source 1..2154: mol_type = other DNA
atgagcgtcgataaagccgaactctgcggctccctgctaacctggctgcagaccttccacgtgccatccccctgtgcgagcccacaggaccttagcagcggactggccgtcgcctacgttttgaaccagatcgacccttcatggtttaacgaagcctggctgcaagggatctcagaggaccccggtcccaactggaaattaaaagtgtctaatcttaaaatggttctgaggagtctggttgagtatagccaggacgtcctcgcccatccagtgtccgaggagcacctgcccgacgtttccctaatcggagaatttagcgatccagccgaactaggtaaattactccagttggtcttaggatgtgcgatttcttgtgaaaagaaacaggaccacatccaaaggatcatgacccttgaagaatctgtacagcacgttgtgatggaagctatacaagagctcatgactaaagataccccagattccctcagccccgagacatacggcaattttgacagccaatcccggagatactattttctgtccgaagaggctgaggagggggatgaattgcaacagcgctgtttggacctggaaagacagctcatgttgttgtcagaagaaaaacagtccctcgcccaggaaaatgctggactgagggaacggatgggtcgccctgagggtgaaggaaccccgggtctgactgcaaaaaagcttctgctgttgcagtctcagctcgagcagttacaggaggagaatttccgccttgaatctggacgagaggacgagcgcctgcgttgtgcagagctcgagcgcgaagtggcggagctccagcatcgcaatcaggcactcacaagccttgcccaggaagcccaggctctgaaggacgagatggacgagcttcgacagagcagcgagcgtgccggacagctggaggccactctgaccagttgcaggcgcagactgggggaactgagggaactcagaagacaggtgaggcagttagaggagagaaacgccggtcatgcagaacgcactaggcagttagaagacgagcttaggcgggctggctcactccgggcacagctcgaggctcagaggcggcaggtgcaagagttgcagggacagcgccaagaagaggcgatgaaggcagagaaatggcttttcgagtgtcgcaacctggaggaaaagtacgaatccgttaccaaggagaaggaacgcttacttgctgagcgtgactcccttcgggaggctaacgaggagttgcggtgtgctcagctgcagcctcgcggactcacgcaagcagaccctagtctggaccccacgagtaccccggtggacaatttggccgctgaaatcctcccagctgagctgagggagaccttactgcgcctgcagctggaaaacaaacgattatgtcggcaggaagcagctgacagggaaagacaggaggagcttcagcgtcacctcgaggatgctaaccgagccaggcacggcctggagacccagcaccgactcaaccagcagcagctgtccgaattgcgggcacaagtggaggacctgcagaaggcactccaagagcagggcggtaagaccgaagattcaattcttcttaagaggaaactggaggagcatctgcaaaaactgcacgaggcagatctcgagctacagcgaaaacgggaatacatagaggaactggaaccaccgaccgattcatctaccgcccgacgaatcgaagagctgcagcacaacctacagaagaaggacgcggaccttcgggcaatggaagaacggtaccggcgttatgtggacaaggccagaatggtgatgcagacaatggagcctaagcagcgcccagcagcaggggctccaccggaacttcattctctgcgcacacagctccgggagcgggacgtgaggataaggcatttagagatggacttcgagaaatcgaggagccagcgcgagcaagaagagaaactactgatttccgcgtggtacaacatgggaatggcactacagcagcgtgctggggaggagcgcgctcctgctcatgcacaatcgtttctggcacagcagcgcctcgctactaattcacgtcggggacctttgggtcgactggcctccctgaaccttaggccgacggacaagcactag

SEQ ID NO: 226370 - DNA, 2160 bp, synthetic construct
  misc_feature 1..2160: note = Description of Artificial Sequence: Synthetic coding sequence
  source 1..2160: mol_type = other DNA
atgtctgtggacaaagccgagctatgcggctctcttctcacctggcttcagacgttccatgtcccaagtccttgcgcttctccccaggatctgtctagcggcttagcggtggcttacgtgctcaatcagattgatccatcctggttcaatgaagcctggttgcagggtatctcggaggatccgggacctaattggaaactgaaggtgagcaacttaaagatggtgctacgctcactggtggaatatagccaagatgtcctggctcaccccgtgtcagaagagcaccttcccgacgtatccctgatcggcgaattttcagaccctgccgaactggggaaactgctgcagttggtgctggggtgcgccatttcctgtgaaaaaaagcaggatcacatacagaggatcatgaccttagaagagtcggtacaacacgtagtgatggaggcaatccaggaactgatgactaaggatacacctgactcccttagtcccgagacttatggtaatttcgacagtcagagtaggcgatattatttcttaagcgaagaggcggaggagggcgacgaactccagcagcggtgcctggatctggagaggcagttgatgctgctgagcgaagaaaagcagagtctagctcaggagaacgctggtctccgggagagaatgggacgacccgagggcgagggaacccctggcctcactgctaaaaaactgcttctcctgcagagccaattagagcagctccaggaggagaatttcaggctggagtctggccgagaggacgaaagattgcggtgcgcagaattagaacgtgaggtggcagagctccagcacaggaaccaggccctgaccagcctcgcccaggaggcccaggcccttaaggatgagatggacgagctgcggcaatcatcagagcgcgcaggacagctggaggcaacactgacctcctgtaggcgacggctaggcgagctgcgcgagctgagacggcaagtgaggcaattggaggaacggaatgccggtcatgcagagcgcacccgccagcttgaggatgagctgcgcagggctggctctctgcgagctcagttagaggcccagcgccgtcaagtgcaagagctgcaagggcagaggcaggaggaagctatgaaggcggagaagtggctgtttgagtgccggaacctggaggaaaagtacgagagtgttacgaaagaaaaggaacgtttgttggctgagcgcgatagcctgcgtgaagccaacgaggaattaagatgtgcgcaactccagccccgagggctgacacaggctgacccctcacttgacccgacgagcacccctgtcgacaatcttgcagctgagatactgcccgcagagctgcgcgagacactgctgaggctgcagcttgagaacaaacgactgtgccggcaggaggcagcggatagagagaggcaggaggagttacaacgacatctcgaggatgccaaccgcgctcgccacggcctggagacacaacataggctgaaccaacagcagctgtccgaactgagagcacaggtcgaagacctgcagaaagctctgcaggagcagggaggcaagactgaggacgctatatctattttactgaaacgcaagttggaggagcacctccagaagttgcacgaagccgacctcgaactccagcggaagagagaatatattgaggagctggagcccccaactgacagctcaacagccagacgtattgaggaactgcagcataacttacaaaagaaagacgctgatcttagggcaatggaggagcgataccgcaggtatgtggacaaagcacgaatggtcatgcagaccatggagcccaagcagaggccggcagccggtgccccacccgagctgcacagtttaaggactcagctgagagaaagagatgtgcggatacggcatttggaaatggacttcgagaaaagccgttctcaacgcgagcaagaagagaagctgctcataagtgcctggtataatatgggcatggctttgcagcagcgggctggagaggagcgggctcctgcccacgcacagtcttttctggctcaacagcggctcgcaaccaattcaagacgtggcccactgggcaggctagcatctttaaatctgcgcccaactgacaaacactag

SEQ ID NO: 226371 - DNA, 2157 bp, synthetic construct
  misc_feature 1..2157: note = Description of Artificial Sequence: Synthetic coding sequence
  source 1..2157: mol_type = other DNA
atgttctccgtagaaagccttgagcgagcagagctgtgtgaaagtctgctaacctggattcagacttttaacgtggatgcaccttgtcagacggtagaagatctgacgaatggagtggtgatggcacaggtgctgcagaagatcgacccggcttactttgatgagaactggctgaaccggatcaagactgaggtcggcgacaactggcggctcaaaatcagtaacttgaagaaaatactaaagggaatccttgattataatcacgaaatcttgggccagcagataaatgactttaccttgccggacgtgaatctcattggggaacattcagatgcagccgaattaggccgtatgctccagttaattttgggctgcgcagtgaattgtgagcagaaacaggaatacattcaggcgattatgatgatggaggagtccgtgcagcatgtggtgatgaccgccatccaggagctgatgagtaaggaatcacctgttagcgcgggaaacgatgcttatgtggatttagataggcagctaaaaaaaaccacagaggagctcaacgaggcactgagtgcgaaggaggaaatcgcgcaacgttgccatgaacttgacatgcaggtggccgctctccaggaagaaaagagttctctgttggccgagaaccaggtactcatggagagactgaatcaaagtgactcaattgaggatccaaatagcccagcgggtcgccgacacctgcagcttcaaacacagcttgagcagcttcaagaagagacatttcggctggaagcagccaaggacgactaccggatccggtgcgaggagcttgagaaagagatctctgaattgcgccagcaaaatgacgaactgactacactggccgacgaggcccagagccttaaagatgagatagacgttctaagacacagctctgataaagtgagcaagctagagggtcaggtcgaaagttataaaaagaagctggaggacctaggagaccttcgaaggcaggtcaaactgctcgaggagaagaatacaatgtacatgcagaacacggtgagcctggaagaggagctgcgcaaagccaatgccgcacgctcccagttagaaacttacaagagacaggtggtcgaacttcagaaccgtttaagcgaggaatccaaaaaggcagataagctggattttgaatataagcgcctgaaggaaaaggtcgatagccttcagaaagagaaagacaggcttcgcactgagcgcgacagcctcaaggagaccatcgaagagctccgctgtgtccaggcccaggagggacagctgaccactcaggggctaatgccactgggctcacaagagtcttcagactcactggctgctgagatcgtcacacctgagattagagaaaagctcattcgactgcagcatgagaataagatgctcaaactgaaccaggagggcagtgacaacgaaaagatcgctttgctccaaagccttctcgacgatgctaacctgcgaaagaacgagctggagacggaaaaccgtctcgtaaaccagaggctgctggaggtgcagtcacaggtcgaggagttgcagaaatcgttacaggatcagggcagcaaggccgaggactccgtgctcctgaagaagaagctggaggagcatctggagaagctacatgaggccaacaacgagctgcagaagaagagagccatcatagaggatctggagcccaggttcaacaattcgtctctgaagatcgaagagttgcaggaggccctgcgcaagaaagaggaggaaatgaagcagatggaggaacgatacaagaaatacctcgagaaagcgaaaagtgtcatacgaacgctggaccctaagcaaaaccaaggtgctgcccctgaaattcaagccctcaaaaaccagctgcaggagcgcgatcgtttatttcattcactcgagaaggagtacgaaaagactaaatcacagcgggagatggaggagaaatatatcgtgagcgcttggtataatatgggcatgaccttgcataaaaaggcagccgaagatcgccttgcatcaaccggttcaggccagagctttcttgcgagacaacggcaggcgacgagttcaagacggtcctatcccggtcatgtccagccagcaacagcaagatag

SEQ ID NO: 226372 - DNA, 222 bp, synthetic construct
  misc_feature 1..222: note = Description of Artificial Sequence: Synthetic coding sequence
  source 1..222: mol_type = other DNA
atgtccgccgaaactgcctccgggcctacagaagaccaggtagagatcctggaatataatttcaacaaggttgacaaacacccggatagcacaaccctgtgcctgatcgcagctgaagcgggtctgtcagaggaagagacccagaagtggtttaaacagaggctggccaagtggcgacggtcagaagggttgccctctgaatgcagaagtgtcaccgattag

SEQ ID NO: 226373 - DNA, 222 bp, synthetic construct
  misc_feature 1..222: note = Description of Artificial Sequence: Synthetic coding sequence
  source 1..222: mol_type = other DNA
atgagcgcagagacagcctctggaccgaccgaggaccaggtggagatccttgagtataacttcaataaggtggacaaacacccagatagcacaacgctgtgtctgatcgccgctgaagccggacttagcgaggaggagacacagaagtggtttaagcagcgattggccaagtggcgtcggagcgagggcctcccaagcgagtgcaggtccgtgaccgactag

SEQ ID NO: 226374 - DNA, 222 bp, synthetic construct
  misc_feature 1..222: note = Description of Artificial Sequence: Synthetic coding sequence
  source 1..222: mol_type = other DNA
atgagtgcggagacggcttcaggacctaccgaagaccaggttgaaattctggagtacaacttcaacaaagtggacaagcatcccgacagcaccactttgtgtttgattgcagccgaggcgggactctctgaggaagagactcagaaatggttcaaacaaaggctggccaagtggcgcagatcagaaggactgccctcagaatgtcggtctgtgactgactag

SEQ ID NO: 226375 - DNA, 285 bp, synthetic construct
  misc_feature 1..285: note = Description of Artificial Sequence: Synthetic coding sequence
  source 1..285: mol_type = other DNA
atgtctgcggagacagcgagtgggccaaccgaggatcaggtagagatacttgaatacaattttaacaaggttgacaaacacccagattcaaccactctctgtttgatcgctgcagaggccggtctttcagaggaggaaacacaaggatccgacctaatttcacgaagcaaaatctggcatcccgagtcaagccctcaaagagaaggatacccccatgactccttgccctgcctggccttcgactacttctctctcttgcctcctcaatgcaaagaaatggtgtag

SEQ ID NO: 226376 - DNA, 276 bp, synthetic construct
  misc_feature 1..276: note = Description of Artificial Sequence: Synthetic coding sequence
  source 1..276: mol_type = other DNA
atgctcatatttcttggatgttaccgacgacgcttagaggagagagctggaaccatgtctgctgagacagcatcaggtccgactgaggaccaggttgaaattctggagtataatttcaacaaggttgacaagcacccggatagcacaactctctgcttgatcgcagccgaagcaggattaagtgaggaagaaacacaaaagtggtttaagcagagactcgccaaatggagacgcagcgaaggcctgcccagcgagtgccgttccgtgaccgattag

SEQ ID NO: 226377 - DNA, 222 bp, synthetic construct
  misc_feature 1..222: note = Description of Artificial Sequence: Synthetic coding sequence
  source 1..222: mol_type = other DNA
atgtctgctgagactgcctctggaccaaccgaggaccaagtggaaattctggagtacaacttcaacaaagtcgataaacatccagactctacaaccctgtgtcttatcgctgcggaagcgggactttccgaggaggagacccaaaagtggttcaaacagcgcctggcaaagtggcgccgttctgagggactacctagcgaatgtcgttctgttactgattag

SEQ ID NO: 226378 - DNA, 285 bp, synthetic construct
  misc_feature 1..285: note = Description of Artificial Sequence: Synthetic coding sequence
  source 1..285: mol_type = other DNA
atgtccgccgaaacggcgagcggtcctacggaggaccaggtggaaattctcgagtacaactttaataaggtggacaaacaccctgattctaccactctgtgtctcattgctgcagaagccggactctctgaggaggaaacacaaggatcagacctcatctcacggtcgaagatttggcacccagaatcttctccacaacgggagggttacccgcatgattccctcccctgcctggctttcgattatttttcccttctccccccacagtgcaaagagatggtgtag

SEQ ID NO: 226379 - DNA, 222 bp, synthetic construct
  misc_feature 1..222: note = Description of Artificial Sequence: Synthetic coding sequence
  source 1..222: mol_type = other DNA
atgagcgcggagacagccagcggcccaaccgaggaccaggttgaaatcctggagtacaatttcaacaaggtcgacaagcaccccgatagtacaacgctgtgcctgatcgccgctgaagccggtctgtctgaggaagagacgcagaaatggttcaagcaacgtctagccaagtggcggagatccgagggcctgccttcagaatgcagatccgtcactgattag

SEQ ID NO: 226380 - DNA, 276 bp, synthetic construct
  misc_feature 1..276: note = Description of Artificial Sequence: Synthetic coding sequence
  source 1..276: mol_type = other DNA
atgcttattttcctaggctgctatcgccgacggctggaggagcgggctggtacgatgagtgctgaaaccgcctcgggccctacagaggaccaggtggagatcctcgagtataacttcaacaaggtggacaaacatccggattccacaactctgtgtttgatcgccgcagaagccggtctctccgaagaggagacccagaagtggtttaagcagaggctggccaagtggagacgctccgaggggctgccctccgaatgtcggtctgtgaccgattag

SEQ ID NO: 226381 - DNA, 285 bp, synthetic construct
  misc_feature 1..285: note = Description of Artificial Sequence: Synthetic coding sequence
  source 1..285: mol_type = other DNA
atgtccgcagaaactgcttcagggcctacagaagaccaagtggaaatcttggaatataacttcaataaagtcgacaagcatccagatagtaccacgctgtgcttaattgctgctgaagctggactgtctgaggaggagacgcagggtagcgacctgatttcgcgatcaaaaatctggcacccagagagctcaccccagcgagaggggtatccacatgatagcctcccttgtctggccttcgattatttcagtctgcttcctcctcaatgtaaggaaatggtgtag

SEQ ID NO: 226382 - DNA, 222 bp, synthetic construct
  misc_feature 1..222: note = Description of Artificial Sequence: Synthetic coding sequence
  source 1..222: mol_type = other DNA
atgagtgctgaaactgcttccgggcctacagaggatcaggtggagattttggaatataatttcaataaagtcgacaagcatccagactccacaacactgtgcctgattgcagcagaagccggattaagtgaggaggaaacacagaagtggttcaaacagaggctggctaagtggcgtcgctcagagggattaccatccgaatgtagatccgtgacggactag

SEQ ID NO: 226383 - DNA, 222 bp, synthetic construct
  misc_feature 1..222: note = Description of Artificial Sequence: Synthetic coding sequence
  source 1..222: mol_type = other DNA
atgagcgcagagacagctagtgggccaaccgaagatcaagtcgaaatactcgaatacaatttcaacaaggtggataagcaccctgattctaccaccctgtgtttgatcgccgctgaggccggactgagtgaggaagaaactcagaaatggttcaagcaacgactggctaaatggcggaggagtgagggactgccgtccgaatgtagatccgtaaccgactag

SEQ ID NO: 226384 - DNA, 339 bp, synthetic construct
  misc_feature 1..339: note = Description of Artificial Sequence: Synthetic coding sequence
  source 1..339: mol_type = other DNA
atgctcatctttctaggttgctatagacgaaggctggaagaacgggctggcacaatgagtgcagaaacagcctcaggcccaaccgaggatcaggttgagatcctggagtacaattttaacaaggtagataagcatccggattcaaccacactgtgcctgatagctgcagaggctgggctgtcggaagaagagacccaaggctcagatcttatttcacgcagcaagatttggcatccagagagctcgcctcagcgagagggctacccccacgacagcctaccctgtctcgcttttgattacttttcacttcttccccctcagtgcaaagagatggtttag

SEQ ID NO: 226385 - DNA, 222 bp, synthetic construct
  misc_feature 1..222: note = Description of Artificial Sequence: Synthetic coding sequence
  source 1..222: mol_type = other DNA
atgtctgctgaaactgcaagtggtcccaccgaagaccaggtggaaatcctagagtacaattttaacaaagtggataagcacccagatagtacaaccctatgccttatcgccgctgaggccggtttatcggaggaagagactcagaagtggtttaagcagagactggcaaaatggaggcggagcgagggcttaccgtcagaatgccgcagtgtgaccgactag

SEQ ID NO: 226386 - DNA, 222 bp, synthetic construct
  misc_feature 1..222: note = Description of Artificial Sequence: Synthetic coding sequence
  source 1..222: mol_type = other DNA
atgagtgccgagactgctagcgggcctacagaagaccaagttgagatacttgagtacaacttcaataaagtggataaacaccctgacagtacgactctatgtctgattgcagcagaggcaggcttgtccgaggaggagacgcagaaatggttcaaacagcggttggccaagtggaggaggtcagagggactgccgtccgaatgtaggtccgttaccgattag

SEQ ID NO: 226387 - DNA, 222 bp, synthetic construct
  misc_feature 1..222: note = Description of Artificial Sequence: Synthetic coding sequence
  source 1..222: mol_type = other DNA
atgagtgcagagacggcctctgggcctacagaggatcaggtggagatactggagtacaatttcaataaggtggataagcacccagatagcaccactctttgtctgatcgctgccgaggccggtctgtctgaagaggagacacagaagtggttcaaacagcgcctagccaaatggaggcgttcagaagggctgccttctgaatgccggagtgttaccgattag

SEQ ID NO: 226388 - DNA, 144 bp, synthetic construct
  misc_feature 1..144: note = Description of Artificial Sequence: Synthetic coding sequence
  source 1..144: mol_type = other DNA
atgtctgccgagactgcttcaggacctacagaagatcaggtcgaaattctggagtataacttcaataaagtcgacaaacaccccgacagtaccacactgtgtctgatcgccgcagaggccggtctgtcagaggaagagacctag

SEQ ID NO: 226389 - DNA, 1164 bp, synthetic construct
  misc_feature 1..1164: note = Description of Artificial Sequence: Synthetic coding sequence
  source 1..1164: mol_type = other DNA
atggccactgcacaacttcagcgcactccaatgtccgcccttgtctttcctaacaaaatttccaccgaacatcaaagcctggtactcgtgaagcgcctcctggcagtgtccgtctcctgtatcacttacctcaggggcatattccccgagtgcgcttatgggaccagatatctagatgatctgtgtgtgaaaatactcagagaggacaaaaattgcccaggctccactcagctggtgaagtggatgttggggtgctacgacgcattacagaaaaaatacgtatacacaaatcccgaggacccccagactatttcagaatgttatcagttcaagtttaagtacactaacaacggcccacttatggatttcatctccaaaaaccaatctaacgaatcaagcatgcttagcacagatactaaaaaggcttctatccttttaatccgaaaaatctacatattaatgcaaaatttgggacccctacccaacgacgtttgtcttacgatgaagctgttttactacgatgaagttacacccccagactaccagcccccaggatttaaagacggagactgtgagggagtaatctttgaaggagagccaatgtaccttaatgtaggggaggtcagtactcctttccacatttttaaggtaaaggtcacaaccgagagggagcggatggagaacatcgatagcaccatactgtcgcctaaacagattaagaccccgttccagaaaattctgcgtgacaaggatgtcgaagatgaacaggaacattacacctcggacgaccttgacatcgaaaccaagatggaggaacaggagaagaatcccgcatcctctgagctagaggaaccgagcctagtctgcgaagaggacgagatcatgagatctaaagaaagtccagacctgtccattagccactcacaagtagagcagctggtgaataaaacctctgaactcgacatgagcgaatcaaaaacccgctcgggcaaagtgttccagaataagatggctaacggtaaccaacccgtgaaatcctctaaagaaaatcgaaaacgttcgcaacatgagagcggtcgcatcgtgctgcatcattttgacagttcctcacaggagtccgtgcctaagcgtcggaaattctctgagccaaaagagcatatctag

SEQ ID NO: 226390 - DNA, 1185 bp, synthetic construct
  misc_feature 1..1185: note = Description of Artificial Sequence: Synthetic coding sequence
  source 1..1185: mol_type = other DNA
atggccacagcccagctgcagcggacccctatgagcgccctggtattccccaacaaaatcagcacagaacatcagagtctggttcttgttaagcgcttgttggcggtgtccgttagttgcatcacctacttgagagggatatttcccgagtgcgcctatggtaccaggtacctggatgacctgtgcgtgaaaatactgagagaggataaaaactgcccgggttcaacgcagctcgttaaatggatgttgggttgctatgatgccttacagaaaaagtacctgagaatggtagtgctggctgtctacacaaatcctgaagacccccagacaattagcgaatgttatcagtttaagttcaagtacaccaataacggacctttaatggacttcatttctaaaaatcagtcaaatgagagctctatgctttccactgatacaaagaaggcctcgatcttacttatccgcaaaatctatattctaatgcagaatctcggtccccttccgaacgacgtttgcctgaccatgaagttgttttattacgacgaggtaacccccccagattaccagcctccaggttttaaggatggagattgtgaaggcgtaatctttgagggtgaaccgatgtatcttaatgtcggagaagtttccacccccttccatattttcaaggtgaaagtcaccactgaaagagagcgcatggagaacattgattcgaccattctgtcacccaaacagattaaaacacctttccagaaaattcttcgggacaaggacgtcgaggacgagcaagaacattacactagcgacgacctggacattgaaactaaaatggaggaacaggaaaagaatccggcaagttctgagttggaagagcccagcctcgtgtgtgaggaagacgagatcatgcgctcaaaagaaagcccggacctgagcatctctcatagtcaggtggagcagctcgtcaacaagacctccgagcttgacatgagcgaatctaagacaaggtccggcaaagtctttcagaataaaatggcaaacggaaatcagccagttaagagcagcaaggagaaccggaagcgatcacagcacgagagtgggagaatcgtgctacaccacttcgattcgagctctcaggaatcagtgcctaaacgacggaaattcagcgaacctaaagagcacatatag

SEQ ID NO: 226391 - DNA, 573 bp, synthetic construct
  misc_feature 1..573: note = Description of Artificial Sequence: Synthetic coding sequence
  source 1..573: mol_type = other DNA
atgcggctgtggaacaagatatcacgttggatgctgggctgttacgacgctctgcagaaaaaatatttacgtatggttgtactcgctgtgtacaccaaccccgaggatccccagacaatttcggagtgctatcagttcaaatttaaatacacaaacaatggaccactcatggattttatcagtaagaaccagagcaatgaatctagcatgctctctacggacactaagaaagccagtatactgctaattagaaagatctatatattgatgcaaaaccttggcccactgcccaacgatgtgtgcttaacaatgaagctcttttactacgacgaggtgacccctcccgattatcagccaccgggtttcaaggatggagattgcgagggagtgatttttgagggtgagccaatgtatctgaacgtcggagaggtgtctacccctttccatatcttcaaggtgaaggtaaccacggagcgcgagcgaatggaaaatattgacagcactatcctttcccccaaacagattaagacaccattccagaaaattctgcgtgataaagatgtcgaggactag

SEQ ID NO: 226392 - DNA, 972 bp, synthetic construct
  misc_feature 1..972: note = Description of Artificial Sequence: Synthetic coding sequence
  source 1..972: mol_type = other DNA
atgaggctgtggaacaaaatcagccggtggatgttgggttgctatgacgctcttcagaaaaaatatctgaagataatggagcttaccgtgtataccaatccagaggatccacagactattagtgaatgctaccaatttaagtttaaatatacgaacaacggccctctgatggacttcatcagtaaaaaccagtcaaatgagtccagtatgttgagcaccgatacaaaaaaggcttccattctgctgataaggaagatctatattctgatgcaaaatctcggacctctgcctaacgatgtttgcctgactatgaagctgttttactacgatgaagtgactcccccagactaccagccacctggattcaaggacggtgactgcgaaggtgttattttcgaaggggagccgatgtacctgaacgtaggcgaggtgagcacacccttccatatttttaaagttaaggtcactaccgagcgagaaaggatggagaacatcgactcaaccattctgagccccaagcaaataaagactcctttccagaagattttaagagacaaagacgtggaggatgagcaggaacattatacttccgatgacctggatatcgagactaaaatggaagaacaagagaaaaatcccgctagctctgagcttgaagagcccagcctcgtgtgtgaggaagacgagattatgcgttcaaaagagagccccgacctatccatatcccattctcaggtggagcagctagtcaacaagacatcggagctcgacatgtccgagagcaaaactaggtctgggaaagtcttccagaataaaatggcgaacggtaatcagcctgtgaaaagttcaaaagagaatagaaaacgttcccagcatgaatccgggcgaattgttctgcatcactttgacagctcaagccaggaatcagtcccaaaaaggcgtaaattctcagaaccaaaggagcacatctag

SEQ ID NO: 226393 - DNA, 1185 bp, synthetic construct
  misc_feature 1..1185: note = Description of Artificial Sequence: Synthetic coding sequence
  source 1..1185: mol_type = other DNA
atggctaccgctcagctgcagagaacgccaatgagcgctttggtttttccaaataaaatcagcacggaacatcagtcccttgttttagtgaagaggctcttggcagtgtcagtgtcatgcataacgtacctgagaggtattttcccggagtgcgcgtacggaactcgttacctcgacgacctatgcgtgaagattctgagggaggataagaactgccctggtagtacccaacttgtcaaatggatgctgggatgctacgatgccttacagaaaaaatacctgaagattatggagctcacagtctacaccaaccccgaagatccgcagaccatatccgagtgctaccagtttaaattcaagtatacaaacaatggcccactcatggacttcatcagcaagaatcagtccaatgagtcctccatgctgtctacagatacaaagaaggctagcattcttctcatacgaaagatttacatcctgatgcagaacctcggccctctgcctaacgatgtctgcttaacgatgaagttattctattacgatgaagtcaccccacctgactatcagccgccagggtttaaagacggtgactgtgaaggcgtcatattcgaaggtgagccaatgtacctgaacgtaggggaagtgagtactccttttcacatctttaaagtgaaggtgacgactgaaagggagagaatggagaatatcgattccacaattctgagccctaagcagatcaaaactccattccagaagattctcagagacaaagatgtggaggacgagcaagagcattacacatctgacgacctggacatcgaaaccaagatggaggaacaggaaaagaatcctgctagcagtgaactggaagagcctagcctagtgtgtgaggaggacgagataatgaggagtaaggagtcccctgacctgtcaattagccattctcaggtagaacaattggtcaacaagacgtccgaactcgatatgtcagaatccaaaacgaggtccgggaaggtatttcagaacaaaatggcaaacgggaaccagcccgtgaagtcaagtaaagagaataggaaacgaagccagcacgagagcggacggatagtacttcatcactttgacagttcgagccaggagagtgtacccaagaggcggaagtttagcgagccaaaggagcatatttag

SEQ ID NO: 226394 - DNA, 945 bp, synthetic construct
  misc_feature 1..945: note = Description of Artificial Sequence: Synthetic coding sequence
  source 1..945: mol_type = other DNA
atgagattgtggaacaaaattagcaggtggatgctaggctgctacgacgctttgcagaaaaagtacctccgaatggtcgtccttgccacaatatctgagtgttatcagttcaagttcaaatacaccaataatggcccactcatggattttatatccaaaaatcagtccaacgaatctagtatgctgtctaccgacacaaagaaagcgtcaatccttctcatccggaagatttatatactgatgcagaatctcggaccccttcccaatgacgtttgcctgactatgaaactcttctattatgacgaagtgacaccgccagattaccagcctcctggctttaaagacggagattgtgagggggtcatcttcgaaggggagccgatgtatctgaacgtgggagaggttagcacaccttttcacatcttcaaggtgaaggtaacaactgaaagggaacggatggagaacattgacagcacaattttatctccaaagcagattaaaacccctttccagaaaatattgagggataaagacgtagaggatgagcaggaacactacaccagcgatgatttagatatagagaccaagatggaagagcaggagaagaacccagcatcttcggaactggaagagccaagccttgtgtgcgaagaagatgaaattatgaggagcaaggaaagccccgacttgagcatatcccactcccaggtcgagcagttggtgaacaaaacctcagaacttgatatgagtgagtcaaagacacggtccggcaaggtgttccagaacaagatggctaatgggaaccagcccgttaagtcctccaaggagaatcgtaagaggtcacaacacgagagcggcaggatagtcttgcatcatttcgactcatcatctcaagagagcgtgcctaaacgtcgtaaattctctgagccgaaggaacacatctag

SEQ ID NO: 226395 - DNA, 495 bp, synthetic construct
  misc_feature 1..495: note = Description of Artificial Sequence: Synthetic coding sequence
  source 1..495: mol_type = other DNA
atgcgcctgtggaacaagatttcaaggtggatgctgggttgttatgacgcactccagaagaaatatgtgtatacaaatcctgaagatccccaaactatcagcgaatgctaccaatttaagtttaagtacacaaacaacggcccactgatggattttatctccaagaaccagagtaatgaaagctccatgcttagcaccgatactaagaaggcctctattctccttattcggaagatctatatactcatgcagaacctcggacccctgcccaatgatgtgtgcctgaccatgaaactgttctactacgacgaggtgacccctcccgactaccagccaccgggattcaaagatggcgattgcgagggcgtgatcttcgagggagagcctatgtacctcaacgtgggtgaggtgagcaccccctttcacattttcaaggtcaaggtaaccactgagcgggaaaggatggaaaacatcgactcgactattctgtcttag

SEQ ID NO: 226396 - DNA, 945 bp, synthetic construct
  misc_feature 1..945: note = Description of Artificial Sequence: Synthetic coding sequence
  source 1..945: mol_type = other DNA
atgcggctctggaataagatctccagatggatgctgggttgctacgatgccttgcagaagaagtatcttcggtactttttgttcaaaacgatcagcgaatgttatcaattcaaattcaagtacactaacaatggaccactaatggattttatcagcaaaaatcagtctaacgagtccagtatgctttccaccgacactaaaaaggccagcatactccttatcaggaagatttacatcttgatgcagaacctgggaccattacccaacgacgtgtgtctaacaatgaaactcttttactatgatgaagtgactcctccagactaccagccaccgggatttaaagatggagactgtgaaggagttatcttcgagggtgagccaatgtaccttaacgtgggagaggtctcaactcccttccacatatttaaagtgaaggtgactacggaacgagagcgcatggagaatatagatagtaccattttgtcgccaaagcagatcaagactccgtttcagaaaattttacgcgataaggatgttgaggacgagcaggagcactatacttctgacgacctggacattgaaacaaaaatggaagaacaggagaagaaccccgctagctcagagctcgaggaaccatcactcgtgtgtgaggaagacgaaatcatgcgaagcaaggagtcaccggacctttccatatcccacagccaagtcgaacagctggtgaacaaaacctccgagttagatatgtctgaaagcaagacacgctccggaaaagtatttcaaaataaaatggccaatggaaatcagcctgtcaaatccagcaaagagaatcgtaaacgatctcagcatgaaagcggacgcattgtgttgcatcattttgattcatcttcacaggagtcagtgcctaagcgtaggaagttcagcgagcctaaggagcacatctag

SEQ ID NO: 226397 - DNA, 6107 bp, synthetic construct
  misc_feature 1..6107: note = Description of Artificial Sequence: Synthetic coding sequence
  source 1..6107: mol_type = other DNA
atggccagcgctgtaagcccagctaatctgcccgcagtactgctccagcccagatggaagcgcgtggttgggtggagcggcccagtgcccaggccgagacacggacacagggccgtggctatcaaggagcttattgtcgtttttggcggaggtaacgaaggcatcgttgacgagctacacgtgtacaataccgctaccaatcaatggttcatccctgcagtaaggggcgacattccccctggatgtgccgcatacggttttgtgtgtgatggaaccaggctcttggtttttggaggtatggtagagtacggcaaatactcaaacgacttgtacgagctgcaagcgagccgatgggagtggaagcggctcaaggctaagacccctaagaacgggccacctccctgtcctaggcttgggcacagtttctcactagttggaaataaatgctacctatttgggggtctcgctaacgattccgaggatcccaaaaataacattcctagatacctgaacgacctctatattctggaattaagaccaggaagcggcgttgtagcgtgggacatacccatcacgtacggagtactccctccacctagagagtctcacacagccgtggtgtatacagaaaaagataacaagaaaagcaaactggtaatctacgggggtatgagtggttgtcggctgggcgacctgtggactctggacatcgacacactgacatggaacaaaccatccctttcgggcgtggcccctctgcctcggtctttacacagtgccaccacgattggtaataagatgtacgtgtttggcggatgggtccccctggttatggacgacgtgaaagtggctacacacgaaaaagaatggaaatgtactaatacactggcttgccttaacctggacaccatggcatgggagacaatactgatggacactctcgaagataatattcccagagcgagggctggacattgcgccgtggccataaacacaaggttgtacatatggtcgggaagagatgggtaccgcaaagcctggaacaaccaggtttgttgtaaagatttgtggtatctggagaccgagaaacctcctccaccagccagagttcagctcgtgagagcgaataccaactcccttgaagtcagttggggggcagtggccaccgcagattcttatctgctccagcttcagaagtacgacatccctgccaccgcggctactgctacaagccccactccaaatccagtacccagtgtgcctgcaaaccccccaaagtcacccgcacctgccgcagccgcacctgctgtgcaacccttaactcaggttggaattacactacttccccaggccgcacccgctccaccaactacaactactatccaagttcttcccacagtgcctggctcttccattagcgttccaacagcagctcgtacccaaggcgtcccagctgtgctgaaggtgaccggtccgcaagctaccactggaacccctcttgtcactatgaggcccgctagtcaggctggtaaagctccagttaccgttacatcattgcccgctggagtgagaatggtggtccctacacagagcgctcagggtaccgtgatcggcagcagccctcagatgagcggcatggctgcgctcgcagcagccgcagctgctacccagaagataccgccaagctctgctcctactgtcctctccgttcccgctgggacaacaattgtaaaaaccatggcagtcacacctgggacgacaactctacccgcaactgtcaaggtggcttcctctccggtcatggttagtaatcccgctactcgtatgttaaaaaccgccgctgcacaggtgggtacctccgtgtcaagtgcaaccaacacctctactcgccctatcatcactgttcacaagtctggcactgtgacagtggctcagcaagctcaggtcgtgactaccgtggtgggcggtgtgacgaagacaatcaccctcgtcaagtctcccatctctgtgccaggcggatctgctcttatatctaatctcgggaaagttatgtcggtggtgcaaactaagcccgtgcagacctccgctgttaccggtcaggccagcacaggcccagtaactcagattattcagacaaaaggcccactgcccgctggtactatccttaagctggtaacatcagccgacggcaaaccaacgaccattatcaccactacacaagctagcggggctggtacaaaacccacgatcctgggcatcagtagcgtgagcccatcaacaactaagccgggaacaacgactataatcaaaaccatccctatgtcagccatcattacccaggctggtgcaacaggagtaactagcagccccggaatcaagtctcctatcacgattatcactacgaaagtgatgaccagcggtactggcgctcctgccaaaattatcactgctgtgcctaagatcgccacgggacacggacagcaaggcgtgacacaggtggttctcaaaggggcacctggtcagccgggtacaatcctgcgtaccgtccccatgggtggtgtaaggctggtgacccccgtgactgtcagcgccgttaagccggctgtgaccactttggtggtcaagggaactactggcgtgacaactctagggaccgtgactggtacagtctccactagcctcgcaggcgcagggggacacagtacctccgccagtttggccaccccgattacaacccttggaaccattgccacactcagtagccaggtgatcaatcctacagctattacagtctcagcagcccagaccacattgactgccgcaggtggccttaccaccccgactatcacaatgcagccagtctcccaacctactcaggtaactctgattactgccccaagtggggtggaagcacaacctgtgcacgatctcccagttagcatacttgcctcccccactaccgagcagcccacagcgacagtgacaattgccgattccggccagggcgatgttcagcccggaaccgtcaccctggtttgttctaaccctccttgtgaaactcatgagacaggcaccaccaatactgcaacaactacagtggttgccaacttaggcggacaccctcagcctactcaagtgcagttcgtttgtgatagacaggaggccgcagctagcctggtcactagtacagtcggccagcagaacggctctgtggtgcgtgtgtgctccaatcctccttgtgagacacatgaaaccgggacaactaataccgctactactgcaacatcgaacatggcgggacagcatggatgcagtaatcctccttgcgaaacccacgaaacaggcacaacaaatactgctacaaccgctatgtcaagtgtaggagccaatcaccagagggacgctcggagggcatgtgctgcaggaacccccgcagtgattaggatttcagtggctactggagcccttgaggccgcacagggtagcaagtcccagtgtcagactcgacagacaagtgccacctcaactacaatgactgtgatggccaccggggctccctgcagtgcaggcccattgttgggaccctccatggcgagggaacccggagggcgatctcctgccttcgtccagctggccccattatctagcaaagttcgcctgtcctctcctagtattaaggacctccctgccggtaggcatagtcacgccgttagcacagcggctatgactagatcatcagttggtgctggcgagcctcgcatggcccctgtgtgtgaatcccttcaaggcggttccccatccacaactgtcactgtgaccgcattggaggcattactgtgcccaagtgcaaccgtcacccaggtatgcagcaatccaccttgtgaaacacatgagaccggaacgactaatacagctaccacaagcaacgcaggttctgcccagcgtgtgtgctctaatcccccatgtgagacccatgagacaggaacgacacatacagcgacaactgccacctctaatggaggaacaggccagccggagggcggacaacagccaccggctggccgtccatgtgagacccaccagactacatcaacaggtaccacaatgtccgtgtcggtgggcgctcttcttcccgacgcaactagtagtcacagaaccgtggaatcaggcctggaggtcgccgcagccccttccgtcactccgcaggcagggaccgctcttttagcacccttcccaacccaacgagtctgcagtaatcccccatgcgaaactcatgagaccgggaccacccacacagctactacggttacctctaacatgagctccaaccaggatccacccccagccgcaagtgaccagggtgaggtagagtccactcaaggggatagcgttaatattacatcctcgtccgcaatcacaaccacagtgtcctcaacgcttactagagctgtgaccacagtgacgcagtccacacctgttcctggcccatccgtgccccctcctgaggagctacaggtctctccgggtccgaggcagcagctgcctcctaggcaactcctacaatcagccagcaccgcgctcatgggggaatccgccgaagttctgagcgcatcccaaacacccgagcttccggctgccgtggatctgagtagcaccggggaaccatcctctgggcaggagagcgccggtagcgcagtcgtcgctacagtggtagttcagcctcctccacctacccaatctgaggtagaccaactgagcctgccacaggagctgatggctgaggcacaggccggtacgaccaccctcatggtgaccggcctgactcccgaggaactcgctgtaaccgctgcagctgaagccgctgcccaggctgccgctaccgaagaagcacaggcgctggccatacaagccgtcctccaggcggcacagcaggctgtgatgggtaccggggaacccatggacactagcgaggctgccgcaactgttactcaagccgagctcggtcatttatctgccgaggggcaggagggacaggctacaaccatccctatagtcctaacccagcaggagctggcagctcttgtacagcagcaacagttgcaggaggctcaagcccagcagcagcaccaccacctgccaacagaggcactggcgccagccgacagtctcaacgatcccgctatcgagtcgaactgcctcaacgagttggccggaaccgtgccttctaccgtcgctcttctgccctccactgctaccgagagtctcgccccaagcaataccttcgtggcaccacagcccgtcgtggtggctagtccggctaagctgcaagctgccgcaaccttgacagaagtggccaatggaatagagtccctgggcgtaaagcccgacctgcctcctcctccctcgaaagcaccgatgaaaaaggagaatcagtggttcgacgtgggagtgatcaaaggaacaaatgtgatggtgacacactattttctgcctcccgacgatgccgtgccgtccgatgacgatctgggcaccgtgcccgactataatcagttgaagaagcaggaattgcaaccgggtaccgcctacaagttccgagtagccggaattaatgcttgtgggagaggccctttcagtgagataagcgcatttaaaacatgtctgccaggattccccggagcgccttgcgccattaaaatcagcaaaagccccgacggggctcatctgacctgggagccgccatctgtgactagcggtaaaatcatcgaatacagtgtttatctggcaattcagagttctcaggccggaggcgagctcaagagcagcacgcccgcacagctggcctttatgcgcgtgtattgtggtccctcccccagctgcctcgtgcaaagcagcagcctgtctaacgctcatattgattacacaactaaacccgcaatcatctttcggatcgccgctaggaacgaaaaaggatacggtccggctacacaggtgagatggcttcaggagaccagcaaggattcctcaggaaccaaaccagctaataagagaccaatgtcatcccccgagatgaaaagcgctcccaagaagtccaaggctgatggccagta

SEQ ID NO: 226398 - DNA, 5900 bp, synthetic construct
  misc_feature 1..5900: note = Description of Artificial Sequence: Synthetic coding sequence
  source 1..5900: mol_type = other DNA
atggcttccgccgttagccctgcgaatctgcccgctgtgctcctgcagcccagatggaagcgggtggtgggatggagtggccctgtcccccgacctcggcacggccatagggctgtggcaattaaagagttgattgtagtgttcggtggcggaaatgaggggatcgttgacgaacttcacgtttacaatacagccaccaaccaatggttcatcccagccgtaaggggcgacatccctccagggtgcgccgcttacggcttcgtgtgcgatgggacgcggctccttgtctttggcggaatggtcgaatacggaaaatactccaatgatttatatgagttacaggcgtctaggtgggaatggaagaggctgaaagcaaaaacccctaaaaatggcccacctccatgtcctaggctggggcactcgttctcactcgtgggcaataagtgctacctttttggcggactggcaaacgattcagaggatcccaagaacaacattcccagataccttaacgacctgtacatcttggagctcagaccgggtagtggcgtggtcgcatgggatatcccaattacttatggagttcttcccccacccagggagtcccataccgctgttgtatacaccgagaaggataacaagaagtccaagctggtgatttatggaggaatgtccggttgccggctaggcgacctgtggaccctggatatcgacaccctcacatggaataaaccgagcctgtccggggtcgcacccctgcccagaagtctgcattcagcgactactattgggaataagatgtatgtgttcggtggctgggtccctctggtgatggatgatgtgaaggtcgctacccatgagaaagaatggaaatgcacaaatacactcgcatgtctgaaccttgacacaatggcctgggagactatattaatggacacgctcgaagacaatattccgcgtgcacgcgcagggcattgcgcagtggcaattaacacacgtctatacatttggagcgggagagatgggtacaggaaggcgtggaacaaccaggtttgctgtaaggatctatggtatctcgagacagagaaaccgcctcctcccgctcgcgtccagctcgtgagagcgaacaccaacagtctggaagccgcacccgcaccaccaaccacaaccacaatccaggtcttgcccacagtcccgggaagcagcatctctgtcccgacagcagcccgtactcagggggtccctgccgtgctcaaagttaccgggccacaggccactaccgggacgccactggtgaccatgagaccagcatcgcaggctgggaaggctccagtgactgtgacctcactacctgccggagtgcgaatggtggttcctacccagtcagctcagggcaccgtcatcggctcttcacctcaaatgagtggcatggctgctctggctgccgctgcggctgctacccaaaaaattcctccgtctagtgcacccaccgtcctgtccgtgcctgcaggtacaaccatcgtcaaaaccatggccgtgaccccgggaacaaccacactgcctgccactgtaaaggttgccagttcgcccgttatggtttctaacccggctactcgaatgctgaaaactgccgctgcacaggtgggaacgtctgtgtccagtgctactaacaccagtacaagacctatcatcacagtgcacaagtcaggaacggttaccgtagctcagcaggcacaggtggtgactacagtggttggaggagtaaccaagacaattactctggtgaagtctcctatttccgtgcctggcggaagcgctctcatctctaatcttggaaaagtaatgtctgtcgtccagacaaagcctgtgcagacctctgccgtgaccggacaggcttctacaggacctgttacccagattatccagacaaaaggtccgttaccggcaggaacaatactcaaactggtgaccagtgctgacggaaagcccacaacgataatcactacaacccaggcaagcggtgccggaaccaagccaaccattctgggaatctcctctgtgtcaccttcgaccactaaacccggtactacgaccatcatcaaaacaataccgatgtcggcaattatcacacaggctggcgcaacaggagtgactagcagcccaggaattaagtcaccaatcactatcattaccaccaaggttatgacttcaggaaccggagcccctgctaagattataaccgcggttcccaagatcgctaccggacacggccagcagggagtaacacaagtcgtcctcaagggagcacccggtcaaccaggaacaattttaagaaccgtccccatggggggagtgaggctcgtcacaccagttacggtgagtgctgtcaagcccgctgtgacaacattggttgtcaagggtactacgggagtaacaacgttaggcacagtcacagggacagtcagcacctctctggccggagccggaggccactcaacttctgccagcctggccacaccaattaccaccctgggaacaatcgccactctgtcctcccaggtgatcaatccaacagctatcaccgtgtccgctgcccagacaacgctgaccgctgctgggggtctgaccaccccaaccatcacaatgcaacccgtgagccagcctacccaagtcacgctcatcaccgcaccctctggcgttgaggctcagccggtccacgatcttcctgtttccatcctagcttccccaacgactgagcagcccactgcgaccgtgactatcgcagactccgggcagggtgacgtgcagcctggcacagtaacccttgtgtgttcaaatcccccatgcgagactcacgagactgggactacaaatacagccacgactacagtcgtggctaatctgggaggccaccctcagccaacgcaagtgcaattcgtgtgtgataggcaggaagctgccgcatccttggtcacttcaacagttggccagcagaacgggagcgtggtccgtgtgtgctcaaatcccccatgtgagacccacgagaccggaactaccaataccgcaaccacggcaacctcaaatatggccggtcagcacggctgttccaatcccccttgtgagactcatgaaactggcacaaccaataccgccaccactgctatgtcatccgtgggcgctaaccatcagagggatgctcgccgagcctgcgcagcgggaacgcccgcagttattagaataagcgtagcaactggggcactcgaagccgcacaggggtcaaagtctcagtgccagaccaggcagacttcggcgacttctactactatgactgtcatggcaactggcgcaccttgctctgcaggaccgctgttgggaccatccatggcccgagagccagggggtaggagccccgcttttgtccagctggcaccactttcctctaaggtccggttgtcctcaccaagcatcaaggacctgcccgctggacggcattcccatgctgtgtcaactgccgctatgacccgcagctctgtgggcgctggagaaccacggatggctccggtctgcgaaagcctgcaaggcggatctcccagcacaaccgtgacagtgacagctcttgaagctctactttgcccttctgcaacagtgacccaggtgtgtagcaatccgccttgtgaaacccacgaaaccggaacaacaaatacagcaaccaccagtaatgcgggatctgctcaacgtgtctgtagcaaccccccttgtgaaacccatgagacaggaactactcacactgctaccacagcgacctcaaacggaggcacaggacaaccggaagggggacagcagcctcctgccggacggccttgtgaaacgcatcagacaacctcaaccggtaccacaatgagcgtcagtgttggggcactactcccagatgcgacctcttcccatagaacagtcgagtctggcctcgaggttgccgcagccccttccgtgactccccaggccggaacagctcttctggcaccttttccgacccagagggtgtgtagcaatcctccgtgcgagacgcatgaaactggcaccacgcacacagccaccacagtgacctccaacatgtcttcaaaccaagatcccccaccggcagcaagcgaccagggcgaagtcgagtctactcagggtgacagtgtgaatatcacttcaagctctgcaatcaccactaccgttagctctaccctcaccagggcggttaccaccgtaacacagtccaccccagtcccaggcccatccgtgccacccccagaggaactccaggtgagccccggacccagacaacaactgccacctcgccaactgctccagtccgccagcactgccttgatgggcgagtcagccgaggtcttgtccgcctcacagacccctgaactcccagccgcagtagacctctctagcacaggcgaaccttcctccgggcaggagtccgctgggagcgcagtcgtcgcaactgtcgttgtgcagccccctccaccgacacagtcagaagtggatcagctgtccctgccccaggagttaatggccgaggctcaggctggaacaaccacattaatggtgactggtctgactcccgaagagcttgcagttacagctgcggctgaggccgcagcgcaggccgcagcaaccgaggaggcccaggccctggcaatccaggccgtgttgcaggctgctcagcaagctgtcatggggactggagaaccaatggatacctccgaggcagccgctactgtgacccaggcagagctcggacatttgtccgcggaggggcaagaagggcaggccacaacaataccgatcgtcctcacacagcaggaactcgcagccctcgtgcaacagcaacaacttcaggaagctcaggcgcagcagcagcaccatcacctgcctaccgaggctctggcccctgctgacagtcttaatgatccagccatagaatcaaactgcctaaacgagctggccggtacagtgcccagcactgtggccctgcttcctagcaccgcaactgaatcgctggcacccagtaacactttcgtcgccccacaacccgtggtcgttgccagcccagccaagctgcaggccgctgccaccctgacagaagttgcgaacggcattgaatcacttggtgttaagcccgacctccctcctccgcctagtaaggctccaatgaaaaaggaaaatcagtggtttgacgtgggtgtaattaaaggaacaaatgtgatggtgacccattactttctcccacccgacgatgctgttcctagcgatgatgacctggggacagtgcccgactataaccagctcaagaaacaggagctgcagcccggtactgcttataagtttcgggtagccggtattaatgcttgcgggagggggcctttttccgaaatcagcgcctttaaaacatgtctgcctggtttccctggcgctccatgcgccatcaaaatatccaagtcgccagacggcgcacacttaacatgggaacccccatctgtaacatccggcaaaatcattgaatattcagtgtaccttgccatccagtccagccaggcaggaggtgagctgaaaagttcaactccagctcagctggccttcatgcgagtgtactgtgggcctagtccgtcctgccttgtgcagtcgtcatcactgtctaacgcacacattgactacaccactaaacctgctataatctttcgtattgccgctcggaatgagaagggatacggcccagccactcaggtccgctggctgcaggaaacttcaaaagattcctctggtaccaagccagcgaacaagagacccatgtcttcgccggaaatgaagtcggccccaaagaaatcaaaggccgacggccagta

SEQ ID NO: 226399 - DNA, 6242 bp, synthetic construct
  misc_feature 1..6242: note = Description of Artificial Sequence: Synthetic coding sequence
  source 1..6242: mol_type = other DNA
atggcctccgccgtctctccagctaatctcccagctgtgctcttgcagccccgttggaaacgagtcgtcggatggtccgggcctgtgccgcgtccgaggcacggacatcgagcggtagccatcaaagagttgatcgtagtctttggcggaggtaatgagggcattgttgatgagctccacgtttataacactgccacaaaccagtggtttattcccgctgtgagaggggatatccctcctgggtgtgcggcatacgggttcgtgtgcgatggaaccaggcttctggtttttggagggatggtcgagtacggcaaatattccaacgacctgtacgaactgcaggcatccagatgggagtggaagcggttgaaggctaagactccaaaaaatggaccgccaccctgcccacgcctgggtcactcattcagcttggtcggcaataagtgctatctgttcggcggtttggccaacgacagcgaggaccccaaaaacaatattccacgctatctcaacgatttatatatcctggaattgagaccaggatcaggggtcgttgcttgggacataccaataacatacggagtcctaccacccccacgggaatcacatacagcggttgtgtataccgaaaaagacaacaaaaagagtaaattagtgatatacgggggaatgtccggatgtcggttaggagatctgtggaccctcgatatcgacacattaacatggaacaaaccaagcctatcgggggttgcccctctccctcgctccctgcacagcgccaccaccatcggcaacaaaatgtacgttttcggaggatgggtacctttggtgatggatgatgtgaaggtggctacccacgagaaagagtggaagtgtacaaacacccttgcctgtctgaatctggacacaatggcctgggaaaccattttgatggacacactggaggacaacatcccaagagcacgcgctggtcattgcgctgtggccataaatactcgactgtatatatggtctggcagggatggctatcgaaaagcctggaacaaccaggtctgttgtaaggatctgtggtatctggaaaccgagaaaccaccgcctcccgcacgcgtacagttagtgagggcgaatacgaacagtttagaggtgagctggggtgccgtggctaccgccgattcttatctgctgcagctccaaaagtacgacatccctgcgacagctgcgacagctaccagccctacccctaatcccgtgcctagcgtgccagccaacccaccaaaaagcccagctcctgctgccgcagcccctgctgtgcagccacttactcaggtgggcatcaccttgctgcctcaggctgcacctgccccaccaacaaccactacaattcaggtcctccccacagtgcccggttcttctatctccgtgcccactgctgctagaacccagggcgtgcctgccgtactaaaggttacaggccctcaggcgactacagggacacccctcgttacgatgagacctgcatcccaggcgggaaaggctccagtcacagtgacgtccctccctgcaggagtgaggatggtcgtgcctacacaaagcgctcagggtaccgtgatcggatcctctcctcagatgagcggcatggccgctcttgccgctgcagcagccgcaacacagaaaataccgcctagtagcgcgcctacggtgctgagcgttccagccggaacaaccattgtgaaaactatggccgtgacgcccggaaccaccactttgcccgctaccgtgaaggtcgctagttcacccgtgatggtcagcaaccccgcaacccgcatgctaaaaacagcagcagcgcaggtgggaacttcagtatcctccgcaaccaataccagtactcggcctattattactgtgcacaaatccgggacggtgactgtggcacagcaagcacaagtagtgaccaccgtggtgggcggtgtgactaagactattactctggtaaagtcacctattagcgtgccaggcggatctgccctgattagcaacctcggcaaggtgatgtcagtagtgcagacgaaaccagttcaaacaagtgccgtgaccggacaagcgagcaccggcccagtcactcaaatcattcaaactaaaggcccactccctgcaggtactattttgaagctcgtgactagtgccgacggtaaaccgaccaccatcattaccaccacacaggcttccggtgcaggtacgaagcctaccattctgggcatttctagtgtgtcaccatctacaacgaagcccggaaccaccacgatcatcaagaccatccccatgtcagcaattatcacacaggccggagcaacaggggtaacctcttctccagggatcaaatcgccaataaccatcatcacaactaaggtgatgactagtggaactggcgcacctgctaaaatcatcacagcagtgcccaagatcgcaaccggccatggtcagcaaggagtgacacaggtcgtgctgaagggtgcacccggacagcccggtactatcctccggaccgtacctatgggtggtgtgcgtctggtgacaccggtaactgtttccgcggtaaagcccgcagtgacaacactggtggtcaaggggaccacgggggtcaccactctgggcacagttaccggcaccgtttcaacctctcttgccggtgccggtggccactcaacttcggccagtctggcaaccccaattaccacgctgggtaccattgctacgttaagcagtcaggtcatcaaccctaccgccattaccgtgtctgcagcccagacaacgctgacggccgctggtgggttgaccacacctactataactatgcagcccgttagtcaacccacgcaggtgacgctgattacggctccttcgggcgtagaggcccaaccagtgcatgacctgcccgtttcaatcctggccagtccgaccaccgaacagcccacagccactgtgaccatcgcggattctggacagggcgatgtgcagccagggacggtgacgctcgtttgctcaaacccgccatgtgagacccacgagacaggaaccactaataccgctacaaccacggtagtggccaatttaggcggacacccacagcctactcaggtgcagttcgtgtgcgatcgtcaagaagcagcggcttccctcgttacctccactgtggggcaacagaacggatccgtcgttcgggtctgcagcaacccaccttgcgagactcatgagaccgggactactaataccgccaccacggctactagtaatatggccggtcagcatggctgtagcaacccgccttgcgaaacgcacgagaccggaactaccaacacagcgacaaccgctatgtcatccgtcggtgctaatcatcagcgggatgcgaggcgggcttgtgccgcagggaccccagctgtgattagaatttctgtcgcaaccggggctcttgaagccgctcagggaagcaagtcccagtgccagacacgccaaacctccgccacatcgacaaccatgaccgttatggccaccggtgccccatgcagcgcgggacctctgttgggaccatctatggcaagagagcctggcggtaggtcccctgctttcgttcaattggcacctctgtcttctaaagtgcggctgagctcaccttcaataaaggatctcccagctgggagacattctcacgctgtcagtaccgcagctatgactcgaagctcagtaggcgctggtgagcctcgcatggcacctgtgtgcgaatcactgcagggcggaagcccctctaccaccgtgacagtgacggcgctagaggcactgttgtgcccatctgcaaccgtgactcaggtttgcagcaatccaccctgtgagactcatgaaacagggaccaccaacactgcgacaacgagcaacgctgggtccgctcagagagtgtgctcaaaccccccatgtgagacacacgagacgggtacaacccacacagcaacaacagcaaccagcaatggcggtacagggcagcctgagggcggacagcagcctccagccggacgaccctgcgaaacccaccagaccacatctactggcacaaccatgagtgtgtctgtgggtgcacttctgccagacgcaactagttctcaccgcacagtggagtctggcctagaagttgccgctgctccaagcgtcacacctcaggccggaaccgcgttgttggcaccgtttcccactcagagagtgtgtagtaatcctccatgcgagacccacgagaccggcaccacccataccgctacaactgtgacatccaacatgtcttcaaaccaagacccccctccagctgcctccgatcaaggggaagtggaatctacccaaggggattcagttaacatcacttccagctcagcaatcacaaccaccgtgagcagtactttaacccgcgctgttactaccgttactcagtcaacacctgtacccggtccatcagtccctaagatctcatctatgacagagacagctccacgggcactgacaaccgaggtacccatccccgctaaaattaccgttaccatcgccaatacagagactagtgatatgcctttcagcgccgtagatatattacagcccccagaagagctgcaggtaagcccgggtcctcgccagcaactaccacctcgacagctgcttcaaagcgcatccaccgctcttatgggtgagtccgcagaggtgttatccgccagccagacgcccgaactccctgcagccgtggatctgagctctacgggtgaaccatctagcgggcaggagtccgctgggtctgccgttgtagcgaccgttgtcgtgcagcctccgcctcccacccagagcgaggtggatcagctttcgctgccacaggagcttatggcagaggcccaggctggaacaaccacacttatggtgactggattgaccccagaagaacttgctgtgaccgccgcagctgaagctgcagcccaggcagctgccacagaggaggcccaggccctggccatccaggctgtgctgcaggccgcacagcaggcggtgatggctggcacaggcgagccgatggatacgtccgaggctgccgcaacggtgacccaggccgagcttggacacctgagtgccgaggggcaagaaggccaggccactactataccaatagtgctcacgcagcaggagttagctgctctggttcagcaacagcagttgcaagaggcacaagctcagcagcaacaccatcacctccccactgaagccctcgcccctgcagactctctcaacgatccagcaattgaatccaattgccttaatgagctggcaggaaccgtgccatccacagttgctctcctgccaagcacagccacagagagcctggccccaagtaacacattcgttgccccacaacctgttgttgttgcctccccagccaagctccaagccgcagctacactgactgaagttgccaatggaatcgagtcgctgggcgtgaaacccgacctgccacccccaccatcaaaggctccaatgaagaaagagaaccagtggttcgacgtgggagtcatcaagggcaccaatgtgatggttacccattacttcctccctccggatgatgctgttccaagcgatgacgaccttgggactgtccccgactacaaccaattgaagaagcaggagctccagcccggaactgcttacaagttccgggtggcaggcattaatgcctgcgggagaggaccattttcagaaatttctgccttcaagacctgcctaccagggtttccaggagctccctgtgccattaagatctctaagtctcccgatggagcccatttgacatgggagccaccatcagtgacatctggaaaaataatcgaatactcggtttacctcgccattcaatcctctcaggccggaggtgaattaaaatccagtacacctgcacaactagcctttatgcgtgtgtactgcggtcctagcccatcttgcctagtacagtcaagctctctgagcaacgctcatatagattacacgactaagccggctatcatttttagaatcgccgcacggaacgagaaaggatatgggccagccactcaggtgaggtggcttcaggaaacgagtaaggattcatctggtacaaagcctgccaacaaacgaccaatgagcagccctgaaatgaaaagtgcgcctaagaagagtaaggcagatggccaata

SEQ ID NO: 226400 - DNA, 1305 bp, synthetic construct
  misc_feature 1..1305: note = Description of Artificial Sequence: Synthetic coding sequence
  source 1..1305: mol_type = other DNA
atggattctgtcgaaaagggggctgcgacctcagtgtcaaaccccagagggagacccagccgagggagaccgcctaagctccaaaggaactcaagagggggacaaggacggggtgtggagaaacctccacatttggctgcattgattttggctcgtggcggttccaaggggatacctctaaagaacataaagcacctggccggagtcccactgattggttgggtgctgagggctgcgctggactctggtgcttttcaatccgtgtgggttagcacagatcacgatgagattgaaaacgttgcaaagcagttcggcgcacaggtccacaggagaagttccgaagtgagtaaggattcatctacgagcttggatgccatcattgagttcctgaattatcacaatgaagtcgacattgttggcaatatacaagccacatccccttgtctgcatcctaccgaccttcagaaagtggccgagatgatacgcgaagaagggtacgacagtgttttcagtgttgttcggagacatcagttccgctggagcgaaatacagaaaggcgtgagagaggtgacagagcctctgaatttgaatcctgcaaagagaccccgacgacaggattgggacggtgaactgtacgagaacggctcgttttactttgcaaagcgccatcttattgaaatgggctacttacagggcggaaagatggcctattacgaaatgagggccgagcacagcgtggatatcgatgttgatatcgactggccgatagctgagcaaagagtgctgcgatacgggtatttcggaaaggaaaagctgaaagaaattaagcttctagtttgcaacatcgacggttgtctgaccaacgggcatatatacgtctctggcgaccagaaggagatcatcagctatgatgtcaaagacgcgatcggcatctcattgttaaaaaagtccggtatagaggtccggctcatttccgagcgggcttgttccaaacagactttgtcatctctcaagcttgattgtaaaatggaggtttcagtgtcagacaagcttgctgtagttgatgaatggagaaaagagatgggactgtgttggaaggaagtcgcttatctgggtaatgaagtctctgacgaggagtgtctgaagagggtaggactctccggtgccccagccgacgcctgctcgactgcccaaaaggctgtgggctatatttgcaaatgtaacggaggcaggggcgcaatccgcgaatttgctgagcatatctgtctcctgatggaaaaggtgaacaactcctgccagaagtag

SEQ ID NO: 226401 - DNA, 507 bp, synthetic construct
  misc_feature 1..507: note = Description of Artificial Sequence: Synthetic coding sequence
  source 1..507: mol_type = other DNA
atggcattcaatgattgctttagcttgaattatccagggaacccctgcccaggtgaccttattgaagtgttcaggcccggttatcaacattgggctctgtacctgggagatgggtatgtcattaacattgcccctgttgatggcatccccgcatcattcacctctgccaaatcagtgttctcaagcaaggccctcgtcaagatgcaactgctcaaagatgtggtgggaaatgatacataccgtataaacaataaatacgatgagacctacccaccactcccagtagaggagatcatcaagagatcggagtttgtgattggccaagaagtggcctacaacctcttggtcaataactgcgaacactttgttactctgctcaggtatggtgaaggcgtatctgaacaggcaaaccgggctatcagtactgtggagtttgtgactgccgcagtgggggtcttctcctttctgggactctttcccaagggtcagcgtgctaagtattactag

SEQ ID NO: 226402 - DNA, 489 bp, synthetic construct
  misc_feature 1..489: note = Description of Artificial Sequence: Synthetic coding sequence
  source 1..489: mol_type = other DNA
atggccctagctaggccccgacccaggctaggtgatttaattgaaatcagtcgtttcggatatgcccactgggcaatttatgtgggagacggatacgtggttcacctggcaccagcgagcgagatagccggtgccggtgctgcctctgtcttaagtgccctgaccaataaagccatcgttaagaaggagttactgagtgtggtggcagggggagataactacagagtgaataacaagcacgacgatcggtatacaccgttaccaagcaacaaaattgttaagcgagctgaagagctagtggggcaagagttaccatattcattgacatccgataattgtgagcacttcgtgaatcacttgcgctacggagtgagtcgctccgaccaggtgacaggtgctgtaactactgtgggcgtcgccgcagggctgttagctgccgcaagtctggtgggcatcctgctggccagatcgaaacgggagaggcagtag

SEQ ID NO: 226403 - DNA, 1023 bp, synthetic construct
  misc_feature 1..1023: note = Description of Artificial Sequence: Synthetic coding sequence
  source 1..1023: mol_type = other DNA
atgaaggaagaccaggtcgttgcggaggagccgggatttcaagacgaggaggagtcgctctttcaagacatagatctcttgcagaaacatgggattaatgtggctgatatcaaaaagctcaagagcgtgggaatctgcaccatcaagggcatccaaatgacaacacgtagagccctttgtaacgtaaagggcctctctgaggctaaagtggacaaaatcaaagaagctgcaaacaaactgatagagccagggtttttgaccgcctttgagtatagcgagaaacgcaagatggtgtttcacattacaacaggaagccaggagtttgacaaattactgggcggtggcatagaaagtatggcaatcactgaggcattcggcgagtttcgcaccggcaagacccagctgagccataccctgtgtgtgaccgcacagctgcctggggctggaggctatcccggtgggaagattatattcatcgacacagagaacacttttaggcccgaccgcctccgagacatagctgatcgcttcaacgtggatcacgacgccgttttggacaatgttctttatgcccgtgcctatacatccgagcaccaaatggagctcttagactacgttgcagctaaatttcatgaagaggctggtatcttcaaactcctgatcatcgacagcatcatggctctctttcgggtcgactttagcggaaggggcgaattagcggaaagacaacaaaagttggctcagatgctctcccgccttcagaagatctcagaggagtacaacgttgctgtgttcgtcaccaaccagatgaccgcagatcccggagctaccatgaccttccaggcagatcccaaaaagcctattgggggacacatactggcccacgcttcaactacccggatttcactcagaaaaggtcgcggtgagctgaggattgccaaaatttatgactcacccgaaatgcctgaaaacgaagcaacctttgccatcaccgccggtgggatcggagacgccaaagaatag

SEQ ID NO: 226404 - DNA, 1080 bp, synthetic construct
  misc_feature 1..1080: note = Description of Artificial Sequence: Synthetic coding sequence
  source 1..1080: mol_type = other DNA
atgtctgatgagggctctcgtggatcacgcctgcctctggctctccccccagccagtcagggctgctcatcggggggagggggtggtggcagctcagccggaggcagcggaaactctcgccctcctcggaatctgcagggcctgctgcagatggcaatcacggccggaagcgaggagcctgatcctcccccagagcccatgagcgaggaacggagacaatggctccaggaggccatgagcgccgcatttagggggcagcgtgaggaagttgagcagatgaagagctgtttgagggtgctgtcacaaccaatgccacctacagcaggggaggccgagcaggcagctgaccagcaggaacgggaaggggcacttgagctcctcgctgacctgtgcgagaatatggacaacgctgccgacttttgccaactgagcggaatgcacctcctggtcggtcgttacctggaggccggagcggctggactccggtggcgtgccgctcaactcattggcacttgtagccaaaacgtcgctgccatacaagagcaagtgctgggcctcggagctctgcgtaagctcctgcgtctgctggatcgcgatgcctgtgatacagttagagtgaaggccttgttcgctatctcttgcctagtaagggaacaagaggcaggactgcttcagttccttcggctcgatggattcagtgtattgatgcgagccatgcagcagcaggtccagaagctcaaggtcaaaagcgccttccttctgcaaaacctattggttgggcacccagagcacaagggaacactgtgctccatgggcatggtgcagcagctcgtggcattggtccggacggaacacagtccttttcatgagcatgttttgggggctctctgctctctcgttaccgactttccacaaggggtgcgggaatgcagggagcccgaattgggtctcgaggagctgttacgccacagatgtcagctgttgcagcagcatgaagaataccaggaagagctggagttctgtgagaagctgctccagacatgtttctcgtcgccagcagatgatagtatggatcgatag

SEQ ID NO: 226405 - DNA, 774 bp, synthetic construct
  misc_feature 1..774: note = Description of Artificial Sequence: Synthetic coding sequence
  source 1..774: mol_type = other DNA
atgtccgatgaaggatcccggggaagtcggttacccttagccctaccccctgccagtcaaggatgtagcagtggagggggagggggaggctcttccgccggtgggtcaggcaatagcagaccacctaggaacctccaagggctcttacaaatggccattacagctggctctgaagaacccgaccctcccccagaaccgatgagcgaggaacgccgacaatggctccaagaagcaatgtcggctgcttttagaggccagcgcgaggaagtggagcagatgaaaagctgtctgagggttctgagtcagccaatgccacccaccgcgggagaggccgagcaggccgcagaccagcaggagagggaaggcgctcttgagctcctggcagacctgtgtgaaaatatggacaacgcggctgacttctgtcaattgtccggtatgcaccttctggtgggcagatatctcgaggccggagccgcaggtctccggtggagggccgctcagcttattggtacttgctcccagaatgtggccgctattcaagagcaggtgctcgggctcggcgcactgcggaaattgctacggctccttgatcgggatgcctgcgacacaggcgtgcgcgagtgccgagagccagaactgggcctggaagaattgctgcgacatcggtgtcaactgcttcaacaacatgaggagtaccaagaggagttggagttctgtgaaaagctcctgcagacctgtttttcctcaccggcagatgactctatggatcgttag

SEQ ID NO: 226406 - DNA, 1080 bp, synthetic construct
  misc_feature 1..1080: note = Description of Artificial Sequence: Synthetic coding sequence
  source 1..1080: mol_type = other DNA
atgtccgacgaaggaagccgaggctctaggttgcctctcgcattgcccccagcctctcaaggatgcagctccgggggaggaggaggcggaagcagcgctggcggttcaggcaattcccggcctcctagaaatctccagggcctgctccagatggcgattacagcgggtagtgaagaacctgatccccctcctgaacccatgtctgaggagagacggcagtggttacaggaagccatgtctgccgctttccgtggccaaagggaggaggtagaacagatgaaatcttgtttaagagtgttgtcccagcctatgccacctaccgctggggaggccgaacaggctgcagaccagcaggaacgggagggagccctcgaattacttgctgacctctgtgagaacatggataatgcagcagacttttgccagctgtcaggaatgcaccttctagtggggagatacttggaagccggagctgccggattaagatggcgcgctgctcagctgatcggtacatgcagccagaacgttgccgcaattcaagaacaggtcctgggtctcggggcactgcgcaaacttctcagactgttggatcgggacgcatgtgatacggtcagagttaaagctctgttcgccatctcctgcctcgtccgtgagcaagaggctgggttgctccagttcctgaggcttgatggttttagcgttctcatgcgggctatgcagcagcaggttcagaagctgaaagtcaagtccgctttcctattgcagaatctcctggtcggtcacccagagcataagggtaccctgtgtagcatgggtatggtgcagcaacttgtagccttagttcggactgaacattcgccattccacgaacacgtcctcggagctctctgctcgctagtgacagattttccccaaggggtgagagagtgtcgggaaccggaacttggacttgaggagctgctgaggcataggtgccagcttctgcaacaacatgaagagtaccaggaggagttggagttctgtgaaaagctcctccagacctgcttctcctcaccggcagatgattccatggatcgatag

SEQ ID NO: 226407 - DNA, 1443 bp, synthetic construct
  misc_feature 1..1443: note = Description of Artificial Sequence: Synthetic coding sequence
  source 1..1443: mol_type = other DNA
atgcagattcctagggcagcactcctaccccttctgttactgctgctggcggctccagcctctgcacaactgtctcgggctgggaggtccgcacctttggccgctggttgccctgaccgatgcgagcctgctcgctgcccccctcaaccagagcactgtgagggcggtcgagcacgggatgcatgcggctgctgtgaggtgtgcggggctccagaaggggcagcatgtgggctacaggagggcccatgtggggagggtctgcagtgtgtggttccattcggtgttcctgctagtgccacggtcaggcgtcgagctcaagcgggattatgtgtgtgcgcaagttccgagcccgtgtgtgggtctgatgctaatacctatgccaacctgtgccagctcagggccgcttcccggcgatctgaacgcctccacagaccacctgtgatagtgttgcagcgcggtgcctgtggtcagggccaggaggatccgaactccctaagacacaagtacaatttcattgccgatgtggttgagaaaatcgccccagccgtagtccacatagaactgttcagaaagttgccctttagtaagcgggaagtccctgtcgcaagtgggtcagggtttatcgtgtcagaagatggacttatcgtgaccaatgcccacgtggtgactaataagcatagagtgaaagtcgagttaaaaaatggtgccacctatgaagccaagattaaagatgttgacgagaaggctgatatagccctgattaagatagaccaccaaggaaaactcccagtgctgctgttgggaaggtcctcagaactgaggcctggcgaatttgtcgtagctatcggaagtcccttttcactgcagaacaccgtgaccaccggtatagtctcaacaacacagagaggcggaaaagagttaggtctcagaaacagtgatatggattacatccagaccgatgctataatcaattacggcaacagcggcggtcctctggtgaacctggacggcgaagtcataggaattaatacgctgaaggtgacagccggtatttcttttgcaattccctctgataagattaaaaaattcctcactgaatcccacgatagacaagccaaggggaaggctatcactaagaaaaaatatatcggtattcgcatgatgtctctcacaagctccaaagctaaagagctaaaagatcggcacagggacttccccgacgtcatttccggtgcatacattatagaggttatcccagatacaccagccgaagcgggtggactgaaggagaatgatgtcattatttccatcaacggacagtcggttgtgtcagccaatgacgtatcagatgtgatcaaacgtgagagtacattgaatatggtcgtccgcaggggtaatgaggatattatgataacggtcataccagaagaaatcgatccttag

SEQ ID NO: 226408 - DNA, 666 bp, synthetic construct
  misc_feature 1..666: note = Description of Artificial Sequence: Synthetic coding sequence
  source 1..666: mol_type = other DNA
ggtaaactgcccgtgctccttctcggcagatcctcggagctgcgtcctggagagttcgttgtggccatcggatctccgttctccctgcaaaacacagtgactacgggcattgtttctactacacaacgcggaggcaaagaactcggactccgcaatagcgacatggattatattcagaccgatgctataataaactatggtaattccggtggaccacttgtgaatctggacggcgaagtgattggcatcaacacattaaaagttactgctggaattagctttgcgatcccctccgataaaattaaaaagttcctgaccgaaagtcacgataggcaggctaaagggaaagcaattactaagaaaaagtacattggaatccgcatgatgtcactgacctcatccaaagcgaaggagctgaaggacagacacagggattttccagatgtaatttccggagcttatatcatcgaggtaattccagacacacctgcggaagccggtgggctgaaagaaaatgatgtgataatatctattaacggccagagtgtggtatctgcgaatgatgttagcgatgtgataaaacgtgaatccactctaaatatggtggtccggcgtgggaatgaggacataatgatcaccgtgatcccagaggaaatcgatccatag

SEQ ID NO: 226409 - DNA, 1344 bp, synthetic construct
  misc_feature 1..1344: note = Description of Artificial Sequence: Synthetic coding sequence
  source 1..1344: mol_type = other DNA
atggggtgggcagcccgaccacgggcactggccccagccgcacccgaggctctgcttcactcaccacgaaggaggagccccgctctcgcactctctgcagcaactgcagctgccgcacggggacccggacgggttcggctgctccggggagtgagaagagccagagggcgacgcgtcagacccgctggaggtcctgtcagacgcggagccgcagtgaggggcgctctcaggggcgcttccctcgggcacggagcggcagccagagccggaagacccctgtgtgtgcgccagcagctccgcgctgcaagcagacggtctgagaggctgcataggccaccggtgattgtcctgcagcgaggtgcctgtggtcaggggcaggaggaccctaatagcttgagacacaaatataatttcatagcagatgtcgtggagaagattgcacctgctgtggtgcatattgagctcttccgcaagctcccatttagtaaacgggaagttcctgtggcgtcgggatcagggttcatcgtttctgaggacgggctcattgttacaaatgcacatgtcgtgaccaataagcaccgggtgaaggtcgagctgaagaacggggctacgtatgaagcaaaaataaaggatgtggacgagaaggccgatatcgcgttaataaaaatagatcatcaagggaagctccctgtcctgttactggggaggtcgtccgagctgcggcctggagaatttgtggtagcaattggcagcccttttagcttgcagaatacggtcacaactggaatcgttagcacgacccagaggggtgggaaggagctgggactgcggaactccgacatggactacatccaaactgatgctatcatcaattatggaaattcaggcggtcccttggtgaatctggatggggaggtaatcggcataaacacactgaaagtgaccgcaggcatttcctttgcaatcccctccgataagatcaagaaatttctgaccgagtcccacgataggcaggctaaaggcaaggccataactaagaagaaatacatcggcatccggatgatgagcctgactagtagcaaagccaaggaactcaaggataggcaccgggactttcctgacgttattagcggcgcatatatcattgaagttatccctgacaccccagcggaggcgggaggccttaaagaaaatgatgttatcatatccatcaacgggcagtcagttgtgtccgctaacgatgtcagcgacgtgataaaaagagagtctacactaaatatggtggtccgcagagggaatgaagatatcatgatcacagtgataccagaggagatcgacccgtag

SEQ ID NO: 226410 - DNA, 1377 bp, synthetic construct
  misc_feature 1..1377: note = Description of Artificial Sequence: Synthetic coding sequence
  source 1..1377: mol_type = other DNA
atggccgcaccaagagctggcagaggggcaggctggtctctgcgcgcatggcgtgcgttaggcggaatccgatggggcagacgcccaagactcacacctgatctgcgcgcacttctgactagcgggacttcggaccctagagctcgagtgacctacggaactccctccttgtgggccagactctctgtaggcgtgacagagcctcgtgcctgtctcacgtcaggcactcccggacctagagcccagctaaccgcggtcactccggatacaagaactagagaagcatcggagaattctgggacaaggtccagagcctggctcgcagtggcactcggcgcaggaggggcagtgctcttactgctctggggaggtggacggggacccccagccgtcctcgcagctgtcccctccccgccacccgcaagtcccaggagtcaatataacttcatcgccgatgtggtagaaaagactgctcccgctgtggtctacatcgaaatcttagaccggcatcctttcctgggtcgagaagtgcccatctctaacggctctggatttgtggtggcagcagatggtctgatagtcaccaatgcacatgtggtggccgatcgacgcagagtgcgagtgagacttctttcgggcgacacctacgaggccgtcgtgaccgcagtggatcctgtggccgatatcgcaaccctgcggattcaaacaaaggaacctttaccgaccctgcccttgggtcgcagcgccgacgtacggcaaggtgaatttgtggtggcaatgggaagccctttcgcacttcagaacacgattaccagtggtattgtcagcagcgcccagcgtcctgcgagggatttgggcctcccacagacaaacgtagaatacatccagacggacgctgcaatcgattttggcaacagcggcggtccgctcgtaaacctggatggagaagtgatcggtgtaaatactatgaaagtcaccgcaggcatctccttcgctattccgtctgaccgtctccgtgaattcctgcaccgcggagaaaagaagaattcttcaagcgggatttccggctcacagagacgctacataggggtgatgatgttgactctctctccatctatcctagccgagctgcagctcagagagccttcgtttccggacgtccagcatggagtactcatccataaggtgattctgggctcacctgcacacagggcaggccttcgaccaggggacgttatcttagcgatcggtgagcagatggtgcagaacgcagaggacgtctatgaagcagtgcgcactcagagtcaactggccgtacagataagaagaggaagggagactctgaccctctatgtgacccctgaggtgaccgagtag

SEQ ID NO: 226411 - DNA, 1086 bp, synthetic construct
  misc_feature 1..1086: note = Description of Artificial Sequence: Synthetic coding sequence
  source 1..1086: mol_type = other DNA
atggcagcaccaagggcaggtcgcggagcaggatggtctttgagagcctggcgcgctttgggagggatcagatggggtcgaaggcctcgcctgacacccgatctcagagcgctgctgacctccggaacttccgatccccgtgccagagtcacttacggaactccatccttatgggctagactctcggtgggtgtgacggaacctcgggcatgcctgacctccggaacacccggacccagggcccagctgactgccgtcacccctgatactcggactcgggaagccagcgaaaattcgggcacacgctctagggcttggctagctgtagctctgggcgcaggaggcgcagtgcttctgctgctatgggggggtggacgaggaccaccggctgtgttagccgctgtgcccagccctcccccagctagtcctagatcccagtacaattttatcgctgacgtggtcgagaagacagctccagctgtcgtctacattgagattcttgatcgacacccctttctgggcagggaggtgcccatttccaatggaagtgggtttgtggtggctgctgacggcttaattgtgactaacgcccacgtggtagccgatcgtcggagagtccgggtcagactgctgagcggggacacctatgaagccgtagtgacggccgtcgatccggttgcggatatcgctaccctccggatccagaccaaattcggaaactccggtgggccactcgtgaatctcgacggcgaggtcatcggggtgaataccatgaaagtaaccgcagggatctccttcgccataccatccgacagactgagggaattcctgcacagaggagaaaagaagaattccagctctggcattagcggcagccagcgtcgttacattggggtcatgatgctcactctgtccccacgcgctggactccgacctggagatgtgattctggctataggggagcagatggtccagaacgcagaagatgtgtacgaggctgtgcgaacacaatctcaactggcggtgcagattaggcggggaagggaaaccctgacactgtacgtcacacccgaggtgactgagtag

SEQ ID NO: 226412 - DNA, 1362 bp, synthetic construct
  misc_feature 1..1362: note = Description of Artificial Sequence: Synthetic coding sequence
  source 1..1362: mol_type = other DNA
atgcaggcacgggctctcctcttagctgctttggctgctctagcactagctagagaaccccctgcagccccatgtcctgctcggtgtgacgtgtcaagatgccctagccctcggtgtcccggtgggtacgtgcctgatctttgtaactgttgcctggtctgcgccgcttctgaaggggagccctgtggcggtccactcgatagtccttgcggggagagcctggaatgcgtgcggggactctgccggtgcaggtggagccacgctgtgtgcgggacagacggtcatacatacgcaaacgtgtgtgccctgcaagctgcttctagacgggcattacagttgagcggaacacctgtcagacagctccagaagggggcttgtcccctgggcctgcaccagttatcatcccctcgatacaagttcaatttcatagctgatgtcgtagaaaaaatcgctcccgcagtggtccatattgagctctttctcaggcatccccttttcggtcggaatgtgcccctttcatcagggtccggatttatcatgagcgaagcaggtctcattatcactaacgcccacgtggttagttctaacagcgctgcacctggaagacagcagctaaaggtgcagctccagaatggcgactcctacgaagctaccatcaaggatatagataagaagagcgatattgcgaccattaaaatacaccccaagaaaaagttgcccgttctgttactcggtcattccgccgacctgcgtcccggagaattcgtggtggccattggtagtcccttcgctctacagaataccgtgacaacgggcatcgtgagtacagcccagcgggaggggagggaactaggcctccgagacagcgatatggactacatacagacagacgccatcattaactatggcaattctgggggaccactggtgaacttagacggtgaagttatcggcatcaacacgcttaaggtgaccgcagggatctcgtttgccatcccaagcgatcggatcacacgctttctcactgaatttcaggacaaacagattaaggactggaaaaagaggttcataggaattcggatgcgaaccatcacgccaagcctggtggatgaacttaaagctagcaacccagattttcctgaggtgagctccggcatctatgtgcaggaggtggcccctaattcacctagccagcgagggggaattcaagacggtgatatcatcgtcaaggttaatgggaggccgctagtcgactccagtgaacttcaggaagctgtgttaaccgagtctcctctactactggaggttcgaaggggtaacgatgacctgctgttttccattgcccctgaggtggtcatgtag

SEQ ID NO: 226413 - DNA, 1431 bp, synthetic construct
  misc_feature 1..1431: note = Description of Artificial Sequence: Synthetic coding sequence
  source 1..1431: mol_type = other DNA
atgatcaggccccaattacgcacagcgggactggggagatgtctcttacccggactcctgctgctgttggtgcccgttttgtgggctggtgcagaaaaattacacacacagccgagctgtcctgcagtttgccagccaacacgatgtcctgccctccctacttgcgctctgggaactactcctgtttttgacctgtgtaggtgttgccgggtttgtccagctgctgagagggaggtgtgcggtggcgctcaaggccagccctgtgccccaggcctgcagtgtttgcagccactccggccaggatttccctcaacttgcggatgccccacactgggcggagcagtgtgtggatccgacagaagaacgtatccaagtatgtgtgcgctgcgcgcagagaatcgcgcagctcgtagactgggaaaagtgccggcagtaccagtacagtgggggaattgtggcgatacgggcactaggagcgcaggccctctgcggcgtaactataattttattgcggcagtcgttgagaaagttgccccttcagtcgtccacgtacagctgtgggggcgtctgcttcatggcagtagactggtacctgtgtacagcggctccggtttcatagtatcagaggatgggctcatcattacaaacgctcacgtggtccggaaccagcaatggattgaggtcgtgctccaaaacggtgcgcgatacgaggcggtcgtaaaggatatcgatttgaagctggatctggcagtcatcaagatagagtctaacgccgagctccccgtgctcatgctgggcagatctagtgatttgcgggctggagaattcgttgtggccctaggaagccccttttcgcttcagaacacagccactgccggtatagtctctaccaaacaaagagggggaaaggagctcgggatgaaggacagcgatatggactacgttcagatagacgcaactatcaattacggtaattccggaggtccactggtgaacctggatggggacgttataggtgtcaactccctccgggttaccgacggtatttcattcgccatcccatccgaccgcgtacgccagtttctagctgaataccacgaacaccagatgaaagggaaagccttttctaataaaaagtacttgggcttgcagatgctgagtttaactgtcccattgagcgaagagctgaagatgcattacccagatttcccagatgtctctagcggagtctatgtgtgcaaagtcgttgaggggactgccgcacagagcagtggtctgcgggaccacgacgttattgtgaatatcaacggaaaaccgataacgacaacgactgacgtcgtgaaagcgcttgactcggatagtctcagtatggccgtactaagaggaaaggacaacctactcttgactgtcatacctgagacaataaactag

SEQ ID NO: 226414 - DNA, 8156 bp, synthetic construct
  misc_feature 1..8156: note = Description of Artificial Sequence: Synthetic coding sequence
  source 1..8156: mol_type = other DNA
atgcccaggacaaaacagatccacccacgcaatctccgcgataaaatcgaggaggctcagaaagagcttaacggtgcagaggtgtcgaaaaaagagatattgcaggctggggtgaaggggacttctgagtccctgaagggcgtgaaacgaaagaagatcgttgccgagaatcacctgaaaaagattcctaagagccctctgaggaatccattgcaggccaagcataagcagaacacagaagaatccagcttcgccgtgcttcacagtgcctctgaatcccataagaagcaaaattatatccccgtcaagaacggaaagcagtttactaagcagaatggcgagactccagggataatcgctgaggcctcgaaatctgaggagtctgtctcccccaagaaacccctgttcctacagcagccgtccgagctccgaaggtggagatccgagggggcagaccctgcgaagttcagtgatctggatgaacagtgtgatagctcatctctgtccagcaaaacccggaccgataacagtgaatgcatctcatctcactgtggcacaacaagtccaagttacactaacaccgcctttgacgtacttctgaaggccatggaacctgagctgagtacactgtctcagaagggcagcccttgtgctattaaaaccgagaaattaaggcctaacaaaaccgctagaagcccccctaaactgaagaactcaagtatggacgcccctaaccaaacgtctcaggagttggtagcagaaagccagtcatcttgcacaagctacaccgtgcacatgtccgctgcacagaaaaacgaacaaggggcaatgcagtccgcgtctcacctgtatcaccagcacgaacacttcgtgcccaagtcgaatcagcacaatcagcagctgcccggatgtagtggatttactgggtccctcaccaacctccagaatcaagagaatgcaaaactcgaacaggtatacaatatagctgtgactagctccgtcggactcacaagtcccagttcaaggtctcaagtgacaccccagaatcagcagatggacagtgccagccctctcagcatcagtcctgcaaacagcacccagtccccgccaatgccgatttacaactctacccacgttgccagcgtcgtcaatcagtccgtagagcagatgtgtaatctgcttttgaaagaccagaaacccaaaaaacaggggaagtacatttgcgagtattgtaatcgcgcttgtgccaagccgtcagtccttcttaagcacatccgctcccataccggtgagcggccatatccttgtgtgacatgcgggttctcattcaagacgaaaagtaatctttacaagcacaaaaaatcacatgcccacacaattaagctggggctggtgctgcagcctgatgctggcggactatttctgagtcatgaatctcccaaagctctgtccatccatagtgacgtggaggattcaggagaaagcgaagaggagggtgccaccgatgaacgacaacacgatcttggagctatggagctacagcccgtgcacattattaaacgcatgtcgaatgctgagaccttactgaagagttcttttacgccaagttcaccagagaacgtgatcggggatttcctgctgcaggaccgctcagccgaatcccaagctgttactgaactgccaaaggtggtcgtgcatcacgtgacggtctccccgctcagaactgattccccaaaggctatggatccaaagcctgagctctcttctgcccaaaagcagaaagatttgcaagtaaccaacgtgcaacctttgagtgctaatatgtcacagggtggcgtctcccgcctggagacaaacgaaaactcgcaccagaagggagatatgaaccctttagagggaaagcaggactctcatgtcgggacagtgcatgcacagctccagagacaacaggcgactgattactcgcaggagcagcagggcaagctattgagtcccagaagcttggggtccaccgattcagggtacttctcccggagcgagagcgctgaccagacagtgtctcccccaacaccttttgccagaagactgccttctaccgagcaggatagcggccgaagcaatggccctagcgcagcactcgtgacaacttccaccccatccgcgcttcccactggggagaaggccctgttattaccaggccagatgagaccaccattggccacaaaaaccctggaagaaaggatctctaagctgatctccgacaacgaggctctggtcgatgacaaacagctggatagcgtgaagccacggcgaacttccttatcaagacggggatccattgattcgccaaaatcatacattttcaaagatagttttcaattcgacctgaagccggtcggcagacgcacatcctcatcctccgacatccctaagagtccctttaccccaacagaaaagagcaaacaagttttcctgctgtctgtcccttctctggactgcctgcctataacccggagtaactccatgccaacgacagggtatagtgcagttccagccaacattatcccgccaccgcatcctctccgtgggagccagtcttttgacgacaagattgggacgttctatgatgacgtttttgtctccggtccgaacgcccctgttccacaaagcggacatcccagaaccttggtccgccaagccgctatcgaggattcctccgccaacgaatcccatgtgctggggaccgggcagtccctggacgaatcccaccagggctgtcacgctgcgggagaagccatgtctgttcgtagtaaagctctggcacagggccctcacattgagaaaaaaaagtcacaccaggggagggggaccatgttcgaatgcgagacctgtcggaatcggtatcgcaaactggaaaatttcgagaaccacaagaagttttactgctctgagctgcatgggcctaaaacaaaggtagctatgcgcgagcccgagcactcacccgttcctgggggactgcagccccagattttgcactaccgtgtagctgggtcaagcggcatttgggaacaaacaccacagattaggaagcgtcgcaagatgaaatccgttggcgatgatgaggagctccagcagaacgaatccggcaccagtccaaaatccagcgaaggtctgcagttccaaaacgctctgggatgtaacccgtcactgccaaagcacaacgtgaccattaggtctgatcagcagcataaaaacatacaattgcagaattctcatattcatctcgtggccagaggcccagagcagactatggatccaaagctcagcacaatcatggagcagcagatctcatctgccgctcaggacaaaattgaactgcagagacatggaaccggcattagtgtcatccaacacaccaatagcctgtcccgaccgaactcatttgataagccagagccctttgagcgggctagcccagtgtctttccaagagctgaatagaaccggcaagtctggtagtctgaaagtaattggcatatctcaggaggagagccatccctcaagagatggctcccaccctcaccagctggccttgagtgatgcattacgcggagagctgcaggaatcttcccgcaaaagcccatctgaacgtcacgtactgggtcagccctcgcgccttgtgcggcagcataatatccaggtgcccgagatccttgttactgaggagcccgacagagatttagaagctcagtgccatgatcaggagaaatccgagaaattctcctggccgcaacgcagcgaaaccttaagcaagttgcctaccgaaaagttaccccctaagaagaaacgactgcggcttgcagagatagagcactcaagcactgagagcagctttgacagcacactgtcccggtctctgtctcgcgagtcatctctaagccacacaagttccttcagtgcttcacttgatatagaagatgtatccaaaacagaggcgtccccgaaaattgacttcttaaacaaagccgaattcctgatgattcctgccggactgaataccctcaatgttcctggctgccaccgggagatgcggaggactgcatctgaacagataaactgtactcagaccagcatggaggtatcagatttgagatccaaatccttcgattgtggttcaataacccctcctcagaccacacctcttacagaattacagcctccttcctcgccgtccagagtcggcgtcaccggtcacgttcctctcctggagcggagacggggacccttggtgcgccagattagcctcaatattgcacccgattctcatctttctcccgtgcatccgacatcatttcagaatactgctctgcccagcgtcaacgccgtgccatatcagggcccacagctgacatccacatctcttgccgaattctccgccaacacccttcattctcagacgcaggtaaaggacttgcaagccgagaccagtaattcttcttccactaatgtgttccccgtacaacaactctgcgacatcaacctgctgaaccagatccacgctccaccttctcatcaatctacccagctgtctttgcaagtctcgacgcagggatctaagcctgataagaattcagtgctatccgggtcttctaagagcgaggattgctttgcccctaagtatcagctacattgccaagtctttacttcaggaccttcctgctcctctaatcccgtacacagcttgccaaaccaggtgatctctgaccctgtgggtaccgatcactgtgtgacttccgccaccctgcctacaaaactgatagactccatgtctaattcccatcctcttctgccacccgaacttcggccactcggttcacaggtgcagaaagtaccatctagctttatgctcccaattagactgcaatcttccgtgcccgcttactgttttgccacattaacgtcactgccccagatcttagtgacccaggatctgccaaatcagccaatctgtcaaacaaaccactccgtagttcctataagtgaagaacagaattcagtcccaacactccagaaaggccaccagaatgccttgcccaatcctgagaaggagtttttgtgcgaaaatgtcttctccgaaatgtcacaaaactccagtttgtctgaaagtttgcctattacccaaaaaatttccgtcggcaggctatcacctcaacaagagtcctccgcctctagtaagcggatgcttagccctgcaaactcactggatatagctatggagaagcaccaaaagagggcaaaagacgaaaacggcgctgtgtgtgctacagacgtgagacctcttgaggcactctcttcccgtgtgaacgaagcgtctaaacagaagaaaccgatcttggtacggcaggtgtgtaccacagagcctcttgatggcgtgatgctggagaaggatgttttttctcagccagagataagcaacgaagctgtgaatttgactaacgtgctccccgcagataatagtagcactggctgctccaagtttgtggtaatagagccaatttccgaattgcaggagttcgaaaacatcaagtcgtcaacctctctgactcttacagttaggagcagccctgccccatctgagaatacccatattagcccactgaagtgtacagacaacaaccaggagagaaaatcccccggtgtcaaaaaccagggcgacaaagtgaacatccaggagcagtcacagcagccagtcacctctctgtcactttttaacataaaggacacccagcagttagccttccccagcctcaaaaccacaacaaattttacttggtgctatctcctgagacagaaatccctccatctaccacaaaaagaccagaagacttcagcctacaccgattggacagtcagcgcgagcaatcctaatcctctgggacttccaaccaaagttgcattggcgttgctcaactctaagcagaacactgggaagtccctatattgtcaggcaatcactactcacagcaagtctgatctgctggtgtattcttcaaagtggaaaagctcattgagtaaacgcgctctgggaaatcaaaaatccacggtggtagaattcagcaacaaagatgcctctgaaataaacagtgagcaggacaaagagaattctttgatcaaaagtgaacctaggcggatcaagatcttcgatggcggatacaaatccaatgaggaatatgtgtacgtacgcggacggggtcgaggcaaatacatatgtgaagagtgcgggataagatgcaaaaaaccctccatgctcaaaaagcacatccgcactcatacagatgtgaggccttatcattgcacgtattgcaatttttcgtttaagactaagggaaatctgacgaaacatatgaaatctaaggctcattcaaagaagtgtgttgatcttggcgtgagtgtgggactgatagacgaacaggacactgaggagtccgacgaaaaacagcgcttcagctatgagcggtctggctatgacctcgaagagtctgatggccctgatgaagacgacaatgaaaacgaggacgacgatgaagattctcaggctgaatccgtcctatcagccactccttctgtcacagccagccctcagcacctgcccagcaggtcttcactgcaggatccagttagcaccgatgaggatgttagaatcacggattgtttctccggtgtccataccgaccctatggatgtgttgcctcgcgcattgctaacccggatgacagtgctgtccaccgcacagtcagactataaccgaaaaacactttctcctggcaaagctcggcagagggctgcgagagatgagaatgatacaataccaagcgtggacacatccaggtctccatgtcatcagatgtctgtggactaccccgagtcagaggagatcctgagaagctctatggccggtaaagccgttgctatcactcagtccccaagctcagttcgcctgccgcctgcggcagcggagcacagcccacagaccgcagccggaatgccctctgtcgcaagcccacacccggacccacaagagcagaagcagcagattactctccagccaacacccggactcccttccccacacacccatctgtttagccacctgcctctccatagccagcagcagtcccggactccttataatatggtgccagttggcggtatccacgttgtgcctgccggtctgacttactcgaccttcgttccactgcaagccggtcccgttcagcttacaatccccgcagtcagtgtggtgcatagaaccctggggacacatagaaatactgttactgaagtgagtggtacaaccaatcccgctggggttgcagagctgagctctgttgtcccttgtatcccaattggtcagatccgggtgcctggcttgcagaacctgtcaacgccaggccttcagtctttgccttcgctcagcatggagacagtcaatattgtgggtctggcaaacaccaatatggctcctcaagttcatccaccgggactggcgctgaatgccgtcggcctccaggtgttgacggccaatccctccagtcagagctccccagcaccccaggcccatattcccggactgcagattctcaatatcgctctgcctaccctgatccctagcgtgtctcaggttgctgttgatgcccagggcgctcccgaaatgccagcatcccagtctaaagcttgtgaaacacagccgaaacagacctccgtcgcctccgctaaccaggttagccgcaccgagagccctcaaggccttcccacggtgcagcgggagaacgccaagaaggtgttaaaccctcccgctcccgcaggtgaccatgcgcgacttgatgggctgtctaagatggatacagagaaagccgcttctgccaaccacgtcaaacccaagcctgagttaacctccatccagggccagcccgcttctacttctcaaccactgctaaaagctcattccgaggtattcaccaaacccagcggccagcagacactgtctcccgatagacaggtaccacggccaacggcactgcccagaaggcagccaaccgtgcatttcagtgatgtctcgagtgacgatgatgaggatcgtcttgttatcgccacata

SEQ ID NO: 226415 - DNA, 387 bp, synthetic construct
  misc_feature 1..387: note = Description of Artificial Sequence: Synthetic coding sequence
  source 1..387: mol_type = other DNA
atgccacgtaccaagcagattcatcccaggaacctgagagataagatagaggaggctcagaaagaactgaacggagccgaagtctcaaagaaagagatcttgcaggcaggtgtcaaaggcacttctgagagcctaaaaggggtaaagagaaaaaaaatcgtggcagagaatcatctgaaaaagattcctaaatcccctctgcgaaaccctctgcaggccaagcataagcaaaacacagaggaatccagtttcgccgttttacactcggcaagcgagtctcacaagaaacagaattacatccctgtcaagaacgggaaacagttcactaagcaaaacggtgagacacctggcatcatcgcagaggctagtaagtcagaggagtcctag

SEQ ID NO: 226416 - DNA, 429 bp, synthetic construct
  misc_feature 1..429: note = Description of Artificial Sequence: Synthetic coding sequence
  source 1..429: mol_type = other DNA
atgccacgaacaaagcagattcacccgcgaaatctaagagacaagatcgaggaggcacagaaggaactaaatggtgccgaggtgtccaagaaggaaatactccaggcaggtgtgaagggcacaagcgaaagcctgaagggcgtgaaacgaaagaagatagtggcagagaatcacctgaagaaaatccctaagtcgcctctacggaaccccctccaggcaaagcacaagcagaacaccgaggagagctccttcgccgtactccacagcgcgtctgagtcacacaaaaaacagaactatattcccgtaaaaaatggaaagcagtttacaaagcagaacggcgaaacgcccggaatcatcgcagaggcttcaaaatccgaggagagcgtctcacctaagaagcccctcttccttcagcagccctctgaatag

SEQ ID NO: 226417 - DNA, 363 bp, synthetic construct
  misc_feature 1..363: note = Description of Artificial Sequence: Synthetic coding sequence
  source 1..363: mol_type = other DNA
atgccacgcaccaagcaaatccacccacgaaatctgagagacaagattgaagaagcccagaaggaactgaatggagccgaggtgtcaaagaaagagattttgcaagctggcgtgaaaggaacaagtgaaagtttgaaaggcgtgaagcggaagaagattgtcgccgagaaccacttgaagaagatcccaaagagcccgttgcggaatcctctgcaggcaaaacacaaacagaatactgaggaaagcagcttcgcagtgctgcatagcgctagcgagagtcacaagaagcaaaactacatccctgtgaaaaatgggaagcaatttacaaagcaaaacggggaaactcccggaattatcgcatag

SEQ ID NO: 226418 - DNA, 1752 bp, synthetic construct
  misc_feature 1..1752: note = Description of Artificial Sequence: Synthetic coding sequence
  source 1..1752: mol_type = other DNA
atgcttaagaaacacatacgtacccacaccgacgtcagaccatatcactgtacttactgtaacttctcattcaagacgaaagacgaaaagcagcgattcagctacgagcgttctggttatgaccttgaagagagcgatggaccggacgaggacgataacgaaaatgaggacgatgacgaagatagccaagcggagtctgttctgagtgccactccttccgtgactgcatcacctcagcacctgccgtctaggtcatcactccaagatcccgtaagtactgacgaggatgtcaggataacagattgcttctccggggtccacaccgacccaatggatgtcttgccgagggcgctactgaccagaatgaccgtgttgtccactgcccagagcgattacaatcgaaagaccctatctcctggcaaggcacgtcagcgagccgctcgggacgagaacgacacaataccttccgtggacacctcacgctccccgtgccatcagatgagcgttgactacccggaaagcgaagagatcctgagatctagcatggcaggcaaggcagtggccatcactcagtctcctagctccgtgaggctgccacccgctgccgcagagcactccccgcagacagcagctgggatgccgagcgtggcaagccctcaccccgatccccaggagcaaaagcagcagattactctccaacccacaccaggcctgccttctccgcacactcacctgttttctcacttacccctgcactctcaacagcagagcaggaccccctacaatatggtaccagtgggcggaatacacgtggtacccgctgggctaacatattctactttcgttccattgcaggccggtcccgtgcagctcaccattccagctgtcagtgtggtccaccgcacactcggaacgcatcgcaatactgtgaccgaggtgtccggaaccacaaaccccgcaggagtggccgagctatcctccgtggtaccttgcattcctatcgggcagattagagtacctggcctgcaaaacctgtccacccccggacttcagtcactgccatcactgagcatggagacggtcaacatagtcggcttggccaacacaaatatggctcctcaagtgcatccaccgggtcttgccctgaacgccgtgggcctgcaagtgctaaccgccaatccatcaagtcagtctagcccagctcctcaggcccacattcccggtctgcagattctgaacatcgcgctccctaccttgataccttccgtgtcacaggtggccgtagatgctcaaggcgcacctgaaatgcctgctagtcaatctaaggcttgtgagactcagcccaaacagacctctgtggcctccgccaaccaagtgtcaaggaccgaaagccctcagggcctgccgaccgttcaaagggagaacgcgaaaaaagtgctgaatccaccagctcccgcaggcgaccatgcgaggctggacggtctctcgaagatggatacggagaaggcggcttcagctaaccacgtgaaacccaaacccgagcttacttccattcaggggcagccagcctcaacgtctcagccactgctgaaggcccattccgaagtgtttacaaagccaagcggacagcagaccctgagtccagaccgccaagtgccaaggccgaccgccctgcctcgacggcaaccaacggtgcacttctccgacgtgagttctgacgatgacgaagaccgattggtaattgccacctag

SEQ ID NO: 226419 - DNA, 2103 bp, synthetic construct
  misc_feature 1..2103: note = Description of Artificial Sequence: Synthetic coding sequence
  source 1..2103: mol_type = other DNA
ggggataagttctcattccaaagagccctggggaatcagaagagcactgtcgttgaattctccaataaggacgcctccgaaatcaattccgagcaggataaggaaaatagtctcattaaaagtgagcctcgcagaattaaaatcttcgatggtggttacaaatctaacgaagagtatgtttacgtgaggggaagaggccgaggaaagtatatctgcgaggaatgcggcataagatgtaaaaagccttcaatgctcaaaaaacacattcgaacacacaccgacgtgcgcccttaccactgcacgtattgcaacttctcttttaaaaccaagggtaacttgactaaacacatgaaatccaaagcgcacagcaagaagtgtgtcgatctgggagtctcagtcggacttattgatgagcaagataccgaggaatccgatgaaaaacagcgtttttcatatgagaggtcgggctatgacctcgaggaaagtgatggtcctgatgaggacgacaatgagaacgaagacgacgacgaagattctcaggctgagtccgtgctcagtgctaccccctccgtgacggcctcacctcagcacctccccagccggagttccctgcaggacccagtatctactgacgaagacgtgcggattacagattgtttctcaggcgtccatacggacccaatggacgtgctgccccgagctctactaactcgcatgacagtgttatccactgcacaaagtgactataaccggaaaactctctcgcctgggaaggctaggcagcgcgctgctcgtgatgaaaatgatactatcccatccgtggacacatccaggtcgccttgtcaccagatgagtgttgactacccagaaagtgaggagattttgcgcagcagtatggccggaaaagctgttgccatcacacaatcaccgtcatctgttcgccttcccccagccgctgctgagcactcccctcaaacagccgctgggatgccttcagtggcctccccacatccagatccgcaggagcagaaacaacaaatcactttacagcccactccaggtctacctagcccccacactcaccttttttcacaccttcctttgcatagccagcagcagtcacggacaccatacaatatggtgcccgtgggcggtattcacgtggtcccggcaggtctcacctattctacatttgtgcccttgcaggcaggccctgtacaactcacaataccggcagtctccgtggtgcaccgtaccctgggcactcatcgtaatacagtgacagaggtgtctgggaccactaaccccgcaggcgtagctgagctttcctcggtggtcccctgcatacccatcgggcagattcgtgtgcctggattacaaaacctgagtactcctgggctgcagtctttaccctccttgtctatggagacagttaatattgtaggcttggccaataccaacatggctcctcaggtccaccccccaggtctggctttaaatgccgtgggcttacaggtgctgaccgctaacccgtctagccagtcatctcctgcccctcaggctcacataccgggactgcagatccttaacatcgccctccccacactgattccttctgtgtctcaagtcgcagttgatgcccagggagctcccgaaatgccggcatcgcagtccaaagcctgtgagactcagccaaagcaaacatctgtcgcatctgccaatcaggtctcccgaactgagagcccacaaggcttgcccacggtgcagagagaaaatgccaagaaggtgctcaaccctccagcacccgctggcgaccatgccagactggacgggctttccaaaatggacactgagaaggccgctagcgccaatcacgttaaacctaagcctgagctgacgtctattcaaggacaacccgcatccacatcacagcctctcttaaaggcacactccgaagtcttcacaaaaccatcaggccaacaaacactgtccccagacaggcaggtgcctcgacctacggctctacctcgacgccagccgacagtgcacttttccgatgtgagttctgatgacgacgaggaccgtctggtgattgccacctag

SEQ ID NO: 226420 - DNA, 7341 bp, synthetic construct
  misc_feature 1..7341: note = Description of Artificial Sequence: Synthetic coding sequence
  source 1..7341: mol_type = other DNA
atggatacaggcgatactgcccttggccagaaagccacctcacgatccggggaaactgacaaagcatcaggcaggtggaggcaggaacaaagtgctgtgataaaaatgagcacattcgggtcacacgagggacagagacagccgcagattgagcccgaacagatcggtaacaccgcttctgcacagctgttcggcagcggcaagcttgcgagcccatcggaagtggtgcagcaagtcgccgagaagcaataccctccacatcgcccttctccttatagctgccagcattccctgagcttcccgcagcacagcctcccacaaggagtgatgcatagtaccaaaccacaccaatctctcgaaggcccaccctggctgtttcccggaccactgccgagcgtggcctccgaggatctcttcccatttccgatacacggccactccggaggctacccaagaaaaaaaatttccagtctgaatcccgcatattcccagtacagtcaaaaatcaatcgaacaagctgaggaagcccataaaaaggagcacaagccaaaaaaacctggtaagtatatctgtccctactgctcgcgtgcatgcgccaaaccttccgttttaaaaaaacacattaggagccatacaggggaacgaccgtatccctgcatcccatgcggtttttctttcaagactaaatccaacctctataagcaccgcaaatctcacgcccatgcaattaaggcaggactcgtcccattcactgagtccgccgtgtctaaattagatcttgaggccggtttcatcgatgtggaagcggagatccatagtgacggggaacaaagtaccgacactgacgaggagtcttcactttttgctgaagctagcgacaagatgagtcccggaccccctattcctttggatatcgcctcaaggggcggttatcatggatctttagaagagtccctggggggtcccatgaaagtaccgatcttaataatcccaaaatccggcattcccctgcctaatgagagtagccagtacataggccctgatatgctgcccaatcccagcttaaacaccaaagccgacgactcacacaccgtcaagcaaaaactagccctacgcctgtccgagaagaaaggtcaggattctgagccttccctcaacttactgagcccacattcgaaagggagtaccgatagcggatatttttccaggagcgagtccgccgagcagcagatcagcccgccaaataccaacgctaagagttacgaggaaatcattttcgggaagtattgccggctatcccccagaaatgccctgtccgtaacaacaactagccaggaacgggctgccatgggcaggaaaggtatcatggagcctctgccccacgtaaacactcggctggatgtgaaaatgttcgaggacccagtatcccagctcatccctagcaagggagatgtagatccaagccagactagcatgttgaagtccaccaagtttaattcagagtcgcggcaaccacagattatcccctcatcgattcgcaatgaaggaaaattgtatcccgcaaattttcagggcagtaatcccgtgctgctggaagcgcctgtggatagcagtcccttaattaggagcaactctgtgccaacaagcagtgccactaacctcactatcccacccagcctcagagggagccactcatttgatgagcggatgaccggtagcgatgatgtcttctaccccggtaccgtcggaatccctccacagcgtatgctgaggaggcaggctgcatttgagctgccttcagtacaggagggtcatgtagaggtggaacatcatggcaggatgctaaagggaatctcaagttctagtcttaaagaaaaaaaactctcccccggtgaccgagtaggctatgactacgacgtgtgtcgtaagccttataagaaatgggaagacagcgagacaccaaaacagaactacagagatataagctgcctctcaagcctcaagcacggcggagagtacttcatggacccggttgttccccttcagggcgtaccttccatgttcggaacgacctgcgaaaaccgaaagcgccgtaaggagaagtccgttggcgacgaggaggatacaccaatgatttgttcttcaattgtgagcactcccgtcgggatcatggcatcagattacgaccctaaactacaaatgcaggagggagttaggtccgggtttgccatggcgggtcacgaaaatctcagtcacgggcatactgaaaggttcgacccttgccggcctcaactgcagccgggatcacctagcctcgtgtctgaggagtctccgtctgcaatcgattctgataagatgagtgatctcggcggtcggaagccccctggcaatgttatctccgttattcagcacacaaacagcctgtcacgccctaacagttttgagcgttctgagagtgcagaactcgtcgcttgcacccaggataaggccccatccccatctgaaacttgcgactcagagatcagcgaagcccctgtgtcacccgaatgggccccaccaggcgacggcgctgagtctgggggaaagccctctccctcccagcaggttcaacagcagagttaccacacacagccaaggcttgtcaggcagcacaacatccaggtccccgaaatccgggtgactgaggaacccgacaagcccgagaaagagaaggaggcgcagagtaaggagcccgagaaacctgtggaggagtttcaatggccccagcgaagcgagacactgagccaactgcctgctgagaagctcccaccaaagaaaaaaagactccgcctggccgacatggagcactccagcggcgagagcagctttgagtctaccggtaccggcctcagtcgcagccctagccaggaatcaaacctcagtcactcatcctccttctcaatgagcttcgaacgagaagagaccagcaagctgtccgctctgccaaagcaagacgaatttgggaaacactctgaattcctgacagttccagccggatcctacagccttagtgtccctgggcatcaccatcaaaaagaaatgcgacgctgttcgtcagagcagatgccatgcccccatcccgcagaagtaccagaggtgagatcaaagtcctttgactatgggaacctttctcacgcacccgtgagtggcgcagccgcttctaccgtgtcccctagtcgtgaaagaaagaagtgcttcttggtgagacaggcgtccttctccggcagccccgaaatatcacagggcgaggtgggtatggatcagtccgtcaagcaggaacagctggagcatctgcatgcaggcctgagatctggatggcaccacgggcctccagcagtgctgccaccccttcagcaggaggaccctggtaagcaggtggcgggtccttgtcctcctctcagcagtgggcctttgcacctcgcccaaccccaaattatgcacatggattcccaggaaagtctgagaaacccgctcatccagcctacatcatatatgactagtaagcacctgccagaacagccacatctgttccctcatcaggagacaatccccttctctcccatccagaacgccctgttccagtttcaataccccactgtctgcatggtccatcttcctgctcagcaacccccttggtggcaagcacactttccccatccatttgctcagcacccacagaagagctatgggaagccatctttccagacagaaatacatagttcttacccactggagcatgtcgcagagcacaccgggaaaaagcccgctgagtatgcacacactaaagagcaaacttacccatgttattctggagccagcggactgcaccccaagaaccttttgcctaaattcccaagtgaccagagctccaaatccaccgagacaccatccgaacaggtcctgcaggaggattttgcctcggccaatgccggaagcctccagagtctgcctggaaccgtggtcccagtgcgaattcagacgcacgtcccgtcgtacggttcagtgatgtacacatctatttctcagatccttggccagaactcacctgcaattgtaatttgcaaagttgacgagaacatgactcaacgaacgctcgtcaccaatgccgcaatgcagggaattggtttcaacattgctcaggttctcgggcagcatgctggcttggagaagtacccaatatggaaggcccctcagacgctcccacttgggttagaatcctctatcccgctgtgtctgcctagcacatccgattctgtagctacactgggaggctcaaaacgaatgttaagcccagctagctcactggaattgttcatggaaacaaagcagcaaaaaagggtaaaggaggagaagatgtatggtcaaatcgttgaagaattatccgctgtagagctgaccaactctgacataaagaaggacctcagtaggccccagaaaccccagctggtgcgtcaaggctgtgcctcggaacccaaggacggactacagtctggcagcagtagcttctcaagcctctcacccagcagtagtcaggactacccaagtgtgagcccatcctctagagagcccttccttccctcaaaagagatgctctccggcagcagagcccctctgcccggacagaaatcgtcaggcccatcagagagcaaagagagtagcgacgaactcgatatcgatgagactgcttccgatatgtccatgagtccccagtccagcagtctcccagccggtgacggtcagctggaagaggagggcaaaggccacaaacggcctgtcgggatgctggtgcgaatggctagcgccccttcggggaatgtagcggacagcaccctcctactgactgatatggcagattttcagcagattctgcagttcccaagtcttcgtactactacaactgtgagttggtgcttcctgaattataccaagcccaactatgtccagcaggctacattcaaatcgtcagtgtatgcaagttggtgcatcagtagctgcaatccaaatccatctgggttaaatactaaaaccacgctggccctccttcgaagtaagcagaaaattacagccgagatttacactctggctgccatgcatcgtccgggtacgggtaaactcacaagcagctcagcctggaagcagttcacgcagatgaaacccgatgcctccttcctctttgggtcgaagctggagaggaagctggtcggcaacatcctgaaagagaggggtaaaggcgacattcatggggataaggatatcggatctaaacagacagagcctatcagaatcaaaatctttgaggggggatacaaatccaacgaagactacgtctacgtgcgaggcaggggaagaggaaagtacatctgtgaggagtgtggcatccgctgtaaaaaaccctcaatgcttaagaagcacattaggacccatactgatgtgaggccttacgtctgtaagctgtgcaacttcgcgttcaaaacgaaaggaaatcttacaaagcacatgaaatctaaggctcatatgaagaagtgcttggagctgggcgtatcaatgacctctgtagatgataccgaaaccgaggaggcagaaaacctggaggacctccacaaagccgcagagaaacactccatgtctagcattagtactgaccaccaattctccgacgctgaagaatcagatggggaggatggggacgacaacgacgacgacgatgaagatgaggatgatttcgacgatcagggggacctgacccccaaaacaagatctcgctctacaagtcctcagcccccacggttctcctccctcccagtgaatgttggggcagtgccgcatggtgtcccttccgattcttctctggggcactcatctctgataagttatcttgtcaccctcccgagtatccgggtaacccaacttatgacgccttcagattcctgtgaggacacacaaatgactgagtaccagagactgttccaaagtaagtctacagattctgaacctgacaaagacaggttggacattccatcttgcatggacgaagaatgtatgctgccgtccgaaccaagctcaagccccagagacttttctccctcgagtcaccatagcagccctggttacgactccagtccttgccgggacaacagtcctaaacgctaccttattcctaaaggcgatttgtctccaaggaggcacctgtcgccccgtcgggacctgtcccctatgcggcaccttagtcccagaaaggaggccgctctgcggagggaaatgtcacagcgtgatgttagtccaagaaggcacctatccccacggcgtcccgtttcgccagggaaggacattaccgctcggagagatctatccccacgcagagagcggagatatatgaccaccatccgtgctccttctccaagaagggctctctaccacaatccaccacttagcatgggacagtatctgcaggcggaacccatcgtgctgggccctccaaacctcagaagggggcttcctcaggtgccatactttagcttatatggtgatcaagaaggagcgtatgaacacccaggcagctctctctttcctgaaggacccaatgactacgtgttttctcacctgcccttgcactcccagcagcaggtgagagcgccaattcccatggtacctgtggggggtatacaaatggtacactcaatgccccctgcactgtcaagtctacatccctccccaaccctcccattgccgatggaagggttcgaggagaagaagggtgctagcggagagtctttcagcaaggacccatatgtgctgagcaaacaacacgaaaagcggggacctcacgctctgcagagtagtgggccaccttccactccatcatcccctcgacttctcatgaaacaatccacaagtgaagacagcctgaacgcaactgagcgagagcaagaagagaacatccagacatgtaccaaagcaattgcttccctcaggattgccacagaagaggccgcacttcttggacctgaccagccagcacgggtgcaggaacctcaccagaatccactggggtccgctcacgtctcaattaggcacttttcgagacccgagcctggccaaccatgtacctcagctacacaccccgatctacacgatggggaaaaggataactttggtacttcacagaccccactggctcactccacgttctattcgaagtcttgcgttgatgacaagcaattggatttccactccagtaaagaacttagttccagcacagaagaaagcaaagacccttctagtgagaagagccagctgcactag

SEQ ID NO: 226421 - DNA, 7340 bp, synthetic construct
  misc_feature 1..7340: note = Description of Artificial Sequence: Synthetic coding sequence
  source 1..7340: mol_type = other DNA
atggacactggagacaccgcgctgggccaaaaagcaacgtcacggagcggagagactgacaaggcatcgggcagatggagacaggaacagtcggccgtgatcaaaatgtccaccttcgggtcacatgaaggacagaggcagccccagattgagccagaacagattggtaataccgcgtcagctcagttgttcgggtcaggcaaactggcgtcaccaagtgaggtggttcagcaggtcgcggaaaaacagtacccccctcaccgacctagtccatactcttgtcagcactccctgtccttccctcaacacagtctcccacaaggtgtaatgcatagtaccaagccacatcagtctttggaagggccaccctggctattcccaggaccactgccctcagtggccagtgaggacctgttcccgttccctatccacggtcacagtggcggttatcctaggaaaaaaatttcctctttgaatcccgcttattcacagtacagtcagaaatctatcgagcaggccgaagaggcacacaagaaggagcacaagccaaagaagccaggaaagtacatttgcccttactgtagccgtgcctgcgcaaagccctctgtgctcaagaagcatatcagatctcacacgggcgagcggccttacccctgtatcccttgcggattctcatttaagactaagtctaacctgtacaagcacaggaaatcccatgcacatgccatcaaagccggactggtcccctttactgagagcgcagtgagcaagctggatcttgaggccggtttcattgatgttgaggccgagattcacagtgatggcgaacaaagcaccgatactgacgaggaatcgtccctttttgctgaagccagtgacaagatgtctcccggtccccctattccattggacatcgcttctcgcggaggataccatggatctcttgaagagagcctgggcggacctatgaaagtccctatcttgatcatcccaaagagcggtatcccgctgcctaacgagagctcccaatacatcggacccgatatgctcccgaatccctccctgaataccaaagcggatgattctcacaccgtgaaacagaaactggcactacgcctgtcagagaagaaaggccaggactcagaacctagtctgaatcttttatctccccatagtaaaggctcgacagattcgggctacttctcacggtcagagagcgctgagcagcagatatctcccccaaacactaatgccaaatcctacgaagaaatcatttttgggaagtattgccgcttgtctccaagaaatgcactgagcgtaaccactacaagtcaggagagagccgcaatgggacgtaagggtatcatggaaccgcttccacacgtcaacactcggttggacgtgaaaatgttcgaagatcccgttagtcagctcatcccttcaaaaggggatgtggacccttcccaaaccagtatgctaaaatccactaagttcaacagcgaaagccgacagcctcagataatacctagtagtatcaggaatgagggcaaactctatccagctaattttcaaggatctaatcccgtgctgctggaggcaccggtggattcctcccccctgatccgaagcaactcagttcccacatcgagcgcaacaaaccttacaatccccccaagtctgagagggtcccatagctttgacgaacgaatgactggcagtgacgacgtattctatccaggcaccgttgggatacctccccaacgtatgcttcgacgtcaagctgccttcgagctcccctctgtgcaggagggtcatgtggaggttgaacatcatggcaggatgttgaaaggcatttcaagtagctctctgaaggagaagaagctttctcccggagatagggtcggatacgactatgatgtctgtcggaagccatataagaagtgggaagactcagaaacccccaagcaaaactatcgcgatatctcctgtttgtcctcattgaagcatggtggggagtactttatggatcctgtcgtccctctgcaaggcgtgccgagcatgttcggaaccacatgtgagaatcgtaagagacgcaaagagaagtctgtaggcgacgaggaggatacccccatgatttgctcttccattgtttcgacacccgtgggtattatggcgagcgactatgaccccaaattgcagatgcaagagggcgtcaggtctgggttcgcaatggccggacacgagaacctaagccacggacatactgagcgcttcgatccctgtagaccccaactgcagccagggtcgccctcgctcgtgagcgaggaatccccttccgcaatcgactccgataaaatgtcagacctgggtggaaggaaacctccaggtaacgttatttcggttatccagcatactaacagcctgtctcggccaaattccttcgagcggtctgaaagcgcagagctcgtggcttgcacacaggataaagctccctctccatctgaaacctgtgattccgagatctcggaggccccagtttcacccgagtgggcccctcccggagacggagctgagagtgggggaaagccgtctccgtcacagcaggtgcaacaacagtcctaccatacccagcctagattagtgaggcagcacaacattcaggtgccagaaattcgcgttacagaggaacctgacaagcccgagaaagagaaagaagcgcagtccaaggagcccgaaaagccagtggaagaatttcagtggcctcagagatcggaaacactgtctcaactgcccgctgagaagttaccacccaaaaagaagcgtttgcggctcgctgatatggagcatagcagcggcgaatcctccttcgagtctaccgggactgggctgtcacgctccccgtcccaggagagcaacctctcccattccagtagctttagcatgagcttcgaacgggaagagacttccaaactgagcgccctgcccaaacaggatgaatttgggaaacattcggaatttctaacagtgcccgctggctcgtactctctgtcagtgccaggacatcaccatcaaaaagagatgcgcaggtgctccagtgaacagatgccctgcccacaccccgcagaggtgccagaagtgcgctccaaatcgtttgattatgggaacctgtctcatgcaccagtaagcggcgctgcagcaagtacggtgagcccatctcgcgaaaggaagaagtgttttctggttcggcaggccagcttctctggaagcccggagatttcccagggcgaggtcgggatggaccagtctgtaaaacaagaacaactggagcatcttcatgcagggttgagatccggctggcatcatgggccaccggctgtgcttcctccgttgcagcaggaagaccccggtaaacaggttgcaggtccttgtccccctctctcgtcaggtcctctgcaccttgcccagcctcagatcatgcacatggactctcaggaatccctgcgtaatcccctcattcagcctacatcctacatgactagcaagcatttacccgagcagccccatctattcccccaccaagagaccatacccttttcaccaatccagaacgctctgttccagtttcagtacccaacggtatgcatggtgcatctccctgcccagcagcctccttggtggcaagctcactttcctcatccatttgcgcagcatccccaaaagagttacggcaagccgagttttcagacagaaatccactcttcttaccctcttgagcacgttgctgaacatacgggtaaaaagccggcagagtatgcccatacgaaagagcaaacgtatccctgctactccggggctagcggccttcaccctaaaaatctgctgccaaagtttccttctgaccaatcctctaagtctacagaaactccttcagaacaggtgctgcaggaggacttcgccagtgctaatgcaggatcactccagtcgctcccgggaacagtggtcccagttagaattcagacgcacgtccccagctatggatccgttatgtacacatccatttcccaaatcctcgggcagaacagccccgctatcgttatttgtaaggtcgatgaaaacatgacgcagcgtacattggtgacgaacgccgcaatgcaggggatcggcttcaacatcgcccaggtgcttggacagcatgcaggccttgagaaatacccaatctggaaagctccccagacgctgcccctgggcctcgaatcctctatcccattatgtctgccatcgacatcagattccgtcgccaccctcggagggtccaagagaatgctgtcccctgcctctagcctggagttgtttatggaaaccaagcaacagaagagagtaaaagaagaaaagatgtacggccagattgttgaggaacttagcgcagttgaactgaccaacagcgacattaaaaaggatctgagccggcctcagaagcctcagttagtgagacagggctgcgcctctgaacctaaggatggattacagagcggcagttcgtctttttccagtctctctccaagctcaagccaggactacccatctgtctctcctagctctcgcgaacctttcctcccttcgaaggaaatgctgagcggaagtcgggctcctttaccaggccaaaagagttcgggcccatctgaaagcaaggaaagttctgacgagctggatattgacgagaccgcaagcgacatgtccatgagcccacagagtagttcccttcccgcaggagatggacagctggaagaagagggcaaggggcacaaacggccagtcggaatgctagttaggatggcctccgcaccgagcggtaacgtggccgacagcactttactgctcaccgacatggcagatttccagcagatacttcagttcccatccttgaggaccacaacaacagtgtcttggtgttttctgaattatactaaacctaattatgtgcagcaagcaacgtttaagtcttcagtgtacgcatcttggtgtatcagttcttgcaatcccaacccatccggcctgaatacgaaaactacccttgcgttactcagaagcaagcagaagatcaccgcagagatttacactctcgcagctatgcatcggccaggcacaggaaagctgacttcttcctccgcatggaaacagttcacacaaatgaagcctgatgcttccttcctcttcggaagtaagctggaacggaaattggttgggaacatcctgaaggagcggggaaagggcgatatccatggagacaaagatattggctctaagcaaacagagccaatccgaatcaaaatttttgagggcggatataaatctaatgaggattatgtctacgtccgaggaagagggagaggcaaatacatatgcgaggagtgtggaatcagatgcaagaagcctagtatgctaaagaaacacattcgaacccacacagacgtgcgaccctatgtgtgtaaactctgtaacttcgcctttaaaaccaagggaaaccttaccaaacacatgaagtcgaaggcgcatatgaaaaagtgtctcgaattaggcgtgtccatgaccagtgttgatgacacagaaactgaagaggctgaaaatctggaggatctccacaaagccgctgagaaacactctatgtcctctatcagcactgatcatcagttcagcgacgcagaagaaagcgatggcgaagatggggacgataatgatgacgacgacgaggacgaggacgactttgatgatcaaggcgacctcacccccaaaactcggagcaggtccaccagccctcagcccccaagattctcatccttgcctgtcaacgtgggcgctgtcccccatggcgtacccagcgattcctcccttgggcacagcagtctgatctcttacctggttacactgccttccatccgggtgacccagctgatgaccccgagcgacagttgcgaggacacacagatgacagagtatcaaaggctcttccagagtaagagcacggactcagagccagataaggatagactggacattcccagctgcatggatgaggagtgcatgctccccagcgagcctagctcatcgccacgcgatttcagtccgtcatcccatcattccagccccggatacgacagctccccatgtagggacaactccccgaagcgttacctcatccccaaaggagatctctcccctagacggcacctcagtccgcgaagggacctcagcccaatgcgtcatctgtcaccacgcaaggaagctgccctgcgcagagaaatgagtcagcgtgatgtgtcccccagaagacatctgtccccaagaagacccgtgagcccaggcaaagatatcactgcacgcagggatctgagtcccaggagagagagacgctatatgacgactattagggccccatctcccagacgcgcattataccataatcctcccctgagcatgggccaataccttcaggctgaacctatcgtgttaggaccacccaacctcaggagggggctgccccaggtgccttatttctctttgtacggcgaccaggaaggggcttacgagcatcccggatcctccttgttcccagaaggtccaaacgattatgtgttcagtcacctcccactgcattcccagcaacaggtcagggcccctattcctatggttcctgtcggaggtatccagatggtccattcgatgccacctgcactcagctcactacatccgtctcccaccctgcccctcccgatggagggtttcgaagagaaaaagggcgcatccggagagtctttcagcaaggacccctacgttttatccaaacagcacgaaaagcgtggcccacacgccctgcagagcagtgggcctcccagcacacccagcagtcccagactacttatgaaacaaagcacaagcgaggactctctgaatgccaccgaacgcgaacaagaagagaacatccagacctgcaccaaggctatcgcttcattgcgaatagctaccgaagaagccgctctgttaggacctgaccagcccgctcgggtgcaggagcctcatcagaatcctcttgggtctgcgcacgtcagcattagacatttctcgaggcctgagcctggacagccatgcacaagtgcaactcaccctgatctccacgatggggagaaggataactttggcaccagtcaaactcccctggcacattctactttttacagcaagagttgtgtggatgataagcagctcgactttcactcgtcaaaagagttatctagctcaaccgaggagtcgaaggatcccagtagcgaaaagtctcagttacacta

SEQ ID NO: 226422 - DNA, 7340 bp, synthetic construct
  misc_feature 1..7340: note = Description of Artificial Sequence: Synthetic coding sequence
  source 1..7340: mol_type = other DNA
atggatactggggatactgcactcggccagaaggcaacttcccggagtggtgagacggacaaagcctctggtcgttggagacaggaacagagtgccgtcatcaaaatgagcacatttgggtctcatgagggccaacgccagccccagattgaacccgaacagatcggaaatactgcatccgcgcagctgtttggtagcggcaagttggcctccccatctgaagtggtgcaacaggtggctgagaagcagtatcctcctcacaggccatcaccatattcatgtcaacactcgctgtccttcccacagcatagcttgccacagggggtgatgcactccaccaagccccaccagtccctggaaggcccaccctggctgttccctgggccactgccctctgtggcctccgaggacctctttccatttcccatacacggccactcaggaggctaccctagaaaaaagatatcgtctttgaacccagcctattcacaatacagtcagaaatctatagaacaggcagaggaggctcataaaaaagaacacaaacctaagaagccaggaaagtatatctgcccatattgttctcgtgcatgcgctaagcccagtgttctcaaaaaacatatccgatctcataccggggaacgcccttatccttgtattccctgcggcttctccttcaagacgaagagcaatctgtataaacacagaaaaagccacgcacacgcgataaaggctggattggtgccatttacagagtcggccgtaagtaagctggacctggaagctggtttcatcgacgtggaggcagagattcatagtgacggggagcagtcaacagacactgacgaggagagcagtctctttgccgaagcaagcgataaaatgagtcctggaccgccaattcccttggacattgccagtaggggaggttatcacggatcactcgaagaatctctcggcggtccaatgaaagtccctattctcataataccgaaatccggtatccctctaccaaacgagtcaagccagtatatcggccctgacatgttgccaaacccgtccttgaacaccaaagctgacgactcccacaccgtgaagcagaaacttgctctgcgactatcggaaaaaaaaggccaggatagtgagccatctctgaatctactgtccccacacagtaagggttctaccgacagcggttatttctccagaagcgagtctgccgagcagcagatttctccgcctaataccaacgccaagtcttacgaggaaattatcttcggcaagtattgtcgcctaagtcctaggaacgctctgtctgtaactacgacaagtcaggagagagccgcaatgggcagaaaaggaatcatggagccgctaccccacgttaatacacggctggacgtgaagatgtttgaagaccccgtctcgcagctaatcccgtcaaaaggggacgtcgaccctagtcagactagcatgctgaagagcacgaagtttaattctgagtcaagacagccccagattataccaagttccatacggaacgaaggaaagctataccctgccaacttccagggctccaaccccgtgttgctggaagcacccgtggacagcagcccgctcataagatcgaactccgtgccgacttcctcagcaaccaatctcacaattccaccctcacttcgcggatctcacagttttgatgagagaatgaccggctctgacgacgtgttttatcctggaacagttggcatacccccacagcgcatgctgagaaggcaggccgcttttgagctcccatcggtccaggagggacatgtggaagtggagcatcacggccgaatgttaaaaggaatctcatcgtccagtcttaaggaaaagaaactctcccccggagaccgagtaggatacgattacgacgtgtgtagaaaaccctacaaaaaatgggaggactctgaaacaccgaaacagaattaccgggacatcagctgcctgagctccctgaagcatggtggggaatacttcatggatcccgtggttcccttacagggtgtcccctcgatgttcggtaccacctgcgagaatcgcaagaggcgcaaggagaagtctgttggagatgaggaggacactccaatgatctgcagtagtattgtatccacacctgttggcataatggcctccgattacgatcctaaactccagatgcaggaaggagtgaggagtggattcgctatggcgggtcatgagaacctcagtcacgggcacacagagcgctttgacccctgtcggccacagctgcagcctgggagcccgtctctggtgtccgaggagtccccttccgcaatagacagcgacaagatgtcagatctgggcggtcggaagccacctgggaacgtgatctctgttattcagcacaccaacagcctatcaaggcctaatagcttcgagaggtccgaatcggcagaactcgtcgcctgcacccaagataaggctccctcccccagcgagacctgcgattcagagatctccgaagctcccgtgtctcccgagtgggcacccccaggtgacggtgccgagtccggcggaaaacccagcccatctcagcaagtccaacagcaatcctatcatacacagcctcgactggtaaggcagcacaacattcaggtgccagaaatacgcgtcactgaggagccagataagcctgaaaaggagaaagaggctcaatctaaggagcccgagaaacctgttgaggaattccagtggccccagagaagcgagaccctgtcccaactgcccgctgaaaagctaccaccaaagaaaaaacggcttaggcttgccgatatggagcatagctctggggagtcaagttttgagagcacaggcacgggcctctcccgctctccctctcaggagagcaacctttcacacagttccagctttagtatgtcctttgagcgggaggagacttccaagctctcagcacttccaaaacaagatgaatttggaaaacacagcgaatttctgactgttcctgcgggatcctatagcctgtccgtgcctggacaccaccaccagaaagagatgcgaagatgcagctctgagcagatgccctgcccccaccccgctgaggttcctgaggtccggtctaaaagcttcgattatgggaatctctctcatgcccctgtgagcggcgctgctgccagcactgtatccccatctagagagaggaaaaagtgcttcctagtgaggcaggcttcattttccgggagcccagagattagtcagggtgaggtcggaatggaccaatcagtgaagcaagagcaacttgaacatctgcacgcaggactccggtcggggtggcatcatggtccccctgctgtgcttccacctttacagcaggaagaccccggaaaacaggtcgcgggaccttgcccaccacttagtagcggtccactccatcttgcacagccacagattatgcacatggacagccaagaatcactccggaatcccctaattcaacccacatcatacatgacttctaagcatctgcctgaacagccgcacctttttccgcatcaggagactattcccttctcgccgattcaaaatgcactgttccaattccagtatccaaccgtttgcatggtgcacctgcctgcacagcagcccccatggtggcaagctcacttcccccatccattcgcccagcacccccagaaatcttatggcaaacctagctttcagactgaaatccattcttcataccctttggaacatgttgccgaacatactggcaagaagccggcagagtacgcccacaccaaggagcaaacatacccttgctattcaggcgcatccggattgcacccaaaaaatcttctgcctaaatttccttcagaccagagttccaagtctaccgagaccccctctgagcaggtcctgcaggaggacttcgcttcagcaaacgctggctcccttcagtctctaccgggaacagtggtccctgtgagaatccagacccacgtgccatcatatggaagtgtcatgtatacatctatctctcaaatactgggacaaaacagcccagcgatcgtgatttgcaaagttgacgagaacatgacccaacgaaccctggtgactaatgccgctatgcaaggaattggcttcaatatagcgcaagttctcggccagcatgccggtctggaaaagtatcccatctggaaggctcctcaaaccctgcctcttggtcttgagagcagcattcctctttgcctcccctccaccagcgattccgtggccaccctcgggggtagcaagagaatgttatcacccgcttcctcactcgaactgtttatggagacgaagcaacagaagagggttaaggaggagaaaatgtatggccagatagtggaggagctgtccgccgtcgagctgacaaactccgacattaagaaggacctgagccgccctcagaagccgcagctcgtgagacaggggtgtgctagcgagcctaaagacgggctgcaatccggcagttcctccttttcctccctgagcccgagttcttcccaggactatcctagtgtgtcacctagcagtagggagccgtttttgccctcaaaagaaatgcttagcggatctagggcccctttgccgggacagaaatcttctggtccttccgagtctaaggaatcctcagatgaactcgacatcgacgagacggccagtgacatgtcgatgagcccccaatcctcctcattgcctgcaggcgatgggcaactcgaagaggaggggaaaggacataagaggcccgtgggtatgctggttagaatggcatcagctccctctggaaacgttgccgactcaaccctcctgctcaccgatatggctgactttcaacagatactgcagttccctagtttgcgaacaacaacaaccgtatcatggtgttttcttaactataccaaacctaattatgtccaacaggccaccttcaagagttccgtatatgctagttggtgtatctcctcctgtaaccccaacccgagcggcctgaatactaagaccactctggctctgctgcgttccaaacagaagataactgctgagatttataccctggctgctatgcaccgccctggtacgggtaaactcacatccagcagtgcgtggaagcagttcacacaaatgaagccagacgcatcgttcctgttcggctccaaactggagcgcaaactcgtcggaaacattttaaaagaaaggggaaaaggcgatattcatggggacaaggacatcggaagcaagcaaaccgagcccattcgtatcaagatttttgaaggcggatacaagtctaacgaagattatgtttacgtgcggggacggggtcggggaaagtacatctgcgaagagtgcggtattaggtgcaagaagccgtcgatgctgaaaaagcacattcgcacgcatactgacgtgcgtccttatgtttgtaaactatgtaatttcgcattcaaaactaagggaaacctgacaaaacacatgaagtccaaggctcatatgaaaaagtgtctggagctaggtgtctcaatgacctccgttgatgatacggaaactgaggaggctgaaaacctggaggatctgcacaaagccgctgaaaagcattctatgtcaagtattagcacagaccaccagttttctgacgcggaggagtccgatggtgaagatggcgatgacaatgatgacgacgatgaggacgaggatgactttgacgaccaaggagatctgacccctaagacaaggtcacgcagcaccagcccacagccgcctcggttcagttcactccccgtgaacgttggagctgtccctcacggcgtcccatccgacagctccctgggacactccagcttgattagttatctagttacactcccaagcattcgcgtgacccagcttatgacaccatccgactcatgtgaagacacccagatgaccgagtaccagcgtctgttccagtccaagtccacggacagtgaaccggacaaggaccgcctcgatattccctcttgcatggacgaggaatgcatgttgcccagtgagccgagctcctcacctcgcgatttctcgccaagctcacaccatagctcgcctggttatgacagttccccatgtagagacaactcaccaaagagatacctcatacctaagggagatctcagcccacggcgacacctgtccccacgaagggatctgtctccaatgagacatctgtccccacggaaggaagctgccctgaggagagaaatgtcacagcgcgatgtgtcacctcgtcgccacctgagtcctaggcgccctgtttctcccggaaaggacataacagctcgacgcgatctgagccccaggagggaaaggagatatatgacaaccattagagccccaagccctaggcgggctctttatcacaatcccccactgtccatggggcagtatcttcaggccgagccaatagtcctcggccctccaaacttacgaagagggctgccccaggtgccatacttttccttgtacggagaccaggaaggcgcttacgaacaccctggtagctccctgtttccagaaggacctaacgactacgtcttttcacaccttccacttcattcccagcagcaggtacgagctcccataccaatggtgcccgttggagggatccaaatggttcactctatgcctcccgcactaagttcccttcaccccagtcctaccttgcctctgccaatggagggctttgaggagaagaaaggggcttctggagagagcttttcaaaggacccctacgtgctgtcaaaacaacacgagaagagaggaccccacgctctgcagtcttccggccctccttctaccccttccagccccaggttgttgatgaagcagagcacctccgaagactccttgaacgccaccgagcgcgaacaggaagaaaacatccaaacttgtacgaaagccattgcgtccctgagaattgccaccgaagaagcggcactgttagggccagaccagcctgccagagtgcaggagcctcatcagaatccactcggaagtgcccatgtgtcaatcagacacttcagcagacccgaaccaggccagccctgcacatctgctactcaccccgacttgcacgacggcgagaaggataacttcgggacgtcccagacacctctggcccattctacgttctactcaaagtcgtgcgtcgacgacaagcagctcgatttccactcctcgaaggagctgtcttctagcactgaagaaagcaaggacccaagtagcgaaaagagtcaacttcacta

SEQ ID NO: 226423 - DNA, 7221 bp, synthetic construct
  misc_feature 1..7221: note = Description of Artificial Sequence: Synthetic coding sequence
  source 1..7221: mol_type = other DNA
atggaccccgagcaaagtgtgaagggaacaaaaaaggccgagggcagccctaggaagcgcctgaccaaaggagaggccattcagacgtccgtctcaagcagcgtcccttacccaggcagtggaaccgctgctactcaggaatccccagctcaggaactgttggcacctcagcctttccctggaccttcatcggtgctcagagagggaagtcaggaaaaaactggtcagcagcagaagcccccaaaacggcctccaattgaggcatcagtccatatatcgcagctcccgcagcatccccttacacccgcattcatgtctccaggtaagccagagcacttgctggagggaagtacttggcagctcgtcgatcctatgcggcctggccctagtgggagctttgtagcaccaggcctacatccccagagtcagttgttgccatcgcacgccagcataatcccaccagaagatctacccggagtccccaaagtatttgttccgcgaccatcccaagtatccctcaagccaactgaagaagctcacaagaaggaaagaaagccccagaagcccggtaagtatatctgtcaatactgctccaggccatgcgcaaaacccagcgtgctccagaagcacatcagaagccatacaggggaaaggccttacccctgtggcccatgcggattttcttttaagactaagagcaacctctacaaacatcggaagagccatgctcaccgcattaaggccggactggcctccggcatggggggtgagatgtaccctcatgggctggagatggaacgcatccctggagaggagtttgaggagcctaccgaaggcgagagcactgatagtgaggaggaaacatcggccacttctggacaccctgccgagttgagcccacgaccaaaacagcctctactgtctagtggtctttatagctcaggctcacattctagctcacacgagcggtgcagcttatcacagtccagcacagctcagtcccttgaagatccaccccctttcgtcgaaccgtcttctgagcacccattaagccataaacccgaagacacgcatacaattaagcaaaagttagctcttagattgagcgaaagaaagaaggtcattgatgagcaggccttcctatccccagggagtaagggaagtactgagtctgggtacttctccagatccgaatccgccgagcagcaggtatcacccccaaacacaaatgcaaaatcttatgcagagattatctttggcaagtgtgggcgaattggacagaggaccgctatgctcaccgccaccagtactcagcctctgcttcccctgtcaacagaagacaagcctagcttggtgcccctctcagttcccagaacacaggtcatcgaacatattacaaaattgattactattaacgaagcagtggttgataccagcgaaatagacagtgtaaagcccaggcgtagcagcttgtctcgacgatcctcaatggagagccccaagtcctcgctgtaccgcgagccgttgtctagccattccgagaagacaaaaccggagcagtcactgttgtccctccagcatccgccatctaccgccccacccgtgcctctcctgcggagccactcgatgccttcagctgcctgcactatctccaccccacaccacccgtttagagggagctactcatttgatgatcacattactgacagtgaagctctatcacacagtagtcatgtttttacctcacatcctcggatgttgaagcggcagccagctattgaactccctctgggaggtgagtacagttctgaagagcccggaccctcctctaaagacacagcctcaaagccctcagacgaagtagaaccgaaagagagcgaactcacaaagaagacaaaaaagggactgaagacaaagggggttatctatgagtgcaatatttgcggggctcggtacaagaaacgggacaattatgaagcacacaaaaaatattattgcagtgagttgcagatcgcaaaaccgatctccgcaggcacccacacctcacccgaagccgagaagagtcaaatagagcacgaaccatggagccagatgatgcattacaagcttgggactactcttgaactgaccccgttgagaaagcgtcggaaggagaaaagtttgggggacgaggaggagcccccagcgttcgaatccaccaagtctcagtttgggtcacccggaccctccgacgctgcaaggaatctcccccttgagtccaccaagtccccagcagagccttcaaagtctgtcccaagcctggaaggcccaaccggcttccagcccaggacacctaagccgggtagtggatccgagagcggaaaggaacggcgaactacatcaaaagaaattagcgttatccagcatacctcaagttttgagaaatccgactctttagagcagccctcagggctggagggagaagacaagcccctggcccagtttccatccccaccacccgctccacacggcaggagtgctcattctttacagcccaaactcgtccgacagcctaatatccaggtccctgagatacttgtcacggaggagcccgaccgtccagatactgaaccggagcctcctcccaaggagcccgagaaaaccgaggaattccaatggcctcaacggtcccagacacttgcccaactccctgctgaaaagctgccaccaaagaaaaagagacttcggctagctgagatggcccaatcctccggagaatccagctttgagtctagcgtgcctttgagccggtctccaagccaagagtctaatgtctctctgagtggatccagcaggtctgctagtttcgaacgggacgatcatggcaaagcagaggcccctagcccaagctccgacatgagaccgaagcctctgggaactcacatgctgacagtgccctcacaccacccccatgctcgggagatgcgacgctccgccagcgaacaatcccctaacgtcagccactccgcgcacatgaccgaaaccagatccaagtcctttgactacgggtccctatctctgacaggcccatccgccccagctccagtggctcctcccgcaagagttgcccctcccgaacgacggaagtgtttcctagtcagacaggccagcctctctcgaccaccggaatccgagctggaggtggcacccaaaggtcgccaggagagcgaggaaccccagccatctagtagcaagcctagcgctaagagcagcctgtctcagatctctagtgcagccaccagccacggaggacccccaggagggaagggccctggccaggatagacctcctctggggcctacggtaccgtacaccgaggcccttcaagtgtttcaccatcccgttgcccaaacccccctgcatgaaaaaccctatctccctcctcccgtatctctgtttagctttcagcacttagtccaacacgagccaggtcagtccccagaattcttctcaactcaagcaatgagcagtctgctgtcctccccctatagcatgccaccactgcctccttccctctttcaagcccctccgctgccactgcaacccacagtgttacaccccggtcaattgcatctcccccaactgatgccgcacccagccaatatacctttccggcagcccccttctttcctgccgatgccctaccctacaagttccgccctctcaagcggcttcttcttacccctgcagtcacaattcgctctgcagctcccgggagatgtcgagtcacatttgcctcagattaaaacaagcctggcccctctggccaccggcagcgccggactgtccccaagtacagagtactcttccgatataaggctgccacccgttgctcccccagccagttctagtgccccaacttctgcccctccccttgccctgccggcatgcccggatacgatggtgtctctagttgtccctgtgcgtgttcagacaaacatgccaagttatggatcagcaatgtacaccacactgtctcagatattggtcacgcagagccagggctcaagtgcgactgtcgctctccctaaatttgaggagccaccatccaagggtaccaccgtatgcggggctgacgttcatgaagtggggcctggcccttctggattgagtgaggagcagagccgcgctttccctaccccttatttgcgtgtccccgtcactttacccgagagaaagggcacttccctgtcctctgagagtattctgtcgttggaaggctctagttccacagcaggtgggagtaaaagagtgctgagcccagctggatctctggagttgacgatggaaacacagcagcaaaagcgcgtgaaagaagaggaggccagcaaggcagacgagaaactggaacttgtgaagccttgctccgtggtactgacctctacggaagacggcaaacggcctgagaaaagccaccttggtaatcagggtcaaggccgacgtgagctggagatgctctcctcattgtcctccgaccccagcgacactaaggagatcccccctcttcctcatcctgcgctgagtcacgggaccgccccaggaagtgaggctctgaaggagtatccccagccaagcgggaagcctcaccggagggggttgaccccactgtcagtcaagaaggaggacagcaaggagcagcccgacctcccgtcactggctccacccagcagtctccccttgtcggagacttccagccggcctgcaaagagtcaggagggtaccgattccaaaaaggtgctgcagtttccatctttgcacacaaccaccaacgtcagctggtgctacctcaattacattaaacctaatcatatccagcatgctgataggcgatcttctgtttatgccggatggtgtatttcactctacaatccaaatctgccgggagtcagtactaaagcagctctcagcttactgaggtctaaacaaaaggtctcaaaggagacctatactatggcaaccgcccctcacccggaagccggacgattagtgccttccagcagcagaaagccccgaatgactgaagtgcatctgccctccctggtatcccccgagggtcaaaaagatctggccagggttgagaaggaggaagagcgacggggtgaacctgaagaggatgcacccgcatctcagcgcggtgagcctgcacggattaagattttcgagggaggctataagagtaacgaggaatacgtgtacgtacggggacggggtcgtggaaagtacgtttgtgaggagtgtggcatcagatgcaaaaagcccagcatgcttaagaagcatatcagaacccatacagacgttcggccttatgtgtgcaaacattgtcactttgccttcaagactaaggggaacctgaccaaacatatgaaaagtaaagctcactcaaagaaatgccaagagaccggggtcttagaggaattggaggccgaggaggggacatctgacgacctatttcaggattccgaaggtcgcgaaggatccgaggcggtcgaggagcaccaattttccgaccttgaagatagcgacagcgacagcgatctggacgaggatgaggacgaggacgaggaagaatctcaagatgaactatcgaggccgagttccgaggcaccaccacccggtccgcctcatgccctccgggcagattcatcccctattttaggaccccagccaccggatgcccctgcctcgggaactgaagcgacccgaggctcgtccgtgtctgaagccgagcggctgacggcatcctcatgctcaatgagtagccagtcaatgcccggacttccttggttgggaccggcacccctggggtcagtggaaaaagacaccggatccgcactcagctacaagccggttagcccgcgacgaccgtggtcaccttcaaaggaagccggatcccgaccccctctggctaggaagcactcacttacaaagaacgacagttccccccagcgctgctcccctgcgcgagaaccacaggcttccgcccctagtccccctggactacacgtagaccctggaaggggtatgggagccctgccatgtggatctcccaggctacagttatcccccctgactttgtgccccctcggtcgcgagctagctcctagagcgcacgtgctgtccaagctggagggtaccaccgatccaggcttgccgagatactcccccacacgaagatggtcccctggtcaggctgagtccccccctcgctctgccccacccggtaagtgggccctggccggacccggatcacccagtgccggagaacatgggccagggctcggcctcgatccgcgtgtgctgttccctcccgcaccactcccccataagctgctcagccggagccccgagacttgcgcatccccctggcagaaagctgagtccaggagcccaagctgtagtcctggcccagcccacccattgtcctcgcgcccattttccgccctgcacgatttccatggtcatattttggcccgaaccgaggaaaatatctttagccatttgcccctgcactcccagcaccttactcgagctccatgtcctctcatcccaataggcggtatccagatggttcaagctcggcctggagctcaccccaccctgttgccaggccctaccgcggcttgggtgtctggtttctcagggggaggatccgacctcactggggctcgcgaggcgcaggagcgcggaaggtggtcccccaccgagtctagcagcgcttctgtatccccagttgcgaaagttagcaagttcacactgtcctcggagctggaggggggtgattatccaaaagagcgcgaacgtaccgggggaggtcccggaaggccaccagattggacgccacatggcacaggcgcacccgcagagcccacccctacacattctccgtgcacacctccagacacgcttccaaggccacctcaggggagacgggctgcccaaagttggtctcccagactggagagcccccgagccccaacaaaccctgaaccctctgcaaccccccctctcgaccggtcatcaagcgtcggatgtttggccgaagcctccgccagatttccagcccgtacgcggaacctgtcaggagagccccgaacccgtcaggactctcctaagcccagcgggtctggcgaacctagggctcacccgcaccagcccgaggatagggtgccccctaacgcctac

SEQ ID NO: 226424 - DNA, 7220 bp, synthetic construct
  misc_feature 1..7220: note = Description of Artificial Sequence: Synthetic coding sequence
  source 1..7220: mol_type = other DNA
atggaccctgaacagagcgttaagggtaccaagaaggctgagggttctccgaggaagagactaactaagggggaggctattcagacatccgtgagcagcagtgtgccttatcctggttcaggaaccgccgctacacaggaaagtccggcacaggaactccttgctccccagccattccccggaccttcttctgtactgcgtgagggctcacaggagaagacagggcaacagcagaaacctccaaagcgccctcctatcgaagccagcgttcacatctcccaactgccgcaacatcccctgacacccgcattcatgtctccaggtaagccggaacacctcctggagggctccacctggcaactggtggaccctatgaggccgggtcccagcggaagtttcgtggccccaggtctgcaccctcagagccaactactgccttcgcacgcctcaattatccctcctgaggatctgccaggggtcccaaaagtttttgttcccaggccgtcacaggtatctttgaaaccaacagaagaagctcataagaaggaacgtaagccccagaaacccggaaaatatatatgccaatactgtagccgcccatgcgctaagccatcagtacttcagaaacacatacggtctcatacaggagaaaggccgtatccttgcgggccttgtggtttcagctttaagaccaagagcaacctgtataaacacagaaagagccatgcacatagaattaaagcaggcctggcctccggcatgggcggagagatgtatccacatgggttggaaatggaaaggattcccggagaggaatttgaggagcctaccgagggggaaagcaccgacagtgaggaagagacttcagctacctctggacaccctgcggagctttctccaagacccaagcaaccactactctcctcgggactctactctagcgggagccactcctcctcacacgaaaggtgtagtctaagtcagtcttctacggcccagtcattggaagacccacccccttttgtggagccctcaagtgaacacccactaagtcacaagcccgaggatacccacacaatcaagcagaaactggcgctgagactttcagagagaaagaaagtgatcgatgaacaggcttttctaagcccaggcagtaaaggatccaccgagtctggatactttagcagaagcgagagcgctgagcaacaggtatcccctccgaacactaacgctaagtcttatgccgagataatctttgggaagtgcggacggattggtcagcggaccgccatgctgactgctacttcaacccagcctttgcttcccctctccacggaggacaagccgagtcttgtccctctgtccgtaccacggacgcaggtcattgagcatatcacgaagctaatcacgattaatgaggcggtagtagatacatcagaaattgactctgtcaaaccacgcaggtcctccctatcccgcaggtcctctatggagagtcccaagtcctctctctacagagaacccctgtcttctcattctgaaaaaaccaaacccgagcagtcactactcagccttcaacaccccccttctacagctccaccggttcctcttttacgttctcactcaatgccctcggctgcctgtacaatatcgaccccacaccatcccttccgaggtagctattcattcgatgaccacataacagactcagaggccttatctcactcttctcacgtcttcacaagtcacccgaggatgctcaagcgtcagccagcgattgaactcccactcggaggcgaatattctagcgaagagccaggacccagtagcaaagatactgcttcgaagccaagcgatgaggtcgagcccaaggaaagcgaacttacaaaaaagacaaagaaaggccttaagaccaagggcgtgatatatgagtgcaacatctgcggcgctagatacaaaaaaagagataattacgaagcgcacaagaagtactactgttccgagttgcaaattgcaaagccaatctctgcagggacccacacctccccagaggccgaaaagtctcaaattgaacacgaaccttggagccagatgatgcattataagctggggacaaccttggagctaactcctctgcggaaacgccgaaaagagaaatctctgggggacgaagaggaaccgccagcatttgaatccacgaagagccagttcggatctcctggccctagtgacgccgctaggaatctgccactggagagtactaaaagcccagctgaaccaagtaaatccgtgccctcactggagggacctaccggctttcagccccgtacacccaagcccggttctggttccgaatcgggcaaggagcgcagaaccacctctaaggagattagcgtgatacagcacaccagctcctttgaaaaaagcgactcgctggagcagcccagcggcctggagggagaggataaacctctggcacagtttccgagtcctccacctgcaccccatggcagatcagcacattccctacagcccaagctcgtaaggcagcctaatatacaagttcctgagattctggtcaccgaggagccggaccgccctgacacagagcccgaaccacctcctaaggagcctgagaagaccgaggagtttcagtggcctcagaggtctcagacgctggctcagttgcccgctgaaaagctgcctcccaagaaaaagcggctgagacttgctgagatggcccaaagctccggcgaaagtagtttcgagtcctccgtgccactgtctagatctccttctcaggagagtaatgtgagcctgtccggcagctctagatctgcttccttcgaaagagatgatcacggcaaagccgaagctccatccccatcctccgatatgagacccaagcctctgggcactcatatgctgacggtacctagtcatcacccacatgccagagaaatgcggaggagcgccagcgagcagtccccgaacgttagtcactccgcccacatgaccgagactcgatctaaatcatttgactatgggagcctatcactgaccggtcccagcgctccagcccctgtggcccctccagcacgcgtggccccacccgaaaggaggaagtgctttctcgtacggcaggccagtttaagtcggcctcctgagtccgaactggaggtcgctccaaagggtaggcaagagagtgaagagcctcagcccagtagcagtaagccttcagccaagagctcgctgtcccagatctctagtgccgcaaccagtcacggaggccctccgggaggcaaaggcccaggtcaggatcgacctccattggggcctacggtgccttacaccgaggccctgcaggttttccatcacccagttgctcaaacacctctccatgaaaagccttacctaccccctccggtatctctgttcagtttccagcatctggtgcagcacgaacctgggcaaagcccagagttctttagtacccaagctatgagcagtcttttatctagcccctattcaatgccccctctgccaccttcattgttccaggccccacccctgcccttacagccaactgtgctacacccaggccaactccacctcccccaattgatgccccaccccgctaacattcctttcagacagcctccttcttttctgccaatgccctaccctacctcaagcgccctgtcaagcggcttcttcctgcctctgcagagccaatttgccctccaactccccggtgacgttgaaagtcacctgcctcagatcaagacttccctcgcccctctagccacaggcagcgcagggttgagtccgtccacagagtactcatccgacatccggctcccccctgtcgctccacccgctagcagtagcgctcccacatcagccccacccctggctctgccagcatgccccgataccatggtgtcactggtcgtgccggtgcgagtgcagaccaacatgcctagctatgggagcgcaatgtacacaacactaagccagatacttgtaactcagagccaggggtcaagcgccacggttgcattgcccaagttcgaagagcccccaagtaaaggaaccacggtgtgtggggcagatgtgcatgaagtgggcccaggcccttccggcctcagtgaggagcagtcccgagctttccctacaccctatctgcgggtcccagtgactcttccagagcggaagggaacctcactgagttctgaatcaattctgtctctggaaggcagctcatctactgccggagggtctaaacgggtgctaagcccagcaggaagcctagaattgactatggaaacacaacagcagaagagggtcaaggaggaggaggcttcaaaggcagatgagaagctggaactggtaaaaccgtgcagtgtggtcctgactagtacagaggacgggaagcggcctgaaaagtcccatttggggaatcagggacaagggcgaagagaactggaaatgctgagctctttgtcttccgacccatctgatacaaaggagatccctcccctgcctcaccccgcactctctcacggtaccgcccctggtagcgaggccctcaaggagtatcctcagcccagcgggaaaccccacagaagagggctgactcccctgagtgtcaagaaagaggactcaaaagaacagcctgatctcccgtctctagcaccgcctagttcattacctctgtcagaaacgtcctctcgcccagccaagtctcaggaaggcacggattccaagaaagtgctgcagttccccagcctgcacacgactaccaacgtctcctggtgctacttaaactacataaaaccgaaccatattcagcatgcggaccggagatcctcggtctatgctggctggtgtattagtctttataacccaaatctgcctggtgtctcaaccaaagcggcactatcgttactaagatctaaacagaaggtttccaaggagacctacacaatggcaaccgcgcctcaccctgaagctggtcgccttgtgccttcatcctctcgaaaacctcggatgaccgaggtccacttgccctcactcgtcagccccgaaggccagaaggatctggcccgagtcgagaaagaagaagagcgcagaggtgagcccgaggaagatgcacccgcatcccaacgtggcgaacctgcaagaattaaaatttttgaaggcggttataaatctaacgaagaatatgtatatgtaagaggacgcggacgcggtaagtacgtatgtgaggagtgtggcattcgctgcaagaagccatctatgctcaaaaagcacatcagaacacataccgatgtgcgcccttatgtttgcaaacactgtcattttgcatttaagactaaaggtaacctcacaaaacacatgaaaagtaaggctcacagtaaaaagtgccaggaaacaggcgtcctggaggaattggaggctgaggaaggtactagcgatgacttgtttcaggatagcgaaggccgtgagggctccgaggcggtcgaggaacaccagtttagtgatctcgaggactcggattctgactctgaccttgacgaagacgaggatgaagatgaagaggagagccaggacgaactctcaaggcccagtagcgaggccccaccacctggccctccccacgctctaagggccgatagctccccaatattaggcccacagcccccagacgcccctgcatctggtacagaggcaacaagaggaagcagcgtgtccgaagccgagcgcctgaccgccagctcctgttccatgtccagccaatcaatgccagggcttccttggctaggtccagcgcctcttggatccgtggagaaggacacgggctccgcactgagctacaagccagtgtccccgaggagaccctggagccccagtaaggaagctggttctcgcccacccctggcacgaaagcactccctgacaaaaaatgactcatcccctcagcggtgttcacctgcaagggagcctcaagcttccgctccctccccgccaggcctgcacgttgacccgggtcgtggcatgggggctctgccctgtggatcacccagattgcagctgtcccctttaaccttatgtccactcggcagggagctcgccccaagggctcatgtgctgagtaagctggaaggaacaaccgaccccggtctgcctagatactcgccaacgcgtaggtggtcccctggccaggccgagagcccaccaagatctgcccctcccggtaaatgggcccttgcagggcctggctcgccttctgccggagagcacggcccaggcctcggcttggatccaagggtgttgtttccgccagcacctctgccacataagttgctgtccagatcgcccgaaacttgcgccagcccttggcagaaagctgagtcccgttccccttcgtgcagtccagggccagctcaccccctgagttccagacccttcagcgccttgcacgattttcacggccatatcctggctagaacagaagaaaatattttcagccacctgccactgcacagccaacacttaacccgagccccttgtcccttgatccccatcggaggcattcagatggtgcaggcccgtcccggagctcatcccactctgctgccagggccaaccgcagcatgggtctcaggattctctggaggcggtagtgatttgactggggctagagaggcgcaggaacgcggtagatggagtcccacagagagttcttcggcaagtgtgagccctgtagcaaaggtgtctaagttcacattgagctccgaattggaaggcggagactaccccaaggagagagagcggactggcggtggccctggcaggccaccggactggacccctcacggcacaggtgccccagcagagcccactcctacccatagtccatgcacccctcccgacacactgcctcgacctcctcagggtcgcagggccgcacagtcttggtccccccgtttagagagccctagggcccctaccaatccagaaccctctgcgacacctcccctagaccgctcaagctcagtgggatgccttgctgaagcttctgccagatttcccgcaagaactagaaacttgagcggagaacctcgcaccagacaggacagcccgaagccatcgggttctggtgaaccccgagcccacccacaccagccagaagatcgcgtgcccccaaacgcgta

SEQ ID NO: 226425 - DNA, 7217 bp, synthetic construct
  misc_feature 1..7217: note = Description of Artificial Sequence: Synthetic coding sequence
  source 1..7217: mol_type = other DNA
atggatcctgagcagagtgtgaaagggaccaagaaggcggaagggtcccctcgaaagcgcctgactaagggggaagcgattcagacgtccgtgagctcgtctgtgccatatcctggcagtggcactgcagcgacacaggagagcccagcccaggagttgctcgctccacagcccttccctgggccaagttcagtcttgcgggagggcagccaggaaaaaaccggccaacaacagaagccacccaagcgtcctcccatcgaggcctctgtgcatatttctcaactgcctcaacatccgctgacaccagcttttatgtcccccggaaagccagagcacttattggagggaagcacctggcagctggtggatcctatgcggccaggaccctccggtagtttcgtggcccctgggttgcaccctcagtcccagttgctgccgagtcacgcctctatcattccacccgaggacctccctggcgtgcctaaagtttttgtgccacgtccgtctcaggtgtcgttgaagcctaccgaggaggcacacaagaaagagaggaagccacagaagccgggaaaatatatctgccagtactgctcccgaccttgtgctaagccatcagtgctgcagaaacacatccgatcacacaccggtgagcgcccttacccgtgtgggccatgcgggtttagcttcaaaaccaagtctaatttatacaaacatagaaaatctcatgcccacagaattaaggccggactggcgagcggaatgggcggagagatgtacccccatggcctcgaaatggagcgaatccccggtgaagagttcgaggagcccaccgagggcgagtccaccgactctgaagaggaaacaagcgccacatccggacatccagccgaactgagtccccgtcctaagcagccactcctatctagcggcctgtacagttctgggagccatagcagttctcatgaaagatgttccttgagccagtcttcaacggcccagtctctagaggatccgccacccttcgtcgagcctagctccgagcatccactaagccacaagcctgaggatactcacactatcaaacagaaactggctctaaggctgtcagaacggaaaaaagttatcgatgaacaggctttcctctcgcccggatccaaagggagcactgaaagcggttacttctctcggtccgaatctgctgagcagcaagtgtcaccaccgaatactaatgccaaatcttacgcggagattatcttcggaaagtgcggaagaattgggcagagaaccgcgatgttgactgctacttcaacccaacccctcctacccctctctactgaggacaagcccagcctggtgcctttatccgtaccacgaacgcaggtgatcgaacatattactaagctgataaccatcaacgaggcagtggtggacacttccgagatcgatagcgttaagcccagaagaagtagcctaagtcggcgaagtagcatggagtccccaaagtcatctttgtaccgcgagcccctgtcttcccacagcgaaaaaaccaaaccggagcaaagcctgttatctctacagcatccaccctccactgcgcctcctgtcccgctactgcgatcacactccatgccctcggccgcttgcactatctccacgccccaccatccgttcagaggctcatacagtttcgatgaccacatcacggacagcgaagccctgtcgcactcaagtcacgtcttcacatcccatcccagaatgctcaaacgtcagccggctatcgaactgccccttggaggggagtactcgagcgaggagcctggacccagctctaaggatacagccagcaagccaagtgatgaggttgagcctaaagaaagcgaactcacaaaaaagactaaaaagggactgaagaccaagggagtgatttacgagtgcaacatatgcggcgctaggtacaaaaagagggataattacgaagcacacaagaaatactactgtagcgagctccagatagctaagcccatctctgcaggaactcacactagccctgaggctgagaaatcacagatagagcacgagccctggtcccagatgatgcattataagttagggaccactttggagctgacccccctacggaaacgcagaaaggaaaaatctctcggcgacgaggaggagccacccgcatttgaaagcactaagtctcagtttggcagcccaggtccctccgatgctgcgagaaatctccccctagagtccaccaagagcccagccgagccgtccaagtcggtcccgagtttggaagggccaaccggtttccaaccaaggactcctaagccaggtagtggttctgaaagcggtaaagaaagaagaacgacgtcaaaggaaatctcagtgatccagcatacaagcagcttcgagaagtccgatagcctcgagcagccctctggcttggagggggaggataagcctctcgcccaatttccatctccacctcctgcccctcacggtagaagcgctcactccctgcaaccaaaactagtgcgccaaccaaacatccaagtgcccgaaatcctagtcactgaggaacctgaccggcctgataccgagccggagccccctcccaaagagccagagaaaactgaagaatttcagtggccacagcgctctcaaactctcgcccagttgccagccgagaaattgccgcctaagaaaaaaaggctcaggctcgcagagatggcacagtcatccggtgaatcctcgttcgagtccagcgtgccgctgagtcgaagcccgtcccaggaaagtaacgtctccctctctggttcttcgcggagcgcgtccttcgagagagacgatcacggcaaagccgaggcaccctctccttcatctgacatgcggcctaagccactcggtacacatatgttaacagtgccatcacaccatccccatgctagggagatgcggcgttctgctagtgaacagagccccaacgtgtctcacagcgcacacatgacggaaacacgctcaaagtccttcgactatggatctctgtccctgaccggacccagcgctcccgctcccgtcgctcccccagctcgggtggcccctcccgaaaggaggaaatgttttctggtgcggcaagcctccctcagccggccacccgagtccgaactggaagttgcaccaaagggacgccaggaatccgaggaaccacagccttcttcatctaagccctccgcaaaatcttcactttcgcaaatttcctccgcggcaacgtcccatggcggacccccaggcggtaaagggccaggacaagacagaccaccattggggccaactgtgccttacactgaggctctgcaggtttttcaccaccccgtggcccagacacccctgcatgaaaagccttatctgccacctcctgtgtcactcttctcttttcaacacctggtacagcacgaaccgggtcagtcccctgagttcttcagtacacaggcgatgtcgagtctgctcagcagtccttactccatgccaccgttgccgccaagtctgttccaggctccacccctgcccttgcagcctaccgttctgcaccccggtcaattacatctgccccagttgatgcctcaccctgccaacatcccattccggcaaccacccagctttctgcctatgccctatccaacgtcttccgcattatcatcagggttcttcctgcccttacagagccagtttgctctgcagctgcctggggacgtcgagagccatctgcctcaaattaaaacatctctggcccctttggccactggatcagccggattgtcaccaagcactgaatactcgtcagatatcaggctcccaccggtggccccacctgcctcaagctcggctcctacttccgccccacctctcgccctgcctgcttgccctgatacgatggtgtctctggtcgtccctgtccgagtccagaccaatatgccatcttatggatcggctatgtacaccacattatcccagatccttgtgacacaaagtcaagggagctcggcaacagtggcactacccaaatttgaggaacctcctagcaagggtaccacagtgtgcggcgcagacgtgcacgaagttgggccaggaccaagcggactgtctgaagaacagtctcgggctttccctaccccttatctgagagtgccagtaacacttcctgaaagaaaggggacttctctctcttcagaatctatcttgtctctagagggtagctccagcaccgccggaggctctaagagggtgctatctcccgcaggttcgctggagttaaccatggagacccaacagcaaaagagggtcaaagaagaggaagctagtaaggccgacgaaaagcttgagcttgtaaaaccttgttccgtggttctgacctccacagaagatggcaagaggcccgagaagagccacctcggtaatcaggggcaaggccgacgcgagctggagatgctcagtagcctgtcaagcgacccctctgacactaaggagatccctcccctgccacatccagctctctctcatggcaccgcgcctggaagcgaagcgcttaaggaatacccacaacctagtggcaaaccacacaggcggggactcacacctctgtccgtcaagaaggaagactccaaggagcagcctgatctcccctccctcgcaccacccagcagcctgccactgtcagagacctcctctcggccagcaaaatcacaagagggaaccgatagtaaaaaggtgttgcagtttccatctctgcatacaactaccaacgtgtcctggtgttatttgaattacattaaacccaaccacatccagcatgcggacagaagatcctccgtgtacgctggatggtgcatatctctttataatcccaacctgccaggagtgtcaactaaggcggctctgagcttgctccgtagtaagcagaaggtctcaaaggaaacctatactatggcgactgcccctcatcctgaggccggaaggctggtgccgtcaagctcgcgaaagccacgcatgacagaagtccatctgccatctctggtgtctcccgaagggcagaaagacctggcaagggtggagaaggaggaggagaggaggggggaaccggaagaagacgcgccagcttcacaacgcggtgagccagctaggataaaaatcttcgaagggggatacaagagcaacgaggaatacgtctacgtgcgaggacgcggaaggggcaaatatgtatgtgaagagtgtgggattcgttgtaaaaaacctagcatgttgaaaaagcatatccgcacccacaccgacgtacggccttacgtgtgtaagcactgccatttcgcgtttaagacgaaaggaaatctgactaaacatatgaagtccaaggcacatagcaaaaagtgccaggagaccggagtgctggaagagctggaggcggaagagggtacctctgacgatctcttccaggattccgagggcagggaaggctctgaggctgtggaggaacaccagttttctgacctcgaagattccgacagcgactctgacctggacgaggatgaggacgaggacgaggaagagtcacaagacgaactttcaagaccatcctccgaggctcctcctcctgggcctccccatgccctgcgggcagattccagtcccattctgggcccacaacccccagacgctccggcatcaggcaccgaggcgacacggggtagcagtgttagcgaagcagagcgcctgacggcaagcagctgtagtatgagcagccagagtatgccgggtctaccttggctgggacctgcgccactgggttctgtggaaaaggatactggttctgcgctctcctacaagccagtgagtcctcgccgaccatggtcgccatctaaggaagcaggtagccggcctccactggccagaaaacactccctcaccaagaacgatagcagcccacagaggtgcagtccggctcgcgaaccacaagcgagtgcccctagcccacctgggttgcacgtcgacccgggtagagggatgggagctctcccatgcggctcccctcgcctgcagctgtcacctcttacgctttgtcccctgggtagagaactcgctccacgggctcacgtgctgtcaaagctggaagggactacagaccccggactgccgaggtattctcccacgagaaggtggtccccaggccaggccgaaagccctcccagatcagccccacctggtaaatgggccctggccggaccaggctccccctctgctggagaacatggccctgggctcgggctagaccccagagttctgttcccaccagccccactcccacacaagctgttgagcaggtcacccgagacttgcgctagcccttggaaggcagagtcccgtagcccctcgtgctcacctgggccagctcatccattatcctcaaggcccttttccgccctccatgactttcatgggcacattttagccagaaccgaggagaatatattcagtcacctcccactgcactcccaacacttgacccgggctccgtgcccacttatccctatcggtgggatccagatggtgcaagcacggccaggtgcacatccgactctgctcccaggccctacagcagcttgggtaagcggtttttctggcggtggtagcgatctcacgggtgcgcgagaagcccaggagcggggaaggtggtcacccactgaatcgtcatcagcgtctgtctccccggtagctaaggtttccaaattcacactctcttccgagctggaaggtggcgactatcctaaggagagggagcggaccggtgggggtcccggtcgcccaccagactggacccctcacgggacaggggcacctgctgaaccgactccaacacacagcccatgtactccaccggacaccctgcccagacccccacagggtagaagggctgcccaaagctggagcccccgattggagtcacccagggcccctaccaaccctgagccaagtgcaacaccaccactcgataggagcagctctgtgggatgtctggccgaggcttcggcgagattccctgcccgaacccggaatctctctggggaacctcgaactagacaggattctcccaagccctcagggagcggagagccacgcgctcacccccaccagcccgaagatcgcgtaccacccaatgccta

SEQ ID NO: 226426 - DNA, 7217 bp, synthetic construct
  misc_feature 1..7217: note = Description of Artificial Sequence: Synthetic coding sequence
  source 1..7217: mol_type = other DNA
atggatccggagcaaagcgtcaagggcaccaagaaagcggagggctcaccgaggaaacgtttaacaaagggggaagccatccagacctctgtgtcttcctcagtcccatatcctggttccggtaccgctgccacgcaagagagccctgcacaggagctgcttgctccacagccattccccggaccaagcagcgtgctgagagagggatcacaggagaagaccggccagcagcagaaaccacctaaacgccctcccattgaagcctccgttcatatttcccagctcccacagcatcccctaacacccgcttttatgtctccaggcaagccagagcaccttctcgaggggtcaacctggcagctggtggaccccatgcgtccgggtcccagtggctcatttgtggctcccggactccatccccagtcccagctcctgccttcacacgctagcattatacctccggaggacctgccaggagtcccaaaggtatttgtcccccgaccctcacaggtgtctctgaagccaaccgaagaggcgcataagaaagaaagaaagccgcaaaaaccagggaagtacatctgccagtattgtagtagaccatgcgccaaaccatccgtcctccagaaacacattcgcagccataccggtgagagaccttatccatgtgggccttgcggattctcattcaagacaaagagtaatctgtataaacaccggaaaagtcacgcccatcggattaaagcagggctggcttccggaatgggcggagaaatgtaccctcacggtttagagatggagaggattccaggtgaggagtttgaagagcctacagaaggtgagtccaccgactcagaggaggaaacatctgcaacctctggtcatccagccgagttatcacctagaccaaaacaacccctcttgtcatctgggctgtatagcagtggcagtcacagcagttctcacgaacggtgcagtctgtcccaatcctctacagcccagtcattagaagaccccccaccttttgtggagcctagcagcgagcatcctctatcgcacaagcccgaggacacccatacgataaagcagaagctcgcgcttagactttcagagcgtaagaaggtcattgacgagcaggcgttcctgtcccctgggagcaagggctctaccgagagcgggtacttttccaggagtgaatcagccgagcagcaggtaagtcctcccaataccaatgccaagtcctatgcagagatcatcttcggcaagtgcggtcgaatcgggcagcgtactgcaatgctgactgctactagcacccagcccctgctgccgctctcgacagaagacaaaccttccttagtacctttgtctgtacccaggacacaagtcatcgaacacataacaaaactcatcactatcaatgaagccgtcgtcgacacctcagaaatagatagcgttaagccaaggagaagctctctatcacgaagatcctctatggagtcaccgaaatcctcactgtaccgcgagccccttagctcccattccgagaaaacaaagcccgagcaaagcctgctgagcttgcagcatcccccaagcaccgcaccacctgtgccccttctgaggagccacagcatgccttccgcagcatgtaccattagcactccacaccacccgttcagaggtagttacagtttcgacgatcatatcaccgacagcgaagcactaagtcattcttctcacgtttttacttcacatccacgtatgttgaagcgtcagcccgcaatagagttgccacttggaggagaatacagctctgaagagcctgggccaagcagcaaagataccgcttccaagcctagcgacgaagtggagccgaaggagagtgagctcaccaaaaagacaaaaaagggactgaagactaaaggggtaatctatgaatgtaacatatgcggtgccaggtataaaaagcgggataattacgaggcccacaagaagtactactgcagcgaactgcagattgcaaaaccgatttctgccggtacacacaccagtcccgaagccgagaaatctcaaatcgaacatgaaccatggtcacaaatgatgcactacaagctgggaacgaccctggagctaacaccgctgagaaaaagacgaaaggagaagagcctgggggacgaagaagaacccccagcttttgagtcaacaaagtcacagtttggcagcccaggacctagtgacgcagcgcgaaacttgcccctcgagagcacgaaatctccagccgagccttccaaatctgttccatcattagagggacccaccggtttccaacctcgcacccctaaaccagggagcggctcagaatctggcaaggagcgcagaaccacatccaaggaaattagcgtgatccagcatacaagtagtttcgagaaatccgattctcttgaacaaccatccggattagagggtgaagacaaaccacttgcacagttcccctccccgcctccggcaccccacggacgatccgctcactctctgcagcctaagctagtacgccagcctaacattcaggtcccagagatcctcgttacagaagagccggatagacctgatactgaacctgaaccccctccaaaggagccagagaagacagaggagtttcaatggcctcaaaggtcacagacactggcccagctgccagctgagaagttgccaccaaaaaaaaagaggttgcggctggcagagatggctcaaagcagtggagagagcagttttgaatcctctgtcccactgtcacgaagcccgtcacaggaaagtaatgtcagtctgagcgggagctcaagaagtgccagcttcgaacgcgatgatcatggtaaagcagaggccccttccccatcatccgacatgcgcccaaagccactaggcacccatatgttgacagtcccaagccaccacccacatgcgcgtgagatgcgtcgctctgccagcgaacagagtcctaatgtctcacacagcgctcacatgacggaaaccagaagtaaaagttttgactacggcagcttgtctttgaccgggccatctgctcctgccccagttgcgccaccagcccgtgtggcccctccagaaagacgcaaatgcttcttggtccgacaggcatccctctctcggccaccagaatccgagctggaagtcgcacctaaagggcgtcaggaatcagaggaacctcagcctagcagctcaaagcccagtgccaaaagtagcctctcccaaattagctcggcagcgacatcacatgggggaccccctggtgggaaaggtcctgggcaggacaggccgcctctcggccctactgttccatatactgaggcgctgcaggtgtttcaccatcccgtggctcaaacacctcttcatgaaaaaccatatctacctccaccagtgagcctattctcttttcagcacttagtccaacacgagccaggccagagtcccgagttcttctccacacaggcaatgtccagtctgctgtcctccccctactctatgccccctcttccacccagccttttccaggcccctccccttccactacagcccactgtgctgcaccctggccagctccatctgcctcaactgatgccacaccctgctaatatcccttttcgtcaaccccctagttttctgcctatgccatatccaacctccagtgccttgtcctccggattcttcttacctcttcaaagccagttcgccttgcagctgccaggtgacgtggaatcccacctgcctcaaattaaaacctctctggccccactagccacaggctccgctggccttagcccgtctacggagtacagctctgacattcgattgccccctgtggctcccccagcatcctcatccgccccaacctcggcgccaccattagctctgccagcgtgcccggatacaatggtttcattagtcgtccccgttcgggtccagacgaacatgccgtcctacggttcagccatgtatacaactttgtcccagatactcgtgacacaatcacagggctcatcggccacggtcgcactgccaaagttcgaagagcctccgagcaagggaaccactgtctgcggcgctgatgtgcatgaggtcgggccaggcccttccggtctatccgaggagcagtcacgagcctttcccactccatacctacgggtgccagtcactcttccggagagaaaagggacctcactctcttccgagtctattctgtcactggagggcagtagttctaccgccggtggatcaaagcgggtcctgagtcctgcgggtagtctcgagttaacgatggagacacagcagcagaagagggttaaagaggaggaggccagcaaggcggacgagaagctggaattggtaaaaccttgctctgtggtgctgacgagtactgaggatgggaaacggccagaaaaatcgcatctcggcaaccagggacaagggaggcgtgaattggaaatgttaagctctctttcatctgacccatccgacaccaaagagatcccgcctcttccccacccagccctgtctcatggcacagcccctggcagtgaagctttgaaggagtatcctcagccatcagggaagcctcaccggaggggactgaccccccttagcgtcaagaaggaggattctaaggaacagcccgatctgccaagccttgctcctccttcatccttgccgcttagcgagacttcaagccggccagctaaatcacaagaaggtaccgatagcaaaaaagtgctgcagtttcccagtctgcacactacgaccaacgtgagttggtgttacctcaattacattaaacctaatcacatccaacatgccgataggcgcagcagcgtctacgccggatggtgcatcagcctttacaaccctaacttacccggagtgtccaccaaggccgctctgtcattgctgaggtctaagcagaaggtgtccaaagagacttacacgatggccactgcacctcatccagaagctggtagactcgtgccatcatcctcgaggaagcccagaatgacagaggtgcacctgcccagcctggtgagccctgaagggcagaaagatctggctcgggtggagaaggaggaagagagacgtggagagcctgaggaagacgcacccgcatctcaacgcggagaaccagccaggattaagatatttgaaggcggatataagagcaatgaagagtacgtctacgtccgtggaagaggccgaggcaaatacgtgtgcgaggagtgcggaattcgttgcaaaaaaccatcgatgcttaaaaaacatatccgcacccacactgatgtgcgtccctacgtttgcaagcattgtcattttgcgttcaagactaaggggaacctgactaaacacatgaaatcaaaagcccactccaaaaaatgccaggagaccggagtgttggaggagttggaagccgaagaaggcacaagtgatgacctgttccaggacagtgagggtcgcgaagggtccgaggccgtggaggaacaccagttctccgacctcgaagactctgacagtgattcggaccttgatgaagatgaagatgaagacgaggaggaatctcaagacgagctgtcccgcccaagtagcgaggccccacctcccggaccacctcatgctctgcgcgcagactcctcgccaattttgggtcctcagcccccagacgctccggcaagcggcacagaagcaactcgcggttcatcggtatctgaggccgagagactaacagcgtcgagctgttcaatgagctctcagtccatgccagggctgccttggctgggtcctgcgcctctcgggagcgtggagaaggatacagggagcgccttgagttataaacccgtgtctccaagaagaccttggagtcccagcaaggaggcagggagccgccctccactggcgaggaagcatagcttgactaagaacgactcttcaccccagcgatgtagccccgcaagggaaccccaggcctccgccccaagccctcccggtctgcacgtcgatcccggaagggggatgggggctctgccctgcggatctcccaggctgcaactttcccctctgaccctgtgcccgcttggccgtgaactggctcctcgagcccatgttctgtccaagctggaaggcactaccgatccaggacttcctaggtattcccccacccggagatggagccccggacaggcggagagccctcccagaagcgcccctcccggtaagtgggcccttgccggtccaggaagcccttccgccggagagcacggacccggtctcggcttggatccacgcgtactctttcctcctgccccactcccacataaattattgagcaggtcccctgaaacctgcgcctccccgtggaaagctgagtcaaggtcaccctcatgctctcctgggcctgctcatccactgtccagcagaccgttttctgccctacacgacttccatggacacattctcgctcgcacagaggagaatatcttttcgcatttacccctgcactcacaacatctcacgagagctccttgccctctcatccccataggaggtatccaaatggtccaggctcgtcctggagctcatcccacgctgctccctgggccaacggccgcttgggtcagtgggttcagtggaggcggttccgatctgaccggggctagagaagcacaagagagagggaggtggagcccgactgaaagcagctctgcatctgtcagccctgtggccaaggtcagcaagttcacactaagtagtgagctggaagggggagactaccctaaggaacgggagcggacaggagggggtcctgggagacctcccgactggacacctcacggcacaggtgccccagcggagccgactcccacgcattctccatgtacccccccagacacactcccaaggccaccacagggcagacgggctgcacagtcgtggtcacctcgactggagagccctagagctcccacgaaccccgaacccagcgccacacccccactcgatcgctctagctccgttgggtgtcttgccgaggcaagtgcacggttcccggctcgcactcggaacctttccggtgaaccacgaacacgccaggacagccccaagcccagcggctctggagagccgcgagcacatccacaccagcccgaagatcgggtgcccccaaatgccta

SEQ ID NO: 226427 - DNA, 9428 bp, synthetic construct
  misc_feature 1..9428: note = Description of Artificial Sequence: Synthetic coding sequence
  source 1..9428: mol_type = other DNA
atggcaactctggaaaaacttatgaaagccttcgagagtctgaagtcattccagcaacagcagcagcagcagcaacagcagcagcaacagcagcagcaacagcagcagcagcagccaccacccccaccccctccaccgcctcctccccaactccctcagccgcctccccaagctcagcctctacttccccagccacagcctcctcctccgccacccccaccaccgcctggccctgccgtagccgaggagcccctccaccgccctaaaaaggaattaagcgccaccaaaaaagacagagtgaaccactgtctgactatttgtgagaatattgttgcgcagagcgtgaggaatagtccagaattccagaagttacttgggatcgccatggaactatttctcctctgctccgacgatgctgagagtgacgtgcgaatggtggccgatgagtgtctcaacaaagtcattaaggcgctgatggattcgaatctgccacggctccaactggagctgtataaggagatcaagaagaatggggcacccagatcgctgagggccgcattgtggagatttgcagagctggcgcacttagtgcggcctcagaaatgtcgtccttatctggtgaatctccttccttgcttgacacgtaccagcaagcgtcctgaagagtccgtgcaggaaaccttggctgccgcagtacccaagattatggcttcattcgggaatttcgcaaatgataacgagatcaaggtgcttctcaaagcgttcatagccaacctaaagagcagttcccccacaattaggcggactgccgctgggagcgctgtgtctatatgccagcattccaggcgcacacagtacttttattcttggcttttgaacgtcttgctggggctgcttgtgcccgtagaagatgaacacagtactttgctcatccttggcgttctgctgacactgagatatctcgtgcccctgttgcagcaacaggttaaggacacatctttgaagggctcctttggcgttacacggaaagaaatggaagtatcacccagtgccgagcagctcgtgcaggtgtatgaattaacactacatcatacccaacaccaagatcacaacgtcgtcacaggtgctttggaacttctgcagcaactgttcagaacaccgcctcctgagttgcttcagacactgactgccgttggaggaatcggccaactcacagcagctaaagaggagtccggaggcaggtcgcgaagcggatctatcgtggaactgatcgcagggggaggatcctcctgcagtccagttctgagtaggaagcagaagggaaaagtgcttcttggtgaggaggaggccctggaggacgactcagaaagccgttcagatgtgtctagtagtgctctgaccgcctcagtgaaggatgaaataagtggagagctcgcagcatccagcggcgtctccactcctggttctgccggacatgacatcatcaccgagcagccccgtagccagcacaccctgcaggccgactctgtggacctggcaagctgtgacttaacatcatctgccaccgacggggatgaggaggacatcctttctcactcgagctcacaagtaagcgccgtgccttccgatccagccatggacctgaacgacgggacccaggcttcctcaccaatctcggacagttcccaaaccacaacggaagggcctgacagcgcagtgacccccagcgacagctcagagatagtactcgatggcactgataatcagtacctagggctccaaatcgggcagcctcaggacgaggatgaagaagccactggcatcctcccggacgaagccagcgaagccttcagaaactcctcaatggccctgcagcaagcacacctgctgaagaatatgtcccactgtagacagccctccgactcttcggtcgacaagtttgtgctacgcgatgaagccaccgagccaggtgaccaagagaataagccgtgtcgaattaaaggcgacattggacagagtaccgatgacgacagcgcacccctcgtccactgtgtgcgtctactgtcagcctcttttctcctgacgggaggaaaaaacgtcctggtgcccgaccgggatgtgcgtgtgtccgtgaaagctcttgcgctgtcatgtgttggagccgctgtggccctccatcctgaaagtttcttctctaagctgtacaaagttcccctcgatactactgagtacccggaagagcagtacgtgagcgacattttgaactacatcgatcacggcgaccctcaggttcggggagcgacggcaattctatgcggcaccttaatttgtagtattctgtccaggtctagattccatgtgggggactggatgggcacaattaggacacttacgggaaacacattcagtctggccgattgtattccactcctgcgcaagactctcaaggatgaaagtagcgttacatgtaagttagcttgcacggccgtaagaaattgtgtaatgtcattatgctcctcctcttatagcgaattaggtctgcagttaatcattgatgtcctgacgcttcgaaactccagctattggctggtcagaacagagctgttggaaaccctcgctgaaatcgatttcaggctcgtcagtttcctcgaggccaaagccgagaaccttcaccgaggggcacatcattacaccggcctactcaaactgcaggagcgcgtgctcaataatgttgttatacacctgctgggcgacgaggaccctcgtgtccgccatgtagctgcagcctcactgattaggctggtgccgaagcttttctacaagtgcgatcagggccaggcagacccagtggtggcagtcgcccgagatcaatccagtgtctaccttaagctgctgatgcacgagacacagcctccaagtcacttttcagtctcaaccattaccagaatttatagggggtacaatctcttaccttccatcacagatgtgacaatggagaataatctttcaagggttatcgccgcagtcagccacgaactcattacgagtacaactagagcccttactttcggatgctgcgaagccctctgcctgctaagcaccgcctttccggtgtgcatttggtccctcggatggcactgcggagtacctcctctctccgctagcgacgagagtagaaagtcctgcactgttgggatggcaaccatgattcttacattactgtcatctgcctggtttcccttggacctttcagcacaccaggacgctctgatcttagctggcaatctgctggctgcgagtgctcctaagagtcttaggtcaagttgggctagcgaagaagaagcaaaccccgcagctacaaaacaagaggaggtctggccagccttgggcgacagggcccttgtgccaatggttgagcaacttttcagccacctcctgaaagtgatcaacatctgcgctcacgtcctggatgacgtggctcccggacctgccatcaaagccgctcttcccagtctgactaatcctccgtcgctcagccctatacgtagaaagggtaaggagaaagaacccggagaacaggcatctgtgcctctaagtcccaaaaagggaagcgaggcatcagcagcctctcgccagagtgatacaagcgggcctgttactaccagtaagagctcctctctcggcagcttttaccaccttccttcttacctgaagctgcatgatgtgcttaaggccacgcacgccaattataaggtcaccctggacctccagaacagcaccgaaaaatttggaggttttttgagatccgccttggacgttctttctcagatattggagttggcaactctccaggatattggaaaatgtgtggaagaaatattggggtacctcaaaagctgtttttcgcgagaaccaatgatggctaccgtgtgtgtgcagcagctgctgaagacactgtttggcactaacttagcatctcagttcgacggactgtcaagcaacccttccaagtcccagggcagagcccagaggctgggcagctcctctgttcgccctggtctgtaccactattgtttcatggctccatacacccacttcacacaggccctggctgacgcctccctacgcaatatggtccaggcggaacaggaaaacgacacgtcaggctggttcgacgtgctccaaaaggtgagcacccaactcaagaccaatctcacatctgtcacaaaaaatcgcgcagataagaacgctatccataaccacatccgcctgttcgagccactggtgataaaggctcttaaacagtacactacaactacttgtgtgcagctacagaagcaggtactagacctactagctcaacttgtccagttacgtgttaactactgtctgctggattccgaccaggtgtttattggatttgtactcaagcagtttgaatatatcgaagtcgggcagttccgggagagtgaagctatcattccaaatattttcttctttctggtgttgctctcatacgaacgctaccattccaagcaaataatcggaatccccaaaataatacagctctgtgacggcattatggcaagcggcagaaaggcagtgactcatgccatccctgccctgcagcccatcgtgcatgatctctttgttctcaggggcaccaacaaggctgatgccggaaaggagctggagacacaaaaagaggtggtggtctctatgctgcttagactaattcagtatcaccaggtgcttgaaatgtttatactggtcttgcagcagtgccacaaagagaacgaagataaatggaagcggctttccaggcagattgctgatattattcttcccatgctcgcaaagcagcagatgcacatcgatagccacgaagcgttaggagtcctcaacacccttttcgagattcttgcgccatccagcttacgccctgttgacatgctgctgcggtcaatgtttgtgactcctaataccatggccagcgtttcaacagtacagctgtggatctctggtattttggctatcctgcgggtcctgatttcccagagtaccgaggatattgtcctatcaaggatacaggagctgagcttttcaccctatttgatctcttgcactgtgatcaacagattgcgcgatggagatagcacaagcacacttgaggagcacagcgaggggaagcagatcaagaatctcccggaggaaacattttcacggttcctccttcagcttgtgggaatcctgcttgaggacattgtgacaaaacagctaaaagtggaaatgtctgagcaacagcataccttctactgccaagagttaggaactttgttgatgtgcctcatacatatctttaagtcgggcatgtttcggcgtatcacagctgccgctacccgcctctttcgcagcgatggctgtgggggttccttttatactctggattcgctgaatcttagagccagaagcatgatcacaactcatcccgcacttgtgctgctttggtgtcaaattctgctgctggtgaatcataccgattatagatggtgggctgaggtgcaacagacccccaagcggcactcattgagtagtaccaaattattgtcacctcaaatgagcggtgaagaagaggactcagatctagccgcaaaattaggtatgtgtaaccgagagatcgtgagacggggtgctttaatccttttttgtgattacgtgtgccagaatcttcatgactcagaacacctcacctggctcatcgtcaaccatatacaagaccttatctcattgtcccatgaaccccctgtgcaggatttcatcagcgccgtacataggaatagtgccgctagcggactttttattcaggcaatccagtccagatgtgagaacctgagcaccccaactatgttgaagaaaacattgcagtgcctggaaggcatccacctgtctcagtcgggtgccgttctgacattatacgtcgacaggttgttgtgtacacctttccgcgtgttggccaggatggtcgatatactggcatgccgcagagtggaaatgctgctggctgccaatctgcaatcctctatggctcagctgccaatggaagagctcaaccgtatccaggaataccttcagtctagcggactggcgcagcgccaccagcgcttgtacagcctccttgatcgcttccgcctctcaacaatgcaagactccctttcacccagccccccagtctctagtcaccccctggacggcgacggccacgtatctttagaaactgtgagccccgataaggactggtacgtacatcttgtgaagagccaatgctggaccagaagcgactctgcattgcttgagggggcagagctggtcaataggatccctgctgaggatatgaatgcatttatgatgaacagcgagttcaatttatctttactggcaccttgcctgagtttgggcatgagtgaaatcagcggcggacagaagagcgccctgttcgaagccgcacgggaagtgaccttagcacgtgttagcggaacagtgcagcagctgccagccgtgcatcacgtgtttcagccagagctgcccgctgagccagccgcttattggtctaagttgaacgacttgtttggagatgcggctctataccagtcccttccaaccctagcgagagctctggctcagtatctggtcgtcgtgagtaaacttcctagccatctgcacctgccacctgaaaaagaaaaggatattgtaaaattcgtcgtcgccacgctggaggcgctctcttggcacctcatacatgagcagatacctctcagcctggatctgcaggccggactggattgttgttgcctcgccctccagctccccggactgtggtcagtcgtgagttcaacagaattcgttacgcacgcgtgctctcttatatattgcgtgcacttcattcttgaggcagtcgcagtgcaaccaggcgagcagctgctctcacccgagaggaggactaatacccccaaggccatctccgaggaggaagaagaggtggatcctaacactcagaatcccaagtacatcacagccgcatgcgagatggtcgcagagatggttgaatctttgcaatccgtgttggctctgggacataaacgcaactccggagtccccgctttcctgactccgttacttaggaatatcattatcagtctggcccgactccccctggtgaacagctatacacgggtgccgcctctagtatggaagctgggatggagtccaaaacccggaggtgactttggcacagcatttccggaaatacctgtggagtttctgcaggagaaggaagtgtttaaagagtttatttacagaattaacacattaggatggacctcacgcacccagttcgaggagacatgggcaacactactaggtgttctagttacacaacctctggtcatggagcaagaggagagtcctcctgaagaagacacggagcgcacgcagattaacgtgctcgcagtgcaagccatcacctccctggtcctctccgcaatgacagtgccagtagccggaaatccggctgtctcatgtttggaacagcaaccacgcaataagccccttaaagcacttgacaccaggtttggacgaaagctgagcatcattagagggattgtcgaacaagagatccaagcaatggtatccaagcgggagaatatcgcgacccatcacctgtatcaagcttgggatcctgttccatctctttctcccgcaaccaccggagctcttattagtcatgaaaagctgcttcttcaaatcaatcctgagcgtgagctcgggtccatgtcctataagctcggtcaagtgtctatccacagcgtgtggcttggaaattccataactccgctaagggaggaggaatgggacgaagaggaagaagaggaggccgatgccccagctccgagctccccacctacaagcccagtgaactctagaaagcaccgcgcaggggtcgacattcattcttgttctcagttcctgctggagctttatagccgctggattctgcctagtagttctgcgcgacgtactccagccattcttatcagcgaagttgttcgtagtctcctggtcgtctctgacctgtttacagagaggaaccagttcgagttaatgtatgtaactctgactgagttacggcgtgtacacccaagcgaggacgaaatcctcgctcagtaccttgtgcccgctacctgtaaggcagcagcagtgctggggatggacaaggcagtggccgagcctgtttcccgcctcctggaaagtaccctgcgttcctctcatctaccatctagggtcggagctttacatggtgtgctgtatgtgctcgagtgtgacctcctcgacgataccgcaaagcaacttatccctgtcatctccgactacctccttagcaatctcaaaggtattgcccactgcgtgaacattcactctcagcagcatgtcctggtgatgtgtgccaccgccttctatctgatcgagaactatccacttgacgttgggcctgaattcagcgcttccatcatccagatgtgtggtgttatgctgtcaggttcggaggaatccactccatcaattatttaccactgcgccctcagaggcttagagaggctgctgcttagcgagcagctcagccggctagatgctgaaagtttggtcaagctgagtgtcgaccgagtgaacgtgcactctccccatcgtgccatggcagccctcggcctaatgcttacctgcatgtataccggcaaagagaaagtgtcccctggaagaaccagtgacccgaacccagcagcgcctgattccgagagtgtgattgtagccatggaacgagtcagcgtcctcttcgatcgcattcggaagggtttcccatgcgaggccagagtggtggctagaattctgccacagttccttgacgactttttcccgccacaggacattatgaacaaagtcatcggcgaattcctctctaaccagcagccctatccccagttcatggccaccgttgtgtataaggtgttccagacccttcactccacaggacagtccagtatggtgagggattgggttatgctgtccttatccaacttcacccaaagagcccctgtggcaatggcaacctggagcctttcttgcttttttgtatccgcgagcacctcaccgtgggtggccgcaattcttcctcacgtaataagccgaatggggaagctcgagcaggtcgatgtcaatctgttctgcctcgttgcaacagacttctataggcaccagatagaagaggaattagatcgaagggcgtttcagtccgtactcgaggtagtggctgcgcctggctcaccctaccatcggctgctgacctgtctccgtaatgtacacaaggtaacaacatgcta

SEQ ID NO: 226428 - DNA, 3114 bp, synthetic construct
  misc_feature 1..3114: note = Description of Artificial Sequence: Synthetic coding sequence
  source 1..3114: mol_type = other DNA
atggatcgaatggcatcaagcatgaagcaggtgcccaaccctcttcctaaagtgctgtcccgcagaggtgtgggtgctggcctcgaagctgctgaaagggagtcatttgagaggactcaaaccgtttccattaataaggctatcaacacacaggaagtggccgtgaaggaaaagcacgctcgaacatgcatacttggcactcaccacgaaaagggggctcagaccttctggtctgtggtgaacaggcttccactaagttccaacgcagttctgtgctggaaattctgccacgtctttcacaagctgctgagagatgggcaccctaatgtcctcaaggactcgcttcgatatagaaacgaactctctgacatgagcagaatgtgggggcacctctccgagggctatggtcaattgtgctccatttacctcaaattactgagaactaaaatggaataccacaccaagaatccaaggtttcctggaaacctgcagatgtcggaccggcagcttgacgaagctggggagagcgacgtgaataatttcttccagctaaccgtcgagatgtttgattaccttgagtgtgaactgaatctgttccaaacagtgtttaacagtctggatatgagccggtcagtgagcgtcacggccgcaggtcaatgcagactggctcctctcatccaggtgattctggattgctcccacctgtatgactatacagtcaagctactctttaagctgcactcatgtctccccgctgatacactgcaaggccatcgggataggtttatggaacagttcaccaagctaaaagacctgttctacagatcttcgaacctgcagtactttaagcgcttgatccagattcctcaactccccgagaaccctcctaacttcctgagagctagtgccctctccgagcatatttcccctgttgtcgtcattcccgctgaggctagcagtcctgacagcgagcctgtgctagaaaaagatgatcttatggacatggatgcaagccaacagaacctgtttgacaacaaatttgacgatatttttggcagttcgttctcctctgatcctttcaattttaattcacagaatggggtcaacaaggatgagaaggaccacctgatcgaaaggctgtatagagagatctccggattgaaagcccagcttgaaaatatgaaaactgagagccagcgggtggtcttacaattgaagggtcacgtctccgaactggaagcggatctggcagaacagcagcacctgcgccagcaggcagccgacgactgcgaattcctccgggctgaactagacgagctcaggcgccagcgtgaagacaccgaaaaggcccagcgctcgctgtcggagatcgagcgcaaagcacaggcgaatgaacagcggtactctaaattgaaagaaaaatactccgaactcgtgcagaatcacgcagatctcctgcgtaagaacgccgaggtgacaaagcaagtgtctatggcacgccaggctcaggtggatctcgaacgcgaaaaaaaggaactggaggactccctggagagaatcagtgatcaagggcagagaaaaacccaggaacagctcgaagtactggagagcttgaagcaggagctcgcaaccagtcaacgtgaactgcaggtgcttcaaggctcattggagaccagcgcccagtctgaggccaattgggccgctgaattcgcggagctcgaaaaggagagagattctcttgtgtccggcgctgcccatcgggaagaggagttatccgctctgaggaaagaactgcaagatacgcagctaaaactggcctccaccgaagagtccatgtgccaactggcgaaggatcagcggaagatgctgcttgtgggatcgaggaaggcagcggagcaggttatccaagatgcgctgaaccaactggaggagcctcctctgattagctgcgcagggtctgccgaccacctgctgtcaacggttacaagcatcagcagttgtattgaacaactggagaagtcttggtctcaatacctcgcttgccctgaggacatttcagggctccttcacagtatcaccttgctggcgcatctgacaagcgacgctattgcgcatggggctaccacgtgcttacgcgcaccacctgagccagccgactccctgactgaagcttgcaaacaatacgggagagagactctcgcatacctggcttctttagaagaggaaggctccctcgagaacgctgactccaccgccatgcgaaactgcctttccaaaataaaagccatcggagaagagctcttgcctagaggattggatattaagcaagaagagctgggagacttggtggataaggaaatggcagccacctctgcggcaatcgagaccgccaccgcaaggatcgaggaaatgctgtcaaaaagtagggctggagacacaggcgtgaaactggaggtcaacgagcgcatcttaggatgttgtaccagcttgatgcaggcaatccaggtgctgattgttgccagcaaagatttacaacgggagatcgtcgagtccggaagaggaacggcttcgccgaaagagttctacgcaaagaactccaggtggacggaggggttaatcagtgcgtccaaggccgtgggctggggcgctacagttatggttgatgccgctgacctcgtcgtgcagggtaggggcaagttcgaagaactgatggtgtgcagtcatgaaatcgccgctagtactgcccagctcgtggccgcttcaaaagtcaaagccgataaagacagtcccaacttggcccagttgcagcaggcctctaggggagtgaaccaggccaccgccggagttgttgcctcaaccatatcaggcaaaagccaaattgaagagacagataacatggactttagctccatgacactgacccaaattaaacggcaggagatggactcacaggtgcgcgtcctggagctggagaacgagttacaaaaggagcgacagaaattaggagaattgagaaagaagcattatgaactagcgggagtggccgagggctgggaggagggcacagaagcatctccccctaccctccaggaggtcgtgacggaaaaggagtag

SEQ ID NO: 226429 - DNA, 2961 bp, synthetic construct
  misc_feature 1..2961: note = Description of Artificial Sequence: Synthetic coding sequence
  source 1..2961: mol_type = other DNA
atggatcgcatggcatctagcatgaagcaagttcctaatccccttcctaaggtcctatccagacggggtgtaggagccggactagaggcggcagaaagagagtccttcgagagaactcagaccgtatctatcaataaggcgattaacactcaggaagtagccgttaaggagaagcacgcaaggacttgtattctgggcacccaccacgagaagggagcccagactttttggtctgtggtcaatcgcctgcccctcagcagtaacgccgtcctttgttggaaattctgtcatgtgttccataaactgctgagagacggacaccctaatgtgctgaaggactccttaaggtaccgaaatgaactgtctgatatgagccgtatgtggggacacctcagtgaaggctacgggcagctctgctcaatttatcttaaactcctgaggactaagatggaatatcataccaaaaacccgcgattccccggtaatctacagatgtctgatcgacaactcgatgaagcaggggagtccgatgtgaacaacttctttcagttaacagttgagatgtttgactacctggaatgtgaacttaacctgttccagactgtgtttaacagtctggacatgagccgcagtgtgtctgttacagcagcgggacagtgccggttagctccactaatccaggttatactggattgttcgcacttatatgactacaccgtgaaactgctctttaagctgcacagctgcttgcccgctgatacccttcaaggccatcgggaccgatttatggagcagtttaccaaattaaaggacttgttctatcgctcgtcaaacttgcagtatttcaaacgcctcatccaaatacctcagctgcctgaaaatcctcctaatttcttacgggcatctgccctgagcgaacatattagccctgtggtggtaatccccgcagaggcatcgtcacccgacagtgagccggtactggagaaggacgacctgatggatatggacgccagccagcaaaacttatttgataacaagttcgatgacatattcgggtcctctttctcgtcagaccccttcaacttcaactctcagaatggagtcaacaaggacgagaaggaccacctgattgagcgcctgtaccgtgagatcagtgggttgaaggcccagcttgagaatatgaaaactgaatcccagcgcgtcgtattgcagttgaagggccacgtgagtgaactagaagccgatctggccgaacaacagcacctgcgccagcaggctgctgatgattgtgagttcctccgggcagaactcgatgagctgcgtcgacagagagaagatacagaaaaagctcagagatcactgtcagagatcgaacggaaggctcaggccaatgagcagcgatattcgaaactgaaggagaagtactcagagttagtgcagaaccatgcagatctcctcagaaagaatgccgaggttacaaagcaggtgagtatggccagacaggcgcaggtggacctggagagggagaaaaaagagcttgaagactccctggaaaggataagtgaccaagggcagagaaaaacacaggagcagcttgaggtcctggagagcttgaagcaggagctggcgaccagccagagggaactgcaggtcctccagggctctttggagacttcggctcagagcgaagccaattgggccgctgaatttgcggagttagagaaagaaagagacagcctcgtctcgggcgctgcccatagggaagaagagctgtccgccctcaggaaggaactgcaagatacacagctgaaactagccagtacagaagaaagcatgtgtcagctggcaaaagatcaaagaaagatgctgctggtgggctcccggaaggcggctgaacaggtgatccaggacgcattgaaccagctggaggagccccctctcatttcctgtgccggttcagctgaccacttgctgtcgactgtgacatccattagtagctgcattgagcagctggagaaaagctggagccagtatctggcctgccccgaagatatctccggcctcctgcactcgattacactgctcgcccacttaacctcggatgccatcgcgcacggagcaacaacatgccttagggcaccacctgaacccgctgatagtctgacggaggcctgcaagcagtatggtagggagaccttggcttaccttgctagcctggaagaagaagggtctttggaaaacgccgactccaccgctatgcgcaactgcctcagtaagattaaagccatcggggaagaactattgccaagggggctggacataaagcaggaagaactgggtgacctggtggacaaagaaatggcagctaccagcgccgcaattgaaacagccacagctcggattgaaggcaccgcttctcccaaagaattttatgctaagaactctagatggacagaaggactgatttcagcctccaaggccgtcggatggggcgctacagtgatggtcgacgccgctgacctggtcgtacagggtagaggtaagttcgaggagctgatggtgtgtagtcacgaaatcgctgcatccaccgcccagctggtggcagccagtaaagtgaaagcggataaggactcaccaaatcttgcccagcttcagcaagctagccgtggggtgaatcaggccaccgcaggcgtggttgcctcgaccattagcgggaaaagccagatcgaggaaacagataatatggacttttctagcatgactttgacgcagattaaaagacaggagatggatagccaagtgagggtccttgagctggagaacgaactgcaaaaggagcgccagaaacttggcgagctgaggaagaaacactatgagcttgcaggtgtagcagagggctgggaggagggcactgaagcttcacccccaacactccaggaggtggtgactgagaaggagtag

SEQ ID NO: 226430 - DNA, 3207 bp, synthetic construct
  misc_feature 1..3207: note = Description of Artificial Sequence: Synthetic coding sequence
  source 1..3207: mol_type = other DNA
atgaacagcatcaagaacgtgcctgcccgagtgctaagtcggagacctggacatagcctggaagccgaaagagaacaatttgataagacccaggccatcagtatttcaaaagcgataaacacccaggaagccccagtaaaagaaaaacacgctaggcgaatcatcctgggcacccaccacgagaaaggcgcattcactttctggagctacgctataggtctaccgttgccctcatcttccattctttcctggaagttttgtcatgttctgcataaggtcctccgcgacggtcatcctaatgtgctgcatgactgtcagagataccgcagcaacatcagggagatcggcgacctgtggggccacctgcacgacaggtatgggcagcttgtaaatgtttacaccaaactgctcctcactaaaatctcctttcaccttaagcatcctcagttccctgctggcctcgaggtgaccgatgaggttttggagaaggctgccggtacagacgtcaacaacatcttccagctaactgttgagatgttcgactacatggactgtgaattgaaattgagcgaaagtgtctttagacagcttaatacggccattgccgtgtcccaaatgtccagcggccagtgccgcctggccccattgatccaggtcattcaggactgtagtcatctgtatcactacacagttaaattactgtttaagctccacagttgcctaccggcagatactctccagggacatagagataggtttcatgagcaattccactctctgcgcaactttttccggcgtgcctctgatatgctgtactttaaacggctcatccagatccccagactgcccgaagggcctcccaactttctgagagcgtctgcgctagccgagcacattaagcccgtggtggtaatacctgaagaggcccctgaagatgaggaacctgaaaacctcatcgagatttcgactggcccacccgcaggcgaacctgttgttgttgctgatctgttcgaccagacgttcggacctccaaatgggtctgtcaaagacgacagagacctccagattgagtctttgaaaagggaagtggagatgctccgtagtgaactggagaagattaagttggaggcacagcgttacattgcacaattgaaaagccaggtaaacgcccttgaaggcgaacttgaagaacagcgcaaacaaaagcaaaaggccctcgtggacaacgaacagctgcgacatgaattggcacagcttagggccgctcaactggaaggtgagcgctcgcaggggttgcgcgaagaggctgagagaaaagcctctgcgaccgaggccaggtacaataaactgaaggaaaagcattcagagttagttcacgtccacgccgagttactgcgaaagaatgcagatactgcaaagcaactgactgtgacccagcagagccaagaagaagtggctagagttaaggaacagttagcgttccaggtcgagcaggtgaaacgggaatcagagctgaagctcgaggaaaaatccgatcagttagagaagctgaaaagggaattggaagctaaagccggtgagctagctcgagcccaagaggccctaagtcacacagagcaatctaaaagcgagctgagctcgagattggatacactgagcgccgagaaagatgccttgtccggcgctgtgcggcagagggaggccgatctccttgccgctcagtccctggtgcgagagactgaggccgctctttctcgggagcagcagaggtctagtcaggaacagggcgagctgcaggggagactggccgaaagagagagccaggagcagggactcaggcagagactccttgacgagcagttcgccgtactgaggggagctgcagctgaggcggctggcatattacaggatgccgtgtccaagctagacgatcctttacatcttcgctgcacttcctcaccagattacttggtctctcgggctcaggaggcgttggacgccgtctcaacattggaggaaggacacgcccaatacctgacctcccttgcagatgcttcagccctggtcgccgcattaacgagattttctcatttggccgcagataccataattaacggcggtgcaactagtcacctggccccaaccgatcccgcagaccgcttaatagacacgtgtagagaatgtggagccagggcattggagctgatgggccagctccaagaccagcaggctctgcgacatatgcaggccagcttggtcagaactccgctgcaggggatcctccagctgggacaggagttaaaacctaagagcctggatgtgaggcaagaggaactcggcgctgtggtggacaaggaaatggcagccacaagtgccgctatagaggatgcggtgcggaggatcgaagatatgatgaatcaagctaggcacgcctcctctggcgtcaaattagaagtgaacgaaaggatcttaaactcttgcaccgacctcatgaaagccattaggctgctagtgacgacatccaccagtttacagaaggagatcgtggagtccggcagaggagcagccacccagcaggaattctatgccaagaactcgagatggacggaggggctcattagcgcaagcaaagcggtgggctggggcgctactcaactcgttgaagccgctgacaaagtagtactgcacaccggcaaatatgaggaactcatcgtctgctcgcacgaaatcgcagctagtacagctcaactagtcgccgcaagcaaggttaaggctaataagcattctccccacctttctaggcttcaggagtgttccaggacggtgaacgagcgggcagctaacgtggtagctagtacgaagagtgggcaggaacagattgaggatcgcgacaccatggacttctccggcctgagtctgattaagttgaaaaaacaagaaatggagactcaggttcgcgtattggagctggaaaagacactggaggcagagagaatgcgtctgggagagctgagaaaacagcactacgtccttgccggagcctcagggtcccctggagaagaggttgcaatcagaccatcaaccgcgcctcgctccgtaacaaccaaaaagccaccattggcccagaagccatctgtggccccacgccaggatcaccagcttgacaaaaaggacggcatatatccagcccagctggtgaactactag

SEQ ID NO: 226431 - DNA, 753 bp, synthetic construct
  misc_feature 1..753: note = Description of Artificial Sequence: Synthetic coding sequence
  source 1..753: mol_type = other DNA
atggcccacgtgggaacttcaagggtggggagcgtgctgagcatgagtctttcaatacaccttctcgttcccacgatgacgaagggggaaaccggaaagcctgggcaccatgaggcccctcgcaccctacaggcctttccctggacttgggcacgtgcatctcctggggtttctgtggacatgtctgctgggcttccccagtcactgctttgctggccaggagcaccactcctccccactcccccactgccttctgccacctacgtaggccattcactgggcctacctagagctggttcatctgtgggcccttggttcagtgggaggtgggtgggcggtgctctggttcaatggccgctcggcggaggtgggcctggcagcgtagccgcaggcctcggaggtccactcgtgcgctggctcctcggcggaggtgctctggtgagatggccactcggaggagggggtcccggatcagttgctgctggatggggcggaccttggtttggaggccgatgggtgggcggacctcctggctccgtcgccgcaggttgggggggacctgtgcggtggccactcgggggtggtgggcctggaagcgtggccactggatggggaggtccctggtttggcggtcgttgggtgggtggcccaccaggcagtgtggctgccggttgcggcggagccttggtgcagtggcccttgggcggaggaagtttgcacagcattccttcctttcccagagcttggcggtag

SEQ ID NO: 226432 - DNA, 2016 bp, synthetic construct
  misc_feature 1..2016: note = Description of Artificial Sequence: Synthetic coding sequence
  source 1..2016: mol_type = other DNA
atgcggccaaagcgattgggcagatgttgcgccggatcccgcctgggcccaggcgaccctgctgctttaacttgcgccccatctccttcagcaagcccagctcctgagcccagcgcgcagcctcaggcgagggggacaggccagagggtgggctcccgcgctacatctgggagccagtttctctccgaggctagaacaggagcaaggccagcctctgaggctggcgcaaaagccggagcgaggagaccaagtgcttttagtgctattcagggcgacgttagaagcatgccagacaattccgacgcaccatggacccgcttcgtattccaaggcccttttggaagcagggcaactggacggggaacaggcaaggcagcgggaatctggaagacccccgcagcctacgttggcagacgcccaggggtgagtggcccagagcgggctgccttcatccgagaacttgaggaagcattatgccctaacctccctccacctgttaagaaaataacccaggaggatgtgaaagtgatgctgtacctgcttgaggagctcctaccccctgtgtgggagagcgttacctacggaatggtgctccagcgagagagggacctgaataccgcagctcgtatcggccagtcactggtcaaacagaatagcgttctgatggaagaaaactcaaagctggaggccctgttaggttcagcaaaggaggagattttgtacctacgccaccaggttaacctccgcgatgagctactgcagctgtattcagatagcgatgaggaagatgaggatgaggaagaagaagaagaggagaaggaggctgaagaggagcaggaggaagaggaagccgaagaagatctacagtgcgcccacccatgtgacgcccctaagctgatctctcaagaggccttgctccaccagcatcactgcccccagctcgaagccctccaagaaaagttaagactcctcgaagaggaaaaccatcagctgcgggaagaagcaagccaactcgatacactcgaggatgaggaacagatgctaattctagagtgcgtggaacagttttcagaagccagtcagcagatggctgaactgtcagaagtcctggtgttgcggctggagaactatgaacgacagcagcaggaagtcgccagacttcaggctcaagtcctgaaactgcagcaacgatgccgaatgtacggcgcagagacagaaaagttgcagaagcagctggcatctgagaaggaaatacagatgcagttgcaggaggaaagcgtatgggtgggtagccaactccaagaccttagggagaagtatatggactgcgggggaatgttgattgaaatgcaagaggaggtgaaaacactgcggcagcagcctcctgtgagtactggctcagcaacacactatccatacagtgtacccctggagacactgccagggtttcaggaaacacttgctgaagaactccggacatcactgaggcgtatgatctcagatcccgtgtacttcatggagaggaattatgagatgccgaggggcgatacaagttcccttcgatacgattttaggtactctgaagatcgtgagcaggtgaggggattcgaagcagaggagggcctcatgcttgctgcagatatcatgagaggtgaagactttactccagcagaagagtttgtaccccaggaggagctgggcgctgctaagaaagtgcccgctgaagagggtgtaatggaagaggccgagctggtgagcgaagagaccgagggatgggaggaggtggagttggaattggatgaggcaacccggatgaacgtcgttaccagcgccctggaagcctccggactgggacctagccacttagatatgaactacgtcctgcaacaactcgccaactggcaggatgcccactaccggagacagttgcggtggaaaatgctgcaaaaaggcgaatgcccacatggggctctgccagcggcatcacgaactagctgtaggagctcctgccgctag

SEQ ID NO: 226433 - DNA, 1809 bp, synthetic construct
  misc_feature 1..1809: note = Description of Artificial Sequence: Synthetic coding sequence
  source 1..1809: mol_type = other DNA
atgaggccaaaaagactgggcagatgttgcgcaggatctcgcctcggcccaggggacccggctgctctgacctgtgccccatccccttccgcaagtccggcacctgagccgtcagcacagccacaggcgagaggcacagggcagcgggtgggctccagggcaacgagtggtagccagttcctgtcagaggctaggaccggagcaaggcccgcaagcgaggctggcgctaaggccggagccaggagaccctctgctttttcagccatccagggcgatgtgagatcaatgcctgataactccgacgccccatggactcgctttgttttccaggggccttttggcagtagggctacaggcagggggactggcaaggccgcaggaatttggaaaaccccagcggcttatgtgggcaggcggcctggcgtttcgggacccgagagggctgcattcattcgggagctcgaggaggcattatgccctaatctgccaccaccagtaaagaagatcacccaggaagatgtgaaggtgatgctgtacttgttagaggaggtctgtaccgcctttctgatccaactgctcccaccggtgtgggaaagcgtgacatacggaatggtcttgcagcgcgagcgcgatttgaacaccgctgctagaataggccagtctctcgttaagcagaacagcgttcttatggaggaaaactccaaactggaggccctccttggctcggccaaagaagagatcctttatctgcgacaccaggtcaacctgagggatgaattactgcagctgtactccgattccgatgaggaggatgaagacgaggaggaggaggaagaggagaaagaagccgaggaggagcaggaggaagaagaagctgaggaagacctccagtgcgctcatccttgcgatgcacccaagctcatatcacaagaagcactccttcatcaacaccactgcccacagctggaggcattacaagagaaactgcgactgctggaggaggagaaccaccagttgcgcgaggaagctagccagctcgacactctggaggacgaagagcagatgctgattcttgaatgtgtggagcaattttccgaggcctctcaacagatggcggagctttcggaagtgctcgtcctgcggctggagaattacgagcgccagcaacaagaggtcgccaggctgcaagcccaggtactcaaactgcaacagcggtgtaggatggagactctccccggattccaagagactcttgcagaggagctgcgtacctctctcaggcggatgatctcagacccagtgtacttcatggagaggaactacgaaatgccacggggtgatacttcctccctgaggtatgatttcaggtacagcgaggacagagaacaggtgcggggtttcgaggcagaagaggggctgatgctcgccgcagacattatgcggggtgaggacttcaccccggcagaagagttcgtgcctcaggaagagctgggagccgcaaaaaaggtgccagccgaggagggggtgatggaagaagccgagctggttagcgaggaaacggagggatgggaggaagtggagctggagctggatgaagcaacaaggatgaacgtggtgacatctgctctggaggccagcgggctcggccctagccatctggatatgaattacgtgctgcagcaactcgctaattggcaagacgcacattatagaaggcaacttcggtggaaaatgctccaaaaaggcgaatgcccccacggagccctgcccgctgcctcaaggactagctgtcggtcctcttgtcgctag

SEQ ID NO: 226434 - DNA, 1860 bp, synthetic construct
  misc_feature 1..1860: note = Description of Artificial Sequence: Synthetic coding sequence
  source 1..1860: mol_type = other DNA
atgagacccaagagactaggacgctgttgcgcaggcagccgcctagggcctggggatccagcggcactgacatgcgcccctagcccttccgctagcccagctcctgagccgagtgcccagcctcaagcccgagggactggccagagagttggttcacgcgcaacctccggatcccaatttctgtcagaggccaggacaggggcacgacccgctagcgaagcgggagctaaagctggggcaaggaggccttccgcctttagcgccatccaaggcgacgtgaggtcaatgcctgataattccgacgccccttggacccgcttcgtgtttcagggcccatttggctcacgcgctaccgggcgtggcacaggaaaggcagcaggcatttggaaaactcccgctgcgtacgtgggtagaaggcccggagtttccgggcctgaaagagccgcattcatcagggaacttgaagaggccttgtgtcctaacctgccacccccagtgaagaaaatcacccaagaggatgtgaaagttatgctatacctcctagaggaacttttgccccctgtatgggaaagcgtgacatacggcatggtgctgcagagagagcgcgacctgaataccgctgctcgaatcggccaatcattagtcaaacaaaactccgtgctgatggaagagaattcgaagctcgaagccctgttagggtccgctaaagaggaaatcttatatctgagacaccaggtgaatttacgggatgagctgctccaactctactccgacagtgatgaagaagatgaagacgaggaggaagaagaagaagagaaggaagccgaagaagagcaagaggaggaggaagcagaggaggatttgcagtgcgctcacccctgcgacgcacccaagcttattagccaagaagctttgctccaccaacaccattgccctcaactggaggcacttcaggagaaacttaggctgttagaggaggagaaccatcagcttcgcgaggaggcatcccagttggacactttagaagacgaggaacaaatgctgatcctggagtgcgtagagcagttctcagaggcctcacagcaaatggctgagctatctgaggttctggttctgagattagaaaattacgagcgccaacagcaggaggtggctaggttgcaagcgcaagtccttaagcttcagcaacgatgcagaatgtatggcgctgagaccgaaaaacttcaaaagcagctcgcctctgagaaggagatacagatgcagcttcaggaagaggagactctgccaggttttcaagagaccctggcagaggagctccgcacctcactccgacgaatgatctccgaccctgtctatttcatggagagaaactacgagatgccaagaggagatacctcgagcttacgctatgattttagatatagcgaagacagagagcaggtccggggattcgaagccgaagagggactgatgctcgctgcagatattatgcgaggtgaggattttactccggctgaggaatttgtaccccaagaagagttaggcgcagccaaaaaagttcctgcggaggagggtgtgatggaggaagccgagctcgtgagtgaggagaccgagggctgggaagaagtcgagctagagctggatgaggctaccagaatgaacgtggtgacatcagcactggaggcgtccgggcttgggccatcccatctggacatgaattacgtactgcagcaacttgcaaactggcaggacgcacattaccgcagacaactgcgttggaagatgttgcagaagggagaatgtccccatggcgcactgcctgctgcaagcagaaccagctgccgttctagctgccgctag

SEQ ID NO: 226435 - DNA, 1785 bp, synthetic construct
  misc_feature 1..1785: note = Description of Artificial Sequence: Synthetic coding sequence
  source 1..1785: mol_type = other DNA
atgcgacccaagcgcttgggcagatgttgtgccggttcccggctgggtcccggagacccagcagcactgacctgtgccccttccccctctgcgtcccctgcccctgaaccgtccgcccagccccaggctaggggcacgggccaacgagtgggcagtcgagctacttcaggaagccagttcctgtctgaagcccgtacaggcgctcggcctgcctcggaagcaggagccaaagccggtgccaggaggccctctgccttttctgcaatacagggggacgtgagaagcatgcctgacaactccgatgctccctggacgcgcttcgtgttccagggacctttcggaagcagagcaacaggcaggggtacaggtaaggccgcaggtatctggaagactccggcagcctacgttgggagacggccaggggtgagcggccctgaacgggcagctttcattcgggagctcgaggaagcgctgtgtccgaacctcccccctccagtcaagaagattactcaggaggacgtgaaagtcatgctgtatctgctcgaggagctgctgcccccagtctgggagtctgtcacttatgggatggtcctgcaacgggaacgcgacctgaataccgccgctaggattggccagtccctggtgaagcaaaactcagttttaatggaggaaaatagcaagctggaagctctactcggtagtgcaaaagaggagattctgtatctcagacatcaggttaatctacgtgacgaattgttacagctgtatagcgatagcgacgaagaagatgaggatgaggaagaagaagaggaggagaaagaggctgaggaagagcaggaggaggaagaggcagaagaggaccttcagtgtgcacatccatgtgatgcacccaagcttatttctcaagaggctctcctccatcagcaccattgcccccagcttgaggcactacaggaaaagctaagattattggaggaggaaaaccaccagctccgagaggaggccagccagttggacacattagaagatgaggagcagatgcttatccttgagtgtgttgaacagttctcggaggcatcccaacaaatggccgagctgagcgaagtactggttttgcggctggaaaactacgagcgccagcagcaggaggttgcacgacttcaggcgcaggttctcaagttgcagcagcgatgccgaatggaaacgcttcctgggttccaggaaacactggcagaggaattgcggacttcactgagaaggatgatctccgacccagtgtattttatggagcggaattacgagatgcctcgaggcgacacatcaagcctgcgttacgacttccggtactctgaagatagggaacaggtcaggggatttgaagcggaagaaggtctgatgctggcggcagatataatgagaggagaggatttcacgccggcagaagaattcgttccacaggaggaactgggggctgccaagaaggttcctgcagaagaaggggtgatggaagaggctgagctggtgagcgaggagactgagggatgggaagaggttgaactcgagctggatgaggccacaaggatgaatgtcgtaacgtccgccctggaggcctccggtttaggaccaagtcacctcgacatgaactacgttcttcagcagctggccaattggcaggatgcccactataggcgccaactccgttggaagatgctgcagaagggcgaatgcccgcacggggctctacctgctgcaagtagaaccagctgcagatcatcctgtagatag

SEQ ID NO: 226436 - DNA, 837 bp, synthetic construct
  misc_feature 1..837: note = Description of Artificial Sequence: Synthetic coding sequence
  source 1..837: mol_type = other DNA
atgaaattcagggccaagattaccggaaagggctgcctggaactgtttatccacgtatcagggaccgtggcaagactcgctaaggtctgtgtactacgggttagacctgattctctctgtttcggcccagccggatccggcggtttgcacgaagcccgtctttggtgcgaagttaggcaaggtgctttccagcagtttcggatggagggtgtcagtgaagatctggacgaaattcaccttgagctgaccgccgagcatctctcccgggcagcaagatccgccgcaggggcatcatctctgaagttacagcttacccacaaacgcagaccttcactgaccgtagccgtcgaacttgtttcttcgttgggacgggctcgctcagtggtgcacgatctgccggtacgagtgctccctaggagagtgtggagggactgcctccctccttcactccgagcttccgacgcatctattaggctgcctagatggcgcaccctgcgtagtatcgtcgaacggatggccaacgtcgggtcccacgttctggttgaagccaacctgagcggccgaatgacgctgtcgattgaaactgaggtggtgtcgatccagtcctacttcaagaatctcggcaaccctccacagtcagctgtgggagtgccggaaaatagagatctggaaagtatggtgcaggttcgggttgacaatcggaagttgcttcaattcctggagggtcagcagattcatcctacgactgcgctgtgcaatatctgggacaacacactgctgcaattagtactcgttcaagaggacgtctcactacagtacttcatccccgctctgtag

SEQ ID NO: 226437 - DNA, 1065 bp, synthetic construct
  misc_feature 1..1065: note = Description of Artificial Sequence: Synthetic coding sequence
  source 1..1065: mol_type = other DNA
atgaagagcttgctgctcctcgtactcatctcgatatgctgggccgatcacctgagcgataattatactctggaccatgacagagctatccacatccaggcggagaacggaccccacctgctcgtggaagccgaacaagcaaaggtgttttcacaccggggaggcaacgtgaccttgccctgtaagttctaccgtgaccctaccgcttttggaagtgggattcataaaataaggataaaatggacaaaactcaccagtgactacctcaaggaagtggacgtgtttgtgtctatgggataccacaaaaaaacctatgggggataccagggcagagttttcctcaaaggcggaagcgattcggatgccagcctggtcattacagatctgaccctggaagattacggaaggtataagtgtgaggttattgagggtctggaagacgacacggtggtggttgccctcgacctccagggtgtagtgttcccatactttccccgactgggcaggtataatttgaacttccatgaagcccagcaggcctgtcttgaccaggacgcagtcattgcctcttttgatcagctgtatgacgcctggcggggagggctggattggtgcaacgccggttggctctctgacgggagcgtgcaataccctatcacgaagcccagggagccctgtgggggtcagaataccgtgccaggcgtgcgcaattacggcttttgggataaggacaagtctcgctatgatgttttctgtttcacatcaaatttcaacgggagattttattatctgattcaccctactaaactaacatacgatgaagccgtgcaggcgtgcctcaatgatggcgctcagattgcaaaagtggggcaaatttttgccgcttggaagatacttggttatgatagatgtgacgctggttggctggcagacggcagcgtgagatatcctatcagcaggcctaggcggaggtgcagcccaactgaggctgccgtgaggttcgttggcttcccagataagaaacataagttatatggggtttactgcttccgggcttacaactag

SEQ ID NO: 226438 - DNA, 549 bp, synthetic construct
  misc_feature 1..549: note = Description of Artificial Sequence: Synthetic coding sequence
  source 1..549: mol_type = other DNA
atgaaatccttgctactgctggtcctcatttcaatttgttgggcagatcacctcagcgacaattatacactagaccatgatcgggcaatccacatccaggagaacggcccacacctgctagtggaagctgagcaggcaaaagtgttcagccacagagggggaaatgtgacgctcccctgcaagttttatagagatccaaccgccttcggctccggcattcataagatccggatcaaatggaccaagttaacaagcgattacctaaaggaagttgatgtgtttgtgtccatggggtatcataagaagacctatgggggataccaaggtcgggtgttcttgaaaggtggatctgattccgacgcttctctcgtgatcaccgacctgaccctggaagactatggccgttataaatgtgaagtgatcgaggggctggaggatgatacagtcgtggtagccctggatcttcagggggtagtgtttccctactttcctcgactgggtagatacaatctgaatttccacgaagcccagcaggcctgcctggactag

SEQ ID NO: 226439 - DNA, 477 bp, synthetic construct
  misc_feature 1..477: note = Description of Artificial Sequence: Synthetic coding sequence
  source 1..477: mol_type = other DNA
atgaaaagtcttcttctccttgtacttatctcaatttgctgggctgatcatttgtccgacaattacaccctagaccacgacagagcgattcatatacaagcagagaatggaccacatctccttgtggaggccgagcaggcaaaagtattctctcaccgcggtggcaacgttacactgccctgcaagttttatcgcgatccaacagccttcgggagcgggatccacaagatccgtatcaagtggactaagttgacatccgattatctgaaggaagtggatgtctttgtctcaatgggttatcacaagaagacttatgggggttatcagggaagagtgttcttgaaaggtggctccgactcagatgcttcactggtgattaccgacctcaccctagaagattacggacgttacaagtgtgaggtaattgaaggacttgaggatgatactgtcgtggtggctttggatctgcaggggtag

SEQ ID NO: 226440 - DNA, 600 bp, synthetic construct
  misc_feature 1..600: note = Description of Artificial Sequence: Synthetic coding sequence
  source 1..600: mol_type = other DNA
atgaagagcctgcttctcctggtgctgataagtatctgctgggctgaccatctgtccgataactacacactggatcatgatcgagcaattcacatccaggccgagaatggacctcacttgcttgtggaggctgaacaggccaaggtcttctcccatcggggtggcaacgtcacattaccctgcaaattctatagagatcccacagctttcgggagcgggatccataaaatccgcattaagtggacgaagctgactagcgattacctgaaggaggtggatgtgtttgtgagcatgggctaccataagaagacttacgggggatatcagggacgtgttttcctaaaggggggatcagatagcgacgcatctctcgtcatcacagacttaacattagaggattacgggaggtataaatgtgaggtaatcgaggggttggaagatgataccgtggtcgtcgcgctagatctccaaggcgtggtgttcccttactttccaaggctgggacgatacaaccttaacttccacgaagctcagcaggcttgcctggaccaggatgctgtaattgccagtttcgaccagctgtacgacgcctggaggtag

SEQ ID NO: 226441 - DNA, 777 bp, synthetic construct
  misc_feature 1..777: note = Description of Artificial Sequence: Synthetic coding sequence
  source 1..777: mol_type = other DNA
atgaaaagtctgctgctgctggttctgatctcaatatgctgggcggatcatctctcggacaactacaccctggaccacgatagggccatacacatccaagctgagaacggccctcacctcctcgttgaagccgagcaggccaaggtctttagccaccggggaggcaatgtgacactcccatgcaaattctatagggatcccacagcgttcggctcaggcattcataagattcgtattaaatggaccaagctgacttcggattacctaaaagaggtcgacgtcttcgttagcatgggctaccacaaaaaaacgtacgggggatatcaaggcagggtgttcctcaaagggggaagcgactccgatgcttcactggtgatcactgatcttactctcgaggattacgggagatataaatgtgaagtcattgaaggactggaagatgacactgtggtggtggctctggacctacagggagtagtctttccctatttccctcggctggggcgatataacttgaacttccacgaggcccaacaggcctgtcttgaccaagacgcagtcatcgccagttttgatcagctctacgacgcatggagaggcggtctggactggtgtaacgccggatggctgagcgacggcagcgtgcagtacccaatcacgaagccccgtgagccttgcgggggtcagaataccgttcccggtgtgagaaattatggtttttgggataaagacaagagtagatacgacgttttctgctttaccagcaacttcaattag

SEQ ID NO: 226442 - DNA, 462 bp, synthetic construct
  misc_feature 1..462: note = Description of Artificial Sequence: Synthetic coding sequence
  source 1..462: mol_type = other DNA
atgaagtctcttttattattggtgctgatcagcatctgttgggccgaccaccttagtgataattacaccttggaccatgaccgcgctatccatattcaagctgaaaatggccctcacctgctggttgaggccgagcaagcgaaagtcttttcccacagagggggaaatgttacccttccgtgcaaattctacagggaccctactgcctttggttccggcattcacaaaataaggatcaagtggaccaaattgacttccgattatttgaaggaagtggatgtgtttgtgagcatgggctaccacaagaaaacttacggaggatatcaggggcgagtgttccttaaaggaggttcggatagcgatgcttcattagtgatcaccgacctgacacttgaggactacggcaggtacaagtgcgaagtgattgagggcttggaggacgacacagtggtggtggcgtag

SEQ ID NO: 226443 - DNA, 1683 bp, synthetic construct
  misc_feature 1..1683: note = Description of Artificial Sequence: Synthetic coding sequence
  source 1..1683: mol_type = other DNA
atgttcgcgcgtatgagcgacctgcatgtattactactgatggctctggtgggaaagactgcatgcggtttcagtctgatgtccctgctggagagcttagacccggattggacccccgaccagtacgattatagttatgaagattataaccaagaagaaaatacctcatcgaccttgactcatgctgagaacccagactggtattataccgaggatcaggccgatccgtgccaaccaaacccctgcgagcacgggggagattgcctggtgcatggctccactttcacttgtagctgtctggcacccttttccggaaataagtgtcaaaaagtgcagaacacctgcaaggacaatccctgtggcagaggacagtgtctgatcacgcaaagccctccctattatcgctgtgtctgcaagcacccctacaccggcccatcctgcagtcaggttgtcccagtgtgtaggcctaatccatgccagaacggagccacctgttcaaggcacaagcgtcgaagtaagtttacatgcgcgtgtccggaccagttcaaagggaagttctgtgagataggaagtgacgattgctatgtaggcgatggctatagctatcgcggaaaaatgaaccggacagtcaaccaacacgcatgtctttattggaactcacacctcctcttacaggaaaattacaatatgtttatggaggatgctgagacgcacggaattggcgagcacaatttttgtcgcaaccctgacgcggatgaaaagccttggtgtttcatcaaggttacaaatgataaagtcaagtgggagtactgcgacgtgagcgcctgtagcgcgcaagacgtcgcctatccagaggagagcccgacagaacccagcacaaagttgcctggtttcgattcttgtggcaagacagagatcgctgaacgaaagataaaacgcatctatggaggctttaaaagcacagctggcaagcacccctggcaggcctccctgcaaagcagtctgccgctgacaatatccatgccgcaaggacacttttgcgggggtgctctgatacatccgtgttgggtactaactgccgctcactgcaccgatatcaagacgcgtcacctgaaggtggtcttgggcgatcaagatctgaaaaaggaagagttccatgagcagagttttcgcgtggaaaaaatatttaaatattcacactacaatgaacgggacgagattccccataacgatatcgcactcttaaaactcaaacctgtcgacggccactgcgccttagagtccaagtacgtaaaaacagtgtgcctgccagacggctccttcccaagcgggagtgaatgtcacatttccggatggggcgtgactgagacagggaaaggaagtaggcagctactggacgcgaaagttaaacttattgcgaacactttatgtaactctagacagctttatgaccacatgattgacgactcgatgatctgtgcaggcaacctccaaaaaccagggcaagacacttgccaaggcgattccggcggtccactgacatgcgagaaagacggtacctattacgtatacgggattgtgtcctggggactggagtgtggaaaaaggcccggagtgtacactcaagtgacgaagtttctgaactggataaaggcaacaatcaagagcgaatccgggttctag

SEQ ID NO: 226444 - DNA, 534 bp, synthetic construct
  misc_feature 1..534: note = Description of Artificial Sequence: Synthetic coding sequence
  source 1..534: mol_type = other DNA
atggaagagaattttatctgcagtaggaagaccatggctctgagctcaacctggattttatcgcccaagaagacaggtcctctgactagcatgataaccgcgacccgcatcatcattcgcaaaaggacaccagtggcgcacctccctactctgcggatattgactggcacaaccctgcgtactaagttaatccatgcctcgccgacaccagttaacactgtcggtacagcctccagcatgggggctccaagtcatgccgcagcttggctgctgagcctgggaatcagtgtacgaaaatgtaagattcgggcaaggaccacacatgtggcaggagccaacgtgtccctgcctcgcgtcctgccaacaactgccgtgagcgttaacaccctgacccaggtcccggctgcaccgaagtggttcctgtacgccggacagacgccagcaaggatggggctccctgcccctggtatttccggggacccgtctagccctgtccccgtgcccacctcctccaggggcaacagtgtgaagtag

SEQ ID NO: 226445 - DNA, 843 bp, synthetic construct
  misc_feature 1..843: note = Description of Artificial Sequence: Synthetic coding sequence
  source 1..843: mol_type = other DNA
atgttcgctcgcatgtccgatctgcacgttctgctcctgatggctctagttggcaaaacagcctgtggttttagcctcatgtccctgctggagagccttgatcctgactggacaccagatcaatatgactacagctacgaagattacaaccaggaggaaaacaccagcagtacgttaactcacgcggagaatcccgactggtattacactgaagaccaggccgacccctgccaacccaacccatgtgagcatgggggtgactgtctggtacatggttccacatttacctgttcctgtctggcaccttttagtgggaacaaatgtcagaaagtacagaacacttgcaaagataatccctgtgggcgtggacagtgtttaataactcaaagtcctccctactaccggtgtgtatgcaagcacccttacacagggccatcttgctcccaggtagtaccagtttgtcgcccaaatccttgccagaatggagctacgtgttctagacacaagcgcaggtccaaattcacctgcgcatgtcccgatcagttcaagggcaaattttgcgaaatcgggtcagatgactgctacgtaggcgatgggtattcttaccggggaaagatgaacaggaccgtcaatcagcacgcatgtctctattggaactcccaccttctcctgcaggagaactacaatatgttcatggaagatgcagagacacatggaataggagaacataatttttgccgaaatcccgatgctgatgagaaaccctggtgtttcattaaagtgactaacgacaaggttaaatgggagtattgtgacgtatcagcttgctcagctcaggcctag

SEQ ID NO: 226446 - DNA, 1605 bp, synthetic construct
  misc_feature 1..1605: note = Description of Artificial Sequence: Synthetic coding sequence
  source 1..1605: mol_type = other DNA
atgagcctgctcgagtctcttgaccccgactggacacccgaccagtatgactactcgtacgaagattataatcaggaggagaacaccagctcaactctgacccatgcggaaaaccctgactggtactacaccgaagatcaggccgacccctgtcaacctaatccctgcgagcacggaggagactgtcttgtacacggatcaacctttacttgttcgtgtctggcgccattcagtgggaataaatgccaaaaggttcaaaacacatgcaaagataatccctgtggcaggggacagtgtttgatcacgcagagccccccatactacaggtgtgtctgcaagcacccttatacaggcccaagttgtagccaggtagtccccgtttgtcgtccaaacccatgccagaatggagcaacttgctcccggcataagcgccgttcaaagtttacgtgtgcttgccccgaccagtttaagggaaaattctgcgagatcggctcagacgattgctacgtaggggacgggtacagttaccgagggaaaatgaatcgaactgtgaatcaacacgcttgcctgtattggaactcccacctcctgcttcaggaaaactacaatatgttcatggaagacgccgaaacacatggcataggggagcataacttctgtcgcaaccctgacgccgacgagaaaccttggtgtttcattaaggtcactaacgataaggtcaagtgggaatactgcgacgtctccgcatgttccgcacaggacgttgcctatcccgaagaatcccctactgagccgtcaacaaaacttccgggatttgactcttgcggcaaaacagaaatcgccgagcgaaaaattaagcgtatttatggaggcttcaaatcaaccgctggaaagcacccttggcaggccagccttcaatcctccctgccgcttacaatttctatgccacagggccatttctgcgggggtgccttgattcacccatgttgggtgctaactgctgcgcactgtacagacatcaaaacccggcatctcaaagtcgttctgggagaccaggacctgaagaaggaggaatttcatgaacagtcgttcagagtggagaaaattttcaaatattcgcattataatgagcgggatgaaatcccccataacgatatcgcgctgttgaaactgaagccggtcgacggccactgtgcactggaaagcaaatatgttaaaacagtgtgcttgccggacggctcattcccatccggcagtgaatgtcacatcagcgggtggggcgtgaccgagaccgggaagggctctcggcagctgctggacgccaaggtgaagctcattgccaacacactgtgtaacagtaggcagctgtatgatcacatgattgatgatagtatgatttgcgcaggtaacctgcagaagcccggtcaagacacatgccagggggacagcggcggtcccttgacctgtgagaaagacgggacatactacgtctacggaatcgttagttgggggttggagtgcgggaaacgcccaggcgtctacactcaagtaactaagtttttaaactggattaaggctaccatcaagtctgagagcggattttag

SEQ ID NO: 226447 - DNA, 1656 bp, synthetic construct
  misc_feature 1..1656: note = Description of Artificial Sequence: Synthetic coding sequence
  source 1..1656: mol_type = other DNA
atgttgcccctcctgttgttgcccctgctttggggaggctcactccaggaaaagccagtgtacgaattacaggtgcagaagtccgtgacagtccaggaggggctatgtgttctagtgccctgttcctttagctacccgtggcgctcctggtatagctctccccctctctacgtctattggtttcgggatggcgagattccctattacgccgaggtcgtagctaccaataaccccgatagaagggttaagcctgagactcagggacgctttaggctgctaggggatgtgcagaagaagaactgcagtctctcaatcggcgatgcccgtatggaggacactggttcctacttcttcagagtcgagagaggtagagacgtaaagtattcctatcaacagaataaattgaatcttgaggttacagctctcatcgaaaagccggatattcactttctggaacccttagaaagtggccgacctactcgattgagctgttccctgcctggtagctgtgaggctggaccacccctgacattctcatggacaggcaacgcactgtcccctctcgaccccgagaccacaagatctagcgagctgaccttaactcccagaccagaagatcacgggacaaatctgacctgccagatgaagaggcagggtgcccaggtgactactgagcggactgtgcagctgaatgtaagttatgccccacaaacaattactatctttcgcaacgggattgctttggagatattgcagaatactagctacctccctgtcttggagggccaggcgctgaggctgctgtgcgatgctccttctaaccctccagcccacttgagttggtttcagggaagcccagccttgaacgctacgccaatatctaacaccggaattctggagctccgtagagtcaggagcgcagaagaagggggatttacatgtcgggctcagcatccacttggctttctgcagatctttctgaatctcagtgtttattctttgcctcagctactgggcccaagctgcagctgggaggctgaaggcttacattgtaggtgcagtttcagagctcggccagcaccctcgttgtgttggagactggaggagaaacccttggaaggcaactcatctcagggaagctttaaggtgaacagtagctcagcaggcccatgggcaaacagcagtctaatactgcacggcggtctatcttccgacctcaaagtgtcatgcaaggcatggaatatctacgggagccagtctggctccgtccttcttctgcagggtcggtcaaacctcgggactggcgttgttcctgcagcattggggggagccggagtgatggcactcctgtgtatatgtctgtgcctcattttctttttaattgtcaaggcgagaagaaaacaggccgctggcagaccggaaaaaatggacgacgaagaccccattatgggaacaatcactagcggctcaagaaagaaaccctggcccgacagccccggtgatcaggcatcacctccaggcgatgcccctcccttggaggagcaaaaggaattgcattacgcgtctctgtctttctcagagatgaaaagcagggagccgaaagaccaggaagctccctccacaacagaatacagcgagatcaaaacatcaaaatag

SEQ ID NO: 226448 - DNA, 558 bp, synthetic construct
  misc_feature 1..558: note = Description of Artificial Sequence: Synthetic coding sequence
  source 1..558: mol_type = other DNA
atgttcagggaggtgtttgctgacgaggaccctgccacatatgtgtgggatggcaattatcatcaaccctgggagcctgctgctgcgggagcagtgggagccggagcttatagggaagtcgaggctgaagaccccggaagactggcggtggaagctcttgtccggactcgacgctgcgtctgcgtcgcccagcggtggggagggaaacgcgaggtcatgtacactgctttcaaagcccttggagatagcgttgattatgtgcagttttgtagagtgtgcgactctgatacaaggttagacccgatggcactattggaactggtgagggtgctcgatgaggacccgagggtgggcgctgtgggcggtgacgtgcgaatccttaatcctctcgattcctgggtctccttcctgtctagtttacggtattgggtcgcctttaacgtggagagagcatgtcaatcctatttccactgcgtgtcctgcatctccggtcctctgggcaccccaccaggacctgccgctacacagaggcgaccaagaccatcctgtggaggatag

SEQ ID NO: 226449 - DNA, 645 bp, synthetic construct
  misc_feature 1..645: note = Description of Artificial Sequence: Synthetic coding sequence
  source 1..645: mol_type = other DNA
atgtttcgtgaggttttcgctgacgaggaccccgctacctatgtctgggacggtaactatcaccaaccatgggaacccgctgcagctggagctgtgggcgctggtgcttacagggaggtggaagctgaggatcctggcaggctggccgtcgaggctctggttcgcacacggagatgtgtttgcgtggcccagcggtggggaggcaagagagaggtcatgtacaccgcctttaaagccctgggagacagcgtagactacgtccaggtatgcgacagcgataccagactggatcccatggcgttgttagagctcgttcgggtcttggatgaggaccccagagtcggtgccgtagggggtgacgttcgcatcttgaaccctttagactcttgggtaagtttcctgagttccttgcggtattgggtcgcgtttaacgttgagcgcgcatgtcaaagttactttcattgtgtgtcatgtatcagcggaccactggagtcctgccccggtcctcgggagcacgccatgatgcccagtttcttagcccctgtccaggtgcacttgcaagtcccgcttctgctgagagatgccctggtgctgcccgcagtcgcggaaccagcagatactctggtgcaggtcgtcctaccatag

SEQ ID NO: 226450 - DNA, 1734 bp, synthetic construct
  misc_feature 1..1734: note = Description of Artificial Sequence: Synthetic coding sequence
  source 1..1734: mol_type = other DNA
atgcggcaggacgctcctaaaccaacgcccgcagcctgtagatgttccgggctcgcacgccgtgtactcacaatcgccttcgctcttctcatcctcggtctcatgacgtgggcgtacgctgcaggcgtgccccttgcctccgatcggtacggcctgctcgcttttggattgtacggggcattcctgtctgctcacctggttgcccagagtcttttcgcatacttggaacacaggcgagtcgcggctgccgcaaggggcccattagacgccgctaccgcacggtccgtagcattaactattagcgcctaccaggaagaccccgcttacctacgccagtgtttggcaagcgcacgtgctttactgtatcccagggcccgtttgagggtcctaatggttgtggacgggaacagagctgaggacttatacatggtcgacatgttcagggaggtgttcgctgatgaagatccagctacatacgtgtgggacggaaattatcaccaaccatgggaacctgccgcagccggagccgtaggagcaggcgcttatcgggaagtggaagcagaagatcctggaagattagccgtggaggccctcgttcggacccgtcggtgtgtgtgcgtggcccagagatggggcggaaagcgcgaagtgatgtacacggcatttaaggccctgggtgattcagtggattatgttcaggtctgcgattccgatacacgcctagaccccatggctctcctggaactcgttcgggtcctagacgaagaccccagggtaggggctgtgggcggagatgtgagaatactaaatccgctggacagttgggtttcttttctgagtagcctgcgttactgggtggctttcaatgtagagagggcgtgccagtcttacttccattgcgtgtcatgtatttccggacctttgggcctctaccgtaacaatctactgcagcagtttctggaagcctggtacaaccaaaagtttctgggtactcactgtacatttggtgatgatcggcatttgaccaacagaatgttgagcatgggttacgccactaaatacacctcccggtcacggtgttactcagaaactcctagctccttcctcaggtggctgtcccagcagacgagatggagcaagtcctattttcgggagtggctgtataacgctttatggtggcaccgccatcacgcttggatgacttacgaggccgttgtctccggactgtttcctttttttgtggccgctaccgtgctaaggttgttctacgcgggaagaccatgggccctcctctgggttctgctctgcgtgcagggggtcgcattggccaaggcagcatttgcggcatggctacggggatgtctgcgaatggtactccttagcctctatgctccattgtacatgtgtgggctacttccagcaaaatttctggccctcgtaactatgaaccagtcgggatggggcacttcagggcgacggaaactcgcagccaactatgtccctcttctccctttggcgctctgggcactcctgctgcttgggggtctggtcagaagtgtcgcacatgaggcaagagctgactggtccggtccctccagggccgcagaggcataccatttagccgctggggctggcgcatacgttggttattgggttgcaatgttaaccctgtactgggtcggcgtgaggagactgtgtaggcggcgtacaggcggataccgcgtccaagtatag

SEQ ID NO: 226451 - DNA, 1659 bp, synthetic construct
  misc_feature 1..1659: note = Description of Artificial Sequence: Synthetic coding sequence
  source 1..1659: mol_type = other DNA
atgcactgtgaacgttttctttgcatactacggataattgggacaaccctcttcggggtaagtctgttgcttggaattactgcggcatatattgtgggctaccaattcattcagacggataactattacttctccttcgggctgtacggcgcattcctcgcaagccatctgataatccagagcctgtttgcatttctggagcacaggaaaatgaagaagagcctcgagacccccatcaaactcaataagacagtggccttgtgcatcgctgcctaccaggaggatccagactatcttcgtaagtgcctccaatccgtgaagagattaacctacccagggataaaggtggtgatggtaatcgacggcaacagcgaggacgacctttacatgatggacatctttagcgaggttatgggaagggataagagcgccacgtacatttggaagaataactttcacgagaagggcccaggcgagaccgacgaatcacataaggagtctagccagcacgtgacccaactggtgctttccaacaagtcgatctgtatcatgcagaagtggggaggaaaacgcgaggttatgtataccgctttcagagccctggggaggtcggtggactatgtgcaggtatgcgattccgacaccatgctcgatcccgcatctagtgtcgaaatggttaaggtgttagaggaagatcccatggtgggtggagtgggcggtgatgtacagatcctgaacaagtatgatagctggatttccttcctttccagcgtgaggtattggatggccttcaacatagagagagcatgccagagttatttcggatgtgtgcagtgtatctctggaccactgggcatgtaccgaaattccctgctgcacgagtttgttgaggactggtataatcaagagttcatgggaaaccaatgttcttttggcgacgacaggcacttgacaaatagagtgctcagcctggggtacgctacgaaatacacagcccgtagcaaatgcctgactgagaccccaatcgagtaccttagatggttgaatcagcagacccgctggtctaaaagttatttcagggagtggctgtataatgctatgtggttccacaagcaccatctgtggatgacttacgaagcaattattactggcttcttccccttttttctcattgcaactgtcatccagctgttttataggggcaagatctggaacatcctcttgttcctgctcaccgtacaactagtggggttgattaaaagctcttttgcatcgtgccttagaggaaatattgtgatggtgttcatgtccctctactccgtgctgtacatgagctccctgctgcccgcaaagatgtttgcgattgcaactattaataaggccggatggggcacctcgggtaggaagacaatagttgtgaatttcattgggctgattcctgtgagcgtgtggttcactatcctgctgggtggtgtcatcttcacgatttataaggagtcaaaacgcccattcagcgagtctaagcagaccgtcctcatcgtgggaacactgctgtatgcctgttactgggtgatgctgctgacactgtatgtagtgttaattaataagtgcggtcggcgtaaaaaggggcagcagtacgacatggtactcgatgtctag

SEQ ID NO: 226452 - DNA, 951 bp, synthetic construct
  misc_feature 1..951: note = Description of Artificial Sequence: Synthetic coding sequence
  source 1..951: mol_type = other DNA
atgcattgcgagcggttcctctgtatcttgagaatcattggcaccactttattcggcgtgagtctactcctcggcatcaccgcagcctatatagtgggatatcagtttattcagacagataactactacttttccttcgggctgtacggagcatttctggccagccacctgattatacagagccttttcgccttcctggaacacaggaagatgaaaaagagtttggaaacacccattaagctaaataagacagtagccctttgtatcgcggcatatcaggaggatcccgactatctgcgcaagtgcctgcaatctgtgaagaggcttacataccccggtatcaaggtggttatggtcattgatgggaacagtgaggacgatctctacatgatggacatctttagcgaagttatggggagggacaaaagtgctacgtacatctggaaaaataactttcatgaaaagggtcccggagagaccgatgagtcacacaaggagtcttctcaacacgtcactcagctggtgctgtccaataagtccatatgcatcatgcaaaagtgggggggtaagcgcgaagtcatgtatacggccttcagggccctgggacggtctgttgactatgttcaagtgtgtgactctgatacgatgctggaccctgctagcagcgttgagatggtcaaggtgttagaggaagatcctatggtgggcggagtggggggagacgtgcagattcttaataaatacgacagctggatcagcttcctgtccagtgtgcggtactggatggcctttaatatagagcgcgcttgtcaatcttatttcgggtgtgttcagtgtatcagtggtcctctaggcatgtatcgcaatagccttctgcacgtcctgacattcgcagttacacataataccctagtgccacttggcgcagtacagtattgcgggattaggtag

SEQ ID NO: 226453 - DNA, 1389 bp, synthetic construct
  misc_feature 1..1389: note = Description of Artificial Sequence: Synthetic coding sequence
  source 1..1389: mol_type = other DNA
atggctcaggtgtctatcaataatgactacagcgaatgggacctgtctacagatgcgggtgagagagcccgattgcttcagtccccttgtgtggacactgcaccaaaatccgagtgggaagcatcccccggaggcctggacaggggaactacaagtaccctgggggcaatctttattgttgtcaatgcatgcctgggcgcaggcctactgaatttccccgctgcattttcgacagctggaggtgtggcggctggaattgcactgcagatgggaatgctggtttttattattagcggcctggtgattctggcctattgtagtcaggcgagcaatgaacggacctatcaggaggttgtgtgggctgtgtgtggcaaactgacaggtgtcctgtgcgaggtggccattgcggtgtacactttcgggacctgcatagccttcctgattattattggtgatcagcaagataagataatcgccgtgatggctaaggagccagagggagcctccgggccttggtacaccgatcggaaattcacaatctctttgacagcttttcttttcattctgcccttgtctatccccagggagatcggattccagaaatacgcctcttttctgtctgtggtgggaacctggtacgtcacagccatcgtaatcattaagtatatttggcccgataaagagatgaccccgggtaacattctcacaaggccagcgagttggatggccgtgtttaatgccatgccaactatatgtttcggcttccagtgtcacgtttcatcagtgcccgtcttcaactctatgcagcaacctgaggtaaaaacctgggggggagtcgtgacagccgcaatggtgatagctctggccgtgtatatgggcaccgggatctgcgggttcctgactttcggcgctgcggtggatccagacgttctgctatcatacccaagtgaggacatggctgtcgccgtcgctagggcgttcataattttatctgtactgacctcatacccgattttgcatttttgtggacgcgcagtggtggagggcctgtggctgagatatcagggggtgcctgtagaggaggacgtcggccgtgagagacgtagacgagtactgcagaccctggtctggtttctgctcacccttctgctggcactgttcatacccgacatcggcaaggtgatcagcgtgatcggaggcctggctgcttgcttcatattcgtgttcccaggcctgtgtctcatccaggctaagctgtcagaaatggaagaggtcaagcccgcttcatggtgggtgcttgtgtcctacggggttcttttagtcacacttggcgcatttatatttggccaaacaaccgctaatgctatctttgttgatctccttgcctag

SEQ ID NO: 226454 - DNA, 1662 bp, synthetic construct
  misc_feature 1..1662: note = Description of Artificial Sequence: Synthetic coding sequence
  source 1..1662: mol_type = other DNA
atgccagttcagcttaccactgccttgagggtggtggggacatccctgttcgcacttgcggtcctgggcggaattctggctgcctatgtgaccggctaccaatttattcatactgagaaacactacctcagtttcggcctgtacggcgcaatcttgggactgcatctgctcatccaaagcctctttgccttcttagagcatcgcagaatgcggagagcagggcaggcgttaaagcttccctccccccgacgcggaagcgtggccctctgcattgctgcttaccaagaagatcctgactacttaagaaagtgtctaagatctgctcagcgtatcagcttccctgatcttaaagtggtgatggtcgtggatggtaatcgacaggaagacgcgtacatgcttgacatatttcacgaagttctggggggaacggagcaagctgggttttttgtgtggcgttctaattttcatgaggctggggaaggagaaaccgaggcctccctgcaggaaggtatggaccgtgtgcgtgatgtcgtcagagctagcaccttttcttgcatcatgcagaagtggggtggtaagcgggaggtcatgtacactgctttcaaagccctgggggatagtgtggactatatccaagtgtgtgacagcgataccgtgctggacccagcttgcacaattgagatgctcagagtccttgaagaagacccccaggtgggcggagtaggtggtgatgtgcagattctgaataaatatgactcctggatttcattcctttcctctgtgcggtactggatggcattcaacgtggaacgggcttgccagtcttactttggttgtgttcagtgtatttctgggccactgggtatgtatcgaaactccctgctccagcagttcctggaggactggtatcatcagaaattcctgggtagcaagtgtagtttcggcgatgaccgccaccttaccaaccgtgtcctatccctgggatatcggaccaaatataccgctcggtctaagtgccttacagagacgccaacaaagtaccttagatggctaaatcagcagacaagatggagcaagagctatttcagagagtggctctataattctctgtggtttcacaaacaccacctgtggatgacttatgagagtgtggtaacgggctttttcccatttttcttgatcgcaacagtcattcagctgttctatcgagggaggatttggaatattttgctcttcctcctcaccgttcaactggttggcatcattaaggccacatacgcctgtttcctccggggtaatgcagagatgatatttatgagtctgtatagtctcctttatatgagctccctacttccagcaaagatctttgcaattgccactataaacaaatccggctggggaacgtcagggagaaaaacgatcgtggtgaattttatcggtctcatccctgtcagcatctgggtagctgtgctgctgggtggtctagcgtataccgcttattgtcaagatctgttctccgaaactgagttggcttttttggttagcggggcaatactgtatggatgctactgggtggcacttctgatgctttacctggccataatcgctcgcagatgcggaaagaaaccagagcagtatagtttggctttcgcagaggtctag

SEQ ID NO: 226455 - DNA, 1308 bp, synthetic construct
  misc_feature 1..1308: note = Description of Artificial Sequence: Synthetic coding sequence
  source 1..1308: mol_type = other DNA
atggccgcacaccttctgcctatctgcgcactctttctcactctgctggatatggcacaaggctttcggggacctctcctccccaaccgcccatttaccacggtgtggaacgctaatacacagtggtgtctcgagcgacatggtgtggatgtggatgtaagtgtctttgacgttgtggcaaatccaggacagaccttcagggggccagacatgaccatcttttatagctcccaactcggtacttatccatactatacgcctacaggagaacccgtttttggaggcctgcctcagaatgcatcgctgattgctcacctggctcgaacctttcaggacattctggccgcaatccccgctcccgacttctcaggccttgccgtcattgactgggaagcctggaggccgaggtgggcttttaactgggacaccaaagacatttacagacagcggagcagagccctcgttcaagcccaacacccggattggcctgcacctcaggttgaggccgtggcacaggaccagttccagggagccgcaagagcttggatggcaggcaccttacaactcgggagagccctgaggcccagaggcctctggggtttttacggcttccctgactgttataactatgactttctctccccgaactacaccggccaatgtccatccggaatccgggctcaaaacgaccaattaggctggctttggggccagtcacgcgcactataccccagcatttatatgccagccgtgcttgaggggacaggaaaaagtcaaatgtacgtgcagcatagagtcgccgaggcttttcgggtcgcagtggctgcgggtgaccccaacttacctgtgttgccttacgtacagatcttttatgacacaaccaaccatttcctgccactggatgagcttgagcattccctaggagagtcggccgctcaaggggctgcaggcgtcgttctgtgggtcagctgggaaaacacccgcaccaaagaaagctgtcaagccattaaggaatacatggacaccaccctgggcccttttatcctcaatgttacatctggtgcactgctgtgttcacaggccctttgttcaggtcatgggcgttgcgtccgtcgaactagccatcccaaggccctgctgttattgaaccctgctagctttagtattcagcttacccccggaggcggacccctctcgctgaggggagccctttctctggaagatcaggctcagatggcagtcgaattcaaatgcagatgctaccccggatggcaagcaccctggtgcgaacggaagtccatgtggtag

SEQ ID NO: 226456 - DNA, 1308 bp, synthetic construct
  misc_feature 1..1308: note = Description of Artificial Sequence: Synthetic coding sequence
  source 1..1308: mol_type = other DNA
atggcagcccatttgttgcccatttgtgctctattccttaccctcctggatatggcccaaggcttccggggaccactcctgccaaaccgaccttttacaacggtgtggaacgccaacactcagtggtgcctggaaaggcacggagtcgacgtagacgtctctgtattcgatgttgtggctaatccaggtcagactttccggggaccagatatgacaattttttactcctcacagctgggcacatacccttactacactccaacgggtgagcccgtgtttggcggattgccacaaaatgcctccttgatcgcgcacctcgcaaggacttttcaagatatcctggccgctattcctgccccagatttctccggtttggccgtcattgattgggaagcatggcggcctcgctgggccttcaattgggacactaaagatatttatcggcagcgcagtagagctttagtccaagctcagcatcctgactggccggctcctcaggtggaggccgtggcgcaggaccagtttcaaggcgcagccagggcttggatggctgggactctgcagctgggcagagctctccggccaagaggcctgtggggcttttatggctttcccgactgctataattatgactttctgagcccaaattacacgggacagtgtcccagcggtattcgagctcaaaatgaccaactgggatggttgtggggtcagagccgcgcactgtacccgtctatctatatgcctgcagtgctggaaggtacggggaaaagccagatgtacgttcaacaccgggtagccgaggccttccgggtggcggtggctgctggcgatcctaacctgcccgtgctgccctatgtgcagattttctacgacacaaccaaccattttctacccctggatgagttagaacacagcctgggcgagtcagccgctcaaggcgctgctggcgtagtgctttgggtgagctgggaaaacactcggactaaggagtcttgccaggcaatcaaggaatatatggataccacattgggacctttcattcttaacgtaacctcaggggcactgctgtgcagccaggccctctgtagcggccatggaagatgtgtgaggcgcacaagccatcccaaagcacttctgttgctaaaccccgcatccttttctatccaattgacacccggtggagggcctttgagcctgaggggagccctgtcactggaggatcaagcccagatggcggtagagtttaagtgcagatgctaccccggttggcaggccccatggtgtgagcggaagtcgatgtggtag

SEQ ID NO: 226457 - DNA, 1218 bp, synthetic construct
  misc_feature 1..1218: note = Description of Artificial Sequence: Synthetic coding sequence
  source 1..1218: mol_type = other DNA
atggcagcccatctcctgccaatttgtgccctgttcctcacccttctggatatggcccagggcttcaggggtccgttgctgccaaaccgcccatttacaaccgtatggaacgccaacactcaatggtgccttgagaggcacggggtggatgtggacgtaagtgtcttcgacgtcgtagcaaatccgggacagacatttcgtggacccgatatgaccatcttttacagttcccagctagggacatacccctactatactcctacaggtgaaccagtgttcgggggtcttcctcagaacgcttccctgatcgcccatttggcaaggacttttcaagacatattggcagcaatacctgctcctgactttagcggactagccgtgatcgattgggaggcttggcgccctcgatgggcatttaactgggataccaaggatatatacaggcaacgttcacgggctctcgtgcaggctcagcacccagactggccagcgcctcaagtcgaagctgtagcacaggatcagtttcagggggcagccagagcatggatggccggaacattgcaattgggtagggcactcaggcctcgtggactctgggggttctatggctttccagattgttacaattacgactttctgagccctaactatactggccagtgtccttctggaatccgcgcacaaaacgaccagctcggttggttgtggggtcagagtagagcactatacccttcgatctacatgccagctgtgctcgagggcacaggtaaaagccagatgtacgtgcagcatcgggtggcagaggcattcagagtcgccgttgccgctggcgaccccaatcttcccgtccttccatatgtacagatcttctacgatactacaaaccattttctgccactcgagagctgccaagctattaaggagtatatggataccacgttgggtccattcattttgaatgtcacaagtggagctctgttgtgtagccaggccctctgtagtggtcacggtcgctgtgtgcgcaggacaagccaccctaaggcactgcttttgctgaatcccgcttccttcagcatccaacttactcctgggggaggcccactgtccctgcggggtgcactgagtctcgaggatcaggcgcagatggccgtcgagtttaagtgcaggtgttatccaggctggcaggccccatggtgcgagcgcaagagcatgtggtag

SEQ ID NO: 226458 - DNA, 1308 bp, synthetic construct
  misc_feature 1..1308: note = Description of Artificial Sequence: Synthetic coding sequence
  source 1..1308: mol_type = other DNA
atggcggctcacctgcttccaatttgcgctttgtttctgaccttgctggatatggcacagggatttcggggacccctgttgcctaatcgcccattcactacagtgtggaatgctaacacccagtggtgtcttgagaggcatggcgtggacgtagacgtgtctgtgttcgacgtggtcgctaatcccggtcagacattcagaggccctgatatgacaatcttttatagctcccagcttgggacttatccatactacacccccacaggagagccagtattcggaggcctcccccagaatgcatccctcatcgcccacctggcgagaactttccaggatatcctggctgctatccccgcacctgacttcagcgggttggctgttattgactgggaggcctggcgcccaagatgggcctttaattgggacacaaaggatatttatcgacagcggagtcgcgcactggtgcaggcacagcacccagattggcctgcccctcaagtggaggcagtggcccaagaccagtttcaaggggctgcgcgagcctggatggccggtactctccagctgggtcgagcccttcggcctcgtggactgtggggtttctatggattccccgattgctacaattatgatttcctgtcccccaactacactggacagtgcccttcaggtatcagggctcagaatgaccagctgggttggctgtggggacagtctagagcactctacccgtctatttatatgcctgcggtgctcgaaggaacaggaaaaagtcagatgtatgtgcagcaccgggtcgcggaagcctttcgagtggctgttgctgcaggggacccgaacctgccggtgttaccctacgtgcagatcttctacgacacgaccaaccactttctgccgcttgatgaactcgagcattccctgggtgagagcgctgcccagggcgctgccggtgttgttctttgggtgtcgtgggagaatacaaggacaaaggagtcgtgtcaagcaatcaaggaatacatggacaccactctgggaccctttattcttaatgtgactagcggggctctcctgtgtagccaggctctgtgctcgggacatgggcgttgcgtccgcagaacttcccatccaaaggcgctgctcctgctcaacccagccagctttagcattcagctgaccccgggagggggtcccctctccctgagaggtgccctgtccctcgaggaccaggcacagatggcagttgagtttaagtgcagatgttatcccggatggcaggcgccttggtgcgaacggaaaagcatgtggtag

SEQ ID NO: 226459 - DNA, 312 bp, synthetic construct
  misc_feature 1..312: note = Description of Artificial Sequence: Synthetic coding sequence
  source 1..312: mol_type = other DNA
atggctgcccatctgctgcctatctgcgccctttttctgacactcctggacatggcacagggctttagggggccacttctacctaaccgccctttcaccaccgtctggaacgccaacacccagtggtgtctagaacggcacggtgtggatgtggatgtgagcgtctttgatgtagtggctaaccctggccagactttccgagggccagatatgactatcttttactctagtcagctgggaacttacccttactatactcccaccggagagccagtgtttggcggactgccacagaatgctagtctcatatag

SEQ ID NO: 226460 - DNA, 531 bp, synthetic construct
  misc_feature 1..531: note = Description of Artificial Sequence: Synthetic coding sequence
  source 1..531: mol_type = other DNA
atgtatgtccagcaccgcgttgctgaggcctttagggtcgccgtggcggctggagaccctaatttacccgtgctcccttacgtccagattttctacgatacgaccaatcatttcctaccacttgacgagctggagcactccctgggggagagcgcagcgcagggcgcagcgggagtggtgttgtgggtcagttgggagaataccaggaccaaagagtcctgccaagcaattaaagagtatatggacacaaccctggggcctttcattttgaacgtgacatccggcgctctgctatgcagccaggccctgtgcagcggacacgggaggtgtgtgcgacgcactagccaccccaaagccttgctcctcttgaaccccgcatccttttcaatccagctgacgccagggggaggcccattatctcttcgaggagctttgtcactcgaggaccaggcccagatggccgtagagttcaagtgtaggtgctaccccggttggcaggcaccgtggtgcgaaaggaaaagtatgtggtag

SEQ ID NO: 226461 - DNA, 210 bp, synthetic construct
  misc_feature 1..210: note = Description of Artificial Sequence: Synthetic coding sequence
  source 1..210: mol_type = other DNA
atggctgcgcacctcctgccaatttgcgcgctctttcttaccctgctggatatggcgcaaggatttaggggtcccctgcttcccaatagaccatttacaacagtctggaatgccaacactcagtggtgtctagagagacacggggtcgacgtggacgtttccgtcttcgacgtggtcgcaaacccgggtcagacgttcagaggaccctag

SEQ ID NO: 226462 - DNA, 762 bp, synthetic construct
  misc_feature 1..762: note = Description of Artificial Sequence: Synthetic coding sequence
  source 1..762: mol_type = other DNA
atggccggtacattgcaactcggtagagcactgcggccacgcggactgtggggcttttacgggtttcctgactgttacaattatgattttttgagcccaaattataccggacagtgtccttctggcatccgggctcagaacgaccagctggggtggctctggggacagagccgtgccttatacccctctatttatatgccagcagtgctggagggtactggaaaatctcagatgtacgtgcaacatagagtagctgaagcctttcgggttgcagtggctgccggagacccaaatttaccagtgctgccatatgtacagatcttttatgacaccaccaatcacttcctacccctggatgaactggagcattcactcggagaaagcgccgcacagggcgctgccggagtcgttctttgggtatcttgggaaaacacccgcacgaaggaaagctgtcaggccattaaggagtatatggatacgaccctggggccattcatcctaaacgtgacttctggagccttgctttgtagccaggcactgtgtagtggccatggccgatgcgttcgcaggacaagccatcccaaagctttgcttctgcttaacccggcaagtttttccatccagctgacacctggtgggggacctctgtcactgcggggagcgctttccttggaggaccaggcccagatggccgtggagttcaaatgtcgctgttatcccggttggcaggcgccatggtgcgagcggaaaagtatgtggtag

SEQ ID NO: 226463 - DNA, 1422 bp, synthetic construct
  misc_feature 1..1422: note = Description of Artificial Sequence: Synthetic coding sequence
  source 1..1422: mol_type = other DNA
atgcgcgcaggccctgggcctaccgtgaccctggcattagtgctcgctgtgtcttgggcaatggaactcaaaccaactgctcctcctatcttcaccggtcgaccatttgtcgttgcctgggacgtcccaacccaggattgcggccctcgcctcaaggtccctttggacttaaacgccttcgatgttcaagcgtctccgaacgaaggatttgtcaaccagaacatcacaatcttctatcgagaccgactagggttgtatcctaggtttgatagcgctggaaggagtgtccatggaggagtgcctcagaacgtgagcctgtgggcccataggaaaatgctccagaagagagtcgagcactatatacgtactcaggagtctgccggactcgccgtcatcgactgggaggactggagacctgtctgggtgaggaattggcaggacaaggacgtctatcgccgtctcagtcgtcagcttgttgcctcacgacaccctgattggccacccgacagaatagtcaagcaagctcagtacgagtttgaatttgcagcgcagcaattcatgcttgagaccctcaggtatgtcaaagctgttcggccacgacacctctggggattttaccttttccccgactgctataaccacgactatgtgcaaaattgggagtcctacaccggacgatgcccagatgtggaagtggctcgcaacgatcaactcgcctggctgtgggccgaatcaaccgcgttgttccccagtgtatacctcgacgagactcttgccagcagtcgccatggtagaaatttcgtatcatttagagtgcaggaggccctgcgagttgcaaggacacaccatgccaaccacgcactgcctgtatatgtgtttacacggcctacttactctagacgtcttacaggcctaagcgaaatggatctaataagcacaataggggagtcagccgctctcggagcggcaggcgtcattctttggggcgacgcagggtacaccacttccaccgagacgtgccagtacttgaaggattaccttaccaggctgctggtgccctacgtagtcaatgtgagctgggcgactcagtactgtagtcgtgctcagtgccatggccacggacgttgcgtaaggcggaatccatccgctagcacctttctgcacctgtccacgaatagctttagactggtgccaggccatgcgcctggcgaaccgcaattacggcctgtgggggagttgtcctgggccgacattgaccacctccagacacattttcgatgtcagtgctatctggggtggtccggggaacagtgtcagtgggaccaccggcaggccgctgggggtgcatctgaggcctgggcaggcagtcacttaacaagtcttctggcgttagccgcactcgcattcacctggacgctatag

SEQ ID NO: 226464 - DNA, 1422 bp, synthetic construct
  misc_feature 1..1422: note = Description of Artificial Sequence: Synthetic coding sequence
  source 1..1422: mol_type = other DNA
atgagggcaggcccaggtcccactgtgactttggccttggtcttggcagtgtcctgggctatggagctcaagcccacagcccctcctatcttcaccggacgtccgtttgtagtggcgtgggatgtccctacccaggattgtggtccccgtctcaaggtccccctggatctaaacgcatttgatgtccaagccagccctaatgaaggattcgttaaccaaaacatcactattttctaccgggacagactagggctgtacccacgcttcgactccgcgggtcggtccgttcacggcggagtacctcagaatgtctccctctgggcccatagaaaaatgctacaaaagagggttgaacactatattagaacgcaggagagcgctgggctggctgtgattgattgggaggattggcggcctgtctgggtacgaaattggcaggacaaagatgtctatcggaggctgtcaaggcagcttgtggcatcaaggcaccccgattggcctccagaccggatcgtcaaacaggcccagtatgagtttgagttcgccgcacagcagtttatgctggagacactccgatacgtgaaagctgtgagacccagacacctgtgggggttctatctttttccagactgctataatcatgactacgtgcagaattgggagagctataccggaaggtgtccagacgtggaggtggcacggaacgaccaattagcgtggttatgggccgaatccacagctctgttcccatcggtttaccttgacgaaacactcgcttcgtctagacatgggcgaaattttgtatccttcagggtgcaggaagccctacgagtggccaggacacaccacgctaaccatgctcttccggtatatgtcttcacccgtccaacatacagtcgcagactgacgggtttaagtgagatggatctgatatccaccataggggagagcgccgcattaggggctgccggtgtcatcctgtggggggacgcaggctacactacatctactgaaacatgccagtacttgaaggactatctgacaaggctgctggttccctacgtcgtgaatgtgagttgggccacccagtattgcagccgagcacagtgccatgggcatggaaggtgcgtgaggagaaatcccagtgcctcaaccttcttgcacctaagcactaacagctttagactggtccctggccatgctcctggcgaaccccagctgagaccggtgggggagctgagttgggcagacattgaccatcttcaaacccacttcagatgccagtgctacctggggtggtccggtgaacagtgtcagtgggaccacaggcaagctgccggaggcgcatctgaggcctgggccggttctcatttaacaagcctgctggctctggccgctctggcctttacctggactctctag

SEQ ID NO: 226465 - DNA, 147 bp, synthetic construct
  misc_feature 1..147: note = Description of Artificial Sequence: Synthetic coding sequence
  source 1..147: mol_type = other DNA
atgcgagccggacccggacctactgtgacgctcgccctggtattggcagtctcatgggctatggaattaaagcctacagcgcctccaattttcaccgggagaccattcgtggtggcctgggacgtcccaacacaggattgcggctag

SEQ ID NO: 226466 - DNA, 354 bp, synthetic construct
  misc_feature 1..354: note = Description of Artificial Sequence: Synthetic coding sequence
  source 1..354: mol_type = other DNA
atgagggccggaccagggccaactgtgaccttagcccttgtgctggctgtctcatgggccatggagctcaaaccaacagcacctccaatttttacggggaggcctttcgtggtggcctgggatgtccccacccaggactgtgggccacggctgaaggtccccctggatctgaatgcttttgatgtacaggcaagccccaacgaaggatttgtgaatcagaacattacaatcttttacagagatcgacttggactttatcctcgattcgactcggcaggtcgatcagtacacggaggagttcctcagaatgtgagcctctgggctcacaggaaaatgctccagaagagggtttag

SEQ ID NO: 226467 - DNA, 246 bp, synthetic construct
  misc_feature 1..246: note = Description of Artificial Sequence: Synthetic coding sequence
  source 1..246: mol_type = other DNA
atgcgcgcaggccctggacccaccgtgaccctggccctggtgctggccgtgtcttgggccatggagctaaaaccgactgccccacctatattcacgggcagaccattcgtcgttgcctgggatgttcctacccaggattgcggccctcgtcttaaggttcctctggacctcaacgcattcgatgtacaggccagtccgaacgagggatttgttaaccagaatataacgatcttctaccgcgattag

SEQ ID NO: 226468 - DNA, 231 bp, synthetic construct
  misc_feature 1..231: note = Description of Artificial Sequence: Synthetic coding sequence
  source 1..231: mol_type = other DNA
atgcgggctggccctgggcctacagtcactctggctctggtgttggccgtcagctgggctatggaattgaagcccaccgcccctcctatcttcaccggccgtccgtttgtagtggcctgggatgtcccgactcaggactgcgggccacggttgaaagtcccactggaccttaacgcattcgacgtccaggcaagcccaaatgaagggttcgtcaaccagaacatcacttag

SEQ ID NO: 226469 - DNA, 1422 bp, synthetic construct
  misc_feature 1..1422: note = Description of Artificial Sequence: Synthetic coding sequence
  source 1..1422: mol_type = other DNA
atgagagctggcccagggcctaccgtgaccctcgccttagtcttagccgtctcctgggcgatggaactgaagcctaccgcaccccctatttttaccggtagaccctttgtggtggcctgggatgtgcccacacaggattgcggccctcggctcaaagttcccctggatttaaatgctttcgatgtgcaggcgtctcctaacgagggatttgtcaaccaaaatatcaccattttctaccgagatcggctcgggttataccccaggtttgattctgctggccgaagcgtacacgggggagtccctcaaaatgtctccctgtgggctcacagaaaaatgctgcagaagagagtggagcactacatcagaacccaggaatcggccggacttgcagtcatcgattgggaggactggcgaccggtgtgggtgcgtaactggcaagacaaggatgtttaccggagactcagtcggcagctggtcgcgtcaaggcacccagactggccccctgatagaatcgtgaaacaggctcaatacgagttcgagttcgccgcacaacaatttatgttggaaacactgaggtacgttaaggccgtgagaccacgtcatctgtggggtttttatctctttcccgattgctacaatcatgactacgtgcagaattgggaaagctataccggtaggtgtccagatgtggaggtggccaggaacgatcagctggcctggctgtgggctgagtcaaccgccttatttccatcggtttacctcgatgaaaccctagcttcctcgagacacgggcgaaactttgtgtctttccgtgtgcaagaagctctgcgggtggccagaacccatcatgcgaaccacgccttgcccgtgtatgtgttcacccgaccaacctacagtagaagacttaccgggctttctgaaatggatctcattagtactattggcgagagtgctgcactcggcgcagccggtgtaatcttgtggggagacgctggctacacgacaagcactgagacctgccaatatttgaaggactatctaacccggctactcgtgccctacgtggttaatgtctcctgggcaacacaatactgctctcgagctcagtgtcacgggcacggacggtgtgtcagaagaaacccaagcgcatctaccttcctccatttgtcaaccaacagtttcagattagtccctggccacgcccctggggaaccgcagctgcggcctgttggagagctgtcttgggcagatattgaccatctgcaaacacattttaggtgtcagtgctacctcggatggtccggggagcagtgccaatgggaccaccgtcaagccgctggcggtgcgtccgaggcttgggccggatcacatctcacctcactgctggcactggccgctttggctttcacctggaccctgtag

SEQ ID NO: 226470 - DNA, 1422 bp, synthetic construct
  misc_feature 1..1422: note = Description of Artificial Sequence: Synthetic coding sequence
  source 1..1422: mol_type = other DNA
atgagggctggtccaggtcccaccgtcactctagcacttgtgctcgcggtcagttgggccatggaattgaagccaactgctcctcctatttttacaggccgtccctttgttgtggcatgggacgttccaactcaagattgcggacccaggctcaaggtgcccctcgacttgaacgccttcgatgtccaggcctctccaaacgaaggctttgtgaaccagaacattactatcttttatagagaccgcctgggtctgtacccaagattcgactccgccggtaggtctgtccatggtggagtgcctcaaaatgtgagcctctgggcccaccggaagatgctgcaaaaaagagtggagcactacatacggactcaggagagcgcaggcctcgccgtaattgactgggaggactggcgtcccgtttgggtgagaaactggcaagacaaagatgtttaccggcgtctgagccggcagttagtggcttcacggcatcctgactggccacccgaccgcattgtgaaacaggcgcagtatgagttcgagtttgcagcacagcagtttatgttagaaactctccggtatgtcaaagcagtacggccaagacatctgtggggcttctatctgttccctgactgttacaatcatgactacgtgcaaaactgggaatcatatactggaagatgccccgacgtcgaagtggccaggaatgaccagctcgcctggctttgggctgaatccactgccctgttcccctcagtatacctggatgagacactagcgtcttccagacacggccgaaacttcgtgtccttccgcgtgcaagaagccctgagagtggcgcgtacacatcatgctaatcacgcactgcccgtttacgttttcaccagaccgacatacagccggagattgaccggcctctccgaaatggacctgatcagcacaattggagagtctgccgctctgggtgccgctggcgtgatcttgtggggggatgctgggtacacgacatccaccgaaacttgccagtacttgaaagactatctgaccagactgctggtgccatacgttgtcaacgtgtcatgggccacccaatactgtagcagggctcagtgccacggacacgggcgatgtgtaaggagaaatccaagcgcgtctactttcttgcacctgtccaccaatagctttcggttagttcctggccacgcacctggtgaaccccagctgagacccgtcggggagttaagctgggctgatatcgaccacctgcagacccacttcagatgtcagtgttaccttgggtggtccggagaacagtgtcagtgggatcaccggcaggctgccggtggggcatccgaagcttgggccggttcacatctcacttctctgctcgcgcttgcggcattagcctttacctggactctttag

SEQ ID NO: 226471 - DNA, 366 bp, synthetic construct
  misc_feature 1..366: note = Description of Artificial Sequence: Synthetic coding sequence
  source 1..366: mol_type = other DNA
atgcgggctggcccaggccctaccgtgaccctggccttggtgctcgctgtgagttgggctatggaactcaagcccactgcgcctccaattttcactggacgccctttcgtggtcgcatgggacgttcctacccaggactgcggtcccaggctaaaagtccccttggatctcaatgcttttgacgttcaggcttccccaaacgaaggtttcgtgaatcagaacattaccattttttacagagatagactgggcttatacccgagattcgatagtgcaggaaggagtgtgcacggaggggttccacagaacgtgtctctttgggctcataggaagatgcttcaaaaacgggtcgagcactacatctag

SEQ ID NO: 226472 - DNA, 1254 bp, synthetic construct
  misc_feature 1..1254: note = Description of Artificial Sequence: Synthetic coding sequence
  source 1..1254: mol_type = other DNA
atgactactcagctggggcctgccctggtcctgggggtggctctgtgcttagggtgtggtcagcctctgccgcaagtgcctgagcgcccattctccgtcttgtggaacgtgccatcagcacattgtgaagctaggtttggtgtgcacttacccctgaatgccttgggaattatagccaacaggggccagcacttccatggacagaatatgaccattttctacaagaaccagctggggctgtacccatatttcggacctcggggaacagcgcacaatggtggtatcccccaggccttaccgctcgatcggcacctcgccttggccgcttatcagatacatcacagcctgaggcctggttttgcgggacccgcagtacttgactgggaggagtggtgtcccctctgggccggaaactggggacgacgaagggcctaccaggcagcttcttgggcatgggcacagcaggtatttcccgacttggacccccaagagcagttgtacaaagcttacactggattcgaacaggcagcacgggcacttatggaggataccttacgagttgctcaggccttgaggccacatggcctgtggggcttttatcattatcctgcgtgtggtaacggatggcactcaatggctagcaactacaccggcaggtgtcacgccgctacactagctcgaaacacacagcttcactggctgtgggcagcatcatctgcgttattcccatccatatacttaccacccaggcttccacctgcacaccaccaggcattcgtgagacaccggctggaggaagccttccgcgttgcactcgtaggacaccgacaccccctgccagtcctggcatatgtcaggctcacacaccgcagaagcggtcgtttcttgtcacaggacgatctggtacaaagtattggagtgtctgcagctcttggcgcagccggagtcgtgctctggggcgacctgtctctgtctagctctgaggaggagtgctggcacctccacgactaccttgtcgacacgcttggtccttatgtaataaacgttacccgggctgctatggcttgttcccaccagcgctgccatggccacgggcgttgtgcacgcagagaccccggacaaatggaggcattcttgcatctgtggcctgacgggtctctcggggactggaaaagcttttcgtgccactgctattggggatgggcaggccctacatgccaggaacctcgccctggtcccaaagaagccgtctag

SEQ ID NO: 226473 - DNA, 1164 bp, synthetic construct
  misc_feature 1..1164: note = Description of Artificial Sequence: Synthetic coding sequence
  source 1..1164: mol_type = other DNA
atgaccactcaattgggtcccgcactcgtcctcggtgtcgccctgtgtctcggttgtgggcagccacttccacaggttcctgaaagacctttctcagtgctgtggaatgttccaagcgcacattgtgaagctcgctttggcgtccacctgccactgaacgctttaggtatcattgccaatcgcggtcagcacttccatggccagaatatgactatcttctacaagaaccagctggggctttacccttacttcggcccaagaggaacggcccataacgggggtattccacaggccctaccgttggaccgacacttggccctcgctgcataccagatccaccattccctgcggcctgggtttgccggacctgccgttcttgactgggaggaatggtgtcctctctgggcaggaaattggggccgtcgtcgtgcttaccaagcagccagttgggcctgggctcagcaggttttcccagacttggatccccaagaacaactctacaaagcctatactggctttgagcaggccgctagggcactgatggaagacacactcagagtggcgcaggcgttacgccctcacggattatggggcttctatcactatcctgcttgcgggaacggatggcatagcatggcctcaaactacacaggtaggtgccacgccgctaccctggcaagaaacacccagcttcactggctgtgggccgcatccagtgccctgttcccgagtatctacttacccccaaggctccctccagcccatcatcaggccttcgtgagacaccgactcgaggaggcctttcgtgtggctcttgtggggcatcggcaccctctgcctgtgcttgcatatgtgcgcttgacccatcgccgttcgggcaggttcttatcacaggaggagtgctggcatctgcatgactacctcgtggacacactcggaccatatgtgattaacgtgactcgcgcagccatggcctgttcgcatcagaggtgtcacgggcacggaagatgcgccaggcgcgatcccggtcagatggaagcatttctgcatctttggcccgacggatctctgggagattggaaaagtttctcgtgccactgttactggggctgggcaggcccaacctgtcaagagccgagaccaggaccaaaggaggcggtgtag

SEQ ID NO: 226474 - DNA, 507 bp, synthetic construct
  misc_feature 1..507: note = Description of Artificial Sequence: Synthetic coding sequence
  source 1..507: mol_type = other DNA
atgttgcccccagcgcaccatcaagcgtttgtgaggcaccggcttgaagaggccttcagagtggcgctagtaggacatcgccatcctctccctgtgctcgcatacgtaaggttaacccaccgtagatccggccgatttctttcccaggatgatctcgtgcagagcattggggtcagtgcggctctgggtgcggcaggagtcgtactgtggggcgacctgtcgctgtctagctccgaggaagagtgttggcacctacacgattatttggtagataccctgggaccctatgtcatcaacgtgacaagggctgccatggcttgttcacatcaaaggtgccacggccatggacgctgtgcccgacgagacccaggccagatggaggctttcctacacttatggccggatggcagcttaggagattggaagagcttttcctgtcattgttactggggatgggctggcccaacatgccaggagcccaggcctgggccaaaagaagctgtttag

SEQ ID NO: 226475 - DNA, 483 bp, synthetic construct
  misc_feature 1..483: note = Description of Artificial Sequence: Synthetic coding sequence
  source 1..483: mol_type = other DNA
atgacaacccagctgggccctgcactagttctgggtgtagcattgtgtctggggtgcgggcaaccgctcccgcaggtgcctgaaagacctttttccgtgctctggaacgtgccatccgcccattgcgaggctcgcttcggtgtgcatctcccactgaatgccctcggcataatagccaatcgcggtcagcacttccatgggcagaacatgaccattttttacaagaaccagctaggcctgtatccttattttggccctcgcggtactgcccacaacggagggattccgcaggcactgcccttggaccggcatcttgccctagcagcgtaccaaattcaccacagtctgaggcccggtttcgccggacccgctgtacttgattgggaagagtggtgccccctctgggccggaaactggggacgaaggcgagcctatcaggcggcttcatgggcgtgggcccaacaggtctttcccgacctgtag

SEQ ID NO: 226476 - DNA, 1164 bp, synthetic construct
  misc_feature 1..1164: note = Description of Artificial Sequence: Synthetic coding sequence
  source 1..1164: mol_type = other DNA
atgactactcagctaggccctgctcttgtcctcggagtagccttgtgtctcggctgtggccagccccttccccaggtaccagaacgcccatttagcgtcctgtggaacgtcccgtcagcacattgcgaagcaagattcggcgtgcacctacctctgaatgccctggggattattgctaatagggggcagcactttcatggtcaaaacatgaccatcttttataagaatcaactcggtctgtatccttactttggaccgaggggcactgcgcacaacggaggaatcccccaggcactgccccttgaccggcacttggcactggccgcttatcagattcaccacagcctccgccctggattcgcaggtcctgccgtcttggattgggaagagtggtgtcccttatgggctggcaactggggtcggaggcgcgcataccaggcagccagctgggcgtgggctcagcaagtgttccccgacctggatccccaggagcaactgtacaaggcttacacgggcttcgagcaagcagctcgcgcactaatggaggatactttgcgcgtggcccaagcactacgtccacacggactgtggggcttctaccactatcctgcgtgtggcaacgggtggcattcaatggcttcaaattacacggggaggtgtcatgccgctaccctcgcacgtaacactcagttacattggctttgggcagcaagcagtgcactctttccctccatttatttgcctccacgcctcccacctgctcaccaccaggccttcgtccgccatcgcctggaggaagcgttcagggttgctctggtgggacatcggcatcccctccccgtgttggcatatgtgagactgactcaccgccgatctggacgcttcctatcacaggaggaatgttggcatcttcacgattacctggttgacacactagggccatacgtgatcaacgtgacccgcgctgctatggcttgctcacaccagcgctgccacgggcatggcagatgcgcccgaagggaccccggacagatggaggcttttctccacctgtggcctgatgggtctcttggggattggaaaagtttctcctgccactgttactggggctgggcgggacctacgtgtcaggagccgagacctggaccaaaggaggcagtgtag

SEQ ID NO: 226477 - DNA, 417 bp, synthetic construct
  misc_feature 1..417: note = Description of Artificial Sequence: Synthetic coding sequence
  source 1..417: mol_type = other DNA
atgttacctcctgcccatcatcaggccttcgtcagacaccgacttgaggaggcctttagggtggcactggtgggacacaggcaccctctcccagtccttgcttatgtgcggctgacacacagacggtccgggcgttttctgagccaggaggaatgctggcatctgcacgactaccttgtggataccctgggaccctacgttattaacgtgacaagagccgctatggcctgctcacatcagcggtgccatggccacggaaggtgcgccagaagagatcccggacagatggaagcctttctgcacctgtggcccgacggcagcctcggcgattggaagtcattttcttgccactgctattggggctgggccggacctacgtgccaagagcccaggcccggacccaaagaggcagtatag

SEQ ID NO: 226478 - DNA, 1518 bp, synthetic construct
  misc_feature 1..1518: note = Description of Artificial Sequence: Synthetic coding sequence
  source 1..1518: mol_type = other DNA
atgagcagcgtgcaacagcagccacccccaccgaggcgagtgacgaacgtgggcagcctgctcctgacgccgcaagagaacgagagtcttttcacatttctcggaaaaaaatgcgtgactatgtctagcgctgtcgtgcagttgtatgcagctgacagaaattgtatgtggtccaaaaagtgctctggcgtcgcttgtctagtaaaagataatccccagcgcagttacttcctgcggatctttgacatcaaagatgggaaactgctgtgggagcaggagctctataataattttgtatataacagcccccgaggctactttcatacatttgctggcgatacttgtcaggtcgccctgaattttgcgaacgaagaagaggctaagaaatttcgcaaggctgttactgatctcctgggcaggagacaaagaaagagcgagaaacggagagatcctcccaatggacctaatcttcctatggctacagtagatatcaagaatcccgagatcaccacgaatcggttctatggaccccaagtcaacaatatatcccacactaaggaaaagaaaaagggcaaggccaagaagaaacggctcacaaaggcagatataggcacaccttccaatttccaacatatcggacatgtgggttgggatcctaacactgggtttgatctcaacaatctggacccggaattaaaaaaccttttcgatatgtgcggtatcagcgaggcacagttaaaagatagggagaccagtaaggtcatctacgactttatagaaaaaactggaggagtcgaggctgtcaaaaatgagctgcgcagacaggcccctccacccccaccgccttctcgtggcggaccgccacccccaccaccgccaccccataacagcggtccgcctcctccccctgcaagaggcaggggtgccccaccgccacctccttcgcgggcaccgaccgccgctcctccacctccccctccatcaagaccatcggtagccgtcccaccacctcctccgaatcgtatgtacccccctccacctcctgccttgcctagctccgctccttccggccctccccctcctccgccttccgtcctgggagtcggaccagttgcaccaccgcctccgccacccccacctccccctcccggaccacctcccccacccggactgcctagcgatggagatcaccaggtccccaccaccgcagggaacaaggcggctctcctcgatcaaatcagggaaggggcacagctcaagaaggtcgaacagaactcaaggccggtctcctgttccggacgagatgccttgctggatcagattcgccagggcatccagctgaaaagtgttgccgacggacaggagtccaccccccctacccccgcacccactagcggcatcgtgggcgcactgatggaggttatgcagaaaagaagcaaggccattcactcatcagacgaagatgaggacgaggacgatgaggaggactttgaggatgatgatgaatgggaggactag

SEQ ID NO: 226479 - DNA, 1446 bp, synthetic construct
  misc_feature 1..1446: note = Description of Artificial Sequence: Synthetic coding sequence
  source 1..1446: mol_type = other DNA
atgaaggttcttagtgagggccagctgaagctctgtgtcgtacagcctgttcacctaacctcttggctgctcatattctttatcttaaagtccatctcttgcctgaaaccagctcggcttcccatttatcagcgtaaacctttcatcgctgcgtggaacgctcctaccgatcagtgtcttataaaatacaacttgcgccttaacctcaagatgttcccggttataggaagcccactggctaaggccagaggtcagaatgtgaccattttctacgtgaatcgcctcggttactatccgtggtataccagtcagggagtacctatcaatggtggcctccctcagaacatcagcctgcaggttcaccttgaaaaggccgatcaagatattaactactatataccagccgaggacttctcaggcttggcagtcattgactgggaatattggcggcctcagtgggcccgaaactggaactccaaggatgtatatagacagaagagccggaagctcatctccgacatgggaaagaatgtgtccgctactgatatcgaatacctggccaaagtcacattcgaggagtccgctaaggcgttcatgaaggagactattaagctagggattaagtctcggccaaaggggttgtggggctactatctgtatcctgattgccacaactataatgtctatgccccaaactatagcgggagttgtccggaggacgaggtgctaagaaacaacgaactgagctggctgtggaactcaagcgccgctctctacccaagcattggagtgtggaaatctctcggcgattcggagaacattctgagattctcaaagtttcgggtgcacgagtccatgcgtatcagtaccatgacttcccatgattatgcccttcccgtcttcgtgtacactcgcttgggttatcgcgacgaacccctattctttctcagcaagcaggatttggtgtcaaccataggggaaagcgcggcactgggagctgcaggaattgtgatctggggggatatgaacctgactgcctcgaaggctaactgcacaaaggtaaaacagtttgtcagctctgatcttggatcctatatcgcaaatgtaacacgtgctgcagaggtctgctctctccacctgtgccgcaataacggcaggtgcatcaggaagatgtggaatgccccttcctatctgcatctaaatccagccagctaccatattgaggcctcagaggatggcgagttcaccgttaaaggaaaagcttccgacaccgatcttgccgtgatggctgatacattttcctgccactgttatcaggggtacgaaggcgctgattgtcgcgagatcaaaaccgcagatggctgttcaggtgtttctccaagtcccggaagtcttatgacactgtgcttgctgctgttggcatcatataggagcatccagctgtag

SEQ ID NO: 226480 - DNA, 138 bp, synthetic construct
  misc_feature 1..138: note = Description of Artificial Sequence: Synthetic coding sequence
  source 1..138: mol_type = other DNA
atgaaggttctttcagagggacagctgaagctgtgcgtggttcagcctgtacatctgacctcgtggttattgatcttcttcattttgaagtccatttcatgtctcaagcctgcacggctgccgatatatcagagatag

SEQ ID NO: 226481 - DNA, 192 bp, synthetic construct
  misc_feature 1..192: note = Description of Artificial Sequence: Synthetic coding sequence
  source 1..192: mol_type = other DNA
atgaaggttctgtccgaggggcagcttaaactgtgcgtagttcagccagtgcacctcacctcttggctcctgatcttctttatccttaaatcaatcagttgccttaagcccgctcgtcttcccatatatcagaggaagccctttatcgccgcttggaatgcacctaccgatcagtgtctaatcaagtactag

SEQ ID NO: 226482 - DNA, 15366 bp, synthetic construct
  misc_feature 1..15366: note = Description of Artificial Sequence: Synthetic coding sequence
  source 1..15366: mol_type = other DNA
atgactagtcgtcggctggaggaaagcatgggcgcagttcagatgggtctcgtcaacatgttcaaaggatttcagtccaaggtgttgcccccactgtctcccaaggtggtcacagaagaagaagtgaatcgcatgctgactccaagtgagttcctgaaggagatgagcctgacaaccgaacagagattggccaagacccggctgatgtgcaggccgcagatcatcgaactgttagatatgggagagaccacccatcagaaattcagtggaatcgacctcgaccaggcactgtttcagccattcccctccgagattatcttccaaaactacactccctgtgaagtatacgaagtcccgttgattctgcgcaataacgacaagatcccgagactggtcaaagtggtggaagagtcatccccgtatttcaaagtgattagccccaaagacattggccacaaagtggcccctggtgtgccttctatttttagaatcctatttacaccagaagaaaacaaagactacgctcacaccctcacctgtgtaactgagagagagaaattcattgttcccattaaggctagaggagctagagccatcctcgactttccggacaagcttaacttctctacttgcccagtgaaatattctactcagaagatcttgctggtgcgaaatattggaaataagaacgcagtattccatataaagacctgtagacctttctctatagaacctgccattggcactctcaacgtcggggaaagcatgcaactggaggtggaatttgaaccgcagtccgtgggcgatcatagcggcaggctgatcgtgtgctacgacacaggggagaaggtgtttgtctctttgtatggcgctgctatcgacatgaacatcaggctggataaaaactcactgacaatagagaagacttatatctccctcgcaaatcagcggacaatcaccatccataatagatcaaatatcatagcgcattttctatggaaagtgttcgctacacagcaggaagaggatcgcgaaaagtacagggcctgtgatgacctgattaaagaagagaaggacgaaactgacgagttttttgaggaatgcatcacagacccgctgttgcgagaacacttgtcggtgctaagccgaacttttgccaatcagcgacgcttagtgcagggtgacagcaagcttttcttcaataacgtgtttacggtggaacctctggagggcgatgtatggccaaacagctcagctgaaatcaccgtctacttcaatcccctggaggctaagctctaccagcagacaatctattgcgatatcctgggtcgggagatacgactgcctctgagaattaaaggtgaaggcatggggcctaaaatccattttaatttcgaactcctggatattggcaaagttttcactggatccgcacattgctacgaagccatcctgtacaacaaaggatccatagatgcgctttttaatatgaccccccctacctcagccctgggtgcctgtttcgtgttctctcccaaggaaggcatcattgagcccagcggcgtgcaggctatacagatatcttttagtagcactatcctcgggaatttcgaggaggaatttctggtgaatgtgaatggctccccggagcccgtgaagttaactatccggggttgcgtcatcggccctacattccatttcaacgtccccgctctgcatttcggtgacgtttcttttgggtttcctcatacactgatatgcagtctgaataacacgtccttgataccaatgacatataagctgcgtatacctggcgacggcctgggtcataagtctatcagttattgcgaacagcatgtcgattataaaaggcctagctggaccaaggaggaaatatcgtctatgaagcccaaggagttcacaatttccccagactgcggtaccattagaccccagggattcgccgctatccgggtgacactgtgcagtaacactgtgcagaagtacgagctggccctggtagtagatgtagaaggaattggcgaagaagtcctagccctgcttataaccgctagatgtgttgtccccgcactgcacctagtcaataccgaggtggattttgggcactgctttctgaaatacccttacgagaagactctccaactcgctaatcaggacgacctgcccggattttacgaggttcagccccaggtttgcgaggaggttcccaccgtgcttttctccagcccaactccgtctggggtgatttccccttccagcactatccatatcccattggttttggaaacgcaggtgaccggtgagcatcgttctaccgtttacatctccatctttggatctcaggatccacccttagtgtgtcatcttaagagtgccggtgaaggaccagtgatctacgtgcacccaaatcaagtggatttcgggaatatttacgtgctgaaagactcatcaaggatcctgaacctatgcaaccagtcatttatacccgctttcttccaggcgcacatggcccacaaaaagtctctctggactattgagcccaatgaggggatggttccacccgagaccgatgttcagctggccttgactgccaatttaaacgatacacttaccttcaaggattgcgtcatcctggacatcgagaatagctcgacctaccgcatccccgtccaagcgagcggaacagggtcaactatcgttagcgataagccattcgctcctgagctgaacctgggcgcacatttttctctagacacacactattaccacttcaaactgatcaacaagggtcggaggatacagcagctcttctggatgaacgacagctttcgtcctcaagctaagctttctaaaaaggggagagttaaaaagggacacgcacatgtccagccccagccatctggcagccaggaacccagagacccccagtccccagtttttcacctccacccagctagcatggagctatatccaggacaagctatagatgtgattctggaagggtactctgccacccctcgcatcgtcaaggagaaacttgtatgccatgctatcattggggctcagaagggcaaatcactcgtcatggccgtaaatataacgtgtgaattcgtggcgccactgatccagctgagtacaaagcaattgatctacaggttggaaaagaaacccaattcaattctgaagcccgattatcaaccccttgctataaagaacatttctacccttccagttaaccttctgttgtctacaagtggccctttttttatttgcgagacagacaagtctctgctaccagcaaccccagagccaatcaagctggagattgatgaagagaaaaatttgctgatcaagttcgatccctcttacagaaacgacctcaataactgggtggccgaggagatactggccattaaatatgtggaacatccccagattgattctctggatttgcgtggcgaggtgcattatcctaacctatctttcgaaaccaaggaactggactttggctgcatcctaaacgacacagaactgattcggtatgttacaattacaaattgcagcccgctcgtggtcaagtttcggtggttttttcttgtgaatgatgaggaaaatcagattcgctttgtgaccctgccaaagaagccttactctgccccagtctcacagatggagtcaatcccggctacctctgaagcagcctcaccccctgctatcctagtcacagtcgaaagtccagaaatggacctcaacgacttcgtcaagacggtgctggtcgatgaagatgcccgtccagaagaaaaggagctgagaaagactaaggcaagcagcgtcatcagtgacgagattaagatctcctccacagaaatcgagcgcatatacagttcccagtctcaggtggaagaccaggaaagcctccagacctgtgagcaaaatgagatgctctccattgggattgaggaagttttcgacatcctgcccttgttcggggtgctgcagccgcactccagccatcagatcagctttacattctatgggcacgcgaacatcatcgcccaggcaaaagccttatgtgaagtggaggaaggtccgacctatgagatcaccttgaagggcgaagcctctctcgtcaactactccttcgataccaaagacatccattacggtctgcagctgttcgaccatgtgaccgagcgtgaaatcactcttacaaacatggggaaagtcggcttcgaatttaaggtcctgaccgaccatcagtcctcccctgacaacttgctgcctggggtgcccttaattttacccgtgtctgggtttatttcgtcgcaccaggagcaggtgcttaaggtatattacttacccggagttcccgaggtgttcaagaggtcatttcagattcagatagcacatctcgaccctgagaacattaccctttccggggagggcattttcccgcagatttgtctggacctccctcggaacctcaccgcaaacgagaaatatgaaatgtttctcaatcaggcccgaaaaaacacagacaaagaatacaacaagtgcgagatgctggaccactttgatattataacagaagaggtgcctgaggatgagccagcggaagtaagtgctcacctgcagatggaagtcgaacgcctaatcgtacaatcctacgtgctggaacaccagaaaacaacaactcccgacccaatggatgatccatgcttctcccatcgcagtcgcagaaagctcgccaagatccagctgcccgaatacattctggacttcgggtacatcatcctgggcgaggtccggacacatattatcaaaataatcaacacatcacactttcccgtgtctttccacgccgacaaaagggtcctgcacgaaaccggattcagcacagagcttgacagggtgaaaaatctgcctcactgcgaaacagaaatctttgaagtgagattcgatccccagggagccaatctccccgtgggttcaaaagaggtgatcctcccaattaaggtcgtcggaggacccactgtgcacatctgtctccaggccaaagtaaccatacctactatgacactctctcggggtaaggtggatttcgctacaatacagtgtggccagtgtttagtagaaacaatccaactaagcaaccatctgcaggtcccatgtgagtggttcgtacagagccagaagccggtcgataagcttgagaagcacatgccaaaatatctgaggcaaaaacttcgggcagagttaaagcctaaaactagaattttcgagatacaaccaatctctggagtgctagatccgggagaaaagagcaatgtgcaagtcaaattcatgcctaaagaggaaaagttctatagtcagactctggtgtttcagatcgctcagagcgctcagaagttgacactcctggcgaggggacaggggttggagccacgactggaatttagcccctccgtgctggacttgggtcccctgttgctgtgcgctcccggtgacgaggccgaggtgatcgttaaaaacccttgtaactttcccatagaattctacagccttgaattcgatcagcaatacctcatcgaggagaagatcctgcggaagctgaaagggtacgattcttataataccctcctcctgccccctcgcaacccaggggagaaactgcccccagagctttacgagtatttcaaggagatcaagaaaagcaaggaagaacagatgcgcgcaaagtacctcgaaaacctagcgcaagaaaacgaagaggaggatatcacctccagcgatcaggggacgtctaacagtaccaaaagaacatcactgtcgagaggcatcagtgttacctcaaacttagaggagtggcacgccctgctggtggagtccaagacttacctggaggaggaagaagatgaagagtccctcgaaaagatcattttccaaacagacaagttgcagtcaatagattcccacagcatggaggaggtgggggaggtggagaacaatcctgtctctaaagcgattgccagacatctaggcatcgacatctccgctgagggacgtttggcgaagaaccgcaagggcatagccatcattattcacgggactcctctctccggaaaatccgccaacgcagtgtcagtggccaagtactacaacgccgcttgcctgagcattgattctatcgtgttagaggcagttgcaaatagcaataacatcccgggaatcagagcgagagagctatgtatcagggcagctatagagcagagcgtgaaggaaggcgaggaggccgctcaggaggccgctgtgggacaaaatgttatcggccagggcaggctaagtacggacacactcggcaagctcgcctctgagatgaccctagtggctccagagataaagcccggtaaatcggtccgcggatcagtcgttatcaccaagagcaaggcagactcccacggctccggttcccagaaacagcatcactctcaccagagtgagacaccccaaatttcctcctccccactgcccccaggccctatccataggtggctttctgtgtctcctagcgtcggcggtgagacagggctgatgagttgtgtattgccagatgaactcctagtgcagatactggcggaacgtatccagctgagcgactgctacaggggagtagttttcgacggactggacaccctatttgcccagaatgccgcagctgcactcctgtgcttacttaaggccatcggcagccgtgaacacatttatatcctgaatatggcacaggactatgctgccatgaaggcccaggaaaaggcaaagaaagagcaggaggagaggaagcacaagggcgcactggaaaaggagaaggaaagattgcaaaacatggacgaggaggaatatgacgccctgacggaagaagagaagttaactttcgatagaggaattcagcaggcgctgcgtgaacgaaagaaacgagagcaggagcgactcgcaaaggaaatgcaagaaaaaaagctccaacaggaactggaacggcaaaaagaagaagatgagctcaagaggagggtgaagaaggggaagcagggccctatcaaagaggaacctcccatgaaaaaatcccaggctgctaacaagcaggtccccccactgacgaaggtagatgtgaaaatggaaaccatcgagcgcaaaatcagcgtgcgcgagcagacaatgagcgagaaggaggagcttaataaaaaaaagcgcaacatgggggacgtgagcatgcatggtttgcccttggtgcaggaccaggaggactccgagggggataattctaaggaccccgataagcagcttgccccaaagttcaaaacctatgagcttactctcaaagatgtccagaatatcctgatgtactgggatagaaaacagggggtacagctgccacccgctgggatggaggaagctcctcacgagccagatgaccagagacaggttcctctgggaggtcggcgaggacggaaagatcgtgagagagagagattggagaaagagcgaaccgagaaagaacgcctcgaaagggagaaagcagagcgcgagagacttgagaagctccgggcattagaagaaaggtccgattgggaaggcgaaggggaagaggatcatgaaggtaagaaggagaaagatctgggagtgccctttctggatattcagactcccgactttgaggggctcagctggaagcaagcattagagagcgataaacttcccaagggcgaacaaatcctcgacattctgggcctgggcgcttctggcccacccataccccctccagcactgttctccattgtgtcctatcccgtcaagcggccacctttaactatgactgacgacttagaacattttgtatttgtgatccccccttcagaagatatctctttggatgaaaagaaggagatggagattgagagtgattttctggctacgaccaacactacaaaagcccaggaggagcagacaagtagctctaaggggggtaaacagaagatgaaggaaaaaatcgatcaggtgtttgaaattcaaaaggacaaaaggcacatggcactaaaccgcaaagttctcagcggtgaacccgctggaacaataagccagctgagcgatacagacctggacaacttcaacggccagcattcccaagagaagtttacccggctgaatcacttcaggtggatcgtgccggcaaatggtgaggtgacgttgcaagtgcactttagttccgacgaatttggtaatttcgaccagacattcaatttcgaaatcctgggtacctgctgccaatatcagttgtactgtcggggaatctgtacctacccgtatatttgtcaggatcctaaagtggtgtttcctcaacgaaagatggatatgaaaacaaatgaagtcatatttaagaagtatgtcatgagtactgaaacctactatttcggcccactgctctgcgggaaatcccgcgacaaatacaagagtagtctatttccaggaaacatggagacactgaccatactgaatacctctctgatggttgtggaagcctctttctactttcagaacgacgtgaaagccaacacttattttctggaacccaataccatggtgctcaaacctaatgaaaagcagatcttaaacgtatgggcataccctaccagcgtgggtgtgtttgaggatagcatcgtgtgttgcattaatgataaccctgaacctgctatctttcagctgtcatgccaggggataaggcccgagctggaactggagccgagacaactgcacttcgatcgtctgctgctgcatcggcaggagagcagagttgtgttgcttaggaatgtgaccctgctccctgtcgcctggagaatcacttctctggaacatttgggggacgatttcactgtgagcttgatgcagggcacaatacctccagaggccgagtacggcctacatctgtatttccagccaactaaaccagtcaacatcaagaaagctattcggctggaagtgcttgatgctgaaaaccttctgggggtggtccaaatcgaaaacataatggtgtttgctgaagcatacgacatagctcttgatatcacctttccaaaaggtgctgagggtggactggatttcgggatcgttcgcgtcaccgaggaagctaagcagccacttcaactgaagaatcggggaaagtacgagatcgctttctccttctctgtggattccgtgggcatttccaccccaaacatcaattctatgatcagtgtgcagcccaagaagggctctctaacccctaccgagaagccaaccaatgtgcaggttttcttccacgcgaaaaaggaagttaaaatcgagcaccagccggtgttacggtgtcagatcatcgaaccaaacatctcagagggcggagaaatcatagctagcattccaatcaagttctccgcaaatgccgtgtactctaagtataatattacccccagtagtgtcataaactttggcgctctgatctgcgggaccaggaagtcaaccacctttaccattgagaaccagggtgtgactgatttcaagttcgctctctacaagcttaccggcgaatccccgattcaccagaaaaaggcagcgtcccacgtgcgccacgcacgctctagggagtcagagagtttctataaaacaggcagctcccgggcagctaaattcagtgatacaatccaaaaggaagtgaccacaacaggacaagcgcgttttgcacacgggatgtttaccgtgtatcccggtttcggctctattccttccggcggtcaacaggtcattaatgtcgactgcgtagccgatgctatggggaagtgtgaggaattcattgctatcgacatcagcggtcgcgaccccgcagtccaccccgcaggcatactgtacacactcttagccgaggcatgcttgcctgcgttcgtcacagagaacaatgccctgattttcgaagaacatcagatttgcacaagcgcaaatttgcaccatatcctgcagactatcgagagcgggggattgttcgttgaggatgaaaataaattcattttctgcaacgttctcgtgggccgtcaggccaaggctaggttcaagatttctaatgtggggaaaatcacctgcgacgtaaacatagtggtgaggcctatctccaataaaccgtttgcaaggattgttgacatttttgaggtggaacccagcaaaatgtgcattgcttcccatagccacgcattcgctacagtgtctttcaccccccagattatgcagaactaccagtgcattttcgaagcaacactagacgggcttcccagcactttagcaaagtcacgcggacttgttttcgacattgctggggagggcaacttgcctcgggtgacagtggtcagaccagtgctccataaccagtatggcaatcctctgcttctgttcaagagactgcttttggggcactcagagaagttgcctctcattctcaaaaacaatggcgtgctgcctgcgcagctccatgttgacctccaggacgaattgggtgtgttcagcctcaagggcagacccactacagcctacatttacatcaccgaggagaacaaaccccatgttaaagcgaagaaagctcacacagcttcgctagtggtttcaccaggggacaccgctgaattcgacgtggtgttccactcccaaaaagtcggcaggatgagaggaattatccacctgtccgtcattaacaatcagtacgaggagactagtatccatatggttggggagggctatgaagatgatataacgctggacaacatccacggattggtggctccaacctcacaggaggatatctccatatctgagttcactgagatcattgaagataatgacatggaggacctggttgcagcagcacttgtggatcatattcagttcggagattgtcacatcgggcactcatataacgccagctttacagtcactaaccattcgcaggtgaacctcattcggtttgagtggcctgtgagtgcaacgatagctttcagccctcagatgggccatcttcatcctggctgcgcaaaggatatagttgtaactatgaagtctgatgtcccgattaatttaaagaatatgcggatccggtgtaaactctcccgtattatgtttcagcttcccgctgatcaggtgcccgattgggacgatcggatgcacactgttaaatgggttgacgtcccccgaaacatgccaggcacctttacgaccaagcgaaaggtgattgagactgaccctgagccagctcactcagtcctagaagagaattaccaggaacttcaactccagatttcggcaaatgtggacttcgcgtcataccattgccaggcacgggacgtgcgctttaaagaaactctcgtatatcagacccgtgtgttcgagtttgacgtaataaattccgggagagtgcagctggaattctcgtgggtctccgaagatacctcaaaggcagttagtttcgctaaacccgatcaccaagggtcagcccagaaggatcagctgagccagggtaccatgcacactggatctactctcgactcaacaatggaccattgggccgaagggtccccacaaccctttagcgtggaaccatcatcaggaattgtgccagttgggaaaatccaaaagttcaaggtcaagtttagtcctctcgatattggcgacttcgagtctaatttgttctgtcagatccctaacctcccccctggcgagcaaggacctgttctggttgcaaaaggccgaagtactctccccatatgccatttcgatctgaaggactccgactacatctcagggcaccagagaaacccagaactgcggggaagttctggtggagcactcgacccaaacacacgggttattgagttcacaactgtcggcatcggcggtaagaatctgcgcaccttcaccattttaaaccctaccaattctacctattccttttgttggatctctgaggagatcgaatccctccagaaccccgcagctttcacatgcctcaccgagaaagggttcatccatccagaaaagaaagcagaaatcgtgttccagtttaccccctttcacctgggaattactgaaagctcctggacattccttattccagaacataatataacggtgcccttccttctggtcggtaagaccactgaacccctgatttccttaaacaaatcccaccttaacttctccagcttgctcatcggtagagaggcgcgtgagaccgtgcagataataaacaaagaggaacagggattcgacttctccttccaggataactcacgatatagtgagggcttctctaatagtttgctggtatgtcctatggaaggatggattccccctctcagccggttccctatcgacattttctttacgccgaagcaggagggagacgttaacttcaacttgatttgcaacgtggaaaagaaggtgcaccccgtcacactgaacgttaaggcagaaggctacaccatgaacgtggaaataaagtgcaaagatcgaacaggctccattactttattgactcctaaccagactaacatcataaacttctacgaggtggagttaaatgaatgtgttcagtgtgaatttaatttcatcaatacagggaagtttacttttagcttccaggctcagctgtgtgggtccaagactttgctacagtatctggagttctcccccatcgatagcacagtggacgtggggcaaagtgtgcacgccaccttgagcttccaacccctaaaaaaatgtgttctgacagacctggagctaattatcaaaatctcccacggcccaacctttatgtgtaacatttctggatgcgctgtctcccctgctattcacttttccttcacctcttataacttcggcacctgttttatataccaggccggaatgcctccctacaaacaaactctagtgatcactaataaagaagagacgccaatgagtattgactgcctgtacaccaatacgacacacttggaggtgaacagtagggttgacgtggtgaaacctgggaacactctggagattccaattaccttttatcctcgtgagtcgatcaactaccaggagctcatccccttcgaaattaatggactcagccagcaaactgtcgagattaaaggaaagggcacaaagatgaaaattctggttctcgatccggctaaccgaattgttaaactaggagcggtcctgcccggacaggtcgtaaaaaggactgtgagcattatgaacaattctctcgcccagctgacttttaatcagagcatcctattcactatcccagagctgcaggagcctaaagtgctgactctggccccttttcacaacatcacccttaagccgaaagaggtctgtaaactggaagtgatttttgcgccaaagaaacgtgttccccctttctccgaggaggtgttcatggagtgcatgggtctattacggccactgttcctgctgtcagggtgctgccaagcactggagatatccctggaccaagagcacatcccctttgggccagtggtatatcagacccaggcaacccgcaggatcctgatgatgaatactggtgacgtaggggcacgattcaaatgggatatcaaaaagttcgaaccacacttcagcatttcacccgaagaaggctatattacatcggggatggaagtctcgttcgaggtgacatatcacccgacagaggtgggaaaagagagcctgtgcaagaatattctatgttacatccaaggcggttctcccctgtcactgacactatccggagtatgtgtcggtcccccagcggttaaagaggtggtgaacttcacttgccaagtgaggagcaagcacacgcaaaccatccttctctccaatcgcaccaaccagacctggaacttacaccccatatttgagggagaacactgggaggggcctgaattcattactctggaggcccaccaacaaaataaaccttatgaaataacctatcgaccccgaaccatgaatttggaaaaccgcaaacaccaaggaacactgtttttccccctgccagatgggacaggatggttatacgctctgcatggcacttcggaattgccgaaagccgttgcaaacatctatcgtgaagtgccctgtaagacaccctacacggagctcctgcccattacaaactggctaaataaaccccagcgcttcagggtgatcgttgaaatcctcaagccagagaaacctgatctgtccattaccatgaaaggcctggattatattgatgtgcttagtggcagcaaaaaggattacaagctgaatttcttctcccacaaggaaggcacatatgctgcgaaggtgatcttccgcaatgaagtcacgaatgaattcctatactataatgtcagttttcgggtgataccgtcaggaattattaagactattgagatggtgacacctgtccgtcaagtcgcctctgcctcaatcaagttagagaatcctctgccttacagtgttacgttttcaactgagtgcagaatgccagatattgctctcccttcacagttcgttgtgcctgccaactctgaggggactttcagctttgaatttcaacccctgaaagccggtgagacctttgggaggctcacccttcacaacactgacctggggtactaccagtatgaactatacttaaaagccacacctgctctccctgaaaagcccgtccattttcagacagtcctcggctcttctcagataatccttgtgaaattcatcaactatacacggcaaaggaccgagtactactgtagaacagactgtaccgattttcatgctgagaagctgatcaacgcagcgccaggaggacagggaggcactgaggcatccgtcgaggtgctgtttgaacctagccacttgggggagactaagggcattcttatcttaagtagcttggccggaggagagtacatcattcctctgtttggcatggctctgcctcctaagccacaagggcctttcagtattcgagcgggatattcaatcatcatccccttcaaaaacgtcttttaccatatggtgaccttttctattattgtcgataaccccgcattcacgatcagggcgggagagtctgtgaggccaaaaaagatcaacaacataaccgtatcctttgagggcaatccctctggttccaaaacgcccattacaacaaaactgacagtcagctgcccgcctggcgaaggtagtgagactggggtgaagtgggtgtattatctaaagggaatcactctttaa

SEQ ID NO: 226483 - DNA, 2853 bp, synthetic construct
  misc_feature 1..2853: note = Description of Artificial Sequence: Synthetic coding sequence
  source 1..2853: mol_type = other DNA
atggagagtgctgggggatttaaactcggaatggaaccactatcaggcggtggggtgtgtgagaaaaaaaaattgctgaaaatgacatctagacggctcgaagagagtatgggtgctgtccagatgggtctcgtcaacatgttcaaggggttccagtctaaggtgttaccgcctttgtctcctaaagtggtgacagaagaggaggtgaataggatgttaactccatcagagttcctcaaagaaatgtctctcaccacagagcagcgattggctaagacccgcctgatgtgccgtccacagattatagagctcttggatatgggagagacaacccaccagaaattctctggcattgatctggatcaggccttgtttcagccttttccttcagagattatctttcagaactacaccccgtgtgaagtgtacgaagtgcccttaatcctgcgaaataatgataaaatccctaggctggtcaaagtggtggaggaatcaagcccgtacttcaaggttatcagccctaaagatatcggccacaaagttgctcctggcgtgccatctatatttcgcatactttttacccccgaagagaacaaggattatgcgcacactctgacctgcgtgacagagagagaaaaatttattgtccctattaaggccagaggcgctcgagccattctcgattttcccgacaaactgaactttagcacatgtccagtgaagtatagcactcagaagatccttctcgtgcggaacatcggaaataagaacgccgtgttccacatcaagacttgcagaccgttttcaatcgagcctgctattggcacactgaacgtcggcgagagcatgcagctggaagttgagtttgaaccccaatcggttggtgaccattccgggcgacttatagtctgctacgacacaggagagaaggtgtttgtttctctgtacggggctgccattgatatgaatatacggcttgacaagaatagcctcactatagaaaagacctacatatcgctcgctaaccaacgcacaattactattcacaatcgttctaatatcattgcgcacttcttgtggaaagtgtttgccactcaacaggaagaagacagggagaaatatagggcctgtgacgatctgataaaggaagagaaggatgaaaccgacgaattcttcgaagaatgtatcacggaccccctcctgcgggagcatctgagcgttcttagtagaacatttgctaatcagagacgattggtgcagggcgactctaagctgttttttaataacgttttcacagttgagccgttggaaggagatgtgtggcccaatagttctgccgaaatcacagtttattttaacccactggaggccaaactgtaccaacaaactatttactgtgacatccttgggagagaaattcgattacccctccgaatcaagggagaaggcatgggacccaagattcacttcaacttcgagcttttagacatcggcaaagtattcacaggctccgcacactgttacgaggctatcctgtacaacaagggatcaattgacgctttgttcaacatgactccacctacatctgcactgggcgcttgctttgttttctctcctaaagagggcattatcgagccctccggcgtacaagcaattcagatctccttcagttcaaccatcctgggcaacttcgaagaagagttcttggtcaacgtcaatgggtcccctgagcctgtgaagcttacaataagagggtgtgtgattggcccaacctttcatttcaacgtgccggcactgcatttcggcgacgttagctttggatttccccacacactcatctgcagcctgaataatacgagcttgatccctatgacctataagctgaggatccccggtgatgggctcggccataaatcaatcagctattgtgagcagcacgtggactataagcggccatcctggaccaaggaagaaatctctagtatgaagccaaaggaattcacaatctcgcctgactgtggtaccatccggccacaggggtttgcagctattagggtcacgttgtgctctaacaccgttcagaaatatgagttggccctcgtcgtggatgtcgagggcatcggcgaagaggtgctggctctgctcattactgccagatgcgtcgtcccggctctacacttggtgaacacggaggtggattttgggcattgcttccttaagtacccatatgaaaagactctgcaacttgccaaccaagatgatctgccaggcttctacgaggtccagccacaggtttgtgaagaggttccaacagtattattctcctcacctacaccatctggcgtcatcagcccgtcaagcaccattcatatcccactggtgctggagacgcaggtcacaggcgaacataggtctactgtctatatctcaatttttggatctcaggacccacccctggtttgccacttaaagagtgccggagaaggacccgttatctacgttcatccgaaccaggtggatttcgggaatatctacgtcctgaaagattcctctcgcatcctgaatctgtgtaatcagagtttcattcccgctttctttcaggcccatatggcccacaaaaagagcctctggactattgagccaaacgaaggtatggttcccccagaaactgacgttcagctagctctcacagcgaacctcaacgacactttaacattcaaggattgtgtgatacttgatattgagaattcctctacatatagaattcctgtgcaggcttccggaacaggctcaacaatcgtcagcgacaaaccctttgccccagaactgaacctcggagcgcattttaggtag

SEQ ID NO: 226484 - DNA, 2823 bp, synthetic construct
  misc_feature 1..2823: note = Description of Artificial Sequence: Synthetic coding sequence
  source 1..2823: mol_type = other DNA
atggagagcgccggtggtttcaagctgggggagaaaaaaaaactgctcaaaatgaccagcaggcgactggaggaatctatgggtgcagtgcagatgggtctcgtcaatatgtttaaggggtttcaatccaaggtgctgcctccactttcgccaaaagtggtcactgaggaagaagtgaaccggatgttgactccttcagagtttctgaaggaaatgtctttgactaccgagcaaaggctggccaaaacccggctgatgtgccgacctcagattatcgagctgctcgatatgggagagactactcatcagaaatttagcggcatcgacctggatcaggcattatttcagccattcccctctgaaattattttccaaaactacacaccttgtgaggtgtacgaggtgcccttgatcttaaggaacaacgataagattccacggttggtgaaggtggtggaagaatcttccccttattttaaagtaattagccctaaagatataggacacaaagtggccccaggcgttcctagtatcttcagaatcttatttaccccagaagaaaacaaagattacgcgcatacactcacttgtgtcacggagagagagaaattcattgtccctattaaagctaggggtgcgcgagctatccttgatttccctgataaactcaatttcagcacttgcccggtaaaatattctacgcaaaagattctcctggtgcgtaatatagggaataaaaacgccgtctttcacatcaaaacgtgtaggccattctcaatcgaaccagctataggaacgttgaatgttggcgagtccatgcagctggaagtggaattcgagcctcagagtgtgggggaccatagcggcagactgattgtttgttacgataccggcgaaaaagtgtttgtctcgctgtatggagccgcaattgatatgaatattaggttagacaagaatagtttgacaattgaaaagacatacatcagcctcgcaaaccagcggacaattacaatccacaaccgaagcaatattatcgcacatttcctatggaaagtcttcgcaactcagcaagaagaggatcgggagaagtatagagcttgcgacgacctgatcaaagaagaaaaagacgaaacagacgagttcttcgaagagtgcattacagatcccctcttgagagaacatctctctgtgttaagtaggaccttcgccaatcagcggaggctggtgcaaggagattcaaaactgtttttcaacaatgtgtttaccgtcgaacctctggaaggggacgtttggcccaacagctcagctgagatcaccgtttatttcaatcccctcgaggcgaagctgtaccagcagacaatatactgtgatatcctcggcagggagatcagactgcccttgcgtatcaagggagaaggaatggggccaaagattcatttcaatttcgaattgttagatattggcaaagtgttcactggatccgctcactgctacgaggccattctctacaacaaagggtctattgatgccctctttaatatgaccccaccaacgtccgctctgggagcctgtttcgttttttcaccaaaagaggggataatcgaaccttcaggtgttcaagccattcaaatcagctttagcagcaccatacttggaaactttgaagaggagtttctcgttaacgtgaatggttcacccgaacctgttaaactgacaatccgcggttgtgtcattggacccacatttcacttcaacgtaccagcactccactttggagacgtgtcattcgggttcccacatacgttgatctgctctttaaataacacaagcctcattccaatgacatacaagctacgcataccaggcgacggactcggacataagagtatatcctactgtgaacagcacgtcgactataagcgtcctagctggaccaaagaggagatctcctcaatgaagcccaaggagttcacaatctctcccgattgtgggacgatccgccctcagggatttgcagctatccgggtgaccctgtgcagcaacactgtgcagaaatatgagctcgccctggttgtagacgtggaagggattggagaggaggtgttggccctgctgattacggctagatgcgtcgtgcctgcactgcacctggttaacaccgaggtcgactttggtcactgcttcctgaagtatccatatgaaaaaaccctccagctcgctaaccaggacgacctgccgggattctacgaggtccagccccaggtgtgcgaggaggtgccaactgtgctgttctcctctcccacaccaagcggagtaatttccccctcctcaaccatacatatcccccttgtgctggagacccaggtgactggcgaacataggtccaccgtctacatatctatctttgggtcccaggaccctccgttggtgtgtcatcttaaatcagcaggcgaaggtcctgttatatacgttcaccccaaccaggtggattttggtaacatctatgttttaaaagacagcagccggattctgaatctttgcaatcagtcttttatccctgccttcttccaggcccacatggctcataagaagtccctttggaccatcgagccaaacgaaggcatggtgcctccagagaccgatgtgcagctcgcattgactgctaacctgaatgatacactgaccttcaaggattgtgttattctggacattgagaattcgtccacatacaggatccccgttcaagcctcgggtacaggatcaaccattgtgagcgacaaacctttcgcccctgagctgaacttgggcgctcactttagatag

SEQ ID NO: 226485 - DNA, 15363 bp, synthetic construct
  misc_feature 1..15363: note = Description of Artificial Sequence: Synthetic coding sequence
  source 1..15363: mol_type = other DNA
atgacgtctagaagattggaggagagtatgggcgcagtgcagatggggttagtcaacatgttcaaaggctttcagtcaaaggtcctgcctccactcagtccaaaggttgtgaccgaagaagaagttaaccggatgctgaccccctccgagttcctcaaggagatgtctctgactactgaacagcgattagcaaaaacgagacttatgtgtagaccgcagattattgaattgctggacatgggcgaaacaacccatcagaagttttccggcattgatctcgaccaagcactctttcagccatttccaagcgagatcatctttcaaaactataccccttgcgaagtgtatgaggtgcctctgattcttaggaacaacgacaagatcccccgattggttaaagtcgttgaggagtcctctccatacttcaaagtgataagccctaaagacatcggacataaagtggctcctggcgtgccgtccatcttcaggatactgttcaccccagaggaaaataaggattatgcacacacactaacctgtgttaccgaacgggagaagttcatcgttcctattaaagccagaggcgcaagagccatcctcgatttccccgacaagctcaacttcagtacttgtcccgtgaagtactcaacccaaaagatccttctggtaaggaatattggcaacaaaaacgcggtgttccatattaagacatgccggcctttttcaatagagcctgccataggaactctgaacgttggtgaatctatgcagttggaagttgagtttgagccccagtcagtgggagaccattctgggagactgattgtctgctacgatactggtgagaaggttttcgtgtcactgtatggggctgccatcgacatgaatataagactcgataagaacagcctaaccatcgaaaagacctacatttccttggctaaccagagaaccatcactattcataatcgctccaatatcatagcccacttcctttggaaggtctttgctacacagcaagaagaggatcgggaaaagtaccgtgcgtgtgatgatctgattaaggaggagaaagatgaaaccgatgaatttttcgaggaatgtatcacagaccccctgctccgcgagcatctcagtgtgctttctcgcacctttgccaatcaaagacgcctagtgcagggtgattcaaagcttttctttaacaacgtgttcacagtggagcccttggaaggcgatgtgtggcctaacagctccgccgagattaccgtctacttcaaccctctggaggcgaaactgtatcagcagactatttattgtgatattctcggccgagaaatccgcttgccattaaggataaagggagaaggcatgggcccaaagatccacttcaactttgagttactggatattggcaaagtctttactggttcagcccattgttacgaggcaatactgtataataaaggctcaatagacgccttgttcaatatgaccccccctaccagcgccctgggcgcatgcttcgtgttttctcccaaggagggtatcatcgaaccatcgggtgtccaagcaatacagataagcttctctagcacaattctggggaattttgaagaggaattcttggtgaacgtaaatggttcgccggagcctgtgaaattgacaattcggggttgcgttatcggccctacttttcattttaacgtacccgcactgcacttcggagacgtgagcttcggctttcctcatactcttatctgttccttgaacaacacaagcctcattccaatgacctacaaactcaggataccaggcgacgggctaggccacaagagcatcagctattgcgagcagcacgttgattataaacgcccatcctggactaaagaagagatatcgtctatgaagcctaaggagtttacaatttcccctgactgtggcaccattaggccacaggggttcgctgctatcagggtcactctttgctccaatactgtccaaaaatacgagctcgccctggttgtcgacgttgagggtataggcgaagaggtcctggctctgttgatcactgcccgttgtgtggttcctgccctgcatctagtgaacaccgaggtggacttcggacactgcttcctgaagtacccctacgagaaaactctgcaactcgcaaaccaggacgacctgccaggattttacgaagtccagccacaggtctgcgaggaggtccccacagtcctgttctcgtctccaaccccatcaggggtgatatcaccgagctctacaattcacatccccctggtgctggaaacccaggtgacaggtgaacatcgctccacggtctacatctctatcttcggctctcaagatccacccctggtgtgccatctgaaaagtgcgggagagggtcctgtgatttacgtccaccccaaccaggtggatttcgggaatatttatgtattgaaggatagttcacggatccttaacctgtgtaatcagtcctttatccccgcttttttccaggctcacatggcccacaagaaaagcctctggactatcgagccgaacgaagggatggtacctcccgaaaccgacgtgcaacttgcgttaactgcgaacttaaacgacaccttgaccttcaaagattgcgtgatccttgatattgagaacagctcaacttaccggatcccagtgcaggcttctgggacaggtagtacaattgtgtccgacaaaccatttgcaccagaattaaacctgggcgcacacttctctctcgacacgcactactaccattttaagcttatcaataaaggcaggcgcatccagcaactgttttggatgaatgacagttttcgcccacaggccaaactgtctaagaaaggtcgggttaagaaaggtcatgcacatgtccagccacagccatccggctcccaagagcccagagacccacagtctccggtctttcacttgcaccccgcttcaatggaattgtatcctggccaagccattgatgtcatcctggaaggatactctgctacccccaggatcgtgaaagagaagcttgtatgccatgccataataggtgcccagaagggcaagtcccttgtgatggccgtgaacattacgtgcgaattcgtggcccctctcatacagctttcaactaagcagttgatatacagacttgagaaaaagcctaatagcatactaaaacctgattatcagcccctcgccattaagaatatttccaccctgcctgtcaacctgctattgtccacaagtggtcccttttttatctgcgagaccgacaagtccctcctccctgccactcccgagcccattaaactggagatcgacgaggaaaaaaacttgctaatcaaattcgacccgtcttaccgtaatgacctcaacaactgggtcgccgaagaaatcctggccattaaatatgtggagcacccgcagatcgattcattggacctgcgaggagaggtacactacccaaacctatcattcgagaccaaggagctcgatttcgggtgtatcttaaatgatactgaactcattcggtatgtaaccatcactaattgttcacctttggtggtgaagtttcggtggttttttctggtgaatgacgaggagaaccagatcaggttcgtgaccctgcctaaaaaaccctattccgccccagtgagccagatggagtcaatacccgctacttctgaggccgcttctcctccagctattcttgtaaccgtggagtctcctgaaatggatctcaacgactttgttaagaccgtattggtggatgaggatgctcgcccagaggagaaagaactgcggaagactaaggcctcatccgtgatatccgatgtaagatgtccattccacggagaggagcgcatctactctagtcagagtcaggtggaagaccaggagagccttcaaacctgcgagcagaatgaaatgctgtctatcggaatcgaagaggtatttgatattctcccgctgttcggggttcttcagccccacagtagccaccagatctcttttacattttatggacatgccaatatcatcgctcaggccaaagcattatgcgaggtcgaggaggggcctacttatgagattacccttaaaggcgaggcttcacttgtgaattattccttcgacaccaaggatattcattatggcctacagttattcgatcacgtgacggaacgcgaaatcaccttgacgaatatggggaaagtcggcttcgaattcaaggtgctcactgatcaccagagctcccctgataacctgctcccgggagtgcctctgatcctgcccgtgagcggctttatctcatctcatcaggagcaggttctgaaagtgtactatcttcctggagttcccgaagtctttaagcgatcatttcaaatccagatcgcccacctcgaccccgaaaacataacactctccggtgaagggatctttccccagatctgcctggaccttcctcggaatcttactgccaatgaaaagtacgaaatgttcctgaatcaggctcggaagaacaccgataaagagtataacaagtgcgagatgcttgatcactttgacatcatcacagaagaagttcctgaagacgagcccgctgaagtctccgcacatttgcagatggaggtcgaaagactgatcgtgcagagctatgtcctcgagcaccagaaaaccacaacaccagaccccatggacgatccatgcttctcacacagaagccgccgaaaactggctaagattcagctgcctgagtatattctggactttggctacattatacttggcgaagtccggacccatatcattaagattattaacacctctcatttccccgtcagctttcacgccgacaaaagggttctgcacgaaacaggtttcagcactgaactcgaccgcgtaaagaacctcccccactgcgagaccgagatttttgaagtgagatttgacccccaaggagcaaatctccctgtaggatctaaggaggttatcctgccaattaaggttgtgggaggtccaactgtgcacatctgtctgcaggctaaggttacgatccccactatgaccctctctcgcggtaaggtggattttgctaccatccaatgtggacaatgcctcgtcgagacgatccagctgagcaatcatctgcaagtcccctgcgaatggtttgtccagtctcagaaacctgtggacaaactggagaagcatatgccaaaatacttgagacagaaattgcgcgctgagctgaaacccaagacccggatctttgagatacaacctattagtggggttctggacccaggagagaagtctaatgtgcaggtcaagtttatgcctaaggaagagaagttctatagtcagaccctagtcttccagattgctcagagcgcccagaagttgaccctgttggcccgagggcagggcctcgagccacgtctggaattttctccctcagtgctggatcttggcccactgctcctatgcgcccctggggatgaggctgaggtcatcgtgaagaatccttgtaactttcctatcgagttctatagcctggaattcgatcagcagtacctcatcgaggagaagattctgagaaaacttaagggatacgatagttataacaccctgctgctcccacctaggaatcccggtgagaaacttccccctgaactgtacgagtactttaaagaaattaaaaagtctaaggaggagcagatgcgggctaaatacctggagaacctggcacaggagaacgaggaggaggacatcacatcatccgaccagggcacatccaatagcactaagcggaccagtctgtctagaggaatctccgtgaccagcaacctggaggagtggcacgctctgctggttgagagtaagacatacctggaggaggaagaagacgaggagtcactggagaagatcatcttccagacagataaattgcaatcgattgactctcacagtatggaggaggtaggtgaggtggaaaataacccagtcagtaaagccatagcccgtcatctggggattgacatctccgctgagggtcgcctggcaaaaaatcgcaagggaatagctatcattattcacggaactccactttcaggcaaatctgcaaatgcagtgtccgtggccaagtactacaacgctgcctgtctttctatcgatagcattgtgctagaggccgtggccaactccaacaacattccaggcatcagggcccgtgagctctgcatccgggcagccattgagcagtccgtgaaggagggggaggaagccgctcaggaagccgctgtgggccagaatgttattggccagggcaggttatccacagacactctgggtaagctcgctagtgagatgacccttgtcgcacccgagatcaagcccggaaaatctgtgcggggttctgtcgtgatcacaaagtccaaagctgattctcacggcagtggatcccagaagcagcatcattcgcaccagtcagagacaccgcagattagtagctctcccctgccgccaggtcccattcaccgatggttaagtgttagtcctagtgtgggcggagaaactggacttatgagctgcgttcttcctgatgagttgctcgtgcagattctcgccgaaaggatccagctttctgattgctataggggagtagtgtttgatggtttagatactttgtttgcacaaaacgcagccgctgcacttctctgtctgcttaaagcaattggctcccgggagcacatatacattctgaacatggcccaagattacgccgcaatgaaagcccaggaaaaagcgaaaaaagagcaggaagagagaaagcataagggcgctctggagaaagagaaagagcgcctgcaaaacatggacgaggaagaatatgacgccctaaccgaggaggagaagctgactttcgatcggggaatccagcaggcactgcgggaacgcaaaaaaagagagcaggaacggctggcgaaggaaatgcaggagaaaaagttgcaacaggagttagaaagacagaaggaggaagacgagctgaagagacgggttaaaaaaggcaaacagggcccaatcaaggaagaaccccctatgaagaaatcccaggctgctaacaaacaggtccctcccttgacaaaagttgacgtcaagatggaaacaatcgaacggaaaatatcagtgcgcgagcaaacaatgtcagaaaaagaggagctgaacaagaagaaacggaacatgggggatgtatcaatgcacgggctgcccctggtccaggatcaggaggactcagagggagacaattctaaggatccagataagcaattagctcccaagtttaagacatacgaattgacgctgaaagatgtgcagaacattttaatgtactgggatagaaagcagggggtccagctgccacctgccggtatggaagaagcaccgcatgaacccgacgaccagcgccaggtcccgttaggaggacggagaggcagaaaggatagggagcgcgagaggctggaaaaggaacgtaccgagaaggagcggttggagagagaaaaagccgaaagggaacggcttgagaagctgcgagcactggaggagcgtagcgactgggagggggaaggggaagaggaccacgagggcaagaaggaaaaggatctcggcgtgccctttctagacattcaaacccctgattttgagggcttaagctggaagcaagccctggaatccgataaactgcccaaaggagaacagatactggacattctaggtctgggagcatcaggaccacctatcccaccccctgcactgtttagcattgtctcatacccagtgaagcgccctcccctaaccatgacagacgaccttgaacacttcgtctttgtcatcccgccttctgaagacatttcactggacgagaagaaggaaatggaaatcgagtccgacttcttggccacaaccaatacaacaaaagctcaagaagagcagacctcttccagtaagggaggtaaacagaaaatgaaagaaaagatcgatcaggtgtttgaaattcaaaaagacaagaggcatatggccctgaataggaaagttctgtctggtgagcctgccggaacaatctcacagctgtccgacaccgatcttgacaactttaatgggcagcattcccaggagaagtttactcgcctcaaccacttccggtggatcgttccagcgaacggggaagtaactctgcaagtgcatttcagcagcgacgaattcggaaattttgatcagaccttcaacttcgagatcctcgggacgtgctgccagtaccagctgtattgccggggaatatgcacatacccctacatttgccaggatccgaaggttgtgttcccacagcggaagatggatatgaaaaccaacgaagtaatattcaagaagtatgtgatgagcaccgaaacatactactttggacccctgctctgtggcaagtccagggataaatacaagagttccctgttccccggaaacatggaaactctaacaatccttaacacttctctcatggttgtggaggcgtctttctattttcagaacgacgtcaaagccaatacttacttcctcgagccaaacacaatggtccttaagcctaacgaaaagcagatcctgaacgtctgggcctatcccacttctgttggggtatttgaagatagcattgtctgttgtattaatgataatcctgagcctgcaatttttcagctaagctgccaagggataaggccagagctcgagttggagcctcgacagcttcactttgacaggctgctcctgcatcgtcaggagtctcgggtggtgttgttgagaaatgttactttgctgcccgttgcctggcggatcacttccctggagcatctgggggacgacttcacggtctcacttatgcagggaaccataccccctgaggcagagtatggccttcacctttattttcagcctactaaacctgtgaacatcaaaaaagccatccgacttgaagttcttgacgcagaaaatctgctgggagttgttcaaatcgagaatattatggtctttgcagaggcctacgatattgctctggatatcacctttccaaagggggcagaagggggactggactttggtatagtacgcgttactgaggaagccaagcagccacttcagctgaagaatcgcggaaaatatgaaattgccttctctttctcggtggactcagttggcatcagtacgccaaatatcaatagcatgatctccgtccagcccaaaaaaggctctttaacccctactgagaagcccacaaacgtgcaggtattcttccacgcaaagaaggaggtgaaaatcgagcatcaaccagtactgcggtgccagataatcgagcctaatatcagcgaaggcggagaaatcatcgcttctataccaatcaaattctcagccaacgctgtctattccaagtacaacatcacaccttccagtgttatcaacttcggggcactgatctgcgggacaaggaagtcgacaacttttaccattgagaaccagggagtgaccgatttcaaattcgccctctataagctaactggcgagagccctatccaccaaaagaaggccgcttcccacgtacgccacgcccgttcccgggaatctgagtcattttataagaccgggtctagtcgcgcagctaagtttagcgacactattcagaaggaagtgactactacaggccaggcaagatttgctcacggcatgttcaccgtgtatcccggattcgggagcatccctagcggcggacagcaggttattaatgtcgattgtgtggccgacgcaatgggcaaatgcgaggaatttatagctatcgacatcagcggaagagacccagctgtccatccggcaggcatcctctataccctcctggcagaagcctgtttgccagctttcgtgaccgaaaacaatgcactgatcttcgaggaacaccagatttgcacgagcgcaaatctccatcacatcctacagaccatcgagtctggcggactcttcgtggaggatgaaaataaattcatcttctgcaatgtcctggttgggagacaggcaaaggctcggtttaaaatttccaacgtgggtaagatcacttgcgatgtgaatattgtcgtgaggcccatatccaacaagccatttgccagaatcgtggatatctttgaggtagaaccgtccaaaatgtgcattgcatcacacagccacgcctttgcaactgttagcttcacccctcaaatcatgcaaaattaccagtgtatcttcgaggccactctagatggcctgccctcgaccctggccaagagtaggggcttagtgttcgacattgcaggagaaggcaatttacctagggtcactgtagtccgaccagttctacataaccagtatggaaatccattgttgttatttaagcgcctcctcctcggccactctgaaaaactacccctcatccttaaaaataacggcgtgcttccggctcaattacacgtcgacctacaggatgagctgggagtcttttccctcaagggtcggccaacaactgcgtacatttatataactgaggagaacaaaccacacgtgaaagccaagaaggcccacactgccagtctggtagtttcaccaggtgatacagctgaattcgatgtggtttttcactcccagaaagtgggtcgtatgagggggattatccacctgagtgtcatcaataaccaatacgaggagacgtccatccacatggttggagagggctacgaggacgacattactctcgacaatatccatggccttgtcgcacctacgtctcaggaggatatcagtatctctgagttcacagaaatcattgaggacaacgacatggaggatctggtagctgcggcactcgtggaccacatccagtttggggattgtcatattggccattcctacaatgcctccttcactgtgactaaccactctcaggtcaacctcatcagatttgaatggccagtctccgcgacaattgcattctcacctcaaatgggccaccttcaccccggatgtgccaaagatatagtggtcaccatgaaatcagacgtgccaatcaatttaaaaaacatgcggatccgttgtaagctttctagaatcatgtttcagctgcctgcggaccaggttcctgattgggacgacagaatgcacaccgtaaagtgggtggatgtgccgaggaatatgcccggaacgtttactacaaaaaggaaagtcatcgagacagaccccgaaccagcccactcagttctggaggagaactaccaggaactccagcttcagatcagcgccaacgttgattttgcctcctaccactgccaggcacgtgacgtgagattcaaggagacactggtataccaaactcgcgtattcgagtttgatgttattaacagtggcagagtgcagcttgagttcagctgggtcagtgaggacacaagtaaggcggtgagcttcgcgaagcctgaccaccagggcagtgcgcaaaaagaccagctatcgcagggaactatgcatacaggtagcaccctcgacagcaccatggatcattgggcggaaggctcaccgcagccgttttccgtggagcccagttccggcatagtgccagtggggaagatccaaaagttcaaggtgaagttcagcccgctggatatcggagatttcgagagtaaccttttctgtcagattcccaacctgcctcccggtgagcagggcccagtcctggtcgcgaaggggcgatcaactttgcctatatgccattttgacctgaaggatagcgactatatcagtggccaccagcgcaacccggagctaagaggctcctcgggtggggctctcgatcccaatactcgggtgatagagttcacaacagtcggcattgggggaaagaatctacgaactttcacaattctcaaccccactaatagcacttacagcttttgttggatctctgaagagatcgagtcactgcagaacccggctgccttcacgtgcctgaccgagaaggggttcatccacccggaaaaaaaagcagaaatcgtgttccagtttaccccgttccacctcggaatcactgagagcagctggacctttctgattcctgaacacaatataactgtgccgtttctcctggtgggcaaaactactgagcccctaattagtctgaataagagccatcttaacttcagcagcctcttgattgggagagaagcacgggagaccgtgcagatcatcaacaaggaggagcaaggcttcgacttttcattccaggacaattcccgatactccgagggcttctccaactcattactggtgtgcccaatggaggggtggatccctccattgagcagattccccattgacattttttttactcccaagcaggagggagacgtgaattttaatctgatttgtaatgtcgagaaaaaagtacacccagtaaccctcaatgttaaggctgaaggctacacaatgaacgtcgagatcaaatgcaaggacaggaccggatccataacattgcttacccctaatcagaccaacataatcaacttttatgaagtggagctcaatgaatgtgtacagtgcgaattcaactttattaacacagggaagtttaccttctccttccaggcacagctgtgcggctccaaaacattgctgcaatacctggagttctcaccaatcgatagtactgtcgacgtcggacaaagcgtgcatgccaccctttcattccagcctttgaagaagtgtgtgctgactgaccttgagctcatcatcaaaatcagtcacggtccgacatttatgtgcaacatctccggctgcgccgtttcgccagccatccacttcagtttcacctcgtacaacttcggcacctgttttatctatcaggctgggatgccaccatacaagcagactctggttattaccaacaaggaagaaacacccatgtcaatcgactgcttatatacgaatactacccacctcgaggttaattccagggttgacgttgttaagcccggaaacaccctggaaattcccattactttctatccgagagagtctatcaattatcaggaactgatcccttttgaaatcaatggtctgagccagcaaaccgttgagatcaagggaaaaggcaccaagatgaaaatccttgttctcgacccagccaacaggattgtgaaactgggagcagtgctgccaggacaggttgtgaaacgtacagtttcaatcatgaacaattcgctggctcagcttacctttaatcagtcaatcctgttcaccatcccggaattacaggaacctaaagtgctcactttagctcccttccataacatcactcttaagcctaaggaggtttgcaagctcgaggtcatcttcgccccaaaaaaaagagtcccccctttctctgaggaagtctttatggaatgtatggggttacttaggccactgttccttctgagtggttgttgtcaggcgctggaaatctctctggatcaggagcatatcccttttggtccagtggtctatcagactcaggccaccaggaggatactgatgatgaatacaggggatgtgggtgccagatttaagtgggatattaagaagttcgagcctcatttcagcatcagccctgaggaggggtatatcacttcaggaatggaggtgtcttttgaggtgacttaccacccaacggaggtcggaaaagaaagcttgtgcaaaaatattctgtgttacatccaggggggatcccctttgtcactcaccctaagcggcgtctgcgttggcccaccagccgttaaggaggtggttaactttacatgccaagtacgctctaagcacacacagacaattctcctgagcaacaggacaaaccagacatggaatctgcaccctatattcgagggcgagcattgggagggccctgagttcattactcttgaggcccatcagcagaacaagccatacgaaattacttaccgacctaggaccatgaacctggaaaaccggaagcaccaggggaccttgttcttcccactgccggacggcacaggctggctgtacgcattgcacggcacaagcgagttgcctaaagctgttgctaacatttacagggaggtgccctgtaaaacgccatacacagaactcttacctataactaattggcttaacaagcctcaaaggtttagagtgattgtcgagatactgaaacctgagaaacccgatctctctataacaatgaaagggttagactacatcgacgttttgagtgggagtaagaaggactacaaactcaattttttctcccataaggaagggacttatgcagccaaagtgatttttaggaatgaggtgacaaacgaattcctgtactataatgtttcctttcgagtgatcccatcaggcattattaaaaccatcgaaatggttacacctgtccggcaggtagctagcgcgtcgatcaagctcgagaaccctctgccttactctgtaaccttttccaccgagtgcagaatgcccgatattgctctgccctcccagttcgtggtccccgctaacagtgaggggacctttagtttcgaattccagcctttgaaggctggagaaacctttggacgactgaccctgcataataccgatctgggctactaccagtacgagctctatctgaaagctacaccagcactgcccgaaaaacccgttcatttccaaaccgtactggggtcttcccagattattttggtgaaatttatcaactacacacggcagaggacagaatactattgccgcacggactgtaccgatttccacgcggagaagctaatcaacgccgctcccggtgggcagggaggaaccgaagcgtctgtggaagtcctgttcgaaccaagtcatttgggggagactaagggtatcctcatcttaagttctctggctggcggtgagtatatcatcccgttatttggaatggccctgccaccgaaaccacaagggccattttccattcgagctgggtacagtatcattattccgtttaaaaacgtattctaccatatggtgaccttctctattattgtggacaatccagcattcacaatccgcgcaggagagtctgtgagacctaaaaaaataaacaatataactgtgagcttcgaaggcaacccgtctggatcaaagaccccaatcaccactaaattgaccgtgagctgcccgccaggtgagggttctgaaactggcgtcaagtgggtgtattacctgaagggcataactctgtag

SEQ ID NO: 226486 - DNA, 3054 bp, synthetic construct
  misc_feature 1..3054: note = Description of Artificial Sequence: Synthetic coding sequence
  source 1..3054: mol_type = other DNA
atgacatcaagacgtctggaggaaagtatgggagccgtgcaaatggggttagtgaatatgttcaagggattccagagcaaggtgttgcccccactgtcgcccaaagtcgtgacggaagaagaagtgaatcgtatgctgaccccctccgagttccttaaggagatgagtctgactacggagcaacgactggccaagacacgcttaatgtgtagaccccaaattatcgagctgcttgacatgggcgaaaccactcaccaaaaattctccggtattgatctcgaccaggctctttttcagccatttccctcagagattatcttccaaaattataccccatgcgaagtctacgaggtgccgctgatcctgcgaaacaatgacaaaatcccacgcctggttaaagtggtggaagagtcctctccttactttaaagtgatctccccaaaggatattgggcataaggtcgcacctggggtgcccagtatcttcaggatcttgttcacccccgaggaaaataaggactacgcccacaccctaacctgcgtgaccgaacgagagaaattcatagtgcctattaaagcacgcggagctagagctatactagactttcctgacaaattgaatttttctacctgccctgtaaagtactccacccagaaaattctgctggttcgcaacatcggcaacaaaaatgctgtcttccacattaagacgtgccgccctttctcaatcgagcccgctatcggcacacttaatgtaggggagtctatgcagctggaagttgaattcgaacctcagtctgtgggggaccattctggacggcttatcgtatgctacgataccggcgaaaaagtgtttgtcagcctgtacggcgcagcgatagacatgaacatcaggttggataaaaatagcttgacaattgagaaaacctacatctccctcgcaaatcagaggacgattaccatacataatcgcagtaatatcatagcacattttctgtggaaggtctttgccacccagcaggaggaggacagggagaaatatagagcatgcgacgacctgattaaagaggaaaaggacgagaccgacgaattcttcgaagaatgcataacagaccctctgctgagggagcatttgtcagtcctgagtcgtacttttgccaatcagcgacgcttagtgcaaggcgattcaaagctcttctttaacaatgtgtttactgtcgagccactggagggtgacgtctggccaaattcttctgcagagattaccgtgtacttcaacccattggaggctaagctctatcagcagactatctattgtgacatcctgggacgggaaattcgtcttccactgcggatcaagggagaggggatggggcctaaaatacacttcaatttcgagcttcttgatatcgggaaagtttttacaggctctgcgcactgctacgaagctatcctgtataataagggatctatcgatgcgctgtttaacatgacccccccaacgtccgccctcggggcatgctttgtgttttcccctaaggaagggatcatcgagccaagcggggtgcaagctattcagatctccttttccagcacgatcctcgggaactttgaggaagagtttcttgttaatgtgaatggctcacccgagccagtgaaactaacaattcgaggttgtgtgattggtcctacattccatttcaacgttcctgctcttcattttggggatgtctccttcggttttccccataccctgatttgcagtctgaacaacacgagtctgatcccgatgacatataaactaagaataccaggggacggattaggccacaaatcaataagttattgtgagcagcacgtggattacaaacggcctagctggaccaaggaggaaatatccagcatgaagcccaaggagtttaccattagccccgattgtggaacgatacggccacaggggttcgccgctattcgagtgactctctgttccaacactgtgcaaaagtacgagcttgcattggtggtggatgtggaagggatcggtgaagaggttttggccctacttataacagccagatgcgttgtcccagcactgcacctagtaaataccgaggttgacttcgggcattgttttttaaaatacccctacgagaagactcttcagctggctaatcaggacgacttgccgggattctatgaagtgcagcctcaggtatgcgaggaagtgccaaccgtcttgttttcttcgccaacgccatccggcgtgatctcgccgtcgagtaccatccacatcccactggtgctcgagacgcaggtcacgggagaacaccgttccacagtgtacatctccattttcgggagccaggatcccccactggtgtgtcacctgaaatctgcaggcgaaggtccagtgatctacgtgcacccaaatcaggtcgatttcggcaacatatatgtcttaaaagactcttcccgaattctgaatctgtgcaaccagtcgtttatacctgctttcttccaggcccacatggcccataagaagagtctttggaccatcgaaccaaatgaaggcatggtacctccagagacagatgtacagcttgcactcactgcgaatctgaatgatacactgacctttaaggattgcgtgattctagacattgaaaattccagtacctaccggatcccagtccaggcaagcggaaccggatcaactatagtctcagataagccttttgctcccgaactgaacctgggtgctcacttcagcctcgacactcattattatcattttaaactgataaacaaggggagaaggattcagcagctgttttggatgaatgacagcttccgccctcaagccaaactgagtaaaaaaggccgtgtgaagaagggccacgctcatgtacagccacagccaagtggcagccaggaacctcgcgatccgcagtcccctgtatttcacctgcatccagcctcaatggagctttacccaggacaggctattgatgtgatcctggagggatacagtgccacaccaagagttagaggctag

SEQ ID NO: 226487 - DNA, 2223 bp, synthetic construct
  misc_feature 1..2223: note = Description of Artificial Sequence: Synthetic coding sequence
  source 1..2223: mol_type = other DNA
atgacgtcccgccgtctcgaggaatcaatgggggctgtgcagatgggccttgtaaatatgttcaaaggcttccagtctaaggtgcttcctcctctttcacctaaggtggttaccgaggaggaggtaaataggatgctgacccccagcgagttcttaaaggagatgagcctgacaacagagcagcgactcgcaaagacaagactgatgtgccgaccccaaataatcgagctcctcgatatgggggagactacacaccagaaattctccggaatcgacctggaccaggcattattccagcctttcccatctgagattatcttccagaactataccccgtgcgaagtgtatgaagtcccactaatccttcgcaataacgacaagataccacgattagttaaggtggtggaggagagcagcccgtatttcaaggtgatttctccaaaagatattggccataaggtcgctcccggagttccgagcattttccgtattctgttcacccctgaagagaacaaggactatgctcacacattaacttgcgtaaccgaaagagagaaatttatagtgccgataaaagccagaggggctcgggctattttggacttccccgataaactcaacttctccacgtgtcccgtgaagtattcaacccagaaaattctactggtgaggaatattggaaacaaaaatgcagtctttcacatcaagacttgccgacccttttctatcgaacctgccatcggaacattgaatgtcggcgaaagcatgcagctcgaggtggagttcgagccccagtctgtcggagatcattcagggcgactgatagtatgctatgatacgggagagaaggtgttcgtgagtctatatggtgccgctatagatatgaatattaggttggacaagaattcccttacgatcgagaaaacttacatatccttagctaaccagcggacgataacgattcacaaccgatcaaacataattgcccactttctttggaaggtctttgccacgcagcaggaagaggatagggaaaagtatagggcgtgcgatgatttgatcaaagaggagaaggacgaaacggatgaatttttcgaggagtgtattactgacccactcttaagggagcacctgtcagttttgtctcgcacgttcgccaaccaacgacgactggtgcagggcgacagcaagctcttttttaataacgtgttcacagtggagcccctggaaggggatgtgtggccaaattcatctgccgagatcactgtgtactttaaccccctagaagctaagttgtatcaacagactatttattgcgacatccttggcagggagatacgcctccctctgaggattaaaggcgagggtatgggccctaagatacacttcaatttcgaactgctggacatcggaaaagtgtttaccggcagcgcccactgctacgaggccatcctatacaataaaggttctatcgacgccctattcaatatgactccaccaacgagcgctttgggtgcgtgtttcgtgttctcccccaaagaaggcataatcgaaccatccggggtccaggcgatccaaatttccttctcttccaccatcctgggaaacttcgaggaagaattcttggtaaacgtgaacggatctcccgaaccagtaaagctgacaattcgcggatgcgttatcgggcctaccttccattttaacgtccctgcactgcacttcggtgacgtgagcttcgccacacaggagctccgggatccccaggtgctgatacctttccaaaggtttcctcacaccctcatttgcagcctgaataacacttcgcttatcccaatgacgtacaagctgcgcattcccggagacggtctggggcataaaagcatttcctactgcgaacaacacgtggactacaagagaccttcttggacaaaagaagaaatttctagcatgaagcctaaggaatttactatatccccagattgcggtaccatcagaccccagggtttcgccgcaatccgcgttactctctgctcaaacaccgtgcaaaagtatgaactcgccctcgtcgtggatgtcgaggggattggcgaggaggtgctggctctactgattaccgccagtgctcctgaactatgcaaccggaaggtgatgctctctgtgcttcagtggaagatccatagagccaagaggtccctgccgcgagacacagttgccgtcacttag

SEQ ID NO: 226488 - DNA, 3645 bp, synthetic construct
  misc_feature 1..3645: note = Description of Artificial Sequence: Synthetic coding sequence
  source 1..3645: mol_type = other DNA
atgaccagccgccgactcgaggagtccatgggagccgtgcagatggggctggttaacatgtttaagggttttcagagcaaggtcctgcctcctctgtcacctaaagtagtgactgaagaagaggtcaaccggatgctcacacccagcgagttcttaaaggagatgtccttgacgacagagcagcgcttagccaagacacggctgatgtgtcgccctcagattatcgagcttctggatatgggagaaacaacgcatcagaagttctctggaattgaccttgatcaggcactattccagccatttccttctgaaataatatttcagaactatacgccttgtgaggtgtatgaagtcccgcttattctccgcaataatgataagattccccgattggtgaaagtggttgaggaatccagtccttatttcaaggtaattagtcctaaggacattggacacaaagtcgcacccggagtaccgtccatttttagaatcctgttcactcccgaagagaataaagactatgctcatacacttacctgtgttaccgaacgagagaagttcatcgttcctatcaaggctcgaggcgctcgtgccattttggattttcccgacaagctcaactttagtacttgccctgtgaaatattccacccagaaaatactgttggtgcgcaatatcgggaataagaatgctgtgttccacattaagacgtgtaggccctttagcatcgagcctgcaatcggtactctgaatgtcggagagtccatgcagcttgaggttgagtttgaacctcagagcgtgggcgatcactccgggaggctgatcgtgtgctacgacacaggtgagaaagtcttcgtttccctgtacggcgctgcaattgatatgaacatccgattggacaaaaacagccttaccattgaaaaaacatatatctctttagctaatcagcggacgattaccatccacaaccgaagtaacattattgctcacttcctttggaaagtcttcgccacccagcaggaggaagaccgcgaaaagtatcgggcttgtgatgacctcattaaggaagagaaagacgaaacagatgagttcttcgaagagtgtatcacagatcccttgttaagggagcacctgtctgttctgagccgcacatttgccaaccagagaaggctagttcagggagactctaaactcttttttaataatgtgtttaccgtggagccccttgaaggcgacgtgtggcctaacagttctgccgaaatcacagtctatttcaatccattggaggcaaaactctatcagcagacaatatactgcgatatcctgggtcgggaaataagactgcccctacgcataaaaggcgaaggcatgggtcccaagatccactttaacttcgaattgctcgatattgggaaagtattcacggggtccgctcactgctacgaggctatcctctacaacaaaggatctatcgacgcactgtttaacatgactcccccaacatctgcccttggggcttgtttcgttttttctcccaaggaggggatcatcgagccgtccggcgtgcaggcaatccaaattagctttagctccaccatactaggcaactttgaagaggaatttttggttaatgtgaatggctccccggaacccgttaagttgaccattagggggtgtgtcattggcccaacttttcattttaacgttcccgctctgcatttcggtgacgtatcctttggcttcccacatacactaatctgttctctgaacaacaccagtttgattcctatgacttacaagctgcgcatccccggtgacggacttggccacaagtccatctcttactgcgaacaacacgtggattacaagcggccaagctggacgaaagaggagatttccagtatgaagcctaaggagtttacaatttcacctgattgtggcacaattcgtccccaagggttcgcggctattagagtgactctgtgcagtaataccgttcagaaatacgagctggccttggtcgtcgatgtagagggtattggagaagaagttctagcactcctcattacagcacgctgcgtagtgccggctctccacctggtcaatacggaagtggatttcggacactgctttttgaaatacccctatgagaaaaccctccaactagccaaccaggacgatctgcctggcttctatgaggtgcagccccaggtgtgcgaagaagttccaaccgtcctcttcagcagccctaccccttctggagtgatcagtcctagctccaccatccatataccgctagtgctggaaacgcaggtaaccggagagcataggagtactgtgtacatctctatcttcggctctcaggatcccccactcgtgtgtcatctaaagtcagccggtgagggcccagtgatttatgtccatcccaatcaggtagattttgggaatatatatgttttgaaggatagctctcggatcctcaatctgtgtaaccaaagcttcataccagccttcttccaagcccatatggcccacaaaaaatcactgtggacaattgagcccaatgaggggatggttccacctgagacagatgtccaactcgccctgacagccaacctgaacgacaccctgacattcaaagattgtgtcatcctggacattgaaaattcgagcacataccggattcccgtccaggcatcaggaaccggcagcacaatcgtctccgacaaaccttttgctcctgagctcaaccttggcgcacatttctcgctcgacactcactattaccacttcaaactgatcaacaagggacggaggatccagcaactattttggatgaacgattctttcaggccccaggctaaattgtccaagaagggacgggtcaagaaaggccacgctcatgtgcaacctcagccctccggttcccaagagcctcgtgatcctcagtcccccgttttccatctgcatcccgctagtatggagctttatcctggtcaggccattgatgttattctcgagggctacagcgcgaccccacggaagccaaattccatcctgaaaccagactatcagccccttgccattaagaatatttccactctcccagtgaacctgttactatcaacctcagggccatttttcatctgtgaaactgacaaatcactcctccccgcaacaccagaacctattaaactggagattgatgaagaaaagaacctgctgattaaatttgacccaagctatagaaacgacctgaacaattgggttgctgaggaaattttagcaatcaagtacgtggagcaccctcagattgattcgctggatctcagaggcgaagtccactatcctaacttgtcttttgagactaaagagctcgactttggatgtatccttaacgataccgaactgatccgctacgtgaccatcactaactgcagccctttagtggtcaagtttagatggttcttccttgtaaatgacgaggagaaccagattcgcttcgtcacgctcccaaaaaagccttacagcgctcctgtgtctcagatggagtccatccccgcaacgtccgaagccgcatcacctcctgccattcttgtaaccgtggagagtccagaaatggacctcaatgacttcgtaaagtag

SEQ ID NO: 226489 - DNA, 3054 bp, synthetic construct
  misc_feature 1..3054: note = Description of Artificial Sequence: Synthetic coding sequence
  source 1..3054: mol_type = other DNA
atgacatccagacgcctggaagaaagtatgggcgctgtgcaaatgggactggttaatatgtttaaggggtttcaatcaaaggtgctgcctccactgtcccctaaggtggttactgaggaagaggtgaatagaatgttgacgccctcagaattcctaaaggagatgtctctcaccacagaacagcgcctggctaagaccaggctcatgtgtaggccacaaattattgagctgttggacatgggcgagacaacacatcagaaattctcgggcattgacctggatcaggccttattccaaccctttccatccgaaattatcttccagaattatacaccctgtgaggtctacgaagtgccactgattttacgtaacaacgataagataccacgcctggtgaaggtggtggaggagtcctcaccctattttaaagtgatcagccccaaagacatcggacacaaggtggccccaggtgtccccagcattttccgtatcctgtttacacctgaggagaacaaggattacgctcacactctcacatgcgtcacagaacgcgagaagttcattgtgcccatcaaggcgaggggagccagagcaatcctcgactttcccgacaaattaaacttttctacgtgcccggtgaaatactccacacagaaaatacttcttgttaggaatattgggaacaaaaatgctgtgtttcatattaagacttgcaggcccttctctatcgagccagccatcggaactcttaatgtgggagagtcaatgcagctggaggtggagtttgaaccacaaagcgtaggagaccatagtggacggttaattgtttgctacgatacaggagaaaaggtctttgtttccctgtacggagccgctattgacatgaacatccgcctcgataaaaactccttaacaatcgaaaagacctatataagccttgcaaaccagagaacaatcaccatccacaaccggtctaacatcatagcccactttctgtggaaagtgtttgcaacccagcaggaggaggacagagagaagtaccgcgcatgcgacgatctgattaaggaagagaaagacgaaactgacgaattcttcgaggaatgtatcaccgaccctctgttgcgggaacacctgtccgtgctgtcacggactttcgccaaccagagaaggctcgtacagggagattctaagctgttttttaacaacgtgttcaccgtagagcccctggagggcgatgtatggcctaactcttcagctgaaatcacagtctacttcaatcctctagaggccaagctgtatcagcagaccatctactgcgacattctcggcagggaaatcaggctcccactgcggattaaaggcgaagggatgggaccgaagatacacttcaatttcgaacttctggacattggcaaggtgttcaccggctcagcccactgttatgaggcaatactgtataacaaaggcagtatcgatgccttattcaacatgactcccccaaccagtgccttaggtgcctgctttgtgttttctcctaaggagggcattatcgagccctcaggggttcaggccatccagatcagcttcagctcaaccattcttgggaacttcgaggaagagtttctggtaaatgtgaacgggtccccagaaccagttaagctgaccatcagagggtgcgtgataggccctacctttcattttaatgttcctgctctgcactttggagatgtgagctttgggtttccacataccctgatatgttcacttaacaatacatcgcttattcccatgacatacaaactacgcattccaggtgatggactggggcataagagcatttcctactgtgagcagcacgtcgattacaaaaggccatcttggacgaaagaagagataagctctatgaaacctaaggagttcaccatcagccctgattgtggaaccatccggcctcagggattcgctgccatccgtgttactctatgctccaacacagtccagaaatatgagctggccctggttgtggatgttgagggaataggcgaagaggttctggcgctgctcatcacagcacgttgtgtggtgcctgcactccatctagtcaatactgaggtggatttcgggcattgcttcctaaaatacccttacgagaagaccctgcagctggcaaaccaggatgatctacctgggttctatgaagttcagccccaagtctgcgaagaagtacctaccgtgctcttttcatctcctaccccgtccggtgtcatctccccttcctcaacaatacatatacccctggtgctcgaaacacaggttaccggagaacaccgctccacggtttatatcagcatcttcggatctcaagatcctcctctggtgtgtcatctgaagagcgccggagagggtccagtgatctacgtgcaccccaaccaggtggactttggaaacatctatgtgcttaaggactctagccgaatcttgaacctttgtaaccagtcgttcatcccagcattttttcaagctcacatggcacacaaaaaaagcctctggacaatcgagcccaatgaggggatggtgccaccagagactgatgttcaactggcactaaccgctaacttgaacgacacactgaccttcaaggattgtgtgatactggatatcgagaatagttctacatatcggattcccgtccaggctagcggaactggaagcactattgtatcggacaaaccttttgcccctgaattaaacctaggtgcccatttttctctggatacccattattaccacttcaagctgattaataaaggtcggagaatccaacagctcttctggatgaatgacagcttcagaccacaggccaaactgtctaagaagggtcgggttaagaaggggcacgctcacgtacagcctcagccctctggtagtcaggagccaagggacccccagagtccggtatttcacctgcacccagcttctatggaactctatccaggtcaggccattgatgtaatcctggaaggatatagcgcgacgccgagggtgcgtggctag

SEQ ID NO: 226490 - DNA, 822 bp, synthetic construct
  misc_feature 1..822: note = Description of Artificial Sequence: Synthetic coding sequence
  source 1..822: mol_type = other DNA
atggcaacctgggacgagaaggccgtgacgcggagagctaaagtggcacccgctgaaaggatgagcaagttcttgcgacactttacggttgttggggacgattaccacgcttggaatattaactacaagaagtgggagaatgaggaggaagaggaggaagaggaacagcctccaccaacacctgtatccggcgaggaaggccgagccgctgctcccgatgttgcccctgcacctggccctgctccgcgagccccattggatttccggggaatgctccgtaagctgttctcatcacacaggttccaggtcatcataatctgcctggttgtactagacgcattgcttgtgctggcggaattgatattagacctgaaaattattcagcccgacaaaaataattatgcagcaatggtgtttcattatatgtcgattacaattctggttttttttatgatggagatcatttttaagctgttcgtgttcaggttagaattctttcatcataagttcgaaattctcgacgccgtcgtagttgtcgtctcctttatccttgatatcgtgctccttttccaggagcaccagtttgaagctctggggttgttgatactcttgcgactttggagggtcgctcgcatcataaacgggatcatcattagtgtgaagaccagatccgagcgtcagctgctcaggctaaaacagatgaacgtgcagctggcagccaaaatccagcatttggaattctcctgctcggaaaaagagcaggagatcgagaggttgaataaactgttgagacaacacggtcttctgggcgaggtaaactag

SEQ ID NO: 226491 - DNA, 822 bp, synthetic construct
  misc_feature 1..822: note = Description of Artificial Sequence: Synthetic coding sequence
  source 1..822: mol_type = other DNA
atggccacttgggatgagaaggccgtaaccagaagagcaaaggtagctcccgctgagagaatgagcaagtttctgaggcactttaccgtggtgggtgatgattaccacgcttggaacatcaactacaagaaatgggagaacgaagaagaagaggaagaagaggagcaacctccacctactccagtgagcggagaggagggacgggctgcagcaccagacgtcgcaccggcaccaggacctgctcctcgtgctccactcgattttcgtggaatgctgcgcaagcttttcagttcgcaccgatttcaggtgatcatcatttgtctcgtcgtccttgacgcgcttcttgtcttggccgagctaatactagatctgaaaatcattcaaccagataagaataattacgctgcaatggtgtttcattatatgtctatcacaatcctcgtattctttatgatggagatcatctttaagttgtttgttttccggctggagttctttcatcacaaattcgagatcctggatgctgtcgttgtggtggtctcatttatcctggatattgtccttctcttccaggagcatcagtttgaggcgttgggcctcctgattctcttgagactttggcgagtggcccgaatcatcaacggcatcatcatttccgtgaaaacacggtccgagcgtcagctcctgagattaaaacaaatgaatgtgcagctggcagcaaaaattcagcaccttgaattctcttgttccgagaaagagcaggagatcgagcggctgaacaagctccttcgccaacacgggcttctcggagaagtaaactag

SEQ ID NO: 226492 - DNA, 237 bp, synthetic construct
  misc_feature 1..237: note = Description of Artificial Sequence: Synthetic coding sequence
  source 1..237: mol_type = other DNA
atggctacctgggatgagaaggcagtgacgcgcagggcaaaggtagctcccgctgaaaggatgtctaagttcctgagacacttcacggtagtaggtgatgactatcatgcgtggaatattaattacaaaaaatgggagaacgaggaagaagaggaagaagaggagcagccaccaccaacacctgtgtccggggaagagggacgagccgctgcacctgacgtagccccagctccgtag

SEQ ID NO: 226493 - DNA, 900 bp, synthetic construct
  misc_feature 1..900: note = Description of Artificial Sequence: Synthetic coding sequence
  source 1..900: mol_type = other DNA
atggaagaactactccctgatggacaaatctgggcaaacatggacccagaggaacggatgcttgctgcggctaccgcattcactcacatctgcgcaggacagggagagggcgacgttagaagagaagcgcagtctatccagtacgacccatactctaaggcttccgtggcacctggaaaacgccctgcgctgcccgttcaactgcagtacccccacgtcgaatcaaacgtgccttccgaaaccgtcagcgaagcctcccagaggttgcgcaagcccgttatgaagcggaaagttctgcggcgaaaacctgacggagaggtgttggtcaccgacgagagtatcattagtgaaagtgaaagcgggacggagaacgaccaggacctgtgggacctacgacaacgactcatgaacgtacagttccaggaggataaggaatcatcttttgatgtttcccagaagtttaacctgccccacgagtaccaggggatctcacaggatcagctcatctgcagcttgcaaagagagggcatgggttcccccgcttatgaacaggacctgatcgtcgcctcgcggcctaaatctttcatcctgcccaagctggatcaactttcacggaatagaggcaagaccgaccgtgtggcaaggtatttcgagtacaagcgcgattgggactcaatccggttgcctggggaagatcaccgcaaagaactcaggtggggagtccgcgaacaaatgttgtgcagagccgagccccagagcaaaccgcagcacatctacgtgcccaacaattatctggtaccaaccgaaaaaaaacgcagcgcactcagatggggtgtccgctgtgatctcgccaatggcgttattccccgaaaactgccttttccgctaagtccctcctag

SEQ ID NO: 226494 - DNA, 900 bp, synthetic construct
  misc_feature 1..900: note = Description of Artificial Sequence: Synthetic coding sequence
  source 1..900: mol_type = other DNA
atggaggagctgcttcctgatgggcaaatctgggcgaatatggatcccgaggaaaggatgctggcagccgctaccgcttttactcacatatgtgccggtcagggagagggggacgttcggagggaggcgcagagcatccagtacgatccctattctaaggcgtctgttgcgccaggcaaaaggcccgctctgccggttcagttacagtatcctcacgtggagtcaaacgttccaagcgagaccgtatctgaagcgtcgcagaggctgcgcaagccagtgatgaaacggaaggtactccgcagaaaacccgacggagaggttttagttactgatgagtcgataattagcgaaagtgaaagcgggactgagaatgaccaggacctctgggaccttaggcaacggcttatgaatgtgcagttccaggaggataaggaatcaagtttcgatgtctcacaaaaatttaacctcccacatgagtatcaaggtatttctcaagatcagctcatttgtagcctgcagagagaggggatgggaagcccagcatacgagcaagacctgatcgttgcctcccgaccaaagtctttcatactgcccaagctggaccagttatcaaggaacagggggaagaccgacagggtggccaggtatttcgagtataagagggattgggactccattcgcctgcccggtgaagaccatagaaaagagcttaggtggggcgttagagaacagatgctgtgccgagcagaacctcagagtaaaccgcagcatatctatgtgcctaataactacctggtgccaactgagaaaaagcgcagcgcactgaggtggggtgtcagatgtgacctcgccaacggcgttatcccacggaagttaccctttccacttagccccagctag

SEQ ID NO: 226495 - DNA, 900 bp, synthetic construct
  misc_feature 1..900: note = Description of Artificial Sequence: Synthetic coding sequence
  source 1..900: mol_type = other DNA
atggaggagctgctccctgatggccagatttgggcaaacatggacccagaggaaaggatgctggccgctgcaactgcattcactcacatttgtgccggtcagggcgagggcgacgttaggagagaggcccaatcgatccagtacgacccgtattctaaggcgtcagttgctcctggtaaacgaccggctctcccggtccaactgcaatacccccatgtagaatcaaacgtgccctctgagactgtgtctgaagcatcccagcggctccgcaagcccgtcatgaaacggaaggtcttacggaggaagcccgatggtgaggtcctcgtaaccgacgagtcgattatcagtgagtcagaaagcggcactgagaacgatcaggatctgtgggatcttcggcagcgactgatgaacgtccagtttcaggaggacaaagagtcgtccttcgatgtgtcacagaagttcaatctgccgcacgagtatcagggtattagccaggatcagttgatctgcagcctgcaaagggagggaatggggagccccgcttacgagcaggatctgattgtggccagcaggcctaagagctttatcctgcctaagctggatcagctgtccaggaatcgcggtaagacggaccgggtcgctaggtactttgaatataagcgagactgggacagtatccgtctcccgggtgaagaccatcgtaaagagctgagatggggggtacgggagcagatgctgtgtcgggctgagccccagagtaagccccagcatatatacgttcctaataattacttggtgcccactgagaaaaagcgaagtgctttacgatggggcgtgagatgtgacctggccaatggggtcatccccaggaagttgccctttcctctgagcccaagctag

SEQ ID NO: 226496 - DNA, 1113 bp, synthetic construct
  misc_feature 1..1113: note = Description of Artificial Sequence: Synthetic coding sequence
  source 1..1113: mol_type = other DNA
atgctgcccaggctgatctgcattaatgactatgagcagcacgccaagtccgtcctgccgaaaagcatttacgactactaccgctctggcgcaaacgatgaggaaaccctggccgataatattgcagcattctcgaggtggaaactatatcctcggatgttgcggaacgtggccgaaaccgacctctccaccagcgtcttaggacagcgggtaagtatgcccatctgcgtcggtgctaccgctatgcagcggatggcacacgtagacggagagctggcaaccgtcagagcgtgtcagtctctgggcaccggaatgatgctgtcttcctgggcgaccagcagtattgaagaggttgccgaagccggtcccgaagccttacgttggttacagctgtatatctacaaggaccgggaggtgaccaagaagctggtgagacaagcagagaagatgggatataaggcgattttcgtgactgtggatacaccctatctcggcaatcgccttgatgatgtgcgcaaccgatttaaactgccaccacaactcagaatgaagaactttgaaacctcaacactgtcgttctctcccgaagagaacttcggcgacgactccggcctggccgcatacgtcgccaaagctattgacccttcaatttcatgggaggatattaaatggctaaggcgtctcaccagccttcctattgtggccaaaggcattctccggggtgacgacgcgagagaagcagtgaagcatggtctgaacgggatcctcgtttcaaaccacggcgctcgccagctcgacggagtgcctgcaaccatagatgtgctacccgagatcgttgaggctgtggagggcaaagtcgaggtgttcctggatggaggcgtacgtaaaggaacagacgtactgaaagcgctcgctctgggggcaaaagcggtgttcgtcggtcgtccgattgtctgggggctcgcttttcagggggagaaaggggtacaggacgtgcttgaaatcctgaaggaggagttcagactggcaatggctttgtcgggctgccaaaacgtcaaggttattgacaaaactcttgtccgcaaaaacccactggcggtgtcaaaaatctag

SEQ ID NO: 226497 - DNA, 1056 bp, synthetic construct
  misc_feature 1..1056: note = Description of Artificial Sequence: Synthetic coding sequence
  source 1..1056: mol_type = other DNA
atgtcgctggtatgcttgactgactttcaagcacacgcgcgagagcagctctcaaagtcaactcgagatttcattgagggaggggctgatgactctatcacaagggacgacaacatagccgcattcaaacggatcaggctccggcctcggtatctgagagacgtgtctgaggtagatactcgcacaactatccagggagaggaaatttccgctcctatctgtattgccccaacgggattccattgcctggtgtggcccgacggagagatgtctaccgcaagggcagcacaggcggctgggatctgttacattacttccacattcgcttcctgctcacttgaggatatcgtgattgccgctccagaggggcttagatggttccagctgtacgttcatcccgacctgcagcttaataaacagttgattcagagggtggagtctttaggcttcaaagccctagtcataaccctggatactccagtgtgcggcaatcgtcggcacgatatccggaatcaactccggagaaatctcacgctgactgatctgcagtcgcctaaaaaagggaacgctatcccctattttcagatgacccccatcagcacatccctctgttggaatgacctgtcctggtttcagagtataaccaggctgcctatcatactgaagggtatcctgaccaaggaagacgccgagctggccgtaaagcataacgtccaggggattatcgtcagcaatcatggtgggagacagctggacgaggttttagcttctatcgacgccctcaccgaagtggtcgctgcagtgaagggcaagatcgaagtctatctggatggaggggtgcgcactggcaacgatgttctcaaagccctcgcgcttggtgctaaatgtatttttctgggcagaccaatcctgtggggcctggcctgcaagggtgagcatggcgtcaaggaggtactgaacatactgactaacgaattccacaccagcatggcgctgacgggttgcagatctgtggctgagatcaacagaaacctcgtacaattctcaagattatag

SEQ ID NO: 226498 - DNA, 1095 bp, synthetic construct
  misc_feature 1..1095: note = Description of Artificial Sequence: Synthetic coding sequence
  source 1..1095: mol_type = other DNA
atggaggacaagatgtggtccgaatgtgaggggcctgagatgagcctggtgtgtctcactgattttcaagcccacgcgagagagcagctgtccaagtctacacgcgacttcattgagggcggagcagacgattccataactcgtgatgacaatatcgctgcattcaagaggatccgactgcgccctaggtacctccgggatgtttccgaggtggatacacgcactacgatccagggcgaggagatctctgcacccatttgcattgcccctacagggtttcactgtcttgtctggcccgatggggagatgtctacggccagggcggcacaagccgctggtatatgctacattactagcacatttgctagctgctctctggaggacatcgtgatcgccgcaccagagggcctccggtggttccagttgtacgttcaccctgaccttcagttgaacaaacagttaatacagagggtcgaatcacttggcttcaaagcacttgtaatcaccctcgacacacccgtgtgcgggaatcgacgtcacgacatcaggaaccagttaaggaggaatttgaccctgactgacctccaatctccaaagaaagggaacgctatcccctattttcagatgacgcctatctccacatctctgtgttggaatgatctcagctggtttcaaagtattacccggctgcctattatcttaaaaggcattctgactaaagaagatgcagaactggccgtcaaacacaatgttcagggtataattgtatcaaaccacggaggtagacaattggatgaggtgctagctagtattgacgcgctgacggaggtggtcgcagccgttaagggaaagatcgaggtgtacctggatgggggagttaggacaggaaacgacgtgctgaaggctctggcacttggcgcaaaatgcatttttctgggaagacccattctgtggggtttagcatgcaaaggagaacatggagtcaaggaggttttaaacatcctcaccaacgagtttcatacctcaatggcgctcacaggatgcaggagcgtggctgaaattaacaggaatctcgtccagttttcgagattgtag

SEQ ID NO: 226499 - DNA, 561 bp, synthetic construct
  misc_feature 1..561: note = Description of Artificial Sequence: Synthetic coding sequence
  source 1..561: mol_type = other DNA
atgtcgttggtatgcctcaccgatttccaagctcacgctagggaacagctgtcaaagagcacccgggatttcatcgagggaggagccgacgattctatcacccgcgacgacaatatagcggcttttaaaagaatcagactgcgccctaggtatctccgcgacgtgtccgaagtcgacactagaacaactattcaaggggaagaaatatccgcaccaatctgcatcgccccaactggctttcattgtttggtctggcccgatggggaaatgagcacggccagagcacctgaaggacttaggtggtttcaattatacgtccacccagatcttcaactgaacaaacagctcatacagcgtgtcgagtccctaggctttaaggctctggtgatcacactcgacacccctgtatgcgggaataggcgccacgacattcgaaatcagttacggcgtaatctgaccctaaccgacctgcagtctcctaagaagggtaacgccattccgtatttccaaatgaccccaatttcgacctcactctgctggaacgacctgtcttggttctag

SEQ ID NO: 226500 - DNA, 2292 bp, synthetic construct
  misc_feature 1..2292: note = Description of Artificial Sequence: Synthetic coding sequence
  source 1..2292: mol_type = other DNA
atggtggcctgtcgagctatcgggattctgtcccgcttttcagccttccggatccttcggtctaggggctacatttgcaggaacttcacaggtagctccgctctgctcacacgaactcacatcaattatggagttaagggagacgtcgccgtggtccgcatcaatagcccaaattctaaggtgaatactctgagcaaagaactgcattcagagttcagtgaggtgatgaacgagatttgggcctccgaccagatccgcagtgccgtgcttatctctagcaagccaggctgcttcatcgcgggagctgacattaatatgctggccgcttgtaaaacactgcaggaggtcactcagctgtcgcaggaagcccagagaatcgtagaaaagctcgaaaaatctaccaagccgatcgtcgccgctatcaacggatcttgtctagggggagggctcgaggtggcaataagctgtcagtatcgaatagcaactaaggatcggaaaactgtgttgggcactcccgaagttctgctcggagcactccccggagccggaggaacccaaagactgccgaagatggtgggcgttcccgcagctctggatatgatgctgacaggaaggtctattcgggctgaccgtgccaagaaaatgggccttgttgaccagctggtggagccactaggacccggattgaagccccctgaggagaggactattgagtatctggaggaggtggcaatcacgtttgccaaaggcctggctgacaaaaagatatccccaaagcgagataagggacttgtagaaaagttgacagcttacgctatgaccattcccttcgtcagacaacaagtatacaagaaggtggaggagaaagtgcgcaagcagactaaaggcctgtaccccgctcccttgaaaatcatagatgtggtgaaaaccggaatcgaacagggatctgatgccggttatctttgtgagtcccaaaagtttggcgagcttgttatgaccaaagaatccaaggctctcatggggctgtatcacggccaagtgctttgtaagaagaacaaatttggcgcaccccagaaagacgttaagcatttagccatcctgggcgctggcttaatgggcgcagggatcgcccaggtttccgtggacaagggtctgaaaactatattgaaagatgccactctcacggcacttgaccggggacaacagcaggtatttaaggggctgaacgacaaggtgaagaaaaaagctttaaccagcttcgaaagggacagtatattcagcaacctcaccggtcagctggattaccagggatttgagaaggcggacatggtgattgaggccgtcttcgaagatctctcactgaagcacagggtgctgaaggaggtggaggcggtgattccagatcattgcatcttcgcctcaaacaccagtgcgctccccatttccgagattgctgcggtgtccaagagacctgaaaaggtgattggcatgcactacttcagtccagtggataaaatgcaactgttagagattatcacaactgaaaagacgtctaaagataccagcgcctccgccgtggccgtgggtctgaaacagggtaaagtgatcatcgttgtgaaagatgggcctggcttttacacaacgagatgcctcgcccctatgatgtcggaggtgatccggatcctacaggaaggcgtggacccaaagaaattggattccttgacaactagctttgggtttcccgtgggagcagcaacactggtcgatgaagtgggagtggatgtggctaagcatgtggcagaggaccttggcaaggtgttcggtgaacggttcggcggtggcaacccagagttgcttacccagatggtatccaaaggctttttgggcagaaagtcaggaaagggcttttacatttatcaggagggagtcaagaggaaggatttaaactctgacatggacagcatactcgcttctcttaaactccccccaaaaagtgaagtcagtagtgacgaggatattcagtttagattggttactcggttcgtgaacgaggcagttatgtgcctgcaggaaggcattctggctactcccgcagagggtgacattggcgcagtgtttggccttggctttcccccttgcctcgggggtccattcaggttcgttgatctttacggagcccagaagatcgtggaccgcttgaaaaagtacgaagctgcctatggaaagcagttcaccccctgccagttgctggcagatcacgccaacagtcctaataagaaattttaccagtag

SEQ ID NO: 226501 - DNA, 783 bp, synthetic construct
  misc_feature 1..783: note = Description of Artificial Sequence: Synthetic coding sequence
  source 1..783: mol_type = other DNA
atggaatcaaagggcatgtggcagctgttcgaactgactctcccaatccagtcaatgctggccgcttgcaagacactccaggaggtcactcaactctcccaggaagcccagcggatcgttgagaaactggaaaaatccacaaaaccaattgtggccgctatcaacgggtcctgcctcggtggtggcctcgaggtcgctattagttgtcaatatcgaattgccaccaaggaccggaaaactgttctgggtacccctgaagtccttcttggcgctctgccgggagccggaggaacacagcgcttaccgaaaatggtgggggtgcctgccgcactggacatgatgttgaccggaaggtctattcgggcagatagagccaagaaaatgggcctcgtggaccagcttgtcgaacccctgggcccaggtctaaaaccacctgaggaacgaacgattgagtaccttgaggaggtggctattaccttcgctaaagggctggcagataagaagataagtcctaagagagacaagggcctggtggagaagcttactgcgtacgccatgacgatcccatttgttcggcagcaggtgtacaagaaagttgaagaaaaggtccggaagcagacaaaagggctgtatcccgcacccctcaaaatcatcgacgttgttaaaacaggcattgagcagggtagtgatgccggatacttgtgtgagagccaggtgaacctgtttccatttaatgtactgctaagtgtcaagggcaagctcaagatacaaagttccgtctag

SEQ ID NO: 226502 - DNA, 1425 bp, synthetic construct
  misc_feature 1..1425: note = Description of Artificial Sequence: Synthetic coding sequence
  source 1..1425: mol_type = other DNA
atgaccattctcacctacccattcaagaacttgccgacagcgtctaagtgggccctgagattttccattcgccctctgtcttgttcctcccagcttcgggctgcccctgccgtgcagacaaaaacaaagaaaacactggcgaagccaaatatccgcaatgtcgtggttgtcgacggggtgcgcactcccttcttactaagcggaaccagttataaagacctcatgccccacgatctggctcgggcagcactcaccggcctcttgcaccggacatccgttcccaaggaagtcgtggactatataatttttggaaccgtgattcaggaggtgaagacatctaatgtggcccgagaagcagccctgggagcgggttttagcgacaagacgcccgctcacaccgtgacaatggcctgtatctccgccaaccaagctatgaccaccggcgtgggtcttatcgcctctggccagtgcgatgtgatagtggctggcggagtcgagcttatgtcagacgtgccgatcagacactcacgtaaaatgcggaaactgatgctggacttgaataaagcaaagtcaatgggccagcggctatcattgatttctaaatttcgtttcaattttctggctcccgaattgccagccgtgtccgagtttagcacttccgaaaccatgggccattctgcagaccgccttgcagctgcatttgccgtttcaaggctggaacaggacgaatacgcccttcgttcacatagcctagccaaaaaggctcaggacgaaggcttgttgtccgacgttgtcccatttaaagtacccggtaaggatactgtgacgaaagataatgggatcaggccgtcatccctggagcagatggccaagcttaagcctgcctttatcaagccttacggtactgttactgccgcaaacagctccttcctgaccgatggcgcttcagcaatgttaataatggctgaagagaaagcactggccatgggctataaacctaaggcctatctgcgtgacttcatgtatgtgtcccaggatccaaaagatcagttactgctgggacccacttacgccacacctaaggtgctcgaaaaggctggcctgacaatgaacgacatcgacgccttcgagtttcacgaagctttctctgggcaaatcttggctaacttcaaggctatggactccgattggtttgccgagaattatatggggcgtaaaaccaaagtaggtcttcctccgctggaaaaattcaacaactgggggggatcactgagtttagggcaccccttcggcgctactggatgccgcttggtcatggcagccgctaataggctccgcaaggaggggggacagtatggattggtagctgcgtgcgccgctggaggccagggacacgccatgatcgtggaggcttatcccaaatag

SEQ ID NO: 226503 - DNA, 258 bp, synthetic construct
  misc_feature 1..258: note = Description of Artificial Sequence: Synthetic coding sequence
  source 1..258: mol_type = other DNA
atgacaattctcacttacccctttaaaaacttgccgaccgccagcaaatgggccctgcgattctccatccgtccgctgagctgtagctcacagctgcgtgccgcacccgctgtgcagaccaagacaaaaaagacactcgccaagcctaacattcggaacgttgttgtcgttgacggcgttcgaaccccctttctcctgtccggaacatcctacaaagacctgatgccacatgatcttgctcgagctgctctcacgtag

SEQ ID NO: 226504 - DNA, 531 bp, synthetic construct
  misc_feature 1..531: note = Description of Artificial Sequence: Synthetic coding sequence
  source 1..531: mol_type = other DNA
atgaccatactcacatatccctttaaaaatctgcccacggccagcaaatgggcgctcaggttttccatcagaccactctcatgctcaagccagcttagggcagccccagccgtccaaacaaagactaagaagacgctggccaagcccaatatacgaaatgtggtggtcgtggatggtgtgcgcacgccctttctgctgtccggcactagttataaggacctaatgccccatgatctggcgagggctgctttgactggattactgcatcggacatcagttcccaaggaagtagttgactatatcatctttggaacagtgatacaggaggtgaaaacgtcaaacgtcgccagagaggctgccctgggagccggtttctcggacaagaccccggcacacacagttaccatggcttgcatatccgctaatcaggccatgaccactggagtgggcctgattgcatcaggccaatgtgacgtgattgtcgcagggggagtggagctgatgtcggacgtgcctatccgccattcctag

SEQ ID NO: 226505 - DNA, 453 bp, synthetic construct
  misc_feature 1..453: note = Description of Artificial Sequence: Synthetic coding sequence
  source 1..453: mol_type = other DNA
atgacgatcctcacatacccctttaaaaacttacccactgccagcaaatgggccctccggttcagcattcgccctctcagttgcagttctcagcttagagcagcccctgccgtgcagactaaaaccaaaaaaacactggctaaaccaaacatccggaacgttgtggtagtggacggagtgcggaccccattcctcctaagcggcacatcttacaaagatctgatgccccatgacctcgctcgtgccgctctgacaggtctgctgcatcgaaccagtgtgcccaaagaggtggtggactatatcatattcggcacagtgattcaggaagtgaaaacctccaatgtggcgagggaggccgctttgggggcaggcttttcagataagacgccagcccacacagtgaccatggcttgcatctcagctaatcaggcaatgacaacaggagtcggatag

SEQ ID NO: 226506 - DNA, 1380 bp, synthetic construct
  misc_feature 1..1380: note = Description of Artificial Sequence: Synthetic coding sequence
  source 1..1380: mol_type = other DNA
atgactatcctgacataccccttcaagaatcttcccactgctagtaaatgggctctccgcttttcaatcaggccgctgtcctgctcctctcagctgagggccgctccagctgttcagacaaagacaaagaaaacactggccaagccaaatattaggaacgtggtggtcgtagacggagtacggaccccattcctattatccggaacaagcgggttgcttcacaggacaagtgtgcctaaggaggttgtcgattacatcatattcggtactgtgattcaagaagtgaaaacttccaacgtggctcgtgaagccgctctcggtgctggcttttcagacaagacccccgctcataccgtgactatggcctgtatttctgctaatcaggcaatgaccaccggcgtgggcctgattgcctctggtcagtgcgatgtaatcgtagcaggcggagttgaactcatgtctgacgtgccaataagacatagccgcaaaatgcgcaaactgatgctggacctcaataaggcaaagtccatgggacagcgactgagtttaatatcaaagttcagatttaatttccttgcaccagaattgcctgcagtgtctgagttctctacaagcgaaaccatggggcactcagcggatagattggcagctgcgtttgctgttagcaggcttgaacaggatgaatatgctctccggtcccactccctggctaagaaggctcaagatgaaggtttgcttagcgacgttgttcctttcaaagttcccggaaaggacactgtcaccaaggacaacggcatccggcctagcagtcttgaacagatggcaaaactgaagccagcttttatcaagccctatggaacagtgacagcagccaattccagcttcctgactgatggcgcttcggccatgctgattatggccgaagagaaggcattagcaatggggtataagcccaaagcttacttgagagacttcatgtacgtcagccaagatcctaaggaccagcttttgttgggccctacatacgcaacccccaaagttctggagaaagccggactcacaatgaacgatatcgatgccttcgagttccatgaagcattttctggccaaattttggctaattttaaagcaatggactctgattggttcgccgagaactacatgggacgtaaaactaaggtgggtctcccaccactggagaagtttaacaactggggaggatctctgtcccttggacatccattcggcgctactggatgccgattagtgatggccgcagctaaccggttgcgaaaagaaggcggacagtatgggctcgtggcagcctgtgcggcaggcggacagggccacgccatgattgtggaagcatatcctaaatag

SEQ ID NO: 226507 - DNA, 1359 bp, synthetic construct
  misc_feature 1..1359: note = Description of Artificial Sequence: Synthetic coding sequence
  source 1..1359: mol_type = other DNA
atgacccttgtgtccggctggctgctgtatggatggattatcgctgttcaaacgaagacaaaaaaaactctcgccaaaccaaatatccggaatgtggtagtggtggacggtgtaaggacaccatttcttctatcgggcacgtcgtataaagacctaatgccccatgatctcgctcgtgccgctctcacaggtttactgcaccgaacttccgtacctaaagaagtcgtggactacatcatcttcggaactgttatccaggaagtcaagaccagcaatgtggctcgcgaagctgcactaggagccggttttagcgataagacacctgcccacacagttactatggcctgcatcagtgcaaaccaggccatgactactggcgtggggcttattgcttcagggcaatgcgatgtgattgtggcgggaggggtggaactgatgtccgacgtgccaattcggcatagcagaaagatgagaaaattaatgttagacctgaataaagctaagagcatggggcagcggctctctctcatcagcaagttcagattcaatttcctggcccctgagctcccagctgtgtccgaattttcaacatctgagaccatggggcactctgcagatcggctggctgccgcattcgcagtgtctagactcgaacaggacgagtatgccctgcggtctcacagcctggctaagaaggctcaagacgaaggtctattgagtgatgtcgtgccgttcaaagtgcctggcaaagacacggtgactaaggacaacggtatcaggccctcttcattggagcagatggccaaactgaagcccgcattcattaagccctatggcaccgtgaccgctgcaaatagcagcttcttaacggacggggcttccgccatgctaattatggccgaagaaaaggcgcttgccatgggatacaaacccaaggcgtacctacgcgacttcatgtatgtttctcaggaccctaaggatcagttactcttgggccctacctacgccacaccaaaggtgctcgagaaggctggacttaccatgaatgatattgacgcgtttgaattccacgaggccttcagtggtcaaattttagcaaatttcaaggcgatggatagcgactggtttgccgaaaactacatgggaagaaagacaaaggtagggttacctcctctggagaaatttaacaattggggaggaagcctgtccctcggccatcccttcggggcaacagggtgccgactggtcatggctgctgcaaataggcttagaaaggagggaggacagtacggcctggtcgctgcatgtgcggcagggggacagggtcacgcgatgatcgtcgaagcataccctaagtag

SEQ ID NO: 226508 - DNA, 783 bp, synthetic construct
  misc_feature 1..783: note = Description of Artificial Sequence: Synthetic coding sequence
  source 1..783: mol_type = other DNA
atgaaggtagaggtgctgcctgcactcaccgataactacatgtatctcgtgatagatgatgaaactaaagaggctgctattgtcgatccagtgcagccccagaaggtagtggacgcagccagaaaacatggtgtcaagctgactaccgtgttgacaacacatcaccactgggatcatgcaggtggcaatgaaaagctcgtcaagttggagtcaggcttaaaagtgtatgggggagatgataggattggagcactgacacacaagatcacacacctgagtacattacaggtcgggagtctaaacgtcaagtgcctggccaccccctgtcacaccagcggacacatctgctactttgttagcaagcccggaggaagtgaacctcccgctgtcttcactggtgacacgctgtttgtggccggatgcggcaaattctacgaagggacagccgacgagatgtgcaaggctcttttggaagtcctgggcaggctgcctcccgatacccgggtgtactgcggtcatgaatataccatcaataacttaaaattcgctcggcatgtcgaacccggaaacgcggctatcagagagaagttggcttgggcaaaggagaagtactccatcggggaacctactgttccaagtaccctggcggaagaattcacttacaaccccttcatgcgtgtgagagaaaagaccgtgcagcagcatgctggagagacggaccctgtgactacaatgagggccgtgcgcagagaaaaagaccagttcaagatgcctcgcgactag

SEQ ID NO: 226509 - DNA, 927 bp, synthetic construct
  misc_feature 1..927: note = Description of Artificial Sequence: Synthetic coding sequence
  source 1..927: mol_type = other DNA
atggtcgtgggcagaggcctcctcggcaggcgatccctcgccgcactgggagctgcatgtgcaaggcgaggactgggacccgcacttcttggcgttttctgccatactgacttacgaaagaacctgacggtggacgaaggcacgatgaaggtggaggtcctgccagccctcacagacaactatatgtacctcgtcattgacgacgaaaccaaagaggcagctatagtggacccagtccagccccagaaggtggtggatgccgcacgcaaacacggcgtcaagctcactaccgttctgaccacccaccatcactgggaccatgctggcggtaatgagaagctcgtcaagcttgagagcggcctgaaagtatatggcggagacgaccgtattggggcattgacacacaaaatcacacacctgtcaaccttgcaggtgggctctttaaatgtcaaatgtctcgcgacaccctgccacacttctggacatatttgttactttgtgagtaaaccaggagggtccgaacctcccgcagtctttacaggcgacaccctgttcgtcgccggttgtggtaagttttacgaggggacagccgatgagatgtgcaaagctctgcttgaggtgttgggtcgcttgcccccagatacacgggtatattgcggccacgagtacaccatcaacaaccttaagttcgctagacacgtggaacctggaaacgccgcaatccgtgagaagctggcctgggctaaagaaaaatactccatcggcgaacctacagttcctagcacattagctgaagaatttacctataaccccttcatgcgcgtgagggagaaaacggttcagcagcacgccggagaaacagatcctgtaaccaccatgagggctgtgagacgcgaaaaggaccagtttaagatgcccagagattag

SEQ ID NO: 226510 - DNA, 711 bp, synthetic construct
  misc_feature 1..711: note = Description of Artificial Sequence: Synthetic coding sequence
  source 1..711: mol_type = other DNA
atggtggtgggaaggggtttactcggacggagatcgctggctgctctgggcgctgcatgtgccagaaggggtctcgggcctgctctcttgggcgtcttttgtcatacggacttgcgaaaaaatctgaccgttgacgaaggcactatgaaagtggaagtcctccccgctctgactgataattatatgtatctggttatcgacgacgagaccaaagaagcagcaatagtcgaccccgttcagccccagaaagtggttgacgccgcaagaaagcacggagtgaagttaactacagtcctgacaacacaccatcattgggaccacgctggaggtaacgagaagctggtcaaattggagtctggactcaaggtatatggtggggacgataggattggggctttaactcacaagataacccatctctcaactttacaagtgacaccctgtctgtggctggctgctgggtctagtatgaaaggccttcggatgcgatgcgtcaagctgtgctggcgaagctgggctggctcccctcgtacccaggaatcaactgttgccacttccacgccgtctaccacgagctcactgcacgctacctggagccctgcaatgccacctagcgggaggtcatggcctggccctcggagatcaactgccagcggcagcccccagtgccaccctccatggcagcgctcactcccaactacaccctcctag

SEQ ID NO: 226511 - DNA, 1128 bp, synthetic construct
  misc_feature 1..1128: note = Description of Artificial Sequence: Synthetic coding sequence
  source 1..1128: mol_type = other DNA
atggcaatgacgggttggtcttgtctggtgaccggcgctggcggatttctggggcagagaataattaggctgctggtgaaggagaaggagcttaaggagatcagggtcctagataaagcctttggccctgagctgcgagaggagttctccaaactccagaataagacgaaactcaccgtgctggagggggacatcctcgacgaacctttcctcaagcgggcatgtcaggacgtgtcagtcattatacatactgcttgtatcatcgatgtgtttggcgtcactcatcgtgagtctatcatgaacgtcaacgtaaagggaacccagctcctgctggaagcttgtgtgcaagcaagcgtgcctgtcttcatttacacgagttctatcgaggtagctggccctaatagttataaggagatcattcaaaatggacatgaggaggagcccctggagaatacatggcccgcaccatatcctcactccaagaaactggcagagaaggccgtattggcagcaaatggatggaatctgaaaaatggcggaacactctacacttgcgccttgaggccaatgtatatctacggggagggcagtagattcttgtcggcctccattaatgaagctcttaacaacaacgggattttgagcagcgtcggcaaattttctacggtcaaccccgtgtatgttgggaatgtggcgtgggcacacattcttgccctcagggctttacaagaccccaaaaaagcaccgtcaataagagggcagttttactatatatctgatgacacgccacatcagtcatacgataatctgaattacactctgagtaaagaatttggattgaggttagactctcgctggagctttcctctgtccctgatgtactggatcgggtttctgctcgaaatcgtgtcatttctcctcagacctatctacacctacagaccgcctttcaataggcatatcgtgactttatccaatagtgtgttcacattttcgtataagaaagcacagcgggacctcgcgtacaagccgctgtactcctgggaagaggccaagcagaaaactgtggagtgggttggtagcttagtggaccgccataaagaaaccctgaaatcaaagactcagtag

SEQ ID NO: 226512 - DNA, 1122 bp, synthetic construct
  misc_feature 1..1122: note = Description of Artificial Sequence: Synthetic coding sequence
  source 1..1122: mol_type = other DNA
atgaccggttggtcatgcctcgtcaccggcgctggcggtttcttagggcagcggataatcagactcctcgtcaaggagaaggagttgaaagagattcgggtcctagacaaagcattcggcccagagctgagagaggagtttagcaaactgcagaacaaaactaagctcacagtacttgagggggatatcctcgacgaaccatttctcaagcgagcctgccaggatgtttccgtgatcattcacacggcttgcatcattgacgtattcggtgtgacacacagggagtctattatgaacgtgaatgtgaaggggacacaactcctcctcgaagcctgcgttcaggcttcagtccctgtgttcatttatacctcttccatcgaagtggccggtcccaatagctacaaagagattatccagaacggtcatgaggaggagccgctggagaatacttggcccgctccctaccctcattctaagaagttggcagagaaagccgtgctcgcagctaacggttggaatctgaaaaacggcggtaccttgtacacttgcgctctgcggccaatgtatatatacggtgaggggagccggttcctcagcgcaagcattaacgaagcgctcaataacaacggcatcctctcctcagtcggcaagttcagcacagtcaatcctgtctacgtgggtaatgtggcctgggcccacatattagcccttagagccctccaggatcccaagaaggcaccttctatccggggacaattttactacatcagcgatgatacccctcatcaatcttacgataatctgaactatactttaagtaaggagtttggcctccgcctcgattctcgatggtctttcccactttctctgatgtattggattggttttcttcttgaaatcgtgtccttcctcctgcgccctatctatacataccgcccaccatttaatcgacacattgtgaccctgtccaactccgtctttaccttctcctacaagaaggcgcagcgagatctggcctataagcccctttatagctgggaggaggcaaaacagaagaccgtcgaatgggtgggcagcctggtcgaccgtcataaggagactttgaagtccaaaacccagtag

SEQ ID NO: 226513 - DNA, 1122 bp, synthetic construct
  misc_feature 1..1122: note = Description of Artificial Sequence: Synthetic coding sequence
  source 1..1122: mol_type = other DNA
atgaccggatggagctgtctcgtgactggcgcaggcggttttctcgggcagaggattatacgactgcttgtgaaggaaaaagagctgaaagaaatccgcgtgttggataaggcatttgggcctgaactacgcgaggagtttagtaagttacagaacaaaaccaaactcacagtcctagagggggatatacttgatgaaccgtttctgaaaagggcgtgccaggacgtatccgtgatcatccatacagcttgtatcatagatgtgtttggcgttacccaccgggagagtatcatgaatgttaacgttaaggggacacagttattgctggaggcgtgcgtacaagccagcgtgcccgtttttatatatacgagtagcattgaagtcgccggacccaatagctacaaagaaatcatccaaaacgggcatgaggaagaacctcttgagaacacatggccagctccctacccacactcaaagaaactggccgagaaagcggtgctggccgctaatgggtggaatctcaagaatggcggaacactgtacacatgtgccctgcgaccaatgtatatttacggtgagggctctcgcttcctatcagcctctataaatgaggctctgaacaataacggcatactgagctccgttgggaagttcagcacagtgaacccagtgtacgtcggaaatgtggcatgggctcatattctggcactacgcgctctacaggatccaaaaaaagcgccttccatccggggtcaattctattacatctcagatgacacccctcaccagagttacgataaccttaactatacgttaagtaaagagtttgggctccgattggatagcaggtggagcttcccgctctccctcatgtattggatcggatttctattagaaattgtctcattccttctgcggccaatttatacttatcgtcccccttttaaccgtcacatcgttacattgtccaacagtgtgtttacctttagttataaaaaagcacagagggatttggcgtacaagcccttgtactcatgggaagaagcaaagcaaaaaaccgttgaatgggtcggctcactggtggatcggcacaaagaaactctgaagtccaagactcagtag

SEQ ID NO: 226514 - DNA, 249 bp, synthetic construct
  misc_feature 1..249: note = Description of Artificial Sequence: Synthetic coding sequence
  source 1..249: mol_type = other DNA
atgacaggctggtcatgtctggttacaggagccggaggcttcctcggccagagaatcataaggctactcgtgaaagagaaggagctcaaggaaattagagtcctggacaaagcattcggacccgagctgagggaggaattctccaagctccagaataagacgaagctgacagtgctcgagggtgacatactggacgagccctttttaaagcgtgcatgtcaagatgtgtccgtaattatccatacatag

SEQ ID NO: 226515 - DNA, 1119 bp, synthetic construct
  misc_feature 1..1119: note = Description of Artificial Sequence: Synthetic coding sequence
  source 1..1119: mol_type = other DNA
atggggtggagttgtttggtgaccggcgctggcggacttctgggccaacgcatcgtcagactactcgtggaagaaaaggagctgaaggaaattagggctcttgacaaggcttttcgccctgaacttcgagaagaattcagcaaattgcagaaccgtaccaagcttactgtgttagaaggcgatatcctcgatgagcccttcctgaagcgcgcttgccaggacgttagtgtcgtcatccatacggcctgtataatagatgtttttggcgtgacacacagagagagcatcatgaacgtcaacgtcaaggggacccagttgcttctcgaggcgtgcgtacaagcctcggtccctgtgtttatctatacgagctcaattgaagtagccggaccgaactcctacaaggagatcatccagaatggacacgaggaagaacctctcgagaatacgtggcctaccccctatccttacagcaagaagctggccgagaaggctgttttagccgctaacggatggaaccttaaaaatggggacacgctctacacgtgcgccttgcgaccaacctacatttacggcgagggtgggccttttctgtctgcatcgattaatgaggctctaaataataatggaatcctgagcagcgtagggaagttcagcacagttaatcccgtttacgtgggaaacgtggcctgggcgcatattctggccctaagggcgctacgtgatcccaagaaagcgccatccgtccggggtcagttctactacatcagcgatgataccccgcaccagtcttacgacaacctgaactacatactctctaaggagtttgggctgcgtcttgattcacgatggtcacttccgctcacgctaatgtattggatcggcttcctactcgaagtggtgtcttttctgttgagtccaatctattcctaccagccgccattcaatagacacaccgtgactctatcaaactccgtgtttacattcagctacaagaaggctcagagagatttggcatataagcccttgtatagttgggaagaggccaagcaaaaaactgtggagtgggtgggatctctggtcgatcggcacaaggagactctgaagtctaagacccagtag

SEQ ID NO: 226516 - DNA, 588 bp, synthetic construct
  misc_feature 1..588: note = Description of Artificial Sequence: Synthetic coding sequence
  source 1..588: mol_type = other DNA
atgggatggtcttgtctcgtaactggcgctggaggcctcctgggacagcggatcgtgaggcttttagtcgaggagaaagagttgaaagagatcagggccttagacaaagcctttcgccctgagctgcgtgaagagtttagtaagttgcaaaaccggactaagctgacagtgctcgagggggatatcctagacgagcccttcctgaagagggcatgccaggacgtcagtgtggtcatccacaccgcctgcattatagacgttttcggggtcacccacagagagagcataatgaacgtcaacgtcaaggggacgcaactgctgcttgaggcctgcgttcaggcaagcgtgcccgtgttcatatacacctcttcaattgaggtcgctggacccaattcatacaaggaaatcatacaaaatggtcatgaggaagagcccctggagaatacgtggcccacaccctatccctacagcaagaagctggctgaaaaagctgttttggctgccaacgggtggaacctcaagaatggcgacaccctctacacttgcgccctgaggcctacatacatctatggcgaaggcggaccatag

SEQ ID NO: 226517 - DNA, 1119 bp, synthetic construct
  misc_feature 1..1119: note = Description of Artificial Sequence: Synthetic coding sequence
  source 1..1119: mol_type = other DNA
atgggatggagctgccttgttactggagccggagggctgctgggacagcgcatcgttcgcctgctagtcgaggagaaggagttaaaggagatacgggctttggacaaggcatttcgcccagagctgcgagaagaattttccaagttgcagaaccgcacgaaactcactgtccttgaaggtgacatcttagacgagcctttcctgaaaagagcatgtcaggatgtcagtgtagtcattcacacagcttgcatcatcgacgtctttggggtgacccaccgagagtcaattatgaacgttaatgtgaaggggacccagctgctcctggaggcatgcgtccaggcttcagttcccgtattcatttacacatcctccatcgaagtcgcaggaccaaatagctataaggaaatcattcaaaatggacacgaggaggagccactggagaatacctggcccacaccttatccttatagtaaaaagctggctgagaaagcagtcttggcagcgaatggctggaacttaaaaaatggggacactttgtacacttgcgcacttcgtcccacttatatatacggggaagggggtccctttctttctgcatccatcaacgaggcccttaataacaacgggattctgtcatccgttgggaaatttagtaccgtaaacccggtctacgtgggcaatgtggcttgggcccacatcttggcactgcgtgctctccgtgatcctaaaaaagcaccatccgtgaggggccagttctactatattagcgatgacactccccaccagtcctatgacaacctgaattacattttgagcaaagaatttggattgagactagactctcgctggtctctaccactgaccctgatgtattggattggatttctgcttgaagttgtgtccttcctgttatcaccaatctacagctatcagcctcctttcaatcgacacaccgtgacgctctcaaatagtgttttcacattcagctacaagaaagcgcaacgggacctggcttataagccactgtacagctgggaagaggcaaaacagaagaccgtggagtgggtagggtcattggtggatagacacaaagagacactgaaatctaagacccagtag

SEQ ID NO: 226518 - DNA, 591 bp, synthetic construct
  misc_feature 1..591: note = Description of Artificial Sequence: Synthetic coding sequence
  source 1..591: mol_type = other DNA
atggccgatagcgctcaggcccagaaactcgtgtacctagtgacgggaggctgtggcttcctcggagagcacgtcgtgagaatgctgctccagcgcgagcccagactgggtgagctgagagtgtttgaccagcatctcggaccatggcttgaggaactgaagaccggccctgttcgggtaaccgccatccagggcgatgtgacacaggcccatgaagttgcagcagcagtggccggagctcacgtggtgattcataccgcgggtctggtcgacgtcttcgggagagcgagtcccaaaactatacacgaagtgaacgttcaggggacgagaaacgtgatcgaggcctgtgtgcagacggggacccgcttcttggtatatacctcatccatggaggtggtgggtccaaacacaaaaggtcatcctttttatcgcggtaacgaagacacaccctacgaggccgtgcaccgacatccttatccttgcagcaaagccctggccgagtggcttgtgctcgaagccaacggcaggaaggccatgctgccaggctgtacatgttggcagccgggtagctggagcagtgggcagccttag

SEQ ID NO: 226519 - DNA, 1110 bp, synthetic construct
  misc_feature 1..1110: note = Description of Artificial Sequence: Synthetic coding sequence
  source 1..1110: mol_type = other DNA
atggccgatagtgctcaagctcagaagctggtgtacttggttactggaggatgcggatttctgggagaacacgtagttagaatgctactccagcgcgagccccgacttggagagttgagagtattcgaccaacatctcgggccttggctggaagaactgaagactgggccagttcgggtaactgctattcagggggacgtgacccaggcccatgaagttgccgctgccgtggctggcgcacacgtggtcattcataccgccggactcgtggatgtatttggaagagcaagtccaaaaactatccatgaggttaacgtgcagggcacacgaaatgtcatcgaggcctgcgtgcagacgggcactcgatttctcgtgtacacaagctcgatggaggtcgtgggacctaacaccaaggggcatcccttttacagggggaacgaagacactccctacgaagccgtacacaggcacccatacccgtgttctaaagcacttgccgaatggctggttcttgaggctaacggcaggaaagtccgcggtggattgcccctcgtgacttgtgccctgcggcctactggcatctacggggaagggcaccagatcatgcgcgacttctaccgccaagggctccgacttgggggatggctgttccgagcaattcccgcttcggtggagcacggacgtgtttatgtggggaatgttgcctggatgcacgtgctggccgctcgcgaactggaacagagagctacgcttatggggggacaggtttatttttgctatgatggctccccctacagatcatatgaagatttcaacatggagtttttagggccttgtggcctccgcctggtgggcgcacgcccactcctgccatattggctgctggtttttttagcggctcttaacgctctgctgcagtggcttctccgacctctggtgctgtacgcgccacttctaaacccctatactctggctgtggcgaatactaccttcaccgtcagcaccgataaagcccagaggcattttggctatgaacctctattttcctgggaggatagccggacgaggacaatcctgtgggttcaggccgctacaggaagcgctcaatag

SEQ ID NO: 226520 - DNA, 591 bp, synthetic construct
  misc_feature 1..591: note = Description of Artificial Sequence: Synthetic coding sequence
  source 1..591: mol_type = other DNA
atggccgattcagctcaagcacagaagctagtctatctagtcactggtgggtgcgggtttctgggagaacatgtcgtgcgcatgttgcttcagcgcgaacctcgtctcggggaactgcgagttttcgatcaacacttgggaccttggctcgaagagctgaaaacaggccctgttagagtgacggcaattcagggagacgtgacccaggctcacgaggtagccgctgctgtcgcaggagcccacgttgtcatccacaccgcgggtctggtagacgtgttcggcagggccagccccaaaacgatccatgaggtgaatgtccaggggacccggaacgtgattgaggcatgcgtgcagacgggcaccagatttttggtgtatactagttcgatggaggtggtcggaccaaatacaaagggtcacccattttataggggaaacgaagataccccgtatgaagccgtccaccggcatccttacccttgctccaaagcgttagctgagtggctggtgttggaggcaaacggccgaaaggctatgctcccaggatgtacctgttggcaaccgggatcttggtccagcggtcagccgtag

SEQ ID NO: 226521 - DNA, 1086 bp, synthetic construct
  misc_feature 1..1086: note = Description of Artificial Sequence: Synthetic coding sequence
  source 1..1086: mol_type = other DNA
atgagcggaaacggcaatgccgctgccactgctgaggaaaattctcccaagatgcgggttatccgggtcgggactcgcaagagtcaattagctcggattcagactgacagcgtagtggcaacccttaaggcctcctacccaggacttcagttcgagatcattgccatgtctacaactggcgataaaatcttagacacagccttatcgaagatcggcgaaaagagcctattcacgaaggagcttgagcacgcacttgaaaagaatgaggtggatctggtggtacacagcctgaaggatctgccaacagtcttgcctcctggatttacgattggcgcaatatgtaagcgggaaaatccacacgatgctgttgttttccacccaaagttcgttggtaaaacgctcgagactttgcctgagaagtcagtggtgggaacaagtagcctgcgccgagccgctcagcttcaaaggaagtttccccacttggaattcaggagcatacggggaaacctcaatacacgccttcggaagctggacgagcagcaagaattttctgcaattatacttgctaccgctggcctccagaggatgggctggcacaacagagtcgggcaaatcctgcacccagaggaatgcatgtatgctgtgggacagggagcactgggagtggaggtacgggctaaggatcaggacatcctcgacctcgtgggggtgctgcatgatccggagactctgctcagatgcattgccgagcgggcatttctgagacatctggagggcggttgcagcgtgcccgtggcagtacacactgctatgaaggatggccaactttatctgactggcggtgtttggtctcttgacggatcagattctattcaagaaactatgcaagcaactatacacgtgcccgctcagcacgaggacgggccagaggacgaccctcagctcgtcggaataacagctcgtaacatcccacggggaccacagctggcagcacagaacctgggaatcagcctggccaatctgctgctgagtaaaggtgctaagaacatcctggatgtagccaggcagttgaatgatgctcactag

SEQ ID NO: 226522 - DNA, 1035 bp, synthetic construct
  misc_feature 1..1035: note = Description of Artificial Sequence: Synthetic coding sequence
  source 1..1035: mol_type = other DNA
atgcgcgtgatccgcgttggcacccggaaatctcagctcgctcggatacagacagactctgttgtggcaacgttgaaagcttcctaccctgggttacagttcgagatcatcgcgatgtccacgaccggtgacaagatcctcgacactgcgctctccaagattggggaaaaatccctgttcacaaaagagctggagcacgctcttgagaaaaatgaagtggatctagtggtgcacagcctcaaggatttacccacggttctgcctccagggttcaccatcggtgccatctgcaaaagagagaatccgcacgacgccgtggtgttccatcccaagttcgtcggtaagaccctggagaccctgcccgagaagtccgtcgtgggaacgtcatcactgcgccgagcagctcagttacaacgtaagttcccccacttggaatttcgaagcattagaggcaatctcaataccagactgagaaaactggatgaacagcaggaatttagtgcaataattctagctaccgctggactgcaaagaatgggctggcacaaccgggttggtcagatcctccatccggaggaatgcatgtacgcagtagggcaaggtgcacttggtgtcgaagtgcgtgccaaggaccaagatatcctggatctggtaggcgttctccacgacccagagacgttgttgcggtgcattgccgagcgagcctttcttcgccatttggaaggtggctgctccgtccccgtggctgtccacacagcaatgaaagatggacagctttacctcactggaggcgtctggtccttagatggatcagactccattcaggagaccatgcaagcaacaatccatgtgccagcacaacatgaagatgggcctgaagacgatccccagctggtggggattactgcccgaaatatcccaagaggcccacagctggccgcacagaacctggggatcagtcttgctaatctcctgttgtcaaagggtgcaaagaacattcttgacgtcgcgagacagttgaacgacgcccactag

SEQ ID NO: 226523 - DNA, 1035 bp, synthetic construct
  misc_feature 1..1035: note = Description of Artificial Sequence: Synthetic coding sequence
  source 1..1035: mol_type = other DNA
atgagagttatccgggttggaacccggaagtcccagcttgcccgtatccaaaccgacagcgttgtcgccactttaaaagcaagctaccccggtctgcagttcgagattattgcaatgtctaccacaggagacaaaattctggacactgccctgtcgaagatcggggagaaaagccttttcacaaaagagctggagcacgctctggaaaagaatgaggtggacctggtggtgcattcattaaaagacctccctacagtactgcctccagggttcacaatcggcgctatttgtaagcgggagaatcctcacgacgcggtggtatttcatccaaagttcgtgggcaagaccctcgagaccctccctgagaaaagtgtggttggcacttcttccctgcggagggccgctcagctgcaacggaagtttcctcacctcgagttccgttcaatacgtgggaacctgaacacacgcctgagaaagcttgatgagcaacaggaattctcagcaattatacttgcaaccgcgggactgcagcgcatggggtggcataatagggttgggcaaattctccacccagaggagtgtatgtatgctgtggggcaaggggcactgggtgtggaagttagagctaaagaccaggacatccttgatttggtaggcgtgcttcacgatccagagaccctgctcagatgtatcgctgagagggcatttctgaggcatttagagggtgggtgttccgtcccagttgctgtccacaccgcaatgaaagatggccagttgtaccttaccggcggtgtatggtctctggacggtagcgattcaatccaggagacaatgcaagccactatccacgtccctgcccagcatgaagacggccctgaagacgatccgcaactcgtcggaatcaccgctaggaacatacctcggggtcctcagctggctgcccagaacctcggaattagtctggcgaatctgctcctatcaaagggtgctaaaaatattctagacgtggccaggcaactgaatgatgcacactag

SEQ ID NO: 226524 - DNA, 564 bp, synthetic construct
  misc_feature 1..564: note = Description of Artificial Sequence: Synthetic coding sequence
  source 1..564: mol_type = other DNA
atgagagttatccgagttgggacacggaagagccagctggccagaatccagacggattctgtcgtggctacccttaaagcaagctacccaggtctccaatttgaaattattgccatgtccaccacaggagataagatcctggataccgcccttagcaaaatcggcgaaaagtctctctttacaaaggaactggagcacgcactggagaaaaatgaagtggacttggtggtacactccttgaaagatctgccaaccgttctgcccccaggctttacaatcggtgctatttgcaaacgagagaatccacacgatgctgtagtgtttcaccctaaattcgtggggaaaactctcgaaactttacccgaaaaaagtgtcgtagggacttcttcgctccggagggctgcccagctccagcgaaaattccctcaccttgagttccgaagtatccgaggtaatctgaacacacgcctgcgcaagctggatgagcaacaagagtttagtgccattatcctggccactgctggactgcaacgaatggggtggcataatagggtggggcagtag

SEQ ID NO: 226525 - DNA, 1035 bp, synthetic construct
  misc_feature 1..1035: note = Description of Artificial Sequence: Synthetic coding sequence
  source 1..1035: mol_type = other DNA
atgagggttatcagagtggggacaaggaaatcacagcttgctcgcatacagacagactctgttgtcgctacgttgaaggccagctatccaggtcttcaattcgaaatcattgctatgtcaaccacaggcgataaaatcctcgatactgccctcagcaagattggggaaaagtcgctctttacaaaggagttggagcacgctctggagaagaacgaagttgacttggttgtccactcactgaaagaccttccgaccgtgctgcccccagggtttaccatcggcgctatctgcaagagagagaacccacatgatgccgtcgtgtttcaccccaagtttgtcgggaaaaccctggaaactctgcccgagaaatccgtcgttgggacaagcagtctccgcagggcagcccagctccagcgcaagttccctcacttagaattccggtctatacggggtaatctaaatactcgtctcagaaaacttgatgagcaacaggaattttctgccatcatccttgccactgcaggtcttcagcggatgggttggcacaatcgcgtgggccagatactgcatcctgaagagtgcatgtacgctgtaggtcaaggtgctctgggcgttgaggtgagagctaaggatcaagatatcctcgacctcgtgggagtccttcacgatccagagaccttactgcgttgcattgctgaaagggccttcctcagacatctggaggggggatgcagcgtgcccgttgcagtccacacagctatgaaggacggacagctgtacctgacggggggagtctggagcttagacgggtccgactccatccaagagaccatgcaggctacaatccatgtccccgctcaacacgaagacggtccggaagacgacccacagctagtgggaatcactgctcgcaatataccgcgtggtccccaacttgcagcacagaatttggggatctctctggccaatctgctccttagcaagggcgcaaaaaatatcctcgatgtcgcacgacagctgaatgacgcccactag

SEQ ID NO: 226526 - DNA, 564 bp, synthetic construct
  misc_feature 1..564: note = Description of Artificial Sequence: Synthetic coding sequence
  source 1..564: mol_type = other DNA
atgcgagtcataagggttgggacgcggaagagccagctggcaagaatccagaccgacagcgtagttgctaccttgaaagcttcttatccaggtctgcaatttgaaatcatcgctatgtctaccacgggcgataagatactggacacagccctgagcaagattggcgagaagtcgctgttcactaaggaacttgaacacgccctggaaaagaatgaggtagacttggtcgtgcactcgctgaaagacctacccacagtactgccccctggcttcacaatcggggctatttgcaagcgcgagaaccctcacgacgcagtggtcttccatccgaagtttgtgggcaagacacttgagacgctcccggagaagagcgttgtcggtacatctagtctgaggagggcagcccagctacagcgcaagttcccccacttggagttccgcagtattaggggcaaccttaataccaggctgcgcaagttggatgaacagcaggagttctctgcaattatcctcgcaaccgcaggcttgcagcggatgggatggcataacagagtaggacagtag

SEQ ID NO: 226527 - DNA, 915 bp, synthetic construct
  misc_feature 1..915: note = Description of Artificial Sequence: Synthetic coding sequence
  source 1..915: mol_type = other DNA
atgagggtcatcagagtgggcacaaggaagagtcagctcgctagaatccagactgactcagttgtggctaccctaaaagcaagttaccccggtctgcaattcgagatcatcgctatgtccacaacgggcgataagatcctggacacagcccttagtaaaataggtgagaagagtcttttcacaaaagagttagagcacgcactggagaaaaacgaagtggatctcgtcgtgcactcgcttaaggacctgccaaccgttcttccaccgggtttcacaatcggggctatctgcaagagagaaaatccccacgacgccgtggtttttcaccccaagttcgtcggcaagactttagaaacgctacctgagaaatccgtagtcggaacgtcctccctccgccgagccgctcagctacagcgtaagttcccccacctcgaatttaggagtattcgcggtaacctgaacacacggcttcgaaaactcgatgaacagcaggaatttagcgcgataatcctcgccaccgctggactgcagagaatgggatggcacaatagagtggggcagatcttacaccccgaagaatgcatgtacgcagttggccaggaggggggatgttccgtccctgtcgccgtccacaccgccatgaaggatgggcagctgtatttgaccggaggcgtgtggtccctggatggttcagattcaattcaagaaaccatgcaggctacaattcacgttcccgcacagcacgaagatggtccggaggatgaccctcagctggttggaataactgctagaaatattccaagaggccctcaactggccgctcagaatctcggcatcagcttggcgaacctactgctctcaaagggagccaaaaacatcctggatgtcgccagacagctgaacgacgcccactag

SEQ ID NO: 226528 - DNA, 966 bp, synthetic construct
  misc_feature 1..966: note = Description of Artificial Sequence: Synthetic coding sequence
  source 1..966: mol_type = other DNA
atgagcggcaacggtaatgcagctgccaccgcagaggaaaacagccctaagatgagagtcatcagagtcggcacgaggaagagtcagctagccagaatccagacggactccgtcgtggctacactgaaggcttcttatccaggcctacagtttgaaattatcgccatgtccaccactggagataagatcctcgatacagccctgtcaaagatcggggagaagagcctatttacgaaagaactagagcatgctctcgagaagaatgaggtagacttggtcgtccattccctcaaggacttgcccaccgtgctgccacctggatttacaatcggcgcaatctgcaagagggaaaaccctcacgatgccgtggtattccaccctaagttcgtgggcaagacacttgagacccttcctgagaagagtgtggtcggaacaagctcactgcggagagccgcacagctgcagcgcaagtttccgcacttggagttcaggtccatcaggggaaacctgaatacgcggcttaggaagttggacgaacagcaggagttttccgccattattttagctacggccggactgcaaaggatggggtggcacaacagggtgggacagattctccatccagaggagtgcatgtatgctgtcggccaggagggcggatgcagtgtccctgttgccgtacatacagccatgaaggatggtcagctgtacttaacaggaggagtatggtcactggacggaagcgactctatccaggaaacaatgcaggcgacgatccacgtgcctgcacagcatgaagacggtcccgaagacgatccccagttagtggggattactgcacggaatattccacgagggcctcagcttgccgctcagaacctgggcattagcctagcgaacttgcttctatccaagggggctaagaatatcctggatgtggccaggcaactgaatgacgcacattag

SEQ ID NO: 226529 - DNA, 879 bp, synthetic construct
  misc_feature 1..879: note = Description of Artificial Sequence: Synthetic coding sequence
  source 1..879: mol_type = other DNA
atggcctttatgaaaaaatatctgctcccgattctaggcctgttcatggcctactattactacagcgctaacgaagaatttaggccagagatgcttcagggcaagaaagtcattgtgacgggggctagcaagggtatcgggagagagatggcatatcacctggcaaagatgggcgcacatgtggttgtgaccgctagatccaaggagacattgcaaaaggtcgtttcacactgcttggagctaggtgctgctagtgcccactacatagctggcaccatggaagacatgaccttcgccgagcagttcgtggctcaggcgggaaagctgatgggaggattagatatgctgatccttaaccatataaccaacacatcactgaatctttttcacgacgatatacaccacgtccgaaaatccatggaagttaacttccttagctatgttgtacttacggtcgctgctctccctatgcttaagcagagtaacggatccatagtcgtggtttcttcactggctggaaaagtcgcctacccgatggtggccgcatatagcgctagtaaattcgccctggacggctttttcagcagcattcgcaaggagtacagtgtaagtcgggtcaacgtgtccatcaccctgtgcgtcctcggactgatcgacactgaaacggccatgaaagccgtatcaggcatcgtgcatatgcaggctgcacctaaggaagaatgcgctctcgagattattaagggcggtgcactgcgacaagaggaagtctactatgactcctcattgtggacgaccctgctcattagaaacccctgtagaaagattctggagttcctgtattccacctcttacaacatggatagatttatcaacaagtag

SEQ ID NO: 226530 - DNA, 879 bp, synthetic construct
  misc_feature 1..879: note = Description of Artificial Sequence: Synthetic coding sequence
  source 1..879: mol_type = other DNA
atggccttcatgaagaagtacttacttccaatacttggtctcttcatggcgtactactattacagcgccaacgaggaatttcggccagaaatgctgcaggggaaaaaagtgattgtgacaggcgcaagcaaaggcattggaagagaaatggcttaccacttggccaagatgggagcacacgtggtcgtgacagcgagatcgaaggagactttgcaaaaggtcgtgagccactgtctggagctgggtgccgcttccgcacactatattgctgggacaatggaagacatgacttttgccgaacagttcgtagctcaggccggtaaactgatggggggactggacatgctcattctaaaccacattaccaacaccagcctgaatctcttccacgatgatatccatcacgtgcgcaagagcatggaagtgaattttctgagttatgtggtcctaaccgtcgccgcactgcccatgctgaagcaatctaatgggtccatagtcgtggtttccagcctggccggaaaagtagcctaccctatggtggcagcgtactctgctagcaaattcgccctcgacggcttcttctcctctattagaaaagaatacagcgtgtctcgagtgaacgtaagcatcacactatgtgtgctgggcttaattgacacagagactgcaatgaaggccgttagcgggattgtacatatgcaggcagccccaaaagaggagtgtgcactggaaatcattaaggggggagcattacgacaggaggaggtatactacgactcttccctgtggactactctactaattcgcaacccttgccgcaagatcttggagtttctttactccacctcctataacatggaccgatttataaacaagtag

SEQ ID NO: 226531 - DNA, 879 bp, synthetic construct
  misc_feature 1..879: note = Description of Artificial Sequence: Synthetic coding sequence
  source 1..879: mol_type = other DNA
atggccttcatgaagaagtatttgctgcccatactgggtctgtttatggcctattactattacagtgctaacgaagaatttcgaccagaaatgctccaaggcaagaaggtgatcgtcaccggggctagcaagggaattggaagagagatggcttaccatcttgccaagatgggcgctcatgtggtcgtgaccgctcggagtaaggagacacttcagaaggttgtctcccactgcctggagctgggcgcagcgagtgctcactatatcgctggaaccatggaagatatgacattcgccgagcagtttgtcgcccaggcgggaaaacttatgggaggtttggatatgctcatccttaaccacataactaatacgagcttgaatttgttccatgacgacatccatcatgtgcggaaatctatggaggtcaacttcctctcctatgtcgtgctgaccgtggccgcactgcccatgctgaagcagtcaaatggaagcatcgtggtcgtttcatcacttgctgggaaagtggcgtacccaatggtggcggcatactccgcctccaagttcgccctggacggcttctttagttccataagaaaagagtattcagtgtctagggttaacgtctctataaccctgtgcgtgttaggcttgattgataccgaaactgctatgaaagcagtgtccgggattgttcatatgcaggccgcacccaaagaggagtgtgccctggaaataatcaagggtggggcacttcggcaggaggaggtgtactatgactcatccctctggacaacactgcttatacggaacccctgccgcaagatcctggagtttttgtatagcaccagttataacatggaccgatttattaataaatag

SEQ ID NO: 226532 - DNA, 1218 bp, synthetic construct
  misc_feature 1..1218: note = Description of Artificial Sequence: Synthetic coding sequence
  source 1..1218: mol_type = other DNA
atggagcggtggccttggccttcaggcggtgcttggttgcttgtggcagcgcgtgcactgctacagctacttaggagcgatctacggttgggtagacccttattagcggctctcgccctgttggcagcactagactggttgtgtcaacgccttcttccgcctcctgccgcactagccgtgctagctgcagcagggtggattgcattatcacggctagctagaccacagaggcttcctgtcgccactcgagccgtgctcatcacggggtgcgactccgggttcggtaaagaaacagctaagaagctggattctatgggttttaccgtgctcgcgacagttctggagttaaattctcctggcgcaatagagctgcgcacttgctgcagccctagattgcgactcctccagatggacctgactaaacccggagacattagccgcgtcctagagtttactaaggcccatactactagtaccggcctttggggcctggtaaataatgctggccacaatgaggtggtcgcggatgcggaactgtctccggtggcaacgttccgatcatgcatggaggtgaatttttttggcgcactggagcttaccaagggcctcttaccactgctgcggtctagtcggggacgcatagtcaccgtaggaagtcccgctggtgacatgccttatccctgcctgggcgcttacgggacgagtaaggccgcagtggcattattgatggatactttttcttgcgagctcctcccgtggggagtgaaagtcagcatcatccagcccggttgcttcaagacagaatccgtgcgcaatgtggggcagtgggagaagagaaagcaactgcttctggcaaatctccctcaagaactcctgcaggcatacggaaaggactatatagaacaccttcacggccagtttctgcacagtcttcgccttgccatgtccgacctcacccccgtggtggacgcgattaccgacgcactccttgccgctcggcctcgcaggaggtactaccccggtcagggtctgggcctgatgtattttattcactactatcttcccgagggcctcagaagacgctttctccaagcgtttttcatttcccactgtctgcctcgcgctctccagccaggccagcctggaactaccccccctcaggatgccgctcaggaccctaatctgtctcccggtccaagccccgctgtcgcgagatag

SEQ ID NO: 226533 - DNA, 2232 bp, synthetic construct
  misc_feature 1..2232: note = Description of Artificial Sequence: Synthetic coding sequence
  source 1..2232: mol_type = other DNA
atggaagccgtggccgtggccgctgctgtgggggttttactcctggctggcgcaggcggagcagcaggggacgaagcacgcgaggctgctgcagtgcgtgcactcgtggctcgcctgttaggccctgggcctgccgctgactttagcgtgagcgtggaacgcgcattggctgccaagcctggactggacacctattctttaggtgggggaggggctgcaagagttagagttcgcggtagcactggcgttgcagctgcagccggacttcacagatacctccgagacttctgcggatgccacgtggcttggtccggctcccagctgcggctgccacggcctctgccagctgtgccgggagagttgactgaggctacgcccaatcgctaccgctattatcaaaacgtttgtacacagtcttattccttcgtgtggtgggattgggctagatgggagcgagagatagactggatggccttaaacgggattaatctggcgctcgcgtggtcaggccaggaggccatttggcagcgcgtttacctggccctcggcttgactcaggccgagatcaacgagttcttcacaggcccagcgttcctggcctggggccgaatgggcaacctccatacctgggatggtcctctgcctccatcgtggcatattaagcaactctaccttcagcacagagttctagaccagatgaggagcttcggcatgacgcctgttctccccgcatttgcaggacacgtgcctgaagccgtgacccgtgtgtttccacaggtgaatgtcacaaagatgggatcctggggtcactttaattgcagttacagctgtagtttcttattagctcccgaggatccgatctttcccattattggatccctctttttacgagaactgatcaaagagttcgggactgaccacatttacggggctgacacctttaatgagatgcagcctccatcatccgagcccagttatctggccgctgcaacgactgcagtgtatgaggccatgacagctgtagacacagaggctgtatggctgctgcaaggctggctctttcagcaccagccacaattctggggacctgctcagatcagagctgttctgggggcagtccccagagggcgtctactcgtgctcgatctgtttgccgagtcccagcctgtgtatactcgtactgcttccttccagggccaacccttcatctggtgcatgttacacaatttcggcggtaatcatggactgttcggagcccttgaagccgtgaatggtggccctgaggcagctaggctctttcctaattctaccatggtaggaactggcatggctcccgaaggtatttcccagaatgaggtcgtgtattccctcatggccgagttggggtggagaaaagatccagttcctgatctcgccgcatgggtaaccagctttgccgcacggaggtatggtgtctcacaccccgacgcaggagccgcttggcggctgcttctgcgttccgtgtataattgttctggcgaggcctgtaggggccacaacagatccccattggtaagacgccctagcctgcagatgaatacttccatatggtacaacagaagcgacgtgttcgaggcctggcggctacttctcacatcagcccctagcctcgctaccagccccgctttcaggtatgacctgctcgatctgacccgacaggcagtgcaagagctggtttcgctatactacgaggaggcacggagtgcttacctgtctaaggagctcgcctcattgctcagggctggaggggttctagcttacgagcttttgcctgccttagatgaggtgttagcttcagatagccgattccttctggggtcttggttagaacaggctagagcagctgccgtatctgaggccgaggctgatttttacgagcagaacagtcgctaccaactgacactttggggccctgaaggaaatattctagattacgccaataagcagcttgctggccttgtcgcaaattactacactcctagatggcgtctatttctggaggccttggtggacagcgtggctcaggggatcccctttcaacagcatcaatttgataaaaatgttttccaattggagcaggccttcgtgctatctaagcagcgctaccctagccagccgagaggtgataccgtcgacctcgcaaaaaagatctttcttaagtactatcctcggtgggttgccggatcctggtag

SEQ ID NO: 226534 - DNA, 450 bp, synthetic construct
  misc_feature 1..450: note = Description of Artificial Sequence: Synthetic coding sequence
  source 1..450: mol_type = other DNA
atggcaagaacagtcgtcctgattacgggttgttcatctggaatcggactccacctggctgtgagattggcctcggaccctagccagagctttaaagtgtacgcgacattaagggacctaaaaacccagggccgactgtgggaggccgctcgggcactcgcttgcccacctggctcccttgaaacgttacagttggatgtgcgtgactctaagtcggtggcggctgctcgcgagagggtgacggagggacgagtcgacgttctggtatgcaacgctggcttgggactgctcggtccactagaggccctcggcgaggatgcagtggcctccgtgttggacgtgaacgttgtgggcaccgtcaggatgttgcaggctttcctcccagacatgaaacgtcgaggctccggaagagtgctggtgactggctctgtgggcggacttatggcttag

SEQ ID NO: 226535 - DNA, 987 bp, synthetic construct
  misc_feature 1..987: note = Description of Artificial Sequence: Synthetic coding sequence
  source 1..987: mol_type = other DNA
atggccagaactgtggtattaattactggatgttcttccggcatcggcctacatctggcagtccgtctcgctagcgatccaagtcagtcattcaaagtatacgctactttgagggacctgaaaacacaggggcgtctgtgggaagcagcgcgagctttagcctgtcctccagggagcctggagacattgcagctggacgtgcgggactctaagagcgtcgccgctgcaagggagcgcgtgacagaagggagggtagacgttctggtgtgtaatgccggtctcggcctgctcggccctctcgaggccttgggagaggacgccgtggcttctgtgctggatgttaacgtggttgggactgtcagaatgctccaagctttcctgccagatatgaaacggagaggtagcgggagagtgctggtgacaggaagcgtggggggtctcatgggcctaccttttaacgatgtttactgcgcatctaagtttgcactggaggggctgtgcgagagtctggctgttctcctgttacctttcggagtgcacttgagcctcatagaatgtggaccagtgcacaccgcttttatggaaaaggttttggggtccccagaagaggttctagatagaactgacatccatacgtttcatcgcttctatcagtatctcgcacacagcaagcaagtgttccgggaggccgctcagaatcccgaggaggtagcagaagtcttcctaacagcactacgggcacccaagccaaccctgcggtactttacaactgagcgttttctgcctctgctgcgaatgcgtctggacgatcctagtggctccaactatgtaacagccatgcaccgggaggtttttggcgacgtgcccgctaaggccgaggcaggtgccgaggcgggaggtggggcaggccctggagctgaagatgaggccggtcgcggtgcggtgggcgatcctgagttaggagatccacccgcagcaccacaatag

SEQ ID NO: 226536 - DNA, 447 bp, synthetic construct
  misc_feature 1..447: note = Description of Artificial Sequence: Synthetic coding sequence
  source 1..447: mol_type = other DNA
atggcatgcactgtggtgctgattacaggatgttcatccggaatcggacttcacttggctatacacttagccctcgacccaagtcaatcattcaaggtgtatgcgaccttaagggacctgaaaacgcagggtagactttgggaggctgctcgcgctcttgcctgccctcagggaagcctggagcggctgcagttggatgtaagaaattcctcatctctggccgctgctcgggagcgagttactgagggtagggttgatgtgctagtctgcgacactggcttgggcctgctgggaccattaggtgaggatgctgttgcatcagttttggacgtaaacgtcgtgggcacggtccgcgtgctgcaggatttcttgccggacatgaagcgccctggcagcggtcgggttctggtgacaggatccatgggaggtctgatgggtgagtggtag

SEQ ID NO: 226537 - DNA, 786 bp, synthetic construct
  misc_feature 1..786: note = Description of Artificial Sequence: Synthetic coding sequence
  source 1..786: mol_type = other DNA
atggcagcagcgtgtcgcagcgtcaaggggctagttgccgtgattacggggggagcctccggactgggactcgctacagccgagcgcttggtcggtcaaggagcctctgcagtgcttctagatctgccgaatagtggcggagaagcccaggccaagaagctgggtaacaactgcgtcttcgctcccgcagatgtcacctcggagaaagatgttcaaacagctctcgcgctcgccaaaggaaagttcgggagagtggacgtggccgtgaactgcgctggcatagccgtggcctccaaaacgtataatctcaaaaaaggacagacacacactctagaagattttcagcgagttctggatgttaacctgatggggacattcaacgttataagactggtggccggtgagatgggccagaatgagcccgatcagggaggtcagagaggggtgattataaataccgcctccgtggccgcttttgagggacaagtgggccaagccgcttactcagcctccaaaggaggcattgtaggtatgaccctcccaatagcccgtgatttagcacctatcggcattcgtgtaatgactatcgcccctggactcttcgggacacccttactgacatccctccctgaaaaagtatgtaattttctcgcatctcaggttccgtttccatccaggttgggagaccctgcagagtatgcccacctggtgcaggccatcattgaaaatccattcctgaacggcgaagtgattaggttggacggggctatcagaatgcagccatag

SEQ ID NO: 226538 - DNA, 510 bp, synthetic construct
  misc_feature 1..510: note = Description of Artificial Sequence: Synthetic coding sequence
  source 1..510: mol_type = other DNA
atggcagccgcatgcagaagcgtgaaaggactggtcgctgtcataactggtggtgcttccggcctcggactcgccaccgcagagcggcttgtcggccaaggggcatccgctgtgctgctagatctccctaacagtgggggtgaagcacaggctaaaaaattgggcaacaattgtgtgttcgccccagccgacgtgaccagcgaaaaagacgtgcaaactgccctggcattagccaaagggaaatttggccgagtggacgtcgccgtaaattgtgcagggatagccgtcgcttcaaaaacttataatttgaaaaaagggcaaacgcacacattggaagactttcagcgggtcctggacgtaaacctgatgggaacattcaacgtgatcagactggtggcgggagagatgggccagaacgaacctgaccaagggggtcagcgtggcgtgatcataaatactgcctccgtggccgcatttgaaggacaggtgtgtctagccccacattgctag

SEQ ID NO: 226539 - DNA, 759 bp, synthetic construct
  misc_feature 1..759: note = Description of Artificial Sequence: Synthetic coding sequence
  source 1..759: mol_type = other DNA
atggccgcagcatgtaggagcgtcaagggcttagtggctgtgatcaccgggggagcgtcaggcttgggattggcaactgctgagagactcgtgggccagggcgcttcggccgtgctgctagatcttccaaacagcggaggcgaagctcaagctaaaaaactagggaacaattgtgtcttcgctcctgccgacgtgacctcagaaaaggatgtgcaaaccgccctggccttagcaaagggtaagtttggcagggttgacgtcgccgtgaattgcgctggaatcgccgtggctagtaaaacttacaacctgaaaaagggccagactcacacactcgaggacttccagcgggtactagatgttaacctcatggggacttttaacgtgatccgattggtggcgggagaaatgggccaaaatgagcccgatcagggagggcagcggggtgtgataatcaatacagcatctgtagctgcgtttgaaggccaggtggggcaagcagcatatagtgcctcaaaggggggaatcgtgggaatgactttgcctattgcccgtgatctggctccaatcggacttttcgggacacctctgctaacgtcccttcctgaaaaggtgtgcaattttctggctagccaagtaccttttcccagccggctgggcgacccggcagagtacgcacacctggtgcaggccataatagagaatccctttctgaatggtgaggtcattaggctggacggtgctattaggatgcagccctag

SEQ ID NO: 226540 - DNA, 903 bp, synthetic construct
  misc_feature 1..903: note = Description of Artificial Sequence: Synthetic coding sequence
  source 1..903: mol_type = other DNA
atgaagttcctgttggacatcctccttctattgcctcttttaatagtgtgctctctggagtcttttgttaaactgtttatcccgaagcggcgaaaatccgtgaccggggagatcgtgctgatcacaggagctggccacggaattgggaggcttaccgcttatgagttcgctaaattgaaatctaagttagtgctctgggatataaacaaacatggccttgaggaaaccgccgcaaaatgcaaggggctaggcgctaaagtgcatacgttcgtagttgactgcagcaacagggaggatatctactcctcagctaagaaggttaaggcggagattggagacgtaagtatcctggtgaacaacgccggagttgtctatacctctgacctgttcgccacccaggacccacagatcgagaagacctttgaagtgaacgtccttgcccacttttggacgaccaaggccttcttacctgccatgacaaagaataatcatggccacatcgtgactgtagccagcgcggcaggacatgtctcagtgcccttccttctggcttactgtagcagcaagttcgctgcggtcgggttccataaaaccctgaccgacgagctcgctgcccttcagatcacaggggtaaagacgacatgtctgtgtcctaactttgtaaatacaggttttatcaaaaacccctctacctctctgggtcccactctagaacctgaggaagtggtgaaccggctcatgcatggaattttaacggagcagaagatgatcttcatccctagctcgatcgcatttctgaccactctagaaagaattctgccggagcgctttctagctgtcctcaagcagaagatcagtgtcaagttcgacgcagtcattggatacaagatgaaagctcagtag

SEQ ID NO: 226541 - DNA, 795 bp, synthetic construct
  misc_feature 1..795: note = Description of Artificial Sequence: Synthetic coding sequence
  source 1..795: mol_type = other DNA
atgaacattatcctcgagatattgctcctactgattactatcatctactcctatctcgagagcctagtgaaatttttcattccacaaaggagaaagtcagtggcaggggagatcgttctgattactggagcaggacatggtattgggcgacagaccacctacgagttcgctaaacgacaatccatccttgtactttgggatatcaacaaggtaaagaaagaagttggggatgtgactattgtcgtgaataacgccggtacagtctaccccgcagacctcctttccaccaaagatgaggaaatcaccaagacctttgaggttaacattctgggtcatttctggattacaaaggctttactgccctcaatgatggagaggaaccatggtcacatcgtcacggtcgcttctgtctgtgggcatgaaggcatcccatatttgattccatactgtagtagcaaattcgccgctgtagggtttcatagagggctgacctccgagctccaggctcttggaaaaacagggattaaaacttcctgtctctgtccggtgtttgtgaacaccgggttcaccaagaatccctctacccgtctttggccagtgctggaaaccgatgaggtggtcagatcccttatagatggcatactcacaaacaaaaagatgatttttgtcccatcctacatcaatatctttctgcggttgcagaagtttttgcctgagagggcttccgctatcctgaatcgtatgcagaacattcaattcgaagccgtggtgggtcataaaatcaagatgaagtag

SEQ ID NO: 226542 - DNA, 903 bp, synthetic construct
  misc_feature 1..903: note = Description of Artificial Sequence: Synthetic coding sequence
  source 1..903: mol_type = other DNA
atgaacattatcctagagatcttactgctgctgatcaccatcatctactcctatctagagagcttggtgaagttctttatcccgcagcggagaaaatctgtggctggcgaaatcgtcctcatcaccggggcaggccatggcattggtcgccagaccacatatgagtttgcaaaaaggcagagcatcctcgtgctgtgggatattaacaagaggggggtagaggagacggccgcagaatgcaggaaactcggagtgactgcccacgcctatgtggttgattgctctaacagggaggaaatatatcggtcgcttaatcaggtaaaaaaagaggtgggggatgttacaatagtggtaaacaatgctggcacagtgtatcctgcggaccttctgtcaactaaagatgaggaaataacaaagacctttgaggtgaacattctgggacatttctggataaccaaagctttgctcccatctatgatggagaggaaccacggacacatcgtgacagttgcttctgtgtgcggacacgagggaattccttacctgatcccgtattgctcatccaagttcgctgctgtggggtttcacaggggcctgacctccgaactacaagcactgggaaagacaggcataaagaccagctgcctctgtccagtattcgtgaacacggggtttacaaagaatcccagcaccagattgtggccagtgctggagaccgacgaagtggtgcggtccctgatagatggaatcttgactaataaaaagatgatcttcgttccatcttatatcaacattttcctgagactacaaaagtttctgccagaaagggccagtgcgattttgaaccggatgcagaacattcagtttgaggctgtggtggggcataagattaagatgaagtag

SEQ ID NO: 226543 - DNA, 813 bp, synthetic construct
  misc_feature 1..813: note = Description of Artificial Sequence: Synthetic coding sequence
  source 1..813: mol_type = other DNA
atggctacaggaacacgctacgccggtaaggtggtagtggtgacgggcggaggacggggaatcggggctggtatcgtgcgcgctttcgtgaatagcggagctcgcgttgtcatttgtgacaaagacgagtcaggcggaagggccctcgaacaggagcttcctggtgcagtcttcatattgtgtgacgtaacacaggaggatgatgtaaaaactctcgtgagcgaaacgatccgcagattcggtcgtctcgactgcgtggtgaataacgctggccaccacccgccacctcagcggccagaagagacctccgcacaggggttccggcagttattagagctcaacctgctggggacctatacgctcaccaaactagccctgccatatctcagaaagtcacagggcaacgtgattaacatttcaagtctcgtaggggcaatcggccaagctcaggctgttccatatgtggccacaaagggtgcggtcaccgctatgacaaaagccctggccctcgatgagtccccttatggggtgcgggtgaattgtattagcccgggaaatatctggacccccctgtgggaggagctggctgccctaatgcctgacccacgtgccacaattagagagggtatgcttgcccagcccctgggtcggatgggccagcccgctgaagtgggtgcagctgctgtgttccttgcttccgaggccaatttttgcaccgggattgagctcctcgtgaccgggggtgcagaactagggtacggttgcaaagcgtcacgctctacccccgtagacgcccctgacattccttcttag

SEQ ID NO: 226544 - DNA, 1164 bp, synthetic construct
  misc_feature 1..1164: note = Description of Artificial Sequence: Synthetic coding sequence
  source 1..1164: mol_type = other DNA
atgagtacctttttctcagacaccgcttggatctgtctcgctgtgccaacagtcctgtgcgggacagtgttctgcaaatacaaaaagtcatccggccagttatggagttggatggtttgcctcgccggactctgcgccgtttgcctgttgattttgtctcccttctggggtctgatccttttttctgtgagctgcttccttatgtacacatatttgtccgggcaggagttgctgcccgtggaccagaaagccgtactcgtgacaggcggtgattgcggtttgggacatgccctgtgtaagtacctagatgagctcgggtttacggtgtttgccggagtgctgaacgaaaatggccctggagctgaagagctgagaaggacatgctcaccacgactgtccgtcctccaaatggatatcacaaaacctgtccagatcaaggacgcctatagcaaagtggctgctatgcttcaggatcggggtctgtgggccgtgataaacaatgccggtgttctgggcttccctaccgacggagagcttctcctgatgaccgactacaagcaatgcatggcagtcaacttttttggtaccgtcgaggtgactaagacttttttacctcttcttagaaagtccaaaggcagattggtcaatgtgtcttccatgggcggtggggcacccatggaacgattggcttcctatggtagtagcaaagccgctgtgaccatgttcagcagtgtcatgaggttggagctctcaaagtggggaatcaaggtggcttccattcaacccggagggttcctgacaaacattgcgggaacatctgacaaatgggaaaagctcgagaaagacatactcgatcacctacctgcagaggtgcaggaagactacggacaggactacatactcgctcagcgtaacttcttactgctgatcaattcgttggcatcaaaagacttctccccagtgttgcgagatatccagcacgctatcttagctaaatcacctttcgcctactacacaccaggaaaaggcgcatacctttggatttgcctagcccactatctcccaattgggatttacgactacttcgctaagcgccacttcgggcaagacaagccgatgccgagagctttgcgaatgcctaattacaaaaagaaagccacatag

SEQ ID NO: 226545 - DNA, 783 bp, synthetic construct
  misc_feature 1..783: note = Description of Artificial Sequence: Synthetic coding sequence
  source 1..783: mol_type = other DNA
atgggggacgtgctcgagcagttttttattttaactgggctgttggtgtgcctggcttgtcttgccaagtgcgtgagattcagtaggtgtgtactgttgaactactggaaggtgcttccaaaaagcttcctgcgatctatgggacaatgggcagttattaccggggcaggcgacggcattgggaaggcctactctttcgaactggctaagcgagggctcaatgtcgtgcttatttcccgcacgctggagaagcttgaagccatagccactgagatcgagcgcacaacaggaaggtcggttaagatcatacaggctgacttcacgaaggatgatatttacgagcacataaaggagaagcttgctggccttgagatcgggattttagtgaacaacgtcgggatgctgccgaatctgctgccaagccattttttgaacgcacctgacgagatccagtctcttatccattgtaacattaccagcgtagttaaaatgactcagctgattctcaagcatatggagtcacggcagaaaggtctgatcctcaatatctcttcagggatcgctctgttcccctggcccctttacagtatgtatagcgcttctaaggctttcgtatgtgctttttccaaagccctgcaggaggaatataaggctaaggaagtgataattcaagccggatttctgtccctgatacccgcttgggcgttctacagcggtgcctttcagagacttcttttgacgcactatgtggcctatctgaagctcaacaccaaggtgaggtag

SEQ ID NO: 226546 - DNA, 933 bp, synthetic construct
  misc_feature 1..933: note = Description of Artificial Sequence: Synthetic coding sequence
  source 1..933: mol_type = other DNA
atgggcgatgtgctggaacagtttttcattcttacaggattgctcgtctgcctagcttgcctagctaagtgcgtccgattctcacgctgcgtcctcctgaactactggaaggtattgccaaagtcattcctgaggagcatggggcaatgggcagtgatcacaggtgccggagatggaatcggcaaggcctactctttcgaacttgcaaagagaggactgaatgtggtcttgatctccaggacgttggagaaactcgaagcaattgcaacagagattgagaggacaaccggcagaagcgtcaagattattcaggccgacttcacaaaggacgacatctatgagcatatcaaggagaaattagcgggactggagatcgggattctggtcaacaatgtgggtatgctccccaacctcctgccatcacactttcttaacgccccagatgagatccagtcactgatccattgtaacatcaccagcgtcgtgaagatgacgcagctgatcctgaagcacatggaaagtcgccaaaaggggcttattttaaatatatcctcaggcatagcgctgttcccgtggcccctctactctatgtactctgcaagcaaggccttcgtgtgcgcctttagtaaagccttacaggaagagtacaaggccaaagaggttatcatacaagtgcttactccctacgcggtgtccacagctatgaccaagtacctaaacaccaatgtgatcacaaaaacagcggatgaatttgtgaaggaatctttgaattacgtgacaatcggcggtgagacgtgcggatgcctggctcatgaaatccttgctggctttctaagtctcattccagcctgggccttctactctggggctttccaacgcctgctgctgactcactacgtcgcctatctgaagctcaacaccaaagtaaggtag

SEQ ID NO: 226547 - DNA, 2211 bp, synthetic construct
  misc_feature 1..2211: note = Description of Artificial Sequence: Synthetic coding sequence
  source 1..2211: mol_type = other DNA
atgggatcaccattgaggtttgatggcagagtggtcctcgtgacaggggctggggcaggcctggggagagcgtatgccttggcttttgctgagagaggagccttggtggttgtcaacgacctggggggtgacttcaaaggggtggggaaaggtagcctcgccgctgataaggtggtggaagagattcgccgtcgaggaggaaaggccgtcgctaattatgatagcgttgaggagggcgaaaaggtcgtaaagactgctctggatgccttcggacgtattgatgtggtggtgaataatgccggtatcctgcgagacagaagttttgctaggatttccgacgaagactgggatattatccatcgggtccatctgcgtgggtcatttcaagtgactagagctgcctgggagcacatgaaaaaacagaaatatggcaggataatcatgacaagctccgccagcggcatttacggcaattttggccaagcaaattactcagctgcaaagctgggattgttaggcctggctaactctctggccatcgaggggaggaaatccaatattcactgcaacacaatcgcccctaacgctggcagtcggatgacccagactgttatgcctgaggatctggtggaggcactgaagccggagtacgtagctcccctcgtcctatggctctgccacgaatcatgcgaggaaaatggtggcctgtttgaggtcggagccggatggatcgggaaattgcgttgggaaaggacgttgggagctatcgttagacaaaagaaccaccccatgacgccggaggctgtaaaggccaactggaaaaagatttgcgatttcgaaaatgcttcaaagcctcaaagtattcaggaaagcacaggcagtattatcgaagtcctgagtaaaatcgattctgaagggggtgtgtcagcaaaccacaccagcagggcaacttctacggcaacctctggctttgcaggagctatcgggcaaaagctgccgccattctcctacgcctatacagaactcgaggccatcatgtacgcactcggagtcggggctagtatcaaggaccccaaggatctgaaatttatatatgaaggtagctctgacttctcgtgtctgcccacctttggtgttataatcggacagaagtccatgatgggaggcggactcgccgagattcccggactctcaattaatttcgcgaaggtcctccatggagaacaatacctggagctttataaacctttgcccagggcaggcaaactgaagtgcgaggcagtggtggcggacgtcctggataaagggtcgggcgtcgtgattatcatggacgtgtattcatactccgagaaggaactgatctgccataatcaatttagtctttttctggtggggagcgggggatttgggggtaagcgcacatccgacaaagtgaaagtcgcagttgctattcccaatcgcccaccagatgccgttctcaccgacacaacctcactgaaccaggctgcgctgtaccggctgtccggggactggaacccactgcacatcgatccaaattttgcctcgttggccggtttcgataagccaatcttgcacgggttgtgcactttcggattctctgccaggagagtcctccagcagtttgcagacaatgatgtgagtcgattcaaagccatcaaagcccgatttgcaaaacccgtgtatccaggccagactctacagaccgaaatgtggaaagaagggaacagaatacattttcagacaaaagtgcaagaaactggggacatcgtgatcagtaacgcttatgtagatcttgcaccaacgagtgggactagcgccaagacaccgtctgaggggggtaagctacagtcaaccttcgtattcgaggaaataggacgacgactaaaggatatcggcccagaggtggtgaaaaaggtgaatgctgtgtttgagtggcacattaccaagggcggaaatatcggggctaaatggaccattgacttgaagtctggatccgggaaggtgtaccaggggccagccaagggcgctgctgataccacaattatcctgtctgatgaggattttatggaggttgtgctgggaaagttagacccccagaaagcatttttttctggacggctcaaggctagaggcaatatcatgctgagtcaaaagttgcaaatgatactgaaggattatgcaaaactatag

SEQ ID NO: 226548 - DNA, 2286 bp, synthetic construct
  misc_feature 1..2286: note = Description of Artificial Sequence: Synthetic coding sequence
  source 1..2286: mol_type = other DNA
atggtgattttagaagcgcctcacctccttcgcagaaaagagccagaaacaccaggcctgtcaagtcgaatcggtccaagcctgtgccctgggttttgccgcaagcggagcgtgtcctgctgttttcagaacctctgtaacaatccaatggaaaagattatcagccaatgtcggttttttgtgtccatgaacgacctggggggtgattttaagggagtggggaagggctcccttgcagcggataaggtcgtggaggagatcaggcgtcggggaggaaaagcagttgcaaattacgacagtgttgaggagggcgaaaaagtggtcaaaacagctctcgatgcctttggccgaattgacgtggtggtaaacaatgctggaatcctgagagatcgaagtttcgccagaatcagcgatgaagattgggatatcatccaccgggtgcatctgagagggtcttttcaggtgaccagagccgcttgggaacacatgaagaaacaaaaatatggaaggataattatgaccagctccgcttccggcatttatggcaatttcgggcaggcaaactacagcgcagccaaactgggattgctgggcctagctaactccttggcgatcgaaggcaggaagagcaacatccattgcaacacaatcgcccctaatgctggctcaaggatgacacagactgtgatgccagaagatttagtggaggccctgaagccggaatacgtggctcccctcgtcctctggctgtgccatgagtcctgcgaagagaatggaggactcttcgaggtgggagcaggctggattgggaagctccgctgggagcgaaccctgggggcaatagttcggcagaagaaccaccctatgacacccgaggcagtcaaggcaaactggaaaaaaatttgcgactttgagaatgcttccaaaccccagtccatacaggagagtaccggaagtattatagaagtcctatccaagatagattccgaaggaggcgtgtccgccaatcacacctctcgagccacatctaccgcgacttccggattcgctggtgccatcggccagaaacttcctccattctcatacgcatataccgaactggaggccatcatgtatgcacttggggtgggcgcatcaatcaaagaccctaaagacttgaagtttatctatgaggggagttcagacttctcctgcttacccacatttggggtgattatagggcagaaatctatgatggggggaggcctggcggagatcccgggactctcgatcaattttgccaaggtcctgcatggagagcagtatctggagctctataagccactgccccgtgcaggtaaattgaagtgcgaggctgtcgtcgctgacgtactcgacaagggctcgggggttgtgatcatcatggatgtctattcctatagtgaaaaggagctgatttgtcacaatcaattcagcctatttctggttggatccggcggattcggaggcaagcggacatcggacaaagtaaaagtggcggtagcgatccccaataggcccccagacgcagtgctcacagacaccacgagtctgaaccaagctgcattatatcgcctctcgggggattggaatccactccacatagacccaaacttcgcctcattggctgggttcgacaagcccattttgcatggactgtgcacattcggcttctctgcaagacgggtgctccagcagttcgctgacaacgatgtgtctagattcaaagcaattaaggcccgttttgctaagcctgtataccccggacagactctgcagaccgaaatgtggaaagagggtaatcgcattcacttccaaacaaaagttcaagagactggagatatcgtaattagcaatgcatacgtagaccttgctccaactagtggcacaagtgcgaaaactccatccgaggggggaaaactccagagtaccttcgtgttcgaggagatcggcaggagactgaaggatataggccctgaggtggttaaaaaagtgaatgctgttttcgagtggcatatcacaaaaggcggaaacatcggcgctaagtggactatcgaccttaaatctgggtcaggaaaggtttatcaggggcctgccaagggcgctgccgacaccacaattatcctgtccgatgaggacttcatggaggtcgtcctggggaagctggacccacagaaggccttcttcagcggaaggctgaaggcccgaggcaatattatgcttagtcagaagctgcagatgatcctgaaggattatgcaaagttatag

SEQ ID NO: 226549 - DNA, 2139 bp, synthetic construct
  misc_feature 1..2139: note = Description of Artificial Sequence: Synthetic coding sequence
  source 1..2139: mol_type = other DNA
atggaaaagatcatttcccaatgcagattctttgtctcaatgaacgacttggggggtgactttaagggcgtgggtaagggaagccttgctgctgataaagtggtggaggagattcgcaggaggggaggaaaggctgttgcaaactacgacagtgtcgaggagggcgaaaaggtcgtcaagaccgcccttgacgcattcggacgcattgacgttgtggtcaataatgccggtatcctgcgtgatcggagctttgcacgtatcagcgacgaggactgggatatcatccatcgcgtccacctccgtgggtccttccaggtcacaagagcggcttgggagcacatgaagaagcaaaagtacggccgaattataatgacttcttcagcctctggcatctatggaaactttgggcaggctaattacagtgctgctaaactgggcctccttggcctagctaacagcctggcaattgaaggcaggaaaagcaacatccactgcaacaccatcgctcccaacgctggtagccgcatgacgcagacagtgatgcccgaagacttagttgaggccttaaaacccgagtatgtcgcccctctggtcctgtggctttgtcacgagtcatgcgaggaaaatggcggactgttcgaggtcggagcaggctggattgggaagctccggtgggagcgaacactcggggctattgtgagacagaagaatcatcctatgactcctgaggccgttaaggcgaattggaaaaagatctgtgacttcgaaaacgcatcaaagccccagagcattcaggagtcaactgggtcaatcatagaagtgttgtctaagatcgacagtgaaggaggcgtgtctgctaatcacacgtctcgcgctacctccacagccacgtcaggcttcgccggagccattgggcagaaactacccccttttagctatgcttacacagagttagaggcgattatgtatgcacttggggtgggtgcttcaattaaggatcctaaggacctcaagttcatttatgagggttctagcgactttagctgcttgccaacttttggcgtcattatcggacagaagtctatgatggggggtggcttagcggaaatcccaggcctgtctatcaatttcgctaaggtgctccacggcgagcagtatcttgagctctacaaaccacttcccagagccggaaaactgaaatgtgaggccgtagtggcagatgtacttgataagggatctggagtcgtgatcatcatggatgtttactcctattcagagaaggagctgatttgccacaaccagttctccctattcctggtgggctccggaggattcggtggcaagagaaccagcgataaagtgaaggtggctgtcgccatacctaatcgcccacctgatgccgtcctgacagacacgacctcactcaatcaagcggctctgtataggctgagtggcgattggaaccccctgcatattgacccaaattttgcctcactcgcgggatttgataaaccgattctccacggcctgtgcacctttggatttagcgcacgccgagtcttgcaacagtttgctgacaatgacgtttctcgatttaaggctatcaaagctcggttcgccaaacccgtgtatcccggacaaactctgcagactgaaatgtggaaggagggaaatcgcatccactttcaaactaaggttcaggagactggcgatatagtcataagcaacgcttatgtggatcttgctcccacatccgggacctcggcgaagactcccagcgagggaggaaaattgcagtccaccttcgtctttgaagaaataggccgaagactgaaggacatcgggccagaggtcgtgaagaaggtcaatgccgtattcgagtggcacatcaccaagggcggtaacatcggtgctaagtggacgatcgacctcaaatcggggtccggaaaggtataccagggcccagctaagggggctgctgataccactatcatcttatcagatgaggacttcatggaagtggtgctaggaaagctcgaccctcagaaagcctttttttccggcagactaaaggcaagaggtaatatcatgctcagccagaaactgcagatgatcttaaaggattacgccaagctgtag

SEQ ID NO: 226550 - DNA, 1800 bp, synthetic construct
  misc_feature 1..1800: note = Description of Artificial Sequence: Synthetic coding sequence
  source 1..1800: mol_type = other DNA
atgaaaaaacagaagtatggcaggatcatcatgacgtctagcgcctccggcatctacggtaattttggacaagctaactatagcgccgcaaaactgggcctgcttggtttagcgaactctctcgcaatagaaggacgcaagagcaatatccattgtaacacaattgccccaaacgcgggatcacgcatgacccaaaccgtaatgccggaagatctggtggaagcattgaaacccgagtacgttgctcccctggtgttgtggctgtgtcatgagagttgcgaagagaacggcggattgtttgaagttggggcaggatggataggcaaattacgttgggaaaggacgctaggcgcaatcgtaaggcagaaaaatcatcctatgacacctgaggccgtgaaggccaactggaaaaaaatttgtgacttcgagaatgcttcaaaacctcagagcatccaggagtcaacagggagcatcatcgaggtgttgtctaaaatagattcagagggaggggtgagtgccaatcatacgagtagagcaacttccactgctacttctggttttgcaggggcaatcgggcagaagctcccaccttttagttatgcctatacagaattggaggcaattatgtacgcactgggtgtcggcgcttccattaaagacccgaaagacttgaagttcatctatgagggcagctctgatttctcttgtcttcccacatttggtgtgattatcggccaaaaatctatgatgggcggtgggctggccgagatccctggccttagtatcaattttgcgaaggtgctgcacggggaacaataccttgagctttacaaaccactccctcgcgctggaaaattgaagtgcgaagccgtggttgcagacgtgttggacaaaggctcgggagtggtcatcataatggatgtgtactcatactctgaaaaagagctcatttgccacaaccagtttagcttatttctagttggtagtgggggatttgggggaaagagaacctctgataaggtaaaagttgctgtcgctattcccaaccggccacccgacgccgtgttgaccgacactaccagtttgaatcaagctgcactataccggctaagcggagactggaatcctttgcacatcgaccctaattttgccagcctggcaggttttgacaaacctatactgcatggcctttgcacctttgggttttcagcacggagagtcctgcagcagttcgccgataatgatgtgagtagattcaaggctatcaaagcacgtttcgccaagcctgtctatcctggtcaaaccctccagaccgagatgtggaaggaaggaaatcggatccacttccaaacgaaagtccaggagactggcgacatcgttatttccaatgcttacgtggatctagccccaactagcggcacgtctgccaaaacaccttctgaaggaggtaagttgcagtctacattcgtatttgaggaaatcgggaggcgccttaaggacatcggacccgaggtcgtaaagaaagtcaacgctgtgttcgaatggcacattacaaagggcggtaatatcggagcaaaatggaccattgacctgaagagtggctccggcaaagtgtaccaaggcccagccaaaggagcagccgataccacaataatcctgagcgacgaagactttatggaggttgttctgggcaagcttgatccacagaaggcttttttttctgggaggctcaaagcccgaggcaacatcatgctctcacaaaaactgcaaatgatccttaaagattacgctaaactctag

SEQ ID NO: 226551 - DNA, 2157 bp, synthetic construct
  misc_feature 1..2157: note = Description of Artificial Sequence: Synthetic coding sequence
  source 1..2157: mol_type = other DNA
atgggatccccactgcgtttcgacgggagagtagtgcttgtgacaggagctggagccgttaatgacctggggggtgatttcaaaggcgtcggcaaaggcagcctggctgccgataaagtggtagaggagattcggcgaagaggaggtaaagctgtggctaactacgacagtgtggaggagggcgaaaaagtcgtcaaaacagcgttagatgcatttggaagaattgacgtagttgttaacaacgccggtatcctcagggaccgatccttcgcacggatctccgacgaggattgggatataatacacagagtgcacctgcgcggttcatttcaggtcactcgcgctgcttgggaacacatgaagaagcagaagtatggcaggatcatcatgacatcctccgcctcggggatctatgggaacttcgggcaggccaactactcagccgctaaactggggctgctcggtttggcgaacagcttggccatagaaggcaggaagagcaacatacattgtaacaccattgcaccaaatgctggaagccgtatgacacagacagtgatgcccgaggatctcgtagaggcccttaaaccagagtatgttgcaccccttgtgctgtggctgtgccacgaaagttgtgaggagaacggcggactcttcgaggtgggcgctgggtggattgggaaactcaggtgggaaagaaccctgggagccatcgtccgtcaaaagaaccatccaatgactccggaggctgtcaaagcaaattggaaaaagatttgtgattttgagaacgctagtaagccacaatcaatccaggaatctactggctctataattgaggtgttgtccaaaattgactccgagggcggagtgagcgccaaccacacctcaagagccacttccacagcaacgtcgggtttcgccggtgcaattggtcaaaagttgccgcctttctcgtacgcatatacagagcttgaggcaatcatgtacgcacttggcgtgggtgcctctatcaaagatcctaaagatctgaagtttatttatgagggaagctctgacttctcctgccttcccaccttcggggtcattatcggacagaaaagcatgatggggggaggtctagccgagattcctgggctgtccatcaacttcgccaaagtgctccatggagagcaatatcttgagctctataagcctttgcccagggccggaaaactgaaatgtgaagctgtagtggccgatgttcttgacaagggcagtggagtggtgatcataatggatgtgtacagttacagtgaaaaagagctgatatgtcacaatcaattctcactgttcctggtagggtctggaggctttggcggtaagaggaccagtgacaaggtgaaagtagctgtggcaataccgaaccggccaccagatgcagtcctgacggacacaacctctttgaatcaggctgcactctatcgccttagtggcgattggaaccctctgcacatcgatccaaatttcgcctcactcgctggttttgataaaccgattcttcatgggctctgcacatttggcttttccgcacggagggtcctgcagcagttcgctgacaacgacgtctcgcgatttaaagcgatcaaggccagattcgcaaagcccgtgtaccctggtcagaccctgcaaactgaaatgtggaaggaggggaaccggatccattttcagactaaagtgcaagaaactggggacatcgtcatcagcaacgcgtacgtggaccttgcccctacctccgggaccagcgctaaaacaccgtctgaaggaggtaagctccagtctacctttgtgtttgaggaaataggacgtcgcctcaaagacattgggccagaggtcgtcaaaaaagtgaacgctgtattcgaatggcacattaccaagggtggcaatattggagctaagtggaccattgatttaaaaagcggctctggtaaggtatatcagggcccagctaaaggggcagccgatactacgattatcctgtcagatgaagacttcatggaggtggtgctggggaagctggatccacagaaggcctttttcagcggcagattaaaagcccgagggaacatcatgctcagccagaaactccaaatgatcctgaaggactacgccaagctgtag

SEQ ID NO: 226552 - DNA, 1026 bp, synthetic construct
  misc_feature 1..1026: note = Description of Artificial Sequence: Synthetic coding sequence
  source 1..1026: mol_type = other DNA
atgcgcaaagtagttctaattacaggcgcttcctctggaatcggtctggcactgtgcaagaggctgcttgccgaagatgacgagttgcatttatgccttgcttgccgcaacatgtcaaaagctgaagctgtgtgtgcagcactgctcgcttcgcacccaaccgccgaggtgactatcgtgcaggttgacgtgtccaaccttcagtctgtgttccgcgcttctaaggagcttaaacagagattccagagactagactgcatctacctgaatgctgggattatgccaaacccacagttgaatatcaaggcactcttttttggcttgttttctagaaaagtgatccacatgttctccaccgcagaagggctcttgacccaaggagataagattaccgctgacggtctccaggaggtattcgagaccaacgtgttcgggcactttattctcatccgggagctggaacctctcttatgccacagcgacaacccttcacagctgatctggacatcctctcgcagtgccagaaagagcaatttttctctcgaagacttccagcattctaagggtaaagagccctattcatcttccaaatacgcaacagacctgctctccgttgccctgaatcggaacttcaatcaacagggtctttattccaacgtagcttgccccggaaccgcactcacaaacttgacctatggaatcctcccacccttcatctggactttgctcatgcccgcaatcctgctcctgcgtttttttgccaatgcgtttacactgacgccctataacggcacagaggcgctcgtctggttgttccatcaaaagcccgaaagtctgaatccgctgataaaatatctctctgcaactaccgggtttggaaggaattacattatgacccagaagatggacctagatgaagacactgccgagaagttctatcagaagctgcttgaattggagaaacatatcagggttaccatccagaaaaccgacaaccaggcccgattaagcggctcctgtttgtag

SEQ ID NO: 226553 - DNA, 336 bp, synthetic construct
  misc_feature 1..336: note = Description of Artificial Sequence: Synthetic coding sequence
  source 1..336: mol_type = other DNA
atgcgcaaggtggtgttaatcactggtgcttccagcggcataggcctggccctgtgcaaacgtctgcttgcagaggacgacgagctacacctgtgtctggcttgccgcaatatgagtaaggccgaggccgtctgtgctgcactgctagccagtcatcccactgcggaagttacaattgtgcaggttgacgtaagtaatctgcaatcagtgttcagggcgtcgaaggagttgaaacagagatttcaacgattggactgcatctacctgaatgcgggaatcatgccaaacccccagctgaatattaaagccctctttttcggcctgttctcaagctag

SEQ ID NO: 226554 - DNA, 255 bp, synthetic construct
  misc_feature 1..255: note = Description of Artificial Sequence: Synthetic coding sequence
  source 1..255: mol_type = other DNA
atgaggaaggtggtcctgatcacaggtgcctcttccggaattggactagcactgtgtaagcgcctcctggcagaagacgacgagcttcatttatgcttagcctgtaggaatatgtctaaggccgaagccgtatgcgcagccctgctggcttctcacccaaccgcagaagtgactatcgttcaggtcgatgtgtccaacctgcagagcgttttcagggccagtaaagagctgaagcagaggtacattagctgctag

SEQ ID NO: 226555 - DNA, 921 bp, synthetic construct
  misc_feature 1..921: note = Description of Artificial Sequence: Synthetic coding sequence
  source 1..921: mol_type = other DNA
atgagaaaggtagtacttataacaggggcttctagcggaatcggcctggcgttgtgtaaacgcttgctcgcagaggacgacgagctgcacctgtgtctggcatgccgaaacatgagcaaggcggaagccgtatgtgccgcactgctagcaagtcaccccaccgctgaagtgacgatcgtacaggtagatgtctcaaatctacaatcagtgttccgcgcttcaaaggaactcaaacagcggtttcaacgcctggactgcatttacctcaatgcgggaattatgcctaatccacaacttaatataaaggccctgtttttcgggctcttctcccgaaaggtgatccacatgttcagcaccgccgaaggcctcctgacccagggtgataagattaccgcggacggcctccaggaggtctttgaaacgaacgtttttggccatttcattttgatcagggaactggagcccctgctgtgtcacagtgacaacccaagccagctgatctggacctcctctcggagtgcaaggaagagtaatttctccctcgaagacttccagcattctaaaggaaaggagccctatagctcctctaaatacgctactgatctgttaagcgtggctctcaacagaaattttaaccagcagctccggtttttcgctaacgcgttcacacttacaccgtataatggcacggaggccctggtatggttatttcaccagaagccagagagcctcaatccactcattaaatacctgagtgctacaaccggctttgggaggaattacattatgacacagaagatggaccttgatgaagatactgctgaaaagttttatcagaaactgctagagctggaaaagcacattagagtgactatccagaagactgacaatcaagctcgattgtccggctcgtgcctgtag

SEQ ID NO: 226556 - DNA, 360 bp, synthetic construct
  misc_feature 1..360: note = Description of Artificial Sequence: Synthetic coding sequence
  source 1..360: mol_type = other DNA
gtcgttattagggagttagagcctctcttatgtcatagtgataaccccagtcagcttatatggacctctagtagaagcgccagaaagagtaatttcagcctagaggattttcagcactcaaagggtaaggaaccatactctagctctaagtatgcaactgacctgctgagtgtggccctcaatcgaaactttaatcaacagttacggtttttcgcgaatgcttttacacttacaccatacaatggaactgaggcgttggtttggctgtttcatcaaaaacctgagtcgctgaatccactgatcaagtacttgagcgccacaacaggcttcggtaggaactatattatgacccagaaatag

SEQ ID NO: 226557 - DNA, 966 bp, synthetic construct
  misc_feature 1..966: note = Description of Artificial Sequence: Synthetic coding sequence
  source 1..966: mol_type = other DNA
atggaacggaaaaatcagacagctataaccgagttcattatccttggattcagcaatctcaatgagtggcaattcttactgttcaccatattctttctcacctacttttgcaccctcggcggaaacattctcatcatcttgacaaccgttactgacccacatttgcatacccccatgtattatttcctggggaacctggcatttattgatatatgctataccacctctaacgtgccacagatgatggtacacttgctgtccaaaaagaagagcatcagttacgtcggctgtgttgtgcagctgtttgcgtttgtgttttttgtcggctccgagtgcctcctgttggcagccatggcctacgaccgttatatcgctatctgtaatccgctccgctactccgtcattctgtctaaggtcctgtgcaaccagctggcagccagctgttgggctgccggttttctaaatagtgtggtgcacaccgttcttaccttctgtctacccttttgcggcaataaccagatcaattattttttctgtgacatcccgcctctcctgattctaagctgcggtaacacttctgtgaatgagctcgccttgttgtcaacaggcgtgtttattggatggacacccttcctttgtatcgtgctaagctatatctgcatcatttcgaccattctcaggattcagtcatcggagggcaggcggaaggcttttagcacctgtgctagccacctggcaattgtgtttctgttttatgggtccgcaatctttacctatgtgaggcctattagtacctatagcctgaagaaggacaggctggtgagcgtcctctattcagttgtgacacccatgctgaatcccatcatctacacgctccgtaataaggatatcaaggaggccgtgaagaccatcggaagcaagtggcagcctccaatctccagtctcgatagcaaactaacttactag

SEQ ID NO: 226558 - DNA, 786 bp, synthetic construct
  misc_feature 1..786: note = Description of Artificial Sequence: Synthetic coding sequence
  source 1..786: mol_type = other DNA
atggccagccaactgcagaacagattgcgcagcgctttggcattagtcacgggggcagggtcgggaataggacgcgctgtcagcgttagattagctggggaaggagctaccgtcgcagcctgtgatcttgatagggcagctgctcaagagaccgtgaggctcctgggtggtcccggaagcaaagaaggacccccacgaggcaaccacgcagcttttcaggccgatgtctctgaggcccgagccgctagatgcctgctggagcaggtgcaagcctgcttcagccggcctccaagtgtggtggtgagctgtgctgggatcacacaagacgaatttctgctgcatatgagcgaggacgattgggataaggtgatcgccgttaacttgaagggcacctttcttgtgacgcaggccgctgcccaggccttggtttccaacggctgtaggggttctataatcaatattagcagcatagtcggcaaggtcgggaacgtaggccagacaaactatgctgcctccaaagctggtgtgatcggcttgacccagaccgcagctcgggagcttgggcgtcacggaattcggtgcaatagcgtcctccccggtttcatcgcaactccgatgactcagaaagttccacagaaggtagtggacaagataaccgaaatgatccctatggggcatctgggggaccctgaagatgttgctgacgtcgtggcctttttagcaagcgaagattccggatacatcacaggaacaagcgtagaggttacaggcggattgttcatgtag

SEQ ID NO: 226559 - DNA, 786 bp, synthetic construct
  misc_feature 1..786: note = Description of Artificial Sequence: Synthetic coding sequence
  source 1..786: mol_type = other DNA
atggcatctcaattacagaataggcttcgctctgccttggccttggttaccggagcaggatctggcatcgggagagccgtttcagttaggcttgcgggtgagggagctactgtcgccgcatgcgatctggaccgagccgctgcccaggaaaccgtcaggctcctaggtgggccagggtccaaggaggggccaccaagaggtaatcatgccgcttttcaggcagacgtttcagaggcccgtgcggcaaggtgtcttttagaacaggtgcaggcctgtttttcccgacctccatcggtggtggtctcttgcgcgggtatcactcaggatgaatttctgctgcatatgagtgaagacgattgggacaaagtcattgccgtgaacctgaagggcaccttccttgtgactcaggcagccgcacaggcactcgtctcaaatggatgccggggaagcattataaatatttcaagcattgtggggaaggtgggcaacgtaggccagacgaattacgccgcaagcaaagctggcgtgatcggcctcacccagactgccgctcgggagctgggcaggcatggtatccggtgcaattccgtactgcctggcttcattgccacccctatgacccaaaaagtgccacaaaaggttgttgataaaattaccgaaatgatcccaatgggacatttgggcgacccagaagacgtggctgacgtggtggcctttttagcctcggaggactccggttacatcaccggaaccagtgtcgaggtcactggtggattgttcatgtag

SEQ ID NO: 226560 - DNA, 786 bp, synthetic construct
  misc_feature 1..786: note = Description of Artificial Sequence: Synthetic coding sequence
  source 1..786: mol_type = other DNA
atggcgagtcagctgcaaaaccgccttaggagtgccctggcattggttacaggagccggaagtggaattgggcgtgcagtttccgtccgcctggccggagaaggtgccactgttgctgcctgcgacctcgatagagcagctgcacaggagacggtccggttgctcggcggtcccggttctaaagagggcccacctcggggaaaccatgccgctttccaggcagacgtgtcggaagcacgggctgcccgatgccttctggagcaagtacaggcatgctttagtcggccaccctccgtggtggtaagctgtgcgggtattacacaggacgagtttctcctgcatatgagcgaggacgactgggacaaagtcatcgccgtcaatctaaagggcacttttttagttacgcaggccgcagcccaggctctggtgtctaacggctgtaggggttccattatcaacattagctctatcgtaggcaaggtgggcaacgtcgggcagaccaattacgccgcttccaaggcaggtgtcattggcctcacgcagacagcagctcgtgagctcggtcgccatgggatccgatgcaacagcgttctacccggattcattgccacaccaatgacccaaaaagtgcctcagaaggtagtggacaaaattacagaaatgatccctatgggtcacttgggggatccagaggacgtggcggatgtcgttgccttcctcgcctcagaggactccggatacataactggtaccagcgtggaggtgaccggcggactctttatgtag

SEQ ID NO: 226561 - DNA, 786 bp, synthetic construct
  misc_feature 1..786: note = Description of Artificial Sequence: Synthetic coding sequence
  source 1..786: mol_type = other DNA
atggcctcacagctgcagaatcgcctaaggagcgctctcgccttggtcaccggagcaggcagcgggatcggtagagctgtgtccgtgcggctcgccggtgagggcgctacagtggccgcttgtgacctagacagggccgcagctcaggagaccgtgcgcttattaggaggtccaggttctaaggagggacctcctaggggtaatcatgctgcctttcaggccgacgtttctgaggctcgggctgccagatgcctacttgagcaagtgcaggcttgtttctcgagaccgcctagtgtcgtagtgagctgcgccggaattacccaggatgagtttctgttgcatatgtcagaagacgactgggacaaggtgattgctgtgaatctgaagggtacttttctggtgacgcaggccgctgcccaagccctggtgtctaacgggtgcagaggcagcattataaacatctcttctatcgtcggcaaagtcggaaacgttgggcagactaattatgctgcttccaaggccggagttatcggcctgacccagactgctgcaagagaactgggcaggcacgggatccgctgcaatagcgtcctacccggattcatagcaactccgatgacacagaaagtgccccagaaggtcgttgacaagataaccgaaatgattccgatgggccatctgggcgatcccgaagatgtggccgacgttgtcgcatttctggcctcagaagatagcggatatatcaccggcacgagcgtggaagttaccggtggtcttttcatgtag

SEQ ID NO: 226562 - DNA, 786 bp, synthetic construct
  misc_feature 1..786: note = Description of Artificial Sequence: Synthetic coding sequence
  source 1..786: mol_type = other DNA
atggccagtcaacttcaaaaccggcttcgatccgctctcgcccttgtgacaggagcaggttcaggcattggtcgggcagtaagtgtgagattggccggagaaggtgccaccgtggccgcttgcgatcttgatagagcggctgcacaagagacggtccgactcctcggaggtccaggttccaaggagggtccccctcgtggaaatcatgctgcgtttcaggcagatgtttccgaggctagagccgctaggtgtttactggagcaagttcaggcatgcttcagtaggcccccatctgtggttgtaagttgtgctggcatcacacaagacgagttcctgttacacatgtccgaagacgattgggacaaggtgattgccgtcaacttgaaggggacattcctagttacacaagctgccgcacaggccctggtctctaatggctgcaggggttctattatcaacatcagctccatcgttggaaaggttggcaatgtaggccagacaaactatgccgctagcaaggcgggtgtgattggtctgacccagacagcggcaagggagctgggacggcacggcatccgctgcaatagtgtactcccagggttcattgcaactcctatgacacagaaggtcccccaaaaagtcgtggacaagattaccgagatgatcccaatgggccaccttggggaccccgaagatgtcgccgacgtcgtcgcctttctcgccagtgaagattcaggttacatcacgggaacctccgtggaagtgacaggcggactttttatgtag

SEQ ID NO: 226563 - DNA, 1848 bp, synthetic construct
  misc_feature 1..1848: note = Description of Artificial Sequence: Synthetic coding sequence
  source 1..1848: mol_type = other DNA
atggtgtcaggtccactagcacttcggtggtgtgcctgggcaggcaggggcgatatggggccagatatggagctgcctagccacagcaagcagcttctcctgcaactgaatcagcaaagaacgaaaggtttcctctgtgatgtaattattatggttgaaaatagcatttttcgggcacacaaaaacgtgctggcggcatcatcaatctactttaagtcattggtgctgcatgacaacctgatcaatctggatacagacatggtgtcttcaaccgtcttccagcaaatattggattttatctatacgggtaagctgctcccttccgatcagcctgctgagcccaatttctccacactgttgacagctgcaagttaccttcagctccccgagcttgcagccctgtgtcgaaggaaactcaagcgcgcagggaaaccttttggctctggaagagccggatcaaccggaatgggcaggccccctcggagccaaagactgtcgactgccagcgtgattcaggccaggtaccagggccttgtggatgggcgtaagggcgcacatgccccacaggaactcccccaggctaaagggtccgatgacgagctctttctcgggggtagcaaccaggatagcgtgcaaggccttgggagagccgtctgccctgctgggggagaagctggattgggagggtgcagcagctctactaatgggtcctctgggggatgcgagcaggaactgggactggacctctctaaaaagtccccaccactgcctccagcaaccccagggcctcacttgacacctgacgatgctgcccagctgagcgattctcagcatggatcgccacccgcagctagcgcgccacctgtcgccaatagcgcaagctacagcgagctgggcggtaccccagacgagcccatggatcttgagggggcagaggacaatcatctgagcctcctggaagcgcctggtggtcagcccagaaaatccctccgccacagcacccgcaaaaaagagtgggggaagaaagaacctgtcgccggaagcccattcgagagacgcgaagccggacccaagggaccatgtcctggagaggaaggagaaggagttggagatcgggtgcccaacggaatcctggctagcggcgctggcccatcaggcccttacggcgaacccccttatccctgtaaggaagaggaggagaacgggaaggacgccagcgaggacagcgcccagtcagggagcgagggcggtagtggccatgcctccgcacattacatgtaccggcaggaggggtacgaaacagtatcttatggggataatctgtacgtgtgcatcccatgtgcaaaaggcttcccctcgtcagagcaattaaatgctcatgtggaaacccacactgaggaggagctgttcatcaaggaggaaggagcttatgagaccggctcagggggagcagaagaggaggccgaggacctctcagctcctagcgctgcttacacagctgaacccaggcccttcaagtgtagcgtttgcgaaaagacctacaaagaccctgcgacgctccggcagcacgaaaaaacccactggctgactcggccattcccgtgcaatatttgcggaaagatgttcacgcagagaggcacgatgaccagacacatgaggagccatttgggcttaaaacccttcgcatgtgatgagtgcggtatgaggttcaccagacagtaccgacttaccgaacatatgcgggtccatagcggggagaagccctatgagtgccagctttgtggcggtaagtttacccagcagcgaaatcttatatcacatctgaggatgcacacctctccttcttag

SEQ ID NO: 226564 - DNA, 1848 bp, synthetic construct
  misc_feature 1..1848: note = Description of Artificial Sequence: Synthetic coding sequence
  source 1..1848: mol_type = other DNA
atggtatccggtcccctcgctttgcggtggtgtgcctgggccggaagaggtgacatgggaccagacatggagctgcctagccactctaagcagctgctgcttcagttgaatcagcagcggaccaaggggtttctttgtgacgtcatcatcatggttgagaactccatcttcagggcccataagaacgtgcttgccgcttcttccatttacttcaaatccctcgtgttgcatgacaatttgattaaccttgacaccgatatggtgagcagcacagtcttccagcagatcctggatttcatctataccggcaagcttctcccaagtgaccagccagccgagccaaatttctctactctgttaacagccgcttcttacctgcagctaccagagctcgctgcactgtgcaggcggaaactgaagcgagccggaaagcccttcggaagcggaagagccggaagtactgggatggggcgacctcccaggtcccagaggctaagcaccgcgagcgtcatccaggctaggtatcagggtctggttgatgggagaaagggagctcatgcccctcaggaactgcctcaggcaaaaggctcagacgacgaactttttctgggcggtagcaatcaggacagcgtgcaaggtctgggacgcgctgtgtgtcctgctgggggagaggccggactgggaggctgcagctcttcaaccaacgggagctctggagggtgtgaacaggagttggggctcgatctgtcaaagaaatcacctcccctgccacctgctactccaggtccccacttgaccccagacgatgccgctcaactcagcgatagtcagcatggatcccccccagccgcttcagcccctccagttgctaatagcgcttcttatagcgaactgggtggcacaccagatgagcctatggatcttgaaggggcagaagacaaccacctctctcttcttgaggccccaggcggtcagccacgtaagagtttgcgtcattccacaaggaagaaggagtggggcaagaaagaaccggttgccggttccccttttgagcgcagagaggcaggccctaagggcccatgcccaggggaggagggagaaggggtaggtgaccgcgtccctaatggaatcttagcgagcggggctggacctagcggtccttatggggagcctccctacccctgcaaagaagaggaggagaatggcaaggacgcttcagaggatagtgctcagagtggcagtgaggggggatctgggcatgcaagcgcccactacatgtataggcaggagggctatgagaccgtcagctacggggacaatctttatgtctgcatcccctgtgcgaaaggcttcccgtcatctgaacagttgaatgcacacgtggagacccatacagaagaagagctgttcatcaaggaagagggagcctatgagaccgggagcggtggcgctgaggaggaggctgaggatctgtccgccccttccgccgcatacactgcagagcctaggcccttcaagtgttcagtttgtgaaaagacatacaaggatcctgcgactctgagacaacacgaaaagacgcattggttaacccggcctttcccctgcaacatttgtgggaaaatgttcacccaacgtgggacaatgactcggcacatgcgcagccacctggggctgaagccctttgcttgcgatgaatgcggtatgcggtttaccaggcagtaccggcttacagaacacatgagggtccactccggggagaagccctatgagtgccagctctgcggtggtaaattcacccaacagcggaatctaatttcccacttgcgaatgcacactagcccgtcttag

SEQ ID NO: 226565 - DNA, 1848 bp, synthetic construct
  misc_feature 1..1848: note = Description of Artificial Sequence: Synthetic coding sequence
  source 1..1848: mol_type = other DNA
atggtgagtggcccattggccctgagatggtgtgcatgggccggtaggggcgacatgggacctgacatggagctcccctcccacagcaagcagctgcttctccagctgaatcagcagcggacaaaggggttcctttgtgatgttatcatcatggtcgaaaatagcattttccgtgcccataaaaatgtgctggcagcttctagcatctattttaaatccctcgtgctgcacgacaacttgatcaacctggacactgatatggtctcatcaactgtgtttcagcagatactggactttatctataccggaaaactcctgccttcagaccagcctgccgagcccaacttctcaacccttctcactgctgcatcttacctccagcttcctgagctcgctgctttatgcagaaggaagctaaagagagcgggtaaaccatttggcagcggcagagccggtagcaccgggatgggtcgccctcccaggtcccagcggctctccaccgcttctgtgatacaggctcgataccaaggcttagtcgacgggaggaagggggctcatgctccacaggagctgccccaggctaaagggagtgatgatgagctgttccttgggggatcaaatcaagacagcgtccagggcttagggagggctgtatgtccagccggaggtgaagccggtctgggcggatgttcttccagtaccaacggtagctcagggggatgtgagcaggaattagggctggatctgagtaagaagtcccctccactgcccccagctactcccggacctcacctgacccctgatgacgccgctcagctgtcagattcccagcatgggtcccctcctgctgcctctgctccccctgttgctaattccgcttcttacagcgaactggggggaacacccgatgaaccaatggatctggaaggggcagaagataaccatctttcactcctcgaggctccaggaggtcagcctagaaagtctctccgccatagtactaggaagaaagaatggggcaagaaggagccggtggccggatcgccctttgagagacgcgaagcaggcccaaaagggccatgcccgggagaggaaggggagggggttggcgatcgcgttcctaacgggatcctggcctcaggtgctgggccttccggcccatatggagagccaccctatccttgtaaagaggaggaggagaatggcaaggatgcctcagaggactcggcccagtcaggtagcgaggggggttcagggcatgcgtcagcacactacatgtatcggcaggaggggtacgagactgtatcttacggagacaatttgtacgtctgcattccctgtgctaaagggttcccctcctctgagcagctgaacgcccacgtggaaacacacacagaagaagagctgtttattaaagaagagggtgcttacgagacaggctcaggcggtgcagaagaggaggctgaagatctctctgcccctagcgctgcctacaccgccgagccacgaccttttaagtgcagcgtctgtgagaaaacatataaggacccggctactctccggcagcatgagaagactcactggctcacaagaccttttccatgcaatatctgcgggaaaatgttcacccagaggggaaccatgaccagacacatgagaagtcaccttggcttaaagcccttcgcatgtgatgagtgtggcatgagatttacaagacagtaccggctgacagagcacatgagggtccactccggagagaaaccatacgaatgtcaattatgcggagggaaatttacacaacagcgcaatctaattagccacctcagaatgcacacatcacccagctag

SEQ ID NO: 226566 - DNA, 2670 bp, synthetic construct
  misc_feature 1..2670: note = Description of Artificial Sequence: Synthetic coding sequence
  source 1..2670: mol_type = other DNA
atggacgcccgaggaggcggaggaagacctggtgagtccccaggcgctaccccggcacccggtccaccaccaccacctccaccagctcccccacagcagcagcctccccctccacctcctcccgcacccccacccggtccgggtcctgccccaccacagcaccctccaagagcagaggctcttcctccggaggccgctgatgagggtggccctaggggcagactgaggagcagggacagttcatgcggcagaccgggaactcccggtgcggcaagcacagccaaagggtcacccaacggggagtgcggcagaggagagccacaatgctcacctgccggtcctgaaggacccgctagaggtcctaaagtgtccttctcttgtagaggggctgctagcgggccagcacccggtcctggaccagcggaagaggcgggaagcgaagaggccggacccgcaggcgagcccaggggcagtcaagctagcttcatgcaacgtcagtttggcgctctacttcaaccgggtgtcaataagtttagtcttagaatgtttgggtcgcagaaggctgtagaaagagaacaggaacgagtgaagtcagcgggtgcatggatcattcatccctacagcgatttccgcttttattgggacttcacgatgttactgttcatggtgggtaacctgattattatcccagttggcatcactttcttcaaggacgaaaccacggccccttggatcgtctttaacgtggtcagcgacacctttttcctaatggacctcgtactgaacttccggacaggcatcgtgattgaggacaacacagagatcattctagatcctgaaaagatcaaaaagaaatacctcaggacatggtttgtcgtggactttgtttcttcaatccctgtcgattacatctttctgattgtggaaaaaggtatagatagtgaagtctacaaaaccgcaagggccctgagaatcgtccggttcactaaaatcctgtcgctgctcagactgttgcgcctgtctagattgatacgctacatccatcagtgggaagagatctttcatatgacctatgatctggcgtctgccgtcatgcgaatttgtaacctgatctccatgatgctgctcctctgtcactgggacggatgtctgcagttcctggtgcctatgctgcaagactttccccgtaattgttgggtcagcatcaacggaatggtgaaccatagctggtcagagctgtacagttttgcccttttcaaggctatgtcccacatgctgtgtatcggatacggacggcaggctcccgaatcaatgactgacatctggttaaccatgctctcaatgattgttggagctacctgttacgcgatgtttattggacacgcgaccgcactcatccaaagccttgacagctcccgacgacagtaccaagagaagtacaagcaagtggagcagtacatgagtttccataaactgcccgctgactttcgccagaagatccatgattattacgaacatcgctaccagggaaaaatgtttgatgaggactccattctcggcgagctgaacgggccactgcgagaagagattgtcaactttaattgtcggaaactggtagcaagcatgcctctgttcgcaaacgctgatcccaatttcgtcaccgccatgctgacaaagcttaagttcgaggttttccagccgggtgactacattatccgcgagggaacaatcggcaagaagatgtactttatccagcacggagtcgtgagcgtgctgaccaagggaaacaaggagatgaaattgtcagacggaagctatttcggcgagatttgtctattaacccggggacggaggacagctagtgtgagagccgatacttactgtcgtctctactctctgagcgtggacaacttcaatgaggttttggaggagtacccaatgatgcgacgtgcctttgagacggtagcgatcgatcggctcgacaggatcggcaagaagaattccatcctgctgcacaaagtgcagcatgacctgaattctggggttttcaacaaccaagagaacgcaatcatccaggagatcgtcaagtacgatcgcgagatggtccagcaagctgagctcggtcaacgggtggggctctttccacctcctccccctcctccccaagtgacttccgccattgctacgctccagcaggcagccgctatgtccttttgtccccaggtggcccgtcccctcgttgggcctttagccttgggcagccctcgactcgtaagacgaccaccccctgggcctgctcctgcggcagcatctcccggacctccccctccggcttcgccacccggagcccctgccagccctagggcaccaagaactagcccctacggcggtctgccggctgccccactcgcagggccagctcttcctgccaggcgcctgtcacgggctagtcgtccattaagcgccagccagccttcactgccacatggcgctccgggaccagccgcaagcacacgccctgcttccagctcaacaccacgactcggaccaacccccgcagcacgagccgctgctccctctcccgatagacgtgattcagcatcaccaggcgctgcagggggactggatccccaagattctgcccgttcacgcctcagcagcaatctgtag

SEQ ID NO: 226567 - DNA, 2325 bp, synthetic construct
  misc_feature 1..2325: note = Description of Artificial Sequence: Synthetic coding sequence
  source 1..2325: mol_type = other DNA
atggaagcagagcaacggccagcagctggagcttcggagggagccaccccgggtttggaggccgttcctccagtcgccccaccacccgctactgccgcatcgggccctattccaaaatctgggccagaacccaaacgcagacacttggggactctgctacagcctactgttaataagttttcgctgcgggtgttcggcagccataaggcggtggagattgagcaggagcgcgtaaagtctgctggggcttggatcatccacccgtattccgattttcgtttctactgggatctgatcatgctgctcctgatggtcggaaatcttattgttttgcccgtcgggataacctttttcaaagaagaaaactcccccccttggatcgtcttcaatgtacttagcgataccttctttctcctcgaccttgtgttaaatttccgcactggaatcgtagtggaggagggcgcagagattctcctggccccacgagccattagaaccagatacttgaggacttggtttctcgtggacctcatttcatctatccccgtagactatattttcctcgtggtcgagctggaacctcggctggatgcggaggtttataaaaccgccagggccctgcgcatcgtacggttcactaagatcttgtctctgctgaggctgctaagactctcaagactcattcggtacatccatcaatgggaggagatatttcatatgacatacgatctcgcttcagcagtggtcaggatcttcaatctgatcgggatgatgcttttattgtgccactgggatggctgcttgcagttcctggtacctatgttgcaagatttcccgcctgactgttgggtgagcatcaatcatatggtcaatcactcttgggggagacagtacagtcatgctctatttaaagccatgtcgcacatgctttgcattgggtacggacagcaggccccagtgggtatgccagatgtctggcttaccatgctgtctatgattgtgggcgcaacatgctacgccatgtttattggacatgcaactgccttgattcagtcactcgacagttctaggcggcagtaccaggaaaagtacaagcaagttgagcagtacatgtctttccacaaattaccagcagacactaggcagaggatacacgaatactacgaacaccgataccaaggaaagatgttcgatgaagaatcaattttaggagagctctcggaaccgctacgagaggaaatcattaatttcacctgccgcggtctggtggcccatatgcctctattcgcgcacgctgatcctagctttgtgaccgcagtgctgacaaaactccggttcgaggtgtttcagcctggcgatttggtggtgcgggaagggagtgttggcaggaaaatgtactttattcagcacggcctgcttagcgtccttgccagaggcgcacgggacacccggttgaccgacggatcttacttcggagagatctgtctgctcactcggggacggaggacagcatccgtcagggctgacacttactgtagattgtatagtctgagtgtggaccatttcaacgcagtgctggaggaattccccatgatgcggagagcctttgagacggtggctatggacagactgctgcgcataggtaaaaagaactctatcctgcagagaaagcgatctgaacctagcccagggtcctcagggggaattatggaacagcatctggtgcagcacgatcgcgacatggctaggggcgtcaggggacgggctcctagcaccggcgctcaactgagcggcaaaccagtgctctgggagcctttggttcatgcaccgttgcaggctgctgccgtcactagcaacgtagcaattgccctaactcatcagcggggtcccctcccgctttcaccagacagcccagctacactcttagccaggagcgcctggagaagcgcaggttctccagcctctccactggtccccgtgcgagccggaccatgggcaagcaccagtcgtcttccagcccctcctgcgcgaacccttcacgcatccctgagtagagctgggcgatcccaagtgtccttgctgggcccacctcccggtgggggaggacggaggctaggccctcgcggacgtcccctttccgcctcccaaccatctctgccgcagcgagccacaggcgacgggtcgccgggacgtaaagggtcagggtccgagagactgcctccaagtgggctgcttgccaagccacctaggacagcccagccccctagacctcctgttccggaacctgctactccccgaggtctgcaactgagtgctaatatgtag

SEQ ID NO: 226568 - DNA, 3612 bp, synthetic construct
  misc_feature 1..3612: note = Description of Artificial Sequence: Synthetic coding sequence
  source 1..3612: mol_type = other DNA
atggataaactgccaccctctatgcgcaagcgcctctatagtttgccccagcaagtgggagccaaagcatggataatggatgaagaggaagatgcggaagaggaaggcgctggcggaagacaggatccttcccggcgttcaatcagactgagacctctgccaagtccctctccttccgccgcagcaggcggtacagagtccagatcttccgctctgggcgctgctgactcggagggtccagccagaggtgctggcaagtcaagcacaaatggcgactgtcgtaggttccggggtagtctcgctagtctgggctccaggggagggggttcaggtgggacaggcagcggctccagccacggacatcttcacgatagcgcagaggaacgcagattgatcgccgaaggcgatgcctctcctggtgaagataggactccacctggtctagccgctgaaccagagcgtccaggcgctagcgcacagcctgcagcttcaccacctccgccacagcagcctccccaaccagccagtgcctcctgcgaacaaccctcagtggacaccgccatcaaggtggaagggggagctgccgcaggggatcagattttacctgaggccgaagtaagacttggacaggctggttttatgcaaaggcagtttggggctatgctgcaacccggtgtcaataaattttcccttcgcatgttcggatcccaaaaggccgtggagcgcgaacaggagcgcgtaaaatctgcaggtttctggattattcacccctacagtgattttcgcttttattgggacctcactatgctacttctgatggtcggcaacctcatcatcattccagtgggtatcacattcttcaaggatgagaacacaactccatggattgtctttaatgtggtgagcgacaccttctttctcattgacctcgttctaaattttcggaccggcatcgtagtagaggacaataccgagatcattctggacccccagcggatcaagatgaagtatctcaaatcgtggttcatggtggacttcatttcgagcatccctgttgactacatatttttgatcgtcgagacccgcattgattcagaagtgtataagactgctcgcgcactgagaatagtgagatttaccaagattctttctctcttgcgcttgttaagactgtcgagattaattcggtatattcaccagtgggaagagatcttccatatgacctatgatctggccagcgcagtcgtaaggatagtgaacctgatcgggatgatgctgctcctgtgccactgggacggttgtttgcagttcctcgtgcccatgctccaagatttccccgacgattgctgggtatctatcaacaatatggtgaacaattcctggggtaagcagtacagctacgctctcttcaaggccatgagtcacatgttgtgcattggctatggacgccaagcccctgtgggtatgtcagatgtctggcttacgatgctgtcaatgatcgttggagctacttgttacgccatgttcataggtcatgcaaccgccctgatacagtcacttgattcctctcgtagacaatatcaagaaaaatacaaacaggttgagcaatacatgagttttcacaaactcccacccgatactcgacagagaatccacgactattacgagcatcgctaccaggggaaaatgtttgatgaagaaagtatcctaggtgagctgagcgagcccctgcgggaagagattatcaattttaactgtcgcaaactggtggcttctatgccactattcgccaatgccgacccaaatttcgtgacctccatgctgacaaaactgcggtttgaggtatttcagcctggggactatataatcagggagggaaccatcggaaaaaaaatgtattttatccagcatggtgtcgtgtcagtcctgactaaaggcaataaggaaaccaaactcgcggatggatcatactttggcgaaatctgtctcctcacgcggggtcgcagaacagcctccgtgcgggcagacacgtactgtcggctttactctctgtccgtggataactttaacgaagtgttggaggaataccccatgatgagaagggcatttgagactgtagcgctggacaggcttgacaggattgggaaaaaaaactccatacttctccacaaagtgcagcatgatctgaactcaggtgtgtttaactatcaggagaatgaaataatacagcagattgtgcagcatgaccgtgaaatggcacattgtgcccatagagtgcaggccgcagctagtgccacacctacccccactcccgtgatttggaccccacttattcaagcccctctgcaggctgcagctgctactacctccgtggccattgctcttacccatcaccccaggcttcctgccgctatttttcgcccacctcccggaagcggcttgggtaatctgggggctggccagacaccgcgacacttaaagcggttgcagtcccttatcccatcagcgctggggtctgccagccctgcaagtagcccatctcaggtggacacaccatcttcctctagctttcatatccagcaacttgccggtttttcagcccctgctggtttaagcccactcctccccagctcctccagttcccccccacccggagcatgcggcagccccagcgctccgacgccttctgccggagtcgccgcaactactatcgctggtttcggccactttcataaagccttaggcggaagtctatcctccagcgacagcccccttctcacccccttacagcccggagccaggtcccctcaggcggctcagcctagtcccgcacctcccggagcacggggtgggctgggacttcctgaacattttctacccccaccccctagcagcagatcaccatccagtagccccggtcagctgggtcagcctcctggagagctgtccctgggacttgctacagggccattatccacgccggagaccccaccaagacagccagaacctccatcactggtagcaggcgcatccgggggtgcgagtcctgtgggctttacccccaggggtggtctcagtccgccagggcactctccagggccaccacgcaccttcccatccgcccctcctcgggcaagtggcagccatggctctttattgctgccaccagcttcttcgccaccaccaccccaggtaccacagcgcagaggcacccctcctctgactcctgggagattgacccaagatctaaaactgatatctgcatcacagcccgctctgccgcaggatggcgctcaaaccctgagacgggcatccccacactctagcggggagtcaatggcagcatttcccctcttccctcgcgctggtgggggttcagggggaagtgggtcctcagggggactgggccctcctgggaggccatacggtgccatccccggacagcacgtaacgctcccgaggaaaacatcttccggaagcctgccaccacccttgagtctctttggggctcgagcgactagttcaggagggcctccattgaccgccggaccccagcgagagcccggagccagacccgaacctgttcgatcaaaacttccctccaacttgtag

SEQ ID NO: 226569 - DNA, 396 bp, synthetic construct
  misc_feature 1..396: note = Description of Artificial Sequence: Synthetic coding sequence
  source 1..396: mol_type = other DNA
atgaatctgccatcgaccaaggtgtcatgggctgcagtcaccctgctgctgcttctgctgctcctgccaccagctctgctttcctctggagctgctgctcagccgcttccagactgttgccgccaaaagacttgctcttgccgtctgtatgagttactccatggcgctgggaatcacgcagccggaatcctgactctgggaaagcggaggagcggaccccctggactgcaggggcgactccaacgacttttacaggcatcaggcaaccacgcggcaggcattcttaccatgggcaggcgggcaggtgctgagcctgcgcctagaccctgcctgggcaggcgctgtagcgcaccagccgcagctagtgtggccccaggtggccagtccggcatttag

SEQ ID NO: 226570 - DNA, 1050 bp, synthetic construct
  misc_feature 1..1050: note = Description of Artificial Sequence: Synthetic coding sequence
  source 1..1050: mol_type = other DNA
atggctgcgacagcagcagaagctgtggcaagcggttccggagaaccaagagaagaagccggagctcttggcccagcctgggatgaaagccagcttagaagttatagctttcctacccgcccaatccctagattgtctcaatccgacccaagagccgaagagttaatcgagaacgaggaacccgtggtgctgactgacaccaatctggtgtacccagccttgaagtgggacctggagtatctgcaggagaatattgggaacggcgacttttccgtttatagcgcctcaacacacaagttcctctactatgatgagaaaaaaatggcaaactttcaaaattttaagccccgatcgaacagagaagagatgaaattccatgagttcgtcgagaagctccaggatatccaacagaggggaggggaagagagactctatctgcaacagaccctaaacgacacagttggtcggaaaatcgtgatggactttctcgggttcaattggaactggattaacaagcagcagggtaaaagaggttggggtcaacttactagcaaccttcttctgattggtatggagggaaacgtgacacctgcccactatgatgagcagcagaactttttcgctcagatcaaaggatacaaaaggtgtatcctatttcctccggatcagtttgagtgcctgtatccctacccagtacaccatccctgcgaccggcagagtcaggtggactttgacaatcctgactacgaacggttccccaacttccagaatgtcgtgggatacgagacagtggtgggccctggtgacgttctgtatatcccaatgtactggtggcaccacatcgagtcgctgctaaatggagggattacgattaccgtgaatttttggtataagggtgcacccacaccgaagcgcatagagtacccacttaaggcgcatcaaaaggtagctattatgcggaatatcgaaaagatgttaggagaggcgctggggaacccacaagaagtgggccctctattaaatactatgatcaagggtcgatataattag

SEQ ID NO: 226571 - DNA, 1149 bp, synthetic construct
  misc_feature 1..1149: note = Description of Artificial Sequence: Synthetic coding sequence
  source 1..1149: mol_type = other DNA
atggtttccgttgggtgcgtggtttttctgtttttctttttcggcgtccgaaataggaggagctttcggttccgatgggggccatctctggcagcggaaatggcagctactgctgccgaagccgtcgcgtccggaagcggggagccacgagaggaggcgggagccctaggcccagcatgggatgaatctcagctccggtcctactcctttcccacccggcctatcccacgtctcagtcagagcgacccacgagccgaggagctgattgaaaacgaggaacctgttgtactgacagataccaacctggtgtacccggcacttaagtgggatcttgagtatttgcaggagaatattgggaacggagactttagcgtctatagcgcctcgactcataagttcctgtattatgacgaaaaaaagatggcgaattttcagaactttaaaccaagatctaacagagaggaaatgaagttccatgagtttgtggaaaaattgcaagatatacagcagcgtggcggtgaagagagattgtacctgcaacagacccttaacgataccgtcggacgcaagatagtgatggatttcttgggcttcaactggaactggataaacaagcaacagggtaagcgcggatggggtcaactaacaagcaatctccttctcattggtatggagggaaacgttacccctgcacactatgatgagcagcagaattttttcgcgcaaataaaaggctacaaacgctgcatactcttcccaccagatcagttcgagtgtctgtacccttatcccgtgcaccacccgtgcgacagacagtcacaggtggacttcgacaatccagattatgaacggtttccaaacttccagaatgtcgtcgggtatgaaaccgtggttggtcccggtgacgtgctgtatataccaatgtattggtggcaccacatcgagagcctgttgaatggtggcataactatcaccgtgaacttttggtataagggggcacccaccccaaaacggatcgagtatccactgaaggctcatcagaaagtcgctatcatgcgcaatattgagaagatgttgggcgaagctcttgggaatccacaggaggtaggtcctctgctgaatactatgattaagggtcgctataattag

SEQ ID NO: 226572 - DNA, 579 bp, synthetic construct
  misc_feature 1..579: note = Description of Artificial Sequence: Synthetic coding sequence
  source 1..579: mol_type = other DNA
atggctaactttcagaactttaagccccgaagtaaccgcgaagaaatgaaatttcatgaattcgtcgaaaaactccaagatattcaacaaagagggggagaggagcgcctctacctgcagcagaccttgaatgacactgtcggaagaaaaatagtcatggacttcctgggttttaactggaactggatcaacaagcagcaaggtaagagggggtggggccaactgaccagcaatctgctcctcataggaatggagggcaacgtgacacccgctcattacgacgaacagcagaattttttcgcccagatcaagggttataagagatgtatcttattcccgccagaccagtttgaatgtttgtatccctaccctgtccatcacccctgcgaccgacagtcccaggtggacttcgacaatcccgactacgaacggttcccaaatttccagaatgtagtggggtacgaaaccgttgtgggtccaggcgacgtgctttacatccccatgtactggtggcatcacatagagtcacttttgaatggaggcatcactattactgttaatttctggtacaaagggtag

SEQ ID NO: 226573 - DNA, 1803 bp, synthetic construct
  misc_feature 1..1803: note = Description of Artificial Sequence: Synthetic coding sequence
  source 1..1803: mol_type = other DNA
atgagaccagctgccggagcagcccgacgtcctaggtgctgtacctcatggctcacccgctgtccaagtcctgctgcaagcgctccgacctggactcggcctcttagctgtgctagtccaagtgccacctgtgcctgcacagcatctgccccacaactcgaacttatcggccactcaatctttgatttcatccacccttgcgatcaggaagagttgcaggacgcgctgacgcctcagcagacattatcaagaaggaaggttgaggcccctacagagcggtgcttctccctgcgaatgaagtcaacactgacttctcggggtcgcaccctaaacttgaaggctgccacctggaaagtgcttaattgctcgggccacatgcgcgcttacaaacctcccgctcagacttctccagctggaagccctgactctgaaccccctcttcagtgcttggtgctcatatgcgaagccatcccccatccaggatctctggagcccccactcggacgcggtgccttcctcagtcggcatagccttgatatgaagtttacttattgcgatgacaggatcgccgaagtggcaggctactcgccagatgatttgatagggtgctcggcctacgaatatatccatgcattggactccgacgcagtttccaagagtatccatacactgctgtccaagggtcaggccgtgactggtcaataccgcttcttggctcggtcaggaggttatctctggacacaaacccaggccaccgtggtctccgggggtcgcggaccccagtcagaatctatcgtgtgcgtgcacttcctgatatctcaagttgaagagacaggcgttgtgctgagtctggaacagaccgaacagcatagtcggaggcccattcaacgcggtgctccctcccaaaaggatactcctaatccaggcgattcgttagacacaccaggtcctaggatattggcctttctgcatcccccttccctgtctgaagcggctcttgccgctgatcctcggaggttctgcagtcctgacctgaggaggctcctgggacctattctggacggcgcaagcgtggccgcaacaccctctacccctcttgccacaaggcatccccaatcccccctatcagccgatttgcctgatgagcttcctgtcggaacagaaaatgtacatcgactgtttacatctggaaaggacacagaggcagttgaaacggacctggacatcgcccaagacgcagacgccctggacctcgagatgctggccccatatatttcaatggacgacgatttccagctgaacgcgtcagaacagttaccgagagcataccacagacctttgggagccgtccccaggccccgagctagaagctttcatgggctgtcaccaccagcccttgagccctcccttctgccccgttgggggtcggaccctcggctgtcctgcagcagccccagccgtggagacccttccgcaagcagccccatggcaggggcacgtaagcgaacgcttgcccagtcaagtgaggatgaggatgaaggtgtggagttactcggtgttcggcctcccaagagatcaccatcgcccgaacatgaaaacttcctcctgttccccctgtctctgagcttcctcttaactggtggccctgccccaggaagtctccaggacccctcgacccccctgttaaacctgaacgaacccctagggttaggcccttccctgctgtctccttattctgacgaagacaccacgcagccaggtggacccttccaaccgagggcaggctccgcccaggccgactag

SEQ ID NO: 226574 - DNA, 1353 bp, synthetic construct
  misc_feature 1..1353: note = Description of Artificial Sequence: Synthetic coding sequence
  source 1..1353: mol_type = other DNA
atgaggcctgccgcaggcgctgcccgacggcctagatgctgcacttcttggctcactaggtgtccttcaccggctgcctccgcccctacttggactcggcctctgtcttgcgcttctccgagcgcaacatgcgcctgcactgcgagcgctccacagctggaactcattggtcactcaatctttgatttcattcacccctgtgaccaggaggagctgcaggatgccctgacccctcagcagaccctgtctcgcaggaaggtggaggcccctactgagcggtgtttctctctgcggatgaagtcaacgctcacctctcggggtcgcacactgaatctgaaggcagctacatggaaggtgctcaattgcagtggccatatgagagcttataagccacctgctcagaccagccctgccggttcgccggattccgaaccaccactgcaatgcctggtgctgatttgtgaagctatacctcaccctggctctctggaaccaccgctgggcagaggggcttttctgtcacgccactccttggatatgaaattcacatactgcgacgataggatcgctgaggtggcgggatactctccagacgacttaatagggtgctcagcctatgagtacatccacgctctcgattcagatgccgttagtaagtctattcacactctgctgtccaagggccaggccgtgacagggcagtacagatttcttgcacgatcagggggttatctgtggacacaaactcaggcaaccgtggtttccggcggacgcggacctcaatcagagtccattgtttgcgttcacttcctcatttctcaggtggaagagactggggtcgttctttcactagagcagactgaacagcattctcggagaccgattcaacgcggtgccccaagtcagaaggatacacctaacccaggagacagtctggatacccctggaccccgtattctggcattcttacacccaccttccttgagcgaagccgctttggctgctgatccgagacgattttgctcgcccgacctacgtcgcctgttagggccaatccttgacggagcatcagtggcagcaacaccctccactccactggccaccagacacccgcagagtcctctgagcgccgatttgcccgacgaactgccagttggaacagagaacgtgcatcgactgttcacctcaggaaaggatacagaagcagtggagactgatctggacattgcccaagacccaagtacccccctcttgaacctcaatgaacccctcggcttccattttgtgacgcaaagtggcgtgcagtggcacaagcacagttctccgcagcctcgccctcctggattaaaatag

SEQ ID NO: 226575 - DNA, 1899 bp, synthetic construct
  misc_feature 1..1899: note = Description of Artificial Sequence: Synthetic coding sequence
  source 1..1899: mol_type = other DNA
atggccctggggcttcaacgcgctcggtctaccacagagctgcggaaagagaagagtagggatgccgctagatcaagacgttcccaagaaaccgaggttctgtaccaactggcgcatacactgcctttcgcacgaggagttagtgcccatctggacaaagcctcaattatgcgcctcactatttcgtaccttcgcatgcataggctgtgtgctgcaggggaatggaaccaagtcggtgcaggcggagaacccctcgacgcctgttacctgaaagcactggaggggtttgtgatggttctcaccgccgagggtgatatggcctatctgagtgagaacgtttctaaacatctggggctgagtcagttggagctgatcggacatagcattttcgacttcattcacccctgcgatcaggaggagctgcaggacgcattgactccccaacagactctgtcgagaaggaaagtggaagcaccgactgagcgctgcttttcactgcggatgaagtctactctgacatcaaggggtcggaccctgaacctgaaggccgctacctggaaagtcctgaactgctccgggcatatgcgcgcatataagcctcctgctcagaccagtccagcaggcagtcccgattctgaaccccctctgcaatgcctggtccttatttgcgaagcaattccacatcctgggagcttagagcccccactgggccgtggtgcatttttgtccagacactctctggacatgaaatttacctattgcgatgatcgaatcgctgaggtggctggatattcacccgatgacttaatcggctgtagtgcttatgaatatattcatgctctggacagcgatgccgtttcaaagtccatccacacactcctttcgaaaggtcaggctgtcacaggccaatatcggttcttagccaggagcgggggatacttgtggactcaaacacaggccaccgtggtgagcgggggtcgaggtcctcagagtgagtccatcgtatgtgtccatttcctgatatcccaggtggaggagactggagtagtgctgagccttgaacaaaccgaacagcacagcaggaggcctatccagagaggagctccctcccagaaggacacaccaaatcccggtgactcattagacacaccaggacccaggatcctggcgttccttcatccgccaagtctgtccgaggccgctttggcggctgatccccgtcggttttgttctcccgaccttagaagattgctcggccctattttggatggggcatcagtcgcagcgacgccctccaccccactcgcaaccagacaccctcaaagcccgttgagcgccgatcttcccgatgagctgcctgtaggcactgaaaacgtacatcgcctgtttacctccggtaaagatacagaggcagtagagactgatttagatatcgcccaggacgcagacgccctggatctcgaaatgctcgctccctacatctcaatggatgacgattttcaactgaatgcctcagaacaacttccgagagcttaccaccggccactaggggcagttccaaggcccagagccagatcttttcacggtctgagtcctccagccctagagccaagtctgctgccccgatgggggtccgatccaagactgtcttgttcaagccccagccgaggagacccgagcgcttccagtccaatggctggtgcccgaaagaggaccctcgcacagagctccgaggacgaggatgaaggtgtggagctgcttggcgtgcgcccaccgaagcggagtccatcccctgagcacgaaaatttcctgctctttccgttgtctttggtgtgctggggcatcaatggaatcctttggcccagtctccccagctggctgaaacctacagtgctctag

SEQ ID NO: 226576 - DNA, 1731 bp, synthetic construct
  misc_feature 1..1731: note = Description of Artificial Sequence: Synthetic coding sequence
  source 1..1731: mol_type = other DNA
atgcggctcaccatctcctacctgagaatgcacaggctgtgcgcagctggggaatggaaccaggttggagctgggggtgagccactcgatgcatgttacctaaaggccctagaaggatttgttatggtactcacggcagaaggtgatatggcctacctcagcgagaacgtgagcaaacatctgggcttgtcccagctggagctgattggtcacagtattttcgactttattcacccctgtgaccaggaagagctgcaagatgccctgacaccgcagcaaaccttaagcaggcgaaaggtcgaggccccaaccgagcgctgtttttctctgcgaatgaagtcgacactcacctcgaggggacgcactctgaatctgaaggccgctacttggaaagtgctcaattgctcaggccatatgcgcgcttacaaaccacccgcacagacgagccccgctggctcacccgattccgaacctcccctccagtgccttgtgttgatatgtgaggcaattcctcatcccggttccctcgaaccccctttgggcaggggggctttcctgtcacgccacagcctggatatgaagtttacatattgcgacgatcggatagctgaggtggctggttatagtcccgatgatttgatcggctgtagcgcttatgagtacatacacgcactggactccgatgcggtgtctaaaagtattcatacgttgctgtctaaaggacaggctgtgaccggccagtaccgtttccttgcaagatctgggggatacctgtggacacaaacccaggccacagtcgtatccggagggagggggcctcagagcgagtcaatcgtatgcgtgcacttcctcatatcccaggtggaggaaactggagtagtgctaagcctggaacagaccgagcagcattctcggaggcccattcagaggggtgctccatcccaaaaagatacccccaacccgggagactccctcgatacaccagggcctcgcatccttgcgtttttacatccacccagtttatcagaggccgcactggcagccgatccaagacggttttgtagtcctgatttaaggcgtctgctgggcccaattctggacggcgcatcagtcgcggctacgccttctacgccattggcaacccgtcacccacagagtcccctcagcgctgatctccctgacgaattgccagtgggtactgagaacgttcatagactattcacatctggcaaggataccgaagccgtggaaactgaccttgatatcgcccaggatgcagacgcattagatctggagatgctggcaccttacatctctatggacgacgatttccagcttaatgcatcggagcagctgccaagggcctatcatcggccactcggagccgtgcctcgacccagagccaggtccttccatgggctctcaccccctgccctagagccgagtttgctgccacggtggggttcagacccacgcttgagctgtagctccccttctagaggagatcctagcgcctccagtcctatggctggggctagaaaacggaccctggctcaatcatcagaagacgaggatgaaggtgtcgaattgctcggagttaggccaccaaaaagatcccccagccccgagcatgagaactttctgctctttccactttcattggtctgctggggcatcaatggcatactgtggccttctctacctagctggctgaagcctactgtcctctag

SEQ ID NO: 226577 - DNA, 2004 bp, synthetic construct
  misc_feature 1..2004: note = Description of Artificial Sequence: Synthetic coding sequence
  source 1..2004: mol_type = other DNA
atggattggcaggaccaccggagtaccactgagttgaggaaggaaaagtcacgcgacgcagccaggtcccgcagatcccaagaaacagaggtgctctatcagctcgcacatactttgccttttgcccgtggcgtgtccgcacatctagataaagcttccatcatgagactgactatctcatacctgagaatgcacaggttgtgcgcagcaggtgagtggaatcaggtgggagccggtggcgagccactggacgcatgttacctgaaagcattagagggcttcgtcatggtgctgaccgctgagggggatatggcgtatttgtcagaaaacgtgtctaaacaccttggtctgtcccagcttgagttgatcggacattccatattcgactttatccatccttgcgaccaggaggagctgcaggacgcgcttaccccccagcagacgttaagcaggagaaaggttgaggcccctacagaaaggtgctttagtctgagaatgaagagcaccctgacgagtcgcggacggactctgaacctgaaggcagccacttggaaagtgctaaattgcagcggacacatgagagcatataaacctccggcacagacgagcccagccggatccccagactccgaaccccctctgcaatgcctggtgttgatctgcgaggcaattcctcaccccggatctctggaacctcctttggggagaggcgcttttctgagcaggcacagtctcgatatgaaatttacgtattgtgatgaccgtatcgctgaagtggctggatacagccccgatgatctaattggttgttccgcctatgagtatatccacgcacttgattcagatgcagtctctaagtccatccatacactgctctcaaaagggcaggctgtcacagggcagtaccgctttttagctaggtcggggggatatctctggacgcaaacacaggcaaccgtggttagtggcggtagaggccctcagtcagagagtatagtatgcgtgcattttttaatatcccaagtcgaggagacaggcgtggtgctgtcgctggaacagaccgagcaacacagcagacggcctatccagcgtggcgcaccttcccaaaaggacacccccaatccgggagactccctggacacccctggcccaaggatactggcctttctgcatcccccatctctgtcagaggccgcacttgctgctgatcccaggcggttctgtagcccagacctgcgccgactcttgggacccatcctagacggtgctagcgtggctgcgactccatccactccattggctacccgccatcctcagtcgcccctgagcgcagatctgcctgacgaactccccgtgggaacagaaaacgtgcaccgcctttttacttcaggaaaagacaccgaagccgtggaaactgacctggacattgcccaagatgcagatgccctggacttggagatgctggcaccgtatatatcaatggacgacgacttccagctcaacgccagtgaacagttaccacgggcatatcataggccactcggtgctgtacccaggcctagggccaggagctttcatggcctcagccctcccgcactcgaaccctcccttttgcccagatggggatcagatccacggttgagctgcagctcgccttccaggggagatcctagcgcctcaagccctatggcgggagcccgtaaacggacccttgcccagagcagtgaagatgaagacgaaggtgtcgaattgttgggtgtgagacctccaaagcgctctccctcccccgagcatgagaacttcctgctcttccccctgagcctgtcatttctgctgactggagggcctgcgcctggatcgctgcaagacccaagtacacctttgctcaacctaaatgaaccactgggactgggaccctctctcctgagtccatatagcgatgaagataccacccagcccggaggcccattccagccgcgagccggtagcgcccaggccgattag

SEQ ID NO: 226578 - DNA, 1842 bp, synthetic construct
  misc_feature 1..1842: note = Description of Artificial Sequence: Synthetic coding sequence
  source 1..1842: mol_type = other DNA
atgagactaactattagttacttacgaatgcatagactttgtgcagcaggcgagtggaatcaggtcggggctggaggcgagccactggatgcgtgttatctcaaggcactagagggcttcgttatggtgttaacagccgagggcgacatggcttacctttctgagaatgtgtcaaaacacctcggtctttctcagctcgaacttattgggcatagcatcttcgatttcatccacccctgtgatcaggaggaacttcaagacgctctgacaccacaacaaaccttgtctcggcgaaaggttgaggctccgaccgagaggtgcttctctctaagaatgaaatctacgctgaccagtagaggacgtacattgaatctaaaagcagccacctggaaggtcctgaactgcagcggtcatatgcgcgcttacaagccgccagcccagactagcccagctgggagtccagactctgaaccccctttgcagtgtctcgtgttgatctgcgaagctattcctcaccccggaagtctggaacccccacttggcagaggtgcttttcttagtagacattcactagacatgaaattcacctactgcgatgaccgaattgcggaggtggcaggttactcccccgatgacttgatcggctgttccgcctatgagtatatccatgctcttgactccgacgcggtgtcaaaatccattcatacactcctcagcaagggccaagctgttaccggccagtacaggtttctggccagatccggtggttacctttggactcagacacaggccaccgttgtgtccggtggtagaggccctcaaagcgagtcaatcgtctgtgttcatttcttaatctcccaagtggaagaaaccggcgtcgtcttgagcctggagcagacggagcaacactcacgtaggccaatccagcgcggtgcgcctagtcagaaggatacacccaacccgggtgactccttggatacaccaggtccacgcatcttggccttccttcatccacccagtctgtccgaagctgcgttagcagcagatcctcggagattctgctcccccgacctgcgcagacttctaggcccaattctggacggagcttcagtggcagctaccccctccactccactcgctacaagacatcctcagagcccgctctcagccgacttaccggatgagctgccagtgggcacggaaaatgtacacagactgttcacgtctggaaaggatacagaagcagtggaaaccgacctagacatcgcccaagatgccgacgcacttgaccttgagatgttagccccttatatttccatggatgacgactttcagctgaacgccagcgagcagctgcctagagcctaccaccgcccactcggtgcggtgcctcgccctcgagcgagatcatttcacggcctcagcccccctgcactagaaccctccctgcttccaaggtgggggagtgatccaaggctttcatgttcatcaccttccaggggagacccatccgcatctagccctatggcgggagctcgcaagcgaaccctcgcccaaagtagtgaagacgaggatgaaggggtcgagctgctcggggtgaggcccccaaaaagatctccgtctcccgagcacgagaattttctactgtttccactgtctctctcgttcctactgactggaggaccagcccctgggtccttgcaagacccgtccacgccactgctgaacctcaatgagccattaggactggggcctagcttgctttctccgtactccgatgaagatacgactcaacctggcggaccatttcagcctcgcgcaggttcagcgcaagcagattag

SEQ ID NO: 226579 - DNA, 2010 bp, synthetic construct
  misc_feature 1..2010: note = Description of Artificial Sequence: Synthetic coding sequence
  source 1..2010: mol_type = other DNA
atggcgctgggtctgcagcgggcaaggtccacgactgagctccggaaagaaaagtcgagggacgcagccagatctaggaggtcccaggaaaccgaggtactttaccagttggcacacaccctccctttcgcccgtggggtgtctgcccacctagacaaagctagtataatgaggctgaccatttcttatctcaggatgcaccggctatgtgccgctggagaatggaaccaggtaggcgcaggaggggagcccttggacgcttgttatctcaaagccctcgagggattcgtgatggttctcacagcagaaggtgacatggcgtacttgagtgagaatgtatctaagcatttgggtctttcgcaactggagctcatagggcacagcatctttgatttcattcacccctgtgaccaggaggagcttcaggatgccctaaccccccagcaaacattgtcaaggagaaaagtcgaggcaccaacagagcgttgtttcagtctcagaatgaagtctaccctcacaagcagaggtcggacactgaatctgaaagctgcaacgtggaaggtcttgaattgctcaggccatatgcgcgcttataaacctcctgcacagacatcccccgcaggatcccccgactctgagcccccactgcaatgtctggttctcatctgtgaggccataccccatccaggctcacttgaacccccacttggcaggggcgctttcctgtcccgacacagtttggatatgaaattcacctactgcgacgatcggatcgcagaggtcgcaggctacagtccagatgatttaattggctgttctgcttacgaatatatccacgccctggatagcgacgctgtgtcgaaaagcattcacacactcttgtctaaagggcaggccgtgaccggacagtaccgctttttggcccgaagcgggggatacctctggacgcaaacgcaggcaactgttgtcagtggtggaagagggccacagtcagaatccattgtgtgtgtccactttcttatttctcaggttgaggaaactggtgtggtgttatctctggagcagaccgagcagcacagtagacgcccaattcagagaggggctccatcccaaaaggacacgccaaatccaggggatagcctggacactcctggaccgaggatccttgcattcttgcaccctccttcactatccgaggctgctctggctgccgatccaaggcgattctgttcaccagatctgcggagattgctagggccaatacttgacggggcatccgtagccgctacaccttccaccccacttgctacaagacatccacagagcccactgagcgctgacctgcctgatgaactgcctgtgggaacagagaacgtacaccggctttttacttccggcaaagacaccgaagccgttgaaacagatctcgatatcgctcaggacgcggatgccttggacctggaaatgctggcgccttatatctcaatggacgatgattttcagctcaatgcgtccgaacaactgcctcgtgcttatcacaggcccctgggtgccgtcccccgtccaagggcgagatctttccatggactgagtccacccgctctcgaaccgagcctcctgcctcggtggggttccgatccaaggttgagttgctccagcccatcccgaggcgaccccagcgcatcctctcctatggcaggggctagaaaacgtacgctcgcccagagcagcgaagatgaggacgaaggggttgaactgctcggtgtgagaccacccaaaagatcgccaagtcctgagcatgagaactttctgctgtttcctctttccttgagcttcctgctgacggggggacctgcaccgggatccctgcaggacccctccacacccctgctcaacctcaacgaaccccttggactgggcccatcacttctcagtccttatagcgacgaggacacaacccagccagggggtccgttccagcctcgggcaggatctgcgcaagctgactag

SEQ ID NO: 226580 - DNA, 1092 bp, synthetic construct
  misc_feature 1..1092: note = Description of Artificial Sequence: Synthetic coding sequence
  source 1..1092: mol_type = other DNA
atggctctcggtctgcaaagggctcgatctactactgaactgcggaaggaaaagtctagggacgcggcaaggtcacgcaggtcccaggaaactgaggttttgtaccagctcgcccataccctccctttcgctagaggggtcagtgcccacctcgacaaggctagcattatgcgtctgaccataagctatttgcgaatgcataggttatgtgctgccggagagtggaatcaggtaggtgcaggaggggagcctctcgatgcttgttacttgaaagcgctggaaggcttcgtgatggttctgactgctgaaggcgacatggcatatctgtccgagaatgtgtcaaaacatctcgggctctcccagctcgaactgatcggtcattccatctttgactttattcatccatgcgatcaggaggaactccaggatgccttgacaccacagcagaccctgagcagacggaaggtggaagcccctactgaaagatgcttctcgctgaggatgaagtcgactctcacgtctcgtgggagaacactgaatctcaaagcggcaacttggaaagtgctgaactgctcaggacatatgagagcctataaaccacccgctcagaccagtcctgcaggttcgcctgatagtgagcctcctctgcaatgcttggtcctgatctgtgaggccatccctcaccccggttctctggagcctccattgggaaggggggctttcctttctcggcattccttggacatgaaattcacttattgcgacgataggatagcagaagtggccggatacagccccgatgacctaatcgggtgtagcgcctatgagtacattcatgcactggattccgatgcggtcagtaagtccatccacacctgtatgtatcccatttcaccaggcgcaaaaccggcagctacatggcctcctgctgatacccgaacaccccagttgcccataccacaggatgctctcccaccccatttgaacacatcctcgctcctgcctaagccccaaggtaccgtttctttcctggccccatcgtatcctgtgcccaggtacttttctccacacctgcctccatggtggccatag

SEQ ID NO: 226581 - DNA, 1839 bp, synthetic construct
  misc_feature 1..1839: note = Description of Artificial Sequence: Synthetic coding sequence
  source 1..1839: mol_type = other DNA
atgctgccaatgccctcaggcagacccaggagttgcgccagaaagtcacccggaatgcgcccagcagccggagcagccaggaggccacggtgctgcacttcatggctgaccaggtgtccttcacctgccgcttccgccccaacctggacaaggcccttaagctgcgccagcccgtctgcaacttgcgcctgtactgcttccgcaccgcagctggagctgatcggtcatagtatcttcgactttattcacccgtgtgaccaggaagagctccaggacgcccttaccccgcagcagacactcagccgaaggaaagtggaagcccctactgagaggtgcttttcgctccgcatgaaaagcacacttactagccgcggacgaacactgaatctgaaagccgcaacctggaaggttcttaattgtagcggacacatgcgcgcatacaagccccctgcacagacttcaccagctggaagccccgattccgaaccacccctgcagtgcctggtgctgatctgcgaggccattccacaccccggttccctagagcccccactgggaaggggggcatttttgagcaggcacagtctggacatgaaatttacatactgcgacgatcggattgctgaagtcgccggatacagccccgacgacctaattggctgctcggcctacgaatatattcacgcactggactcagacgcggtgtccaaaagcatccatacgctactgtcaaaaggacaagccgttacaggtcagtatcgttttctggcccgtagcggcggatacctatggacgcaaacccaggctacggtggtttcggggggtagagggcctcagagcgaatccattgtttgcgtccacttcctcatatcccaggtggaggaaaccggcgtggtgctgtcgctcgagcagactgagcagcacagtcggcgtccaatccagaggggagcgccaagccagaaagacacccccaatccgggtgacagtcttgatacccccggacctcggatcttggcatttctccaccctcctagcctgtctgaggccgctttagcggctgacccacggagattctgcagtccagacctgcgtaggcttctgggccctattctggacggtgcttccgtcgcagcgacacccagtacaccactggcaaccagacacccacagagccctctgtctgccgaccttcccgatgagttacccgtagggactgaaaatgtgcataggttattcaccagcgggaaagacactgaagctgtggaaactgacctagacatcgcccaggatgccgatgccctggatctcgaaatgcttgccccatacatcagcatggatgatgatttccagctgaacgcttctgaacagcttcccagggcctaccatagacccctcggcgctgtgccgaggccacgagctcgctcctttcatggcctctcgcccccagccctcgagccaagtttgctgccaaggtgggggtctgatcccagactgagctgtagttctccaagtcgcggtgaccctagtgcttcctcccccatggctggagctcgcaaacggacactggcacagtcctctgaagatgaagatgaaggtgtggagcttctgggggtgcgacctccgaaacggtcaccttcaccagagcacgagaactttctgcttttcccattgtcgctgagtttcctgcttacgggtggcccagcgccaggctccctccaagatccatcaaccccccttctcaatctcaacgagccgctgggatttcactttgtgacccagtccggggtgcagtggcataagcattcatccccccagcctcgtcccccaggccttaagtag

SEQ ID NO: 226582 - DNA, 600 bp, synthetic construct
  misc_feature 1..600: note = Description of Artificial Sequence: Synthetic coding sequence
  source 1..600: mol_type = other DNA
atgagacctgcagccggtgccgcacggcgaccaagatgctgcacgagttggcttacacggtgcccttcacccgcagcatctgcccctacctggactagacctctgtcttgtgcgtctccctctgctacttgtgcgtgtacagcttccgccccacaactggaactcatcgggcacagcatctttgactttatccatccctgtgaccaggaagaacttcaggacgctttaaccccgcagcagacgctgagtaggcgaaaagttgaggctcccaccgaacggtgcttcagcctgcgcatgaagtcaaccctgacatcacggggaaggaccctgaatctgaaggcagctacctggaaggtgctgaattgcagcggccacatgagggcttataagccccctgctcagacatcccctgccggaagccctgactctgagccgcctttacagtgcctggttctgatttgcgaagccatcccgcatcccggttctctggagccaccattgggtagaggagctttcctgagccggcatagtttagatatgaaatttacttactgcgacgacaggatcgccgaggtagccggatacagtcccatgacatag

SEQ ID NO: 226583 - DNA, 714 bp, synthetic construct
  misc_feature 1..714: note = Description of Artificial Sequence: Synthetic coding sequence
  source 1..714: mol_type = other DNA
atgcgacccgctgccggtgcagcaaggcggcctagatgttgtacaagctggctgacgcgctgtccctctccagcggcttctgccccaacatggacccgccctctaagctgcgcttcgccatccgccacttgtgcctgcacagcgtccgcccctcaagaggaacttcaggatgctttgaccccccagcagaccctgagccgcagaaaggtggaggcacctactgagcgatgcttctccctcagaatgaaaagcaccctgaccagcagggggagaacacttaatctgaaggcagctacatggaaagtgctaaattgttccggccacatgcgggcatataagcccccagcgcaaacatcgccagctggatcaccagatagcgagcctcctctccagtgcctcgtactgatctgcgaggctattcctcatccgggaagtctcgagagattcgtcccggttagttctgcagcgaccagtctctgtctgccatccctgtcaccttccaaagtggcgggttactctcctgacgatctgattggatgttcagcctacgaatacatacatgcgctggacagcgatgcaccacaggatgcactcccaccccacctgaatacctctagcctgctcccaaagccccagggcacggtgtcatttctggctccgtcctaccccgtgcctcgctacttcagcccccacttgcctccgtggtggccttag

SEQ ID NO: 226584 - DNA, 1092 bp, synthetic construct
  misc_feature 1..1092: note = Description of Artificial Sequence: Synthetic coding sequence
  source 1..1092: mol_type = other DNA
atggctctgggacttcagagggctagatccacaaccgagttacggaaggaaaagtctagagatgcggctaggagtaggagaagccaggaaacggaggtgctatatcagctggcccatacgctgccctttgctcggggagtctctgcacatttggacaaagcatctattatgaggctgaccatcagctatctccggatgcacaggctctgtgcagccggagagtggaaccaggtgggcgcagggggagagcccctggacgcctgctacctaaaggcgctggagggttttgtgatggtgctaaccgcagaaggagatatggcctacctgagtgaaaacgtatcaaaacatctgggcctctcacagctcgagctcattggtcactctatttttgattttatccatccttgtgaccaggaggagctccaggacgctctgactccccagcagactctctctaggcggaaggtagaggctcccaccgagcgctgtttcagtctacggatgaagtcaactctgactagccggggtcgcacactcaatctgaaagccgcaacatggaaggtgttgaactgcagcggacacatgcgagcctataagccaccggcacagacttctccggctggcagcccagacagcgaaccacccctccagtgtctggtgcttatctgtgaagcaattccgcaccccggtagcctcgaaccacccttgggaagaggagcttttctgtcaagacatagcctcgatatgaaatttacatactgtgacgaccgtatcgcagaggtggctggttatagccctgacgacctgattgggtgtagcgcttacgaatacatccacgctctggattcagatgccgtctctaagtcaatccatacctgtatgtaccccataagtcccggtgctaaaccagcagctacctggccacctgccgacacccggacaccccagctccctattccccaagacgctctgccacctcatctgaatactagcagcctcctcccaaagccgcaaggaaccgtaagctttcttgccccaagctatccggtacctcgttattttagccctcatctgcctccgtggtggccttag

SEQ ID NO: 226585 - DNA, 2976 bp, synthetic construct
  misc_feature 1..2976: note = Description of Artificial Sequence: Synthetic coding sequence
  source 1..2976: mol_type = other DNA
atggccgataaggtcaggagacagcgtccgagaaggcgtgtgtgctgggcactggtggccgtgttgctcgccgacctgctggcacttagtgataccctggccgtgatgtcagtggacctcgggagtgagtcaatgaaggtggccatcgtgttgaataaagagtcccgtagaaagacgccggtcattgtcactctaaaggagaatgagcggttttttggcgactccgcagccagcatggctatcaagaacccaaaagctacactgcgctacttccagcatctcttaggtaagcaggccgataatccccatgtggctttatatcaggccaggttcccagagcacgaactgacctttgaccctcaaaggcagaccgttcacttccagatctcaagccagctgcagttctctccagaagaagtcctgggtatggttctcaattattctcggagtctcgctgaggactttgcagagcagccaatcaaggatgctgtgatcaccgttcctgtgttttttaaccaggccgaaagacgggctgtgctgcaggcagccagaatggctggcttaaaggttctacaactgattaacgataatacagcgaccgctttgagctacggcgtgtttcggaggaaggatatcaacaccacagcacagaacattatgttctacgatatggggtcggggtccactgtctgtactatcgtaacttaccagatggtgaagacgaaagaggcagggatgcaacctcagttacaaatcagaggggtggggttcgacagaacactgggcggattggaaatggagctacgcctacgcgaacgactggccggactatttaatgagcagaggaaaggccagcgcgctaaagacgtccgggaaaatcctcgggctatggccaaactgttaagagaagccaataggttgaaaaccgttctgagcgccaatgcggaccacatggcacaaatcgaaggtctgatggacgacgttgacttcaaagctaaagtcactcgcgtggaattcgaagaactatgtgctgatctttttgaacgcgtgcctggtccagtccagcaggccttgcagagcgctgagatgtccctagatgagatcgagcaagtaatcttagtggggggtgcaaccagagtccctcgagtgcaggaggtgctcctgaaggctgtaggtaaagaagagctggggaaaaacatcaacgcggacgaagccgcagccatgggcgcagtgtaccaagccgctgccctgagtaaggcgttcaaggtaaagccatttgttgtccgggacgccgtggtgtatcccatcctggtggagttcaccagagaggtagaggaagagccaggtattcactcacttaagcacaacaaacgagttcttttcagtagaatgggcccttacccgcagcgtaaggtgatcactttcaatcgctacagtcatgactttaattttcacattaactatggagacttgggtttcctcgggccagaagacctgcgggtgttcggcagtcagaaccttaccacagtgaaattaaagggggtaggcgacagctttaaaaaatacccagactatgagtccaagggtatcaaagcacactttaacttagacgagagtggcgtattatcactagaccgcgtggaatcagtgttcgagacactcgtagaagactccgccgaggaagagagcaccttgactaagctgggcaataccatctctagtttgttcggcggaggtacaacacctgatgccaaggagaacgggactgatactgtccaagaggaagaagagtcacccgctgaggggagtaaagatgaacccggagaacaggtagaattgaaagaggaggccgaggcccctgttgaggatggtagccagcctccaccgccagagcccaagggtgatgcgactcccgagggggaaaaagcaacagagaaagaaaatggcgataaatcagaggcacagaagccgtcagagaaagcagaggcgggacccgaaggtgtggcacctgccccagagggcgaaaaaaaacaaaagcctgcacgcaagagaaggatggttgaagagattggtgtggaattagtggtcctggacctgcctgatcttcccgaagacaagctcgcccaatccgtgcagaagctgcaagatctgactctgcgggatctcgagaagcaggaacgagaaaaggccgcaaattccttggaggcgtttatattcgaaacccaagataagctctatcagccggagtatcaggaggtaagcacagaagagcagcgagaggagatctccggcaagctgtccgctgcctctacatggcttgaggatgagggagtaggagccacgactgtgatgcttaaagaaaagctagcagaactgcggaaactctgccagggtcttttcttccgcgtggaggaaaggaaaaagtggccagaacggctctcagcacttgataatctgctgaaccactcttctatgtttctaaagggggcaaggctcataccagagatggaccagatttttacagaggtagagatgaccacactcgagaaggtgatcaatgaaacatgggcctggaagaatgccacattagcagaacaggctaaactgcccgctaccgagaagccagtgctgctgtcaaaagacattgaagctaagatgatggccttggaccgggaggttcagtatttgctgaataaagccaaattcactaaaccacgtcctagaccgaaagataaaaatggtacgagagccgaacccccactgaacgcctccgcatctgaccagggcgaaaaagttatccctccagcagggcagaccgaggacgccgagccaatttcagaacctgagaaggtggagacggctggtagcgagcccggagatacagagccgctggaattgggcggtcctggcgcagagcctgagcagaaagaacagtctaccggacagaagcggcctctgaagaacgacgagttgtag

SEQ ID NO: 226586 - DNA, 3000 bp, synthetic construct
  misc_feature 1..3000: note = Description of Artificial Sequence: Synthetic coding sequence
  source 1..3000: mol_type = other DNA
atggctgacaaggtgcggagacaacggccacgcaggcgggtatgttgggcgcttgtggccgtcttgcttgcggaccttctggctctcagcgacacactggccgtcatgtccgttgatcttggatccgagagtatgaaggtagcgatagtaaagcctggagtgcctatggagatagtgttaaataaggaatctcggaggaaaacccccgttatcgtcaccctgaaagagaatgaaagattcttcggcgacagcgctgcctcaatggcaataaaaaatccgaaagccaccctgagatacttccagcatctgctgggcaagcaggccgataaccctcacgtcgcattgtatcaggccaggttccccgagcacgagcttaccttcgatccgcagaggcaaactgttcactttcagatctcttcacaattacagttcagtccggaagaggtactggggatggtgttaaactactcccggtctctcgctgaagatttcgctgagcaacctatcaaggacgcggtgatcaccgtgccagtgttctttaaccaggctgaacgacgggcagtactacaggccgctcggatggctggactgaaagttctgcagttaattaacgacaacacagccaccgctctgtcctatggtgtatttaggcgcaaagatataaatacaactgctcagaacattatgttctatgacatgggcagcgggagcaccgtatgcacgattgtgacttaccagatggtcaagaccaaggaagcaggcatgcagccccagcttcagatccgcggagtgggatttgatcgtacgctggggggactggagatggagctgaggttgcgtgagaggctggccggactgttcaatgagcaacggaagggccaaagagccaaggatgttcgagagaacccgagagctatggccaaacttctgcgagaggccaaccgactcaaaaccgttctgtccgctaacgctgatcacatggcccagattgaggggttgatggacgacgtcgacttcaaagctaaagttacacgggtcgaatttgaagagctgtgtgctgatttgtttgaaagggtgcccggacccgttcagcaggcccttcagtcagccgaaatgtctttggacgaaattgaacaggtgattttagttgggggagccacacgagtccccagagtccaggaagtgcttcttaaagccgtcggcaaagaagagctcgggaaaaatatcaacgccgatgaggccgcagctatgggggcagtgtaccaggccgcagccctgtctaaagcctttaaagttaaacccttcgttgtaagggatgcggtggtataccctatactcgtagagttcaccagagaggttgaagaggaacccggaatccatagcctgaagcacaataagcgggtcctgttctcgcggatgggcccttatcctcagaggaaagtgattactttcaaccgctacagccacgacttcaatttccatatcaactacggcgatcttggcttcctgggcccagaggacctcagagtgtttggaagccagaatcttacaaccgttaagcttaaaggcgtgggggattccttcaagaaataccctgattatgaatccaagggcattaaggctcatttcaacctcgacgagtcaggagttctcagcctcgatagggttgaaagcgtattcgagaccttagtcgaggatagcgctgaagaagaaagcactttaactaagttgggaaatactatatcatcactcttcgggggtggcaccaccccagatgccaaggagaatggaactgatacggtgcaagaagaggaggagtcacccgctgaaggctccaaggacgaaccaggggaacaggtcgagctgaaagaggaggcagaggcacccgtagaggatggatcacagcccccacccccagagccaaaaggcgatgcaacccccgaaggcgaaaaagccacagagaaggagaacggagataaaagcgaggcacagaaaccttcagagaaagctgaagcaggcccagagggcgtggccccagccccagaaggagagaaaaagcagaagcccgctaggaagaggcgcatggtggaggaaatcggcgtcgaactggtagttttggacctgcccgacctccccgaggacaagcttgcccagtctgtccagaagctgcaggacctgacactgcgggatctggagaaacaagagcgcgagaaggctgccaattctcttgaagcattcatctttgaaacacaggacaaactgtaccaacccgagtaccaggaagtgtccacggaagagcaacgcgaggagatctccggcaagctttctgctgctagcacttggctggaggacgagggagttggagccactacagttatgctgaaggaaaagctggccgaactcaggaagctctgccaggggctgtttttccgagtggaggagagaaaaaagtggccggaacggctctctgcccttgataatctcttgaaccattcatctatgtttctaaaaggcgctagattgatacccgaaatggatcagatcttcaccgaggtagaaatgacgactctcgagaaggtgattaacgaaacttgggcctggaagaacgcaacactggccgaacaggctaaactgccggcaaccgaaaagccggtgttgctgtcgaaggatattgaggcaaagatgatggccctcgaccgggaggtgcagtatctgcttaacaaggccaagtttaccaagccgagaccaagacccaaagacaagaacgggacacgtgccgaacccccactcaacgcatcagcttctgaccagggggaaaaagtgataccacccgcaggtcagacggaggacgccgagcccatttcagagcccgaaaaagttgaaaccgggtctgaaccaggggatactgaacctcttgagctaggcggtcctggcgctgagcctgaacagaaggaacagagtaccggtcaaaagaggcccctgaagaacgacgagttgtag

SEQ ID NO: 226587 - DNA, 2547 bp, synthetic construct
  misc_feature 1..2547: note = Description of Artificial Sequence: Synthetic coding sequence
  source 1..2547: mol_type = other DNA
atggtgctaaactattcgagaagtttggctgaggacttcgcagaacagccaatcaaggacgctgttatcacagttcccgtgtttttcaaccaggccgagcgcagggccgtgcttcaggcagccaggatggccggactcaaagttctgcagttgatcaacgataatacagcaactgccctgtcttacggtgtttttcgccgtaaggatatcaatactaccgcccagaacatcatgttctacgacatgggaagcggaagtaccgtgtgcactatcgtgacctaccagatggtgaagactaaggaggcgggtatgcagcctcagctccaaattagaggcgtgggctttgacagaacgctcgggggtctggaaatggaattaagattacgggaacgcctggccggactattcaacgagcaacgcaaggggcagagggctaaggacgtgcgcgaaaacccaagagcaatggcgaagctgctcagagaagctaatagattgaagactgtactgtctgcaaatgccgaccatatggcccagatcgaaggactgatggacgacgtggacttcaaagccaaggttaccagagtggagtttgaggagctctgcgccgacctgtttgagcgggtgcccggtccagtccagcaggccctgcagtccgcagaaatgtcactcgatgagatcgaacaggttatcctggttggaggggctacccgagtgccacgtgtgcaggaggttctgctgaaggccgtcgggaaagaagagctaggaaagaacataaatgcggatgaggccgctgccatgggggcagtgtaccaggcagcagctctctcaaaagccttcaaagttaagccttttgtagtgcgtgacgccgtagtctaccccattcttgtggagtttacccgagaagtggaggaggaacccggtatacacagcctcaaacacaataaacgggtgctgttcagtaggatggggccttacccccagagaaaggtcatcacttttaatcgctatagccatgatttcaactttcatattaactatggcgacttgggcttcttggggccagaagacctgagggtgttcggctctcagaatttgacaacagtgaagttaaaaggagttggcgattcctttaaaaagtatcctgattatgaaagcaagggtattaaggcccactttaacctggacgagtcgggcgttctttccttagaccgtgtcgaatcagttttcgagactctcgttgaagattctgctgaagaggaatctacactgactaaactggggaacactatcagtagcctcttcgggggaggcaccacccctgatgctaaagagaatggaaccgacacagtgcaggaagaggaagagagcccagcagagggcagtaaagacgagccaggagagcaggttgaactcaaggaggaggctgaggcccctgtggaagacggaagccagccgcctccacctgaaccgaagggggacgctactcctgaaggggagaaggcaaccgaaaaggaaaacggcgacaaatcagaagcacagaaaccatccgaaaaggcagaggccggtcccgaaggagttgccccagctcctgaaggtgaaaagaagcagaaacctgctaggaaacggagaatggtggaagaaatcggcgtagagctggtcgtccttgacttgccagatctccccgaagataagttggcccagagtgtgcagaaactccaggatttgacacttagagatcttgagaagcaggagcgggaaaaagcagcaaactctctggaagcatttatctttgagacacaggacaagttgtaccagcctgaataccaggaagtgtctacagaggagcagcgggaggaaatcagcggtaagttgtcagcggcttcaacctggttggaggacgaaggcgtgggggctaccactgtgatgttaaaagaaaaattagctgagctcaggaaactttgccaggggctgttctttagggtggaggagcggaagaaatggcctgaacggttaagcgccctcgacaatttgctgaatcactcaagtatgtttctcaaaggggcacgacttattccagagatggaccagatcttcactgaagtagagatgacgactctagagaaagtgattaatgaaacttgggcctggaagaacgccacactggctgaacaagcaaaattgccagcgactgagaagcccgtcctgctgagtaaggacatcgaagccaagatgatggcactggacagagaagtccaatacttgctcaacaaagctaagtttacgaaaccgagacctcgccctaaggacaagaatggcacccgggcagagcccccactcaacgcatctgcctccgaccaaggggaaaaggttatcccacccgctggacaaaccgaagatgctgagccaatctcggagccagagaaggttgaaactggttccgaacctggcgacacagaacccctagagttgggaggccctggcgctgaacccgagcagaaagagcagtcaacaggccaaaagaggcctctcaaaaatgatgagctctag

SEQ ID NO: 226588 - DNA, 2040 bp, synthetic construct
  misc_feature 1..2040: note = Description of Artificial Sequence: Synthetic coding sequence
  source 1..2040: mol_type = other DNA
atggccgacaaggttagaagacagcgaccaaggaggcgagtgtgttgggcattagtggccgtgctcctcgcagatttattggctctgagcgataccctagccgtgatgagcgtcgacctgggtagcgagagtatgaaagttgccatagtaaaacccggtgtgcccatggagatagtactgaacaaggaatccagaagaaaaactcctgtgatagtcacactgaaggaaaatgagagattcttcggagacagcgccgcatccatggccatcaagaaccctaaagccacacttagatattttcagcatctgcttggaaagcaggcagataatccacatgtggcgctgtatcaggcacgctttccagaacatgagctgacatttgatccccagaggcagaccgtgcactttcaaatatcaagccagcttcagttctcacctgaggaggtgctcggaatggtgttgaattactcacggtccctcgcagaggacttcgccgagcaacccattaaagatgcagtaattaccgtgccggtgttttttaatcaggccgagcgacgggctgttctccaggccgcaaggatggctgggcttaaggtgctccagcttatcaatgataacaccgccacggcgctttcatacggcgtgtttcggaggaaggacatcaatactaccgcccagaacattatgttctacgatatggggtcagggagcactgtgtgcaccatcgtaacttatcaaatggtgaagacaaaggaagcaggaatgcaacctcagctgcagattagaggagtgggattcgataggaccctgggaggcctggagatggagcttcgcctgcgggagaggctggcagggctcttcaatgaacagcgcaagggtcagagagccaaggacgtgcgcgagaatccacgggcaatggccaaactgttgagggaagcaaataggctgaagactgtcctgagcgcaaacgctgaccacatggcacagatcgagggactgatggatgatgtcgattttaaggccaaggtcacccgagtggagttcgaggaattgtgcgctgatctgttcgagagagttcctggacctgtgcagcaagctcttcagtctgctgaaatgagcctggacgagattgagcaggtgattttggttggaggggcaaccagagttcccagggtccaggaagtgcttttaaaggcagtgggcaaagaagagctcggcaaaaatattaatgccgacgaagcagccgcaatgggagcagtatatcaggctgctgccctttcgaaggcattcaaggtcaaacccttcgttgtgcgggatgcagtggtgtatccaatcttggtggaattcactagagaggtggaggaggaacccggtattcatagtctgaagcacaacaaacgagtgctgtttagcaggatgggcccatatcctcagcgcaaggttataacttttaatcgctactcacatgactttaactttcacatcaattacggagacctgggctttctggggccagaagatttgcgagtttttggctcccaaaatctgacaacggtcaaactcaagggagtcggcgactcgtttaaaaagtatccggactacgaatcgaagggaatcaaagcccacttcaatctggatgagtcaggcgtgctctctctcgacagggtggagtctgtgttcgaaactctggttgaggatagcgcagaagaggaatctacgctgacaaagttaggtaataccatctcttctctgttcgggggaggaactactccagatgcaaaagagaatgggaccgacacagtgcaggaggaagaagagagcccagctgaagggtctaaagacgagccaggcgaacaggttgagctgaaggaagaggcagaggcacccgtcgaagacgggagccagccacctccgccagagccaaagggggacgccacccctgagggggaaaaagccactgaaaaagagaatggtgacaagtcagaggcgcaaaaacctaccagcgtttgccgtgcttctgttacacgctttggcttttag

SEQ ID NO: 226589 - DNA, 444 bp, synthetic construct
  misc_feature 1..444: note = Description of Artificial Sequence: Synthetic coding sequence
  source 1..444: mol_type = other DNA
atggcagacaaggtgagaagacagcgtcccagacgacgggtctgctgggctctggttgcagtgctcctagccgacctgctggccttgagtgacacgctggctgtgatgagcgtggacctgggcagcgaaagcatgaaggtggcaatagtgaagcctggggtgcccatggagattgttttgaataaggagtctaggagaaagactccagtgatagtaacactgaaggagaacgagaggttctttggcgatagcgccgcatcaatggctatcaaaaatccgaaagccacgctgaggtactttcagcatctgctggggaaacaggcagataatccgcacgttgctctttaccaggcccgtttcccagagcacgaactgacattcgatcctcagagacaaaccgtgcactttcagatttcatcacagctgcaatttagccccctgtag

SEQ ID NO: 226590 - DNA, 1680 bp, synthetic construct
  misc_feature 1..1680: note = Description of Artificial Sequence: Synthetic coding sequence
  source 1..1680: mol_type = other DNA
atggcaatcaaaaacccaaaagcaaccctgcgctactttcaacaccttctcggtaagcaggccgacaatccccatgtggcattgtatcaggctaggtttcctgagcacgagctgacttttgatccccagaggcagaccgttcactttcagatttccagtcagttacaattctcccctgaagaggttctgggcatggtactgaactattcccgttcgcttgccgaggatttcgctgagcagcctatcaaagatgccgttattacagtccccgtattcttcaatcaggcagagcgacgggcagttctgcaggccgcacgtatggcaggcctgaaggtgttacagctgattaatgataataccgcaaccgccctctcctacggggtgtttaggcgtaaggacatcaacaccacagcccaaaacattatgttctacgacatgggctccggaagcacagtctgtacaatcgtgacctatcaaatggtgaaaacaaaagaggccggaatgcagccacaattacagatacgtggcgttggtttcgaccgcacgctgggcggtctggagatggaattgagactgagggagaggttggccggattgtttaatgagcaacgcaaaggtcagcgcgctaaagacgtaagggagaaccctcgagctatggctaagctgttgcgtgaagccaatcgactcaagaccgtgctgagcgccaacgccgaccacatggcccagatcgagggcctgatggacgacgttgactttaaagcaaaggttacacgggtggagttcgaggagctgtgtgcagacctctttgagcgcgtaccgggacctgtacagcaggccctgcagagcgctgagatgtccctggatgagattgaacaggtgatcctggtgggaggggcaaccagagtgccgcgagtccaggaggtgctgctgaaagctgtgggcaaggaagaactaggcaagaatatcaacgctgatgaagctgccgcaatgggagctgtttaccaggccgcagctctgtctaaggcctttaaggtcaaaccctttgtggtgagggacgccgttgtgtacccaatcctggttgagtttacaagagaggtggaagaggaaccaggcattcacagcctcaagcacaacaaaagggtcctcttttctagaatgggcccttatccccaaagaaaggtgattacattcaacagatacagccacgattttaacttccacataaactatggggacctcggatttttgggtcccgaagacctgcgcgtcttcggctctcagaacctaacaaccgtgaaactaaagggagtgggagattccttcaagaaatacccggattatgagtccaaaggtataaaagcccactttaatctggatgagtccggagtgctctcactcgatcgggtggagagcgtcttcgaaactctcgtggaggattccgcagaggaagaatcgacactaacaaagctggggaacactatctcctccctctttggagggggaaccaccccagatgctaaagagaacggtacagacacagtacagatgctttttctgtgtccagctcgcctgcctcagtccaaacaggccatcgatcgctttcatacagctgttacatgtatggaacctccttggggcagacgctgtcgcgctagaccagcctggaggctctgctcttag

SEQ ID NO: 226591 - DNA, 2943 bp, synthetic construct
  misc_feature 1..2943: note = Description of Artificial Sequence: Synthetic coding sequence
  source 1..2943: mol_type = other DNA
atgtggcaaagtcgtgggcctatgctgtttcaccttgggctgtgtgtcggagccgctggcatgatcagagaatggttcgtgcctattcggagggagaaagggagcagattgatctgtccaggcggaactatggccgacaaggtacgtcggcagcgcccacgtcggcgtgtgtgctgggccctggttgccgtcctcctggccgacctgctcgcactgtctgatacactggccgtcatgagcgtggacctgggcagcgaatccatgaaggttgctattgtgaagcctggggttcccatggaaatcgtcttgaataaagaatctaggaggaaaacaccggtcatagtaacgcttaaggagaacgagagatttttcggggactctgccgcaagcatggcaataaagaaccccaaggctactctgcggtatttccagcacctgctcggtaagcaagccgataatcctcacgtcgctctttaccaggccagattccctgagcacgagctcacattcgaccctcaacgacagaccgtccatttccaaatctcgtcacagctgcagtttagtcctgaggaggtgttgggtatggtgctgaattacagccgtagtctggctgaagactttgccgaacagcccatcaaagatgcagtcattaccgtgccagtgttctttaaccaagccgaacgcagagccgtgctgcaggcggcacggatggcaggtctcaaggtccttcagctcatcaacgataacactgcgaccgcattgtcctacggagtgttcagacggaaggacataaacactacagcccagaacatcatgttctacgacatgggttctgggtccacagtctgtactattgtgacgtatcagatggtgaagacaaaggaggcaggtatgcagcctcagctgcagattagaggcgttggcttcgacagaaccttaggcggactcgagatggagctccgcctgcgagagagattagccggactattcaacgaacagaggaagggccagagggcaaaggacgtgcgtgaaaatccgcgagcaatggcgaaactactgagagaggctaataggttgaagaccgttctctctgcaaatgcagatcacatggcacagattgaaggactgatggacgatgttgacttcaaggccaaggtgacacgggtggagttcgaggagctctgcgcggatctgttcgagcgggtaccagggcctgtgcagcaagcccttcagagcgccgaaatgtcactagacgagatcgaacaggtaatcttggtgggcggagccacacgcgtcccgagggttcaggaggtgctgctaaaagccgtggggaaggaggagctgggcaaaaatatcaatgccgacgaggctgccgcaatgggcgcagtgtaccaagctgcggctctgtctaaagcgttcaaggtaaagcctttcgtggtgcgtgacgcagtggtctaccctatcttggttgagttcacccgcgaagttgaggaggaacccggaatccatagtctgaagcataacaaacgtgtgcttttctcccgtatgggcccatatccccagcgaaaagttatcacttttaaccgctacagccatgactttaattttcacattaattacggggacctgggctttctcggccctgaagatctgcgggtttttgggtctcagaatctgacgactgttaagctgaagggcgtgggcgacagctttaaaaaataccccgactatgaaagcaaggggatcaaggcccacttcaacttggacgagtcaggagtcctgagcctggatcgcgtggagagcgtcttcgaaacacttgttgaagattcggctgaggaggaaagtaccctgacaaaactgggcaatactattagttcactctttggaggagggacaaccccagacgctaaagagaacggaactgatacagtccagaagccctccgagaaggcggaggctgggccagagggcgtcgcccctgccccagagggcgagaaaaaacagaaacccgctagaaagcggaggatggtggaggagatcggggttgagttagtggttttagatttacccgacctgcctgaagacaagctcgcccagtccgtgcagaagctgcaggacctcacactccgagatctagagaaacaggaaagagaaaaggccgcaaattcactggaggcatttatctttgaaactcaggacaaactgtaccaacccgaataccaagaggtctccacggaggagcaaagggaggaaatctcaggcaaactttcagccgcaagcacatggttagaagacgagggggttggggcaactaccgttatgttgaaggaaaagctggcggaactcagaaaactgtgccagggactgttctttagagtggaggaacgaaagaaatggcccgaacgcctcagcgctttggacaacctgcttaatcattcctcaatgtttctcaaaggggcacgcctgattcctgaaatggatcagatcttcacggaggtggagatgacgactctcgagaaggtgattaatgagacgtgggcctggaagaatgcgaccctggctgaacaggctaaactcccagctactgaaaaacctgtgttgctgtctaaagacattgaagcaaagatgatggcattagacagggaggttcagtacttgctgaacaaggccaagtttaccaagcccagacccagacccaaggacaaaaacggcacccgcgctgagccccctctgaacgcgtcagcaagtgatcagggggaaaaagtgatccctcctgccggacagacagaagacgctgaaccaatatccgagcccgaaaaagtcgagaccggctctgagccaggtgacactgaaccgttggaacttggcggacccggagctgaaccagaacagaaagaacagtctaccggtcaaaagaggccccttaagaatgacgagttgtag

SEQ ID NO: 226592 - DNA, 333 bp, synthetic construct
  misc_feature 1..333: note = Description of Artificial Sequence: Synthetic coding sequence
  source 1..333: mol_type = other DNA
atggctccacgaggctgtatcgtggctgtgttcgccattttctgtatcagccgactcctatgctcccacggtgcgcctgtggcccctatgactccctatcttatgctctgtcaacctcataaaagatgtggggataaattctatgaccctcttcaacactgctgttatgatgacgcggtcgtgccacttgctcgaacccagacctgtgggaattgtaccttccgagtatgtttcgaacagtgctgcccatggactttcatggtgaaattgatcaatcagaattgcgattccgcacgtaccagtgacgacaggttgtgccgtagcgtgtcttag

SEQ ID NO: 226593 - DNA, 360 bp, synthetic construct
  misc_feature 1..360: note = Description of Artificial Sequence: Synthetic coding sequence
  source 1..360: mol_type = other DNA
atggtgcctcgaatcttcgcacctgcctatgtgagcgtgtgcctccttctgctgtgccccagggaagttattgcacctgcgggttctgaaccgtggctgtgccagccagccccaaggtgtggagataaaatctataaccctcttgagcagtgttgctacaacgacgctattgtttccctgagcgagactcgacagtgcggacccccttgcactttctggccttgttttgaattatgctgcctagattcttttggtctgaccaatgactttgtggttaagcttaaggtccagggggtgaacagccagtgccactcatcaccaatcagttctaagtgcgagtcccgccgacggttcccatag

SEQ ID NO: 226594 - DNA, 393 bp, synthetic construct
  misc_feature 1..393: note = Description of Artificial Sequence: Synthetic coding sequence
  source 1..393: mol_type = other DNA
atgagatttagcgtgtccggaatgcggaccgactatccccgaagcgtgcttgcacctgcctatgtcagcgtctgtcttttactcctgtgccccagggaagtcatagccccagcaggatctgagccctggctgtgccaaccggcaccacggtgtggggacaaaatctacaacccactggagcagtgttgctataacgacgccattgtcagcctgtctgaaacccggcagtgcggccctccctgcacgttttggccctgctttgaactctgttgtctggattcgtttggtctcacaaacgactttgtggtgaagttgaaggtccaaggcgttaacagtcagtgtcattcgagccctatctcctcaaaatgtgagagcagacggcgttttccttag

SEQ ID NO: 226595 - DNA, 378 bp, synthetic construct
  misc_feature 1..378: note = Description of Artificial Sequence: Synthetic coding sequence
  source 1..378: mol_type = other DNA
atgaggcccagatgctgtattttagctttggtttgttggatcacggtatttcttctccagtgtagcaaaggcaccaccgatgcacctgtaggcagtggactgtggttatgccagcccacacctcgttgcggaaacaaaatttacaatccatccgagcagtgttgttatgacgacgctattctgagcctgaaagagacccgtcggtgcggcagcacctgcacgttctggccctgttttgaactgtgctgcccagaaagctttggaccacagcaaaaatttctcgtgaagcttcgagtgctggggatgaagagtcagtgtcacctttcccccatcagtcgctcatgtaccaggaaccggaggcacgtactgtatccctag

SEQ ID NO: 226596 - DNA, 375 bp, synthetic construct
  misc_feature 1..375: note = Description of Artificial Sequence: Synthetic coding sequence
  source 1..375: mol_type = other DNA
atggtccctagaatctcagctgccatcttcattttcgagcttctagggtctaattccgagggtgtgactgatctgcgcttgtggttgtgtcagcccgcacctcggtgcggggaatggacctacaacccactggaacagtgctgtgatgatggtgtgatcctggacctgaaccaaactaggttatgcggttcctcatgcacgttctggccctgttttcagcactgctgccttgagagtctgggctcacagaaccagaccgtggtgcgcttcaaagtgccaggtatgaagcctgactgcaagtctagccccatcactcgcatttgtgcccaggaataccatcccaagagtcccgtcagcagatcagacctgatctag

SEQ ID NO: 226597 - DNA, 1068 bp, synthetic construct
  misc_feature 1..1068: note = Description of Artificial Sequence: Synthetic coding sequence
  source 1..1068: mol_type = other DNA
atgggaccagggcgatgcctgctgacagcactgctgctactagcgctggcccctcccccagaagcctcccagtactgtgggaggctagaatattggaatcctgacaacaaatgttgctctagttgcctacagagatttggccctccaccctgtccagactacgaatttcgcgaaaattgcggcctcaatgatcatggggatttcgtgacaccgccttttaggaaatgttcatccggtcaatgtaacccagacggagcagaattgtgttccccctgtggcggaggcgctgtgacgcctacccccgctgccggagggggacgaaccccctggcggtgccgtgagcgacctgtgccggctaagggacactgtcccttgactcctggcaacccaggcgcaccctcgtctcaggagcggagcagccctgccagcagtatcgcatggaggacaccagagccggtcccccagcaagcctggccaaacttcctgcctttggtggttctcgttctgctccttactttggcagtaatagccattcttctgttcattctcttatggcatttgtgctggccgaaggaaaaggccgacccttatccgtatccaggtctggtgtgcggcgtccccaatacacacactcctagctcttctcacctctccagcccaggcgcacttgaaacaggggacacatggaaggaagctagcttgctcccccttctctcacgcgagctgagctcactcgcttctcaaccgttgagcagactgctggatgagctagaggtcctggaagagctaatagttttgctcgaccctgaaccagggcctggaggaggcatggcccatggaactacccggcacttggccgcacggtatggcctcccggctgcttggagcacctttgcctatagtctgcggccttcaaggtctccgcttagggcgcttatcgaaatggtcgttgctagagagccctccgcgtcactgggacagctgggaacacatttagctcagctgggaagagccgacgcactccgggtactctcaaagcttggcagctccggcgtgtgttgggcctag

SEQ ID NO: 226598 - DNA, 504 bp, synthetic construct
  misc_feature 1..504: note = Description of Artificial Sequence: Synthetic coding sequence
  source 1..504: mol_type = other DNA
atgggcccaggtaggtgcctgctgacggcactgcttctgctggccttggctcccccacctgaggctagccagtattgcggacgcctggagtactggaacccggataacaagtgctgctcttcctgcctccagagatttggtccccctccatgtcccgagctcagctcccttgcctctcaacctttatcccgcctgctggatgagttagaggtgctggaggaactcatcgtcctgctcgaccctgagccaggcccaggtggcggaatggcacacggaacaactcggcacttagccgcacgctacggcctacccgctgcctggtcgaccttcgcctactcactgagaccctctcggtcccctctgcgcgcactcattgagatggtcgtggcacgagaacccagcgcttccttaggccaactgggaactcacctggctcaactgggcagggctgacgcactgcgggtgctgtctaagttgggatcatctggggtgtgttgggcgtag

SEQ ID NO: 226599 - DNA, 723 bp, synthetic construct
  misc_feature 1..723: note = Description of Artificial Sequence: Synthetic coding sequence
  source 1..723: mol_type = other DNA
atgccagagagagatagtgagccattttcaaaccctctcgcccctgatgggcatgacgtggacgacccgcactccttccaccagtccaagctgactaacgaggacttccggaaactgttgatgactcctagagcggctccgacctcggccccacctagcaaatctcggcaccacgaaatgccccgtgaatacaatgaagatgaggatccagctgctcggaggcgcaaaaaaaagagctattacgccaagttgaggcaacaagaaatcgagcgggaaagagagctcgctgaaaagtatcgagatcgggctaaggaacgtcgggatggtgtaaataaggactacgaggagactgagctgattagcacaaccgcaaactaccgcgctgtgggtccaactgccgaggccgataagtctgccgcagagaaacgacgccaactgatccaagagagcaagtttctggggggtgatatggaacacacccacctggtaaaaggtcttgatttcgccctactgcagaaggtccgtgccgaaatcgctagtaaggaaaaggaggaagaagaactgatggaaaagcctcagaaagaaacaaaaaaggatgaagatcccgagaataagattgagttcaagacaaggctgggtcgtaatgtctaccgcatgctgtttaaatccaaagcttacgagcgtaacgagctatttcttcctggccgaatggctatgtggtag

SEQ ID NO: 226600 - DNA, 1674 bp, synthetic construct
  misc_feature 1..1674: note = Description of Artificial Sequence: Synthetic coding sequence
  source 1..1674: mol_type = other DNA
atgccagagcgggatagtgagcctttcagcaaccctcttgcccctgatggccatgacgtggacgatcctcactctttccaccagtccaagctgaccaatgaggacttccgcaaactcctgatgactccccgagcagctcctacaagcgcacctccaagcaagtctagacaccatgaaatgccccgagaatacaacgaggacgaagatccagcagccagaaggcggaaaaaaaaatcttactatgccaagctgaggcagcaggagattgaaagagagagggagctggctgaaaaataccgagatcgcgcaaaggagcgacgcgacggcgttaacaaggactacgaggaaactgagcttatctccactaccgccaactacagagctgtaggcccaacagcagaggccgacaaatccgctgctgagaagcgcagacagctgatacaggaatcgaaattcctggggggtgatatggagcacactcatctggttaagggccttgacttcgctttactccagaaggttcgagcggagattgcaagcaaagagaaagaagaggaagagctgatggagaagcctcagaaagagaccaaaaaagacgaggaccccgagaacaaaatagagtttaaaactcggctgggaaggaatgtgtaccggatgctgtttaaatctaaggcttacgagaggaacgagttgtttctccctggaagaatggcctacgttgtggaccttgacgatgagtatgctgatactgatattccaactacactaatccgcagcaaggctgattgtcctactatggaagcgcagaccacccttaccactaacgacatcgtgataagcaagttgacacagatccttagctacctgcgacaaggcacgaggaataaaaaactcaagaagaaggataaggggaaactggaggaaaagaagcctccggaggcagacatgaatattttcgaagatatcggcgattatgttccctccactaccaagactccacgcgacaaggaaagggaaaggtatagggaacgagagagggaccgcgagagggatagagatcgggaccgcgaaagagagcgcgaacgagatcgtgagcgcgaacgcgaaagagacagggaacgggaggaggagaagaaacgccactcctacttcgagaagcccaaagtggatgatgagccaatggacgttgacaagggcccaggatcaacaaaggaactcatcaagtcgatcaatgagaagttcgccggtagcgccggttgggaaggtacagagagcctgaagaaacctgaggataagaagcagctgggtgattttttcggaatgagcaactcatacgctgaatgctacccagccactatggacgatatggcagtcgattctgacgaagaagttgactattcaaagatggatcaggggaacaagaaaggacctctcggcagatgggatttcgatacgcaggaagagtattccgagtatatgaataataaggaggctctgcccaaagccgcatttcagtatggcatcaaaatgtcagaaggaagaaaaacgaggaggtttaaggagaccaacgacaaagctgagctggacaggcagtggaaaaaaatcagcgccatcatcgagaaacgcaagaagatggaggccgatggcgttgaggtgaaacggcctaagtactag

SEQ ID NO: 226601 - DNA, 1560 bp, synthetic construct
  misc_feature 1..1560: note = Description of Artificial Sequence: Synthetic coding sequence
  source 1..1560: mol_type = other DNA
atggatgctgatgagggtcaggatatgagtcaggtcagcggcaaggaaagcccaccagtctccgatacgccagatgaaggagacgagccaatgcctattcctgaagatctttccaccacaagcggcggacaacagtcttcgaaatctgatcgagtggtggcctcaaacgtcaaagtcgaaactcagtcagacgaagagaatggtcgcgcttgtgagatgaacggcgaggaatgtgccgaagatctgcgcatgctcgacgcatctggtgaaaaaatgaatgggagccacagagatcagggctcttccgcactctccggcgtcggtgggattaggctccctaacggaaagctgaaatgcgacatctgcggcatcatctgtatcgggccaaatgttctgatggttcataagcgttctcacaccggagagagacctttccagtgtaaccaatgcggcgcatccttcactcagaaagggaatcttctgcggcacatcaagctgcatagcggcgagaagccgttcaagtgtcatctgtgcaattacgcctgtcgcagacgggacgccctgaccggtcacctccggacgcatagcgtcggtaagcctcacaagtgcggttactgtgggcgtagctacaaacagcggtcaagcctagaagagcacaaagagcgatgccataattacctcgagtccatgggtttgccagggacactttacccagtcattaaggaggaaactaatcacagcgaaatggccgaggatctgtgcaagatcggttccgagagatctctcgtcctggatcgactcgctagtaacgttgctaaaaggaagtcctcaatgccccagaagttcctgggagataagggcctctctgatacaccttacgattcttctgctagctacgagaaggagaatgagatgatgaaatctcatgtaatggatcaggccataaacaacgccatcaattatctcggcgctgaaagtctgcggccactggtgcagaccccaccgggagggagcgaagttgtcccagtgatttctccaatgtaccaattacacaagcctctagccgaagggacacccagatctaatcactctgcccaagacagcgccgtggagaatttattattgctgtccaaggctaagttggttccctcggagcgggaggcatctccttcaaactcatgccaggattcgaccgacaccgaatccaataatgaggaacagcgcagtgggctcatctacctgactaaccacatcgcgcctcatgctagaaacggactgtctctgaaggaagagcaccgtgcttacgatctcttgagggccgctagcgagaattcacaggatgcccttcgggtagtgagtacatcaggagaacagatgaaggtctacaaatgtgaacactgcagggtgctgttcttagatcatgttatgtacaccatccacatgggctgtcacggctttcgggatccttttgagtgcaacatgtgtgggtaccatagccaggatcgctacgaattcagtagtcacatcacccgaggtgaacatcgatttcatatgtcatag

SEQ ID NO: 226602 - DNA, 1299 bp, synthetic construct
  misc_feature 1..1299: note = Description of Artificial Sequence: Synthetic coding sequence
  source 1..1299: mol_type = other DNA
atggatgccgatgaggggcaagatatgtcccaggtgagcggaaaggagagcccccctgtgagtgatacacccgacgaaggcgacgagccaatgcccattcccgaggacctctcaactactagcggcggacagcagtcttccaagagcgatagagttgtcggcgagcggccattccagtgcaaccaatgcggagcctcattcacgcaaaaggggaacctgctgcgccacattaagttgcacagcggagaaaagccttttaaatgtcacctgtgcaactatgcgtgtcgtagacgggacgcgttaacagggcatctacgtacccattcggtgggaaagccacacaaatgtggctactgcggaagaagctacaagcagaggtcatctctcgaagagcataaggagaggtgtcacaattatctggagagtatgggcttgcctggaactctttatcccgttatcaaggaagagactaaccactccgaaatggcagaagatctgtgcaagattggctccgaacgctctctggttctggataggctggctagtaatgttgccaaacgtaagtctagtatgccccagaagtttctgggagataaaggcctttccgacactccttatgactccagcgcctcatacgagaaggaaaatgagatgatgaagtctcatgtgatggaccaagctatcaacaacgccatcaactaccttggtgccgagtctctccgacctttagtccagactccaccaggcggttctgaagtggtgcctgttatctccccaatgtatcaactccataaaccattagccgagggcacgccaagatccaatcattctgcccaagattccgccgtggaaaacctactgctcctgtccaaagccaaactggtgccctccgagagggaggcctcccccagcaatagttgtcaggattccacagatactgaaagcaacaatgaagaacagcggagcgggttaatctacctcacaaatcacatcgccccacacgctcgaaacggtctctctctgaaggaagagcaccgtgcgtatgatctgctgcgagctgcttctgagaactcccaggacgctttgcgcgtggtgtccacttcgggagagcaaatgaaagtgtacaaatgcgagcattgcagagtgctgtttctcgatcatgttatgtacactattcacatgggctgtcatggttttagggacccatttgaatgcaacatgtgcggctatcactcccaagatagatatgagttttcttcccacatcacccgaggcgagcacagatttcatatgtcatag

SEQ ID NO: 226603 - DNA, 870 bp, synthetic construct
  misc_feature 1..870: note = Description of Artificial Sequence: Synthetic coding sequence
  source 1..870: mol_type = other DNA
atggatgccgacgaagggcaagatatgagccaggtcagtgggaaagagtcccctcctgtatctgacacccccgatgagggtgatgagcctatgcctattcctgaggacctatcaactacctctgggggtcagcagtcttctaagagcgatcgcgtcgtgggggataagggactcagcgatacaccatacgactcctccgcgtcatatgagaaggagaacgagatgatgaagagccatgtcatggaccaggcaatcaataacgctattaactatctgggggcagaatccctgcggcctcttgtacagacacctccgggaggtagcgaagtcgttccagtcatctcacctatgtatcaacttcacaagcctctagccgaggggactccccgatcaaatcactcagctcaggactcagctgtggagaatctcctactgctgtcaaaagcaaagctcgtaccgtctgagagagaagctagtccgagcaattcttgccaagactcaaccgataccgagtcaaacaacgaagaacagaggtctggcttaatttatctcacgaatcacatcgctccccatgcccgaaacggactgagtctcaaggaggagcaccgagcatacgacctcctgcgggcagcgtctgagaactcccaggacgccttgcgcgtcgtgagcacgagtggcgagcaaatgaaggtttataagtgcgaacactgcagggtgctgttcctggaccatgtaatgtatactatccacatgggatgtcacggctttcgggacccattcgagtgtaacatgtgcggctaccactcacaagaccggtatgaattctcgagccatataacgaggggcgagcacaggtttcacatgtcatag

SEQ ID NO: 226604 - DNA, 1131 bp, synthetic construct
  misc_feature 1..1131: note = Description of Artificial Sequence: Synthetic coding sequence
  source 1..1131: mol_type = other DNA
atggatgctgacgaaggtcaagacatgagtcaggtgagtggcaaggaatctcccccagtaagcgacacacctgacgagggcgatgagccaatgcccatccctgaagatctatccaccacatctggtggccagcagtcaagtaagtccgatagggtggttgccagcaatgttaaggtcgaaacccagtctgacgaggaaaatggaagggcatgcgaaatgaatggcgaagaatgtgctgaagacctgcggatgctggatgcttctggtgagaagatgaatggctcccatcgagaccaggggtcctctgctctgtccggcgttggaggcattcggctgcccaacggtaagctgaaatgcgatatctgcgggatcatctgcataggaccaaatgtgctgatggtgcacaaaagatcccacaccggtgacaaggggctatctgacacgccatacgactcctccgcgtcctacgaaaaagaaaacgaaatgatgaaatcccacgtgatggaccaagccatcaacaacgcgataaactatttaggagccgagtcgctgcggccacttgtgcaaacccctcctggcggatcagaagtggtcccggtgatcagtcctatgtatcagcttcataaacctctggcggaagggacaccacggagcaaccactccgcccaggactctgccgtcgaaaatcttctcctgttgagcaaagccaagcttgtgccttcagagcgggaagctagcccctccaatagttgtcaggactctaccgacaccgagtctaacaatgaggaacagcgctcaggcctcatctatttgactaatcacattgcacctcacgcccgtaatggactgtcgctgaaggaggagcatagagcctatgatctcctgcgagcagcctctgaaaatagtcaagatgcgctgcgcgttgtgtctacctctggcgagcagatgaaggtgtataaatgcgagcattgccgggtgctgttcctcgaccacgttatgtataccatccacatggggtgtcacgggttccgcgatccgttcgaatgcaacatgtgcggctaccatagccaggaccgttacgagttctcaagccacattacacggggtgagcaccgtttccatatgagctag

SEQ ID NO: 226605 - DNA, 1299 bp, synthetic construct
  misc_feature 1..1299: note = Description of Artificial Sequence: Synthetic coding sequence
  source 1..1299: mol_type = other DNA
atggatgctgacgaagggcaggacatgagccaggtctctgggaaggaatctcctcccgtgtccgataccccagacgaaggagacgaacccatgcccataccagaagacctgtctactacatccgggggtcagcagagcagcaagtccgaccgcgttgtggcaagtaatgttaaagtcgaaacccagtctgacgaagagaacggaagagcctgtgaaatgaacggcgaggaatgcgcggaagatctgaggatgctggatgcttccggcgaaaagatgaacgggagccaccgcgatcaggggtccagtgctctgtcaggggtgggcggtatccgattacccaatggcaagctgaaatgcgacatctgtggaataatctgtatcgggccaaacgtcctcatggtgcacaagcgttcgcacaccggggagcgtccgttccagtgtaaccagtgtggagccagctttacgcagaaaggcaatctgctgagacatatcaagttacactcaggcgagaaacctttcaagtgccatctctgtaactatgcatgccgccgtcgcgacgcattaaccggacacctgcgcacccattctggggacaagggcctgtctgataccccttacgactcgtcagctagctacgagaaggaaaatgagatgatgaaaagccacgtgatggaccaggctattaacaacgcgatcaattatttaggtgcggagagcctgagaccgctcgtgcagacccccccagggggaagcgaggtggtccctgtcatctctcccatgtatcagctgcataagccccttgccgagggaactcctcgtagtaaccacagcgcacaggattcagcagtggagaacctgctgctgctaagcaaggctaagctggtcccttccgagcgcgaggcaagccctagcaactcttgccaagactctaccgatacagaatcaaacaacgaggagcaacgaagtggtttgatatacctgaccaaccacattgctccccatgccaggaacggactgtcacttaaagaggaacaccgggcatacgatctgctacgagctgcctcagagaattctcaggatgccctcagagtggtgtctacttccggagaacagatgaaggtgtataagtgtgagcactgccgcgtgttgttcttggatcatgtgatgtacacgattcatatgggctgtcacggatttcgggatccctttgagtgtaatatgtgcggctatcattctcaagatcgatatgagttctcatcccacatcacaaggggcgaacatagattccatatgagctag

SEQ ID NO: 226606 - DNA, 1434 bp, synthetic construct
  misc_feature 1..1434: note = Description of Artificial Sequence: Synthetic coding sequence
  source 1..1434: mol_type = other DNA
atggatgcagacgaaggccaggatatgagccaggtgtccggcaaagaatcccctcctgtgtcagacacgcccgacgagggagacgaacctatgcccatccctgaggatctgagcactaccagcggcggacagcaatcctctaagagtgaccgggtcgtcgcctcaaacgtgaaggtggagactcagtctgacgaggaaaatgggagggcttgcgaaatgaacggagaggaatgcgccgaagaccttagaatgttggacgcttcaggcgaaaaaatgaacgggagccaccgtgatcaaggctcctccgccttatctggtgtggggggaatccgcctcccaaacggaaaactgaaatgcgacatatgcggtatcatttgtatcgggccaaacgtgctgatggtgcataaaagatcacataccggcgaaaggcctttccagtgtaaccaatgtggggcatcctttacgcaaaagggcaatttactgaggcacatcaagctccatagcggggagaagccattcaagtgccatctgtgtaattatgcatgtaggaggagggacgcactgactggccacctgcggacccactctgtcattaaagaagaaaccaaccactcagaaatggctgaggacctgtgcaagattggtagtgagagatcgctcgtgttggaccgcttggcgtccaacgtggcgaagagaaaatcaagcatgcctcagaaattcctcggagacaagggtctctctgatactccctacgattcatccgcctcctacgaaaaggagaacgagatgatgaagagtcatgttatggaccaggctattaacaatgcgatcaattacctgggagcggagtcactgaggcccttggtccagacaccacctgggggttctgaggtggtgccggtcatcagccccatgtatcaattgcataaaccactggccgaggggacccctcggagtaaccacagcgcccaggactcagcagtggagaatctgctgttgctttctaaggctaagctggtccccagtgaacgtgaggcaagtcctagtaactcctgtcaggactccaccgatacagaatctaataatgaagagcagcgctcaggcctgatttacctcactaatcacattgcgccacacgccagaaacggcctctccttaaaagaggagcacagagcatatgatctcctgcgcgctgcctctgagaactctcaggatgccctgcgggttgtgtccacatccggagaacagatgaaggtttataagtgcgagcattgcagagtcctatttctggaccatgtgatgtacacaatccacatgggatgtcacggattccgtgatccatttgaatgcaatatgtgtggatatcactctcaagaccgctacgaattctcttcacacataacgcggggtgagcacagattccacatgagctag

SEQ ID NO: 226607 - DNA, 1299 bp, synthetic construct
  misc_feature 1..1299: note = Description of Artificial Sequence: Synthetic coding sequence
  source 1..1299: mol_type = other DNA
atggacgccgatgagggccaggatatgtcacaggtgagtgggaaggagagcccaccggtgtccgatacgcccgatgaaggagacgagccaatgcctatcccagaggatttgtcaactactagtggcggtcaacagtcatctaaatccgacagggtagtcggcgagaggcctttccagtgcaaccagtgtggcgcttcctttacgcagaagggcaacttgctgagacatattaagttacatagcggcgagaaaccattcaaatgtcacctgtgcaactatgcctgtcgccgaagagacgccttgaccggacacttacgaacccactcagtcggaaaaccacacaaatgcgggtattgtggacggagttacaaacagaggtcaagcctggaggagcacaaggagcgatgtcataattatttggaatctatgggattacccggaaccctgtatcccgtcataaaagaagagacaaaccatagcgaaatggccgaagatctctgtaagatagggagcgagcgaagcctcgtgctcgatcgactggcgtcgaacgtcgcaaagaggaagagctccatgccccaaaaatttttgggtgataagggactgtccgacacaccttacgacagtagcgcctcttatgagaaggaaaacgaaatgatgaaaagccatgtgatggaccaggccataaacaacgccattaactatctgggagcagaaagcctacggccattggttcagacacctccaggcggttctgaggtggttccagtaatctctccaatgtaccagctccacaagccactggctgagggcacccccagaagcaatcacagcgcccaggactctgccgtagagaacctcctgctcctgtcaaaagccaagctggtgccatcagaaagggaggcgagcccaagtaacagctgtcaggatagcacagatacagaatctaacaacgaggagcagagaagtggactgatctacctaacgaatcacattgcaccccacgccaggaatgggctttcactcaaggaggagcatagagcatacgatctcctccgggcagccagtgagaactcccaagacgccctgagggtagtgagcacgtcaggagagcaaatgaaggtatataagtgcgaacattgtcgagtgctgttcttagaccacgtgatgtacacaattcacatgggatgccacggcttccgagacccgttcgagtgtaatatgtgtggctatcattcacaagatcgctatgaattttccagccatatcactcgcggtgaacaccgcttccatatgtcctag

SEQ ID NO: 226608 - DNA, 1434 bp, synthetic construct
  misc_feature 1..1434: note = Description of Artificial Sequence: Synthetic coding sequence
  source 1..1434: mol_type = other DNA
atggacgccgacgaggggcaagatatgtcccaggtgtccggtaaagaatccccacccgttagcgacaccccggacgaaggagacgaacccatgccaattccagaggacctgagcaccacctcaggcggtcagcagagttctaaaagcgaccgagtggtggcaagcaatgtaaaggtggagacccagagcgacgaagaaaatggaagagcttgtgaaatgaacggagaggagtgcgcagaggatctaagaatgctcgacgctagtggcgagaagatgaatggtagccatcgcgaccagggaagcagcgcactgagtggagttggtggaatccgtctgccaaatggtaagcttaagtgcgatatctgtggaattatctgcataggaccgaatgtgctgatggtgcataagagatcccacacaggggagaggccattccagtgcaaccagtgcggcgcttccttcacgcagaagggtaatttgctgaggcacatcaagctgcactcgggggaaaaaccatttaagtgtcatttgtgcaactatgcttgccgaagacgcgatgctctcactggacacctgcgcactcatagtgtaattaaggaagagaccaatcacagtgagatggccgaggacctttgcaaaatcggatcagaacggagtctcgtgcttgatcgtttggcatccaatgtagccaagcggaagtctagtatgccacagaagtttttgggagacaaaggactcagcgatacaccatacgactcatctgccagctacgagaaagaaaacgagatgatgaagagccacgtgatggatcaggctatcaataacgccatcaattacctgggagcagagtccctgcgacccctggtccagacacccccaggcggttccgaggtggttcccgtgatttcgcccatgtaccagctgcacaaaccgctcgcagagggaactcctaggtccaaccactctgcccaagatagcgcagtggaaaatctgctcctcctgtcgaaggctaagctggttccctccgagagggaggccagcccctcaaactcctgtcaggattcgacagataccgaatccaacaacgaggagcagagatccggcttgatttacctcaccaaccacatcgcccctcacgccagaaacggactgtcactgaaggaggagcacagagcctacgatctcctgcgagctgcctctgagaacagtcaggacgcgcttcgagtggtgtccacctccggcgagcagatgaaagtttacaagtgcgagcactgtagagtgctcttcttagatcatgtcatgtacacaatccacatgggttgccatgggttcagggatcccttcgaatgcaatatgtgcgggtaccacagtcaggatcgatatgaattttcatcccatatcactagaggggagcatcgtttccatatgtcctag

SEQ ID NO: 226609 - DNA, 681 bp, synthetic construct
  misc_feature 1..681: note = Description of Artificial Sequence: Synthetic coding sequence
  source 1..681: mol_type = other DNA
atggatgccgacgaggggcaggacatgtcacaggtgtctggcaaggaatcccctcctgtcagtgacacgcctgatgagggagacgagccaatgcctatccccgaagatcttagcacaacaagcggtggccagcagtctagtaaatccgatcgagtggtggcgtccaatgttaaagtggagacacagtccgacgaggagaatggacgggcatgcgaaatgaatggggaagagtgtgctgaggatctgagaatgctagacgctagtggcgaaaaaatgaatggctcccatcgggaccaaggaagcagcgctctgagcggggtggggggtatcaggttgcccaatggcaagctcaaatgtgatatttgcgggattatctgtatcgggcctaatgtgctcatggtgcataagcgaagtcacaccggggagaggccttttcaatgtaatcagtgcggcgcttccttcactcaaaaaggaaatcttctacgtcacattaagctccacagcggagagaaaccgttcaaatgccacttgtgcaattacgcttgcagaaggcgcgacgcccttaccggtcacctccgcacgcattctgtgatcaaggaggagacaaatcattccgagatggcagaggacctctgcaagatcggcagcgaaatcagccgggctggccaaacttccaaatag

SEQ ID NO: 226610 - DNA, 1758 bp, synthetic construct
  misc_feature 1..1758: note = Description of Artificial Sequence: Synthetic coding sequence
  source 1..1758: mol_type = other DNA
atgcataccccaccagcgctgcccaggcggttccaaggaggaggcagagtgcgaacacccggatctcataggcagggcaaggataatttagagcgtgacccatctggaggctgtgtgcccgacttcttaccacaggcacaggattccaaccattttattatggagtccttattctgtgaatcttccggggactcatccctggagaaggaattcctcggagccccagtaggcccaagtgtttccactcccaattctcagcactccagcccatcccgctctttgtccgccaatagcatcaaagtagaaatgtactcggatgaagaaagcagtagacttctgggtccagacgagagactgttagagaaagacgactccgtgatcgtggaagattctctgtcggagcctctgggatattgtgatggcagcgggccagagccccatagccccggaggaattcgtctccccaatgggaagctgaagtgtgatgtttgtggcatggtgtgtataggccctaatgtgctgatggttcataagcgatcacataccggtgagagaccattccactgcaaccaatgcggtgcctcctttactcaaaagggaaatttgttgaggcatataaagctgcattccggcgagaagccattcaaatgtcctttctgcaattatgcctgccgcagacgagacgctcttacaggccatttgcgcacacactctgtgtcatcccctactgtgggcaagccttataagtgcaactactgtgggagatcatacaaacaacagtccaccttggaagagcacaaggagaggtgccacaactaccttcagtctctgtcaactgaggcccaagctctggctgggcagcccggagatgaaattcgtgatctcgagatggttcctgacagcatgctgcactcgtcatccgaacgcccaactttcatagaccgactggctaattctctgacgaaacgtaaacggagcacacctcagaagtttgtgggggagaagcaaatgagattttctctatccgatctcccatacgacgttaactctggcggatacgagaaggatgttgagcttgtcgcacaccatagtctggagccgggattcggaagctccctcgccttcgttggggctgagcacctcaggcccctaaggctgcctcctacgaactgcatcagcgagctcacacctgtgatatcatcagtgtatactcaaatgcaacccttacccggtagattagagttacccggaagcagggaagcgggtgagggcccagaggatttggccgacggtggccctctactgtacaggcccaggggccctctgacagatcctggggcaagccccagcaatggttgccaagactcgactgatacagagagcaaccacgaagaccgggtagcaggggtcgttagtctgcctcagggccctccccctcagccgccaccaactatagtggtggggagacacagccccgcatacgccaaggaggacccgaagccacaggagggtctgttgcgtggcaccccaggaccgagcaaagaggtccttagagtggtgggcgagagtggagaaccagtgaaagctttcaagtgcgagcactgcagaatcctctttctggaccacgtgatgttcacaatacacatggggtgccatggcttcagagaccctttcgaatgtaatatctgtggctaccatagtcaagaccggtacgagttctcctcacacatcgtgagaggcgagcacaaagtcggttag

SEQ ID NO: 226611 - DNA, 1452 bp, synthetic construct
  misc_feature 1..1452: note = Description of Artificial Sequence: Synthetic coding sequence
  source 1..1452: mol_type = other DNA
atgtattccgatgaagaatcttcaagactcttggggcctgacgagagactgctggagaaggacgattctgtcattgtggaagactctctgagcgaacctctgggctactgcgacgggagtggtcctgaaccccactctcccggtggcattcgacttccaaacggtaaactcaagtgtgacgtgtgtggcatggtatgtatcggcccaaacgttctcatggtccacaagcggagccacacgggggagcgcccttttcactgcaaccagtgcggcgcatcgttcacacaaaaaggtaatttgctgcgtcatatcaagctccactcaggcgagaaacctttcaagtgtcccttttgcaattacgcctgcaggcgacgggatgctcttaccggccacctgagaacccattctgtgagctcgcctaccgtgggaaaaccctacaaatgtaactattgcggcagaagctacaagcagcagtccacccttgaggaacataaggagagatgtcacaactatctccagagcttgagcacagaggcacaggcgttagcaggtcagccaggcgacgagatcagggatctggaaatggtccctgattctatgttacatagcagtagtgaacgcccaacttttatcgaccggttagctaacagcctgactaaaaggaagcgctctactccccagaagttcgttggagaaaagcagatgaggttctctctctcagatttaccctacgatgtgaactcaggtggatacgaaaaggacgtggagctcgtggcacaccattctcttgagccaggcttcgggtcctctctggcctttgtcggggctgaacacctgcgacctctgcgcctgcccccaacgaactgtatctcagagcttacgcctgtcatctcgtctgtgtatacgcagatgcaacctctgccaggccgtttagaactacctggctcaagagaagccggagaaggcccagaagatttggccgatggaggcccactgttgtacaggcccagaggaccactcacggacccaggagccagcccctcaaacggctgtcaggacagtaccgacacagaaagtaatcatgaggaccgcgttgccggagttgtgtctttgccgcagggtcctccaccccagcccccaccaactatagtcgtagggagacactcgcctgcgtacgctaaggaggatcctaaaccgcaggaaggacttctcagaggtactcccggacctagcaaagaggttctccgagtcgttggggaatccggtgaacccgtgaaagcctttaaatgtgagcactgtaggattttgtttttggaccatgtcatgttcacaatccatatgggatgccacggatttcgggatcccttcgagtgcaatatttgcggctaccacagtcaggacagatacgagttctctagccatatcgtaagaggggaacataaagtcggctag

SEQ ID NO: 226612 - DNA, 1758 bp, synthetic construct
  misc_feature 1..1758: note = Description of Artificial Sequence: Synthetic coding sequence
  source 1..1758: mol_type = other DNA
atgcacacaccgccagctttgccaagacggtttcaaggcggtggtagagtcagaacgccgggatcgcacagacagggaaaggataatttagaaagagacccaagcggtggctgtgtccccgatttccttccccaggctcaggatagtaaccatttcattatggagtctctattttgcgagtcgtccggcgatagctctttggagaaagagtttttaggcgctcccgtggggccttctgtaagtactccaaatagccaacacagttcccccagcagaagcctgagtgccaactctatcaaggtggaaatgtacagcgacgaggaatccagccgtctgctcggcccagatgaaaggttattggaaaaggacgacagcgtgatagtggaggatagcttatcagagcctctgggatattgtgatggcagcgggcctgagcctcattcaccaggcggaatccgcttacctaatgggaaactaaagtgtgatgtatgtggcatggtttgcatagggccaaacgtcctgatggtgcataaacggtcacatactggggagagaccattccactgtaatcagtgcggggcatcatttacccaaaaaggcaatttgcttaggcatataaagttgcatagcggtgagaagccattcaaatgcccattctgcaattacgcatgcagacggagggacgctttgaccggccatcttcgtacacatagtgtaagctcacctaccgtaggcaaaccatataagtgcaactactgtggccgtagttataagcagcagagcacgttagaagaacataaggagagatgtcacaactatctccaaagccttagcaccgaagcgcaggccttagccggacaacccggtgacgagatccgcgatctggagatggtccccgactccatgctacactcctcttccgaaagaccaacattcatcgatcggctcgccaattctctaaccaaacgcaagagatcaacaccccaaaagttcgttggtgagaaacaaatgcgcttcagtctgtcagatttgccctatgatgttaatagtggcggttacgagaaagacgtggaacttgttgcccaccattcccttgaaccagggtttggatcatccctcgctttcgtgggagccgagcatctcaggccgctgcgcctcccaccaaccaactgcatctcagaactgacgcctgtgatcagctccgtgtatacgcagatgcaacccctgccgggacgactggagctgcctggcagcagagaggctggagaaggccctgaggatttggctgacggcggaccactgctgtatcgacctaggggtcccctgaccgatccgggtgcctctccttctaacgggtgtcaggattccactgacacagagtctaaccatgaggatagagttgcaggcgtggtgtctcttccccagggcccaccaccacagccaccacctaccattgtcgtggggcgacacagccccgcttatgccaaggaggatcccaagccccaggaggggttgttgagaggcaccccgggaccttcaaaagaggtgctccgcgtggtgggagagagcggagaacccgtgaaagcctttaagtgcgagcactgtaggatcctcttccttgatcacgttatgtttacgattcatatggggtgtcacgggtttagggacccgttcgaatgcaacatctgtgggtatcatagccaggaccggtacgagtttagctcacatattgtccggggagaacacaaggtggggtag

SEQ ID NO: 226613 - DNA, 33 bp, synthetic construct
  misc_feature 1..33: note = Description of Artificial Sequence: Synthetic coding sequence
  source 1..33: mol_type = other DNA
atgcacacacctcctgcgctaccacggagatag

SEQ ID NO: 226614 - DNA, 1863 bp, synthetic construct
  misc_feature 1..1863: note = Description of Artificial Sequence: Synthetic coding sequence
  source 1..1863: mol_type = other DNA
atgaacaactttattttgcttgaagagcagctcatcaaaaagagtcaacagaagaggcgaacaagcccaagtaattttaaggtgagattcttcgtgctcactaaggctagcctcgcctactttgaagacagacatgggaaaaaacgcactctcaaggggtccatcgaactcagccggataaaatgtgtcgagatcgtcaagagtgatataagcattccctgtcactacaagtaccctttccaggtggtccacgataattacttgctatatgtcttcgctcctgatagggagtctcggcagcgctgggttctggcgctgaaagaggaaaccaggaacaataactccttggttcccaagtatcacccgaatttctggatggacgggaaatggcgctgttgctctcaacttgagaaactagcgaccggttgcgctcaatatgatcccaccaaaaacgcctcgaaaaagcccctcccacccacaccagaggataatcgccgacccttgtgggaacctgaggagacagtggtcattgcactatatgattatcagacaaacgacccgcaagagctggcccttagacgaaacgaagagtactgtttgctggattccagcgaaattcattggtggagagttcaggatcgaaacggacatgagggctatgtaccttccagctatctcgtggaaaaaagccctaataatcttgagacctacgagtggtataataagagcattagcagggataaggctgagaagctgctcctggatacaggaaaggagggcgctttcatggtacgagatagcaggaccgcgggaacctatactgtcagtgtctttaccaaggccgttgtgtccgagaacaatccttgcataaaacattaccacatcaaggagactaatgataacccgaaacgctattacgtcgctgaaaagtacgtctttgatagcattccgctcctgatcaactatcatcagcacaacggtggcggactcgtcacacgacttaggtatccagtgtgcttcggcagacagaaggctccggtgacagccggactcaggtacggtaaatgggtcatagacccgagtgagctcactttcgttcaggagattggcagtggccagtttggcctggtgcacctcggatattggctgaacaaggataaagtggctattaaaaccattcgtgagggcgctatgtccgaggaagacttcatcgaggaagccgaggtgatgatgaagcttagccatccaaaacttgtccaattatacggcgtctgcctcgagcaggctcccatctgcttagtttttgaattcatggagcacgggtgcctatcagattatctgcgtactcagaggggcctgtttgccgcagagacactactgggaatgtgtctagatgtgtgcgaaggcatggcatacttggaggaggcctgcgtgatccatcgagaccttgctgcacgaaactgtctcgtaggggagaaccaggtgataaaggtgtcggacttcggtatgactcgcttcgtgttggatgatcagtacacaagttccaccggcacaaagtttccggtgaaatgggcatcgcccgaggtgttcagcttctcaagatattcatcaaagagtgacgtgtggtcattcggcgtcttgatgtgggaagtcttctccgagggtaagatcccttacgaaaataggagcaattctgaggtggtggaagacatttctacaggctttcggttatataagcccagactggcaagcacccacgtgtaccagattatgaatcactgctggaaggagcggcctgaggaccggccagcgttctcaagactgctgcgacagctggccgaaattgcagaatctggattgtag

SEQ ID NO: 226615 - DNA, 1899 bp, synthetic construct
  misc_feature 1..1899: note = Description of Artificial Sequence: Synthetic coding sequence
  source 1..1899: mol_type = other DNA
atggagaccccagccgctgccgctccagctggcagcctcttcccttcattcctacttctcgcctgtggaaccctcgttgctgccctcttgggggcagcccacaggctcgggttgttttatcagttgctccacaaagtggataaggcttccgttagacacggaggggaaaatgttgcggctgtgctgagagcacacggagtgaggttcatttttactttggttggcggacacatatcccctctgctggtggcttgtgagaagctcggaatccgagttgtcgacactaggcacgaagtgactgccgtgttcgccgctgatgcgatggcacgattgagcggaaccgtgggtgtggctgcggtcaccgccggtccagggctgaccaacacggtgacagcagtgaaaaacgcccagatggcacaaagtcccattctgctgctagggggagcagctagcacgctgctgcagaaccgcggagcactgcaggccgttgatcaactgtcactgttccgccctctgtgtaaattttgcgtcagcgtgagacgcgttcgtgacattgtccccaccttgcgggcagctatggcagctgcccaaagtggcactcccggaccggtgtttgttgagctgccagtggatgtgctgtacccatatttcatggtccagaaagaaatggtccctgcgaagcctcccaagggtctggtggggagggtggtgagttggtatctggagaattacttagccaacctgttcgccggagcgtgggaaccgcagcccgagggcccattgccactcgatatacctcaggcttcaccccaacaggttcaaagatgcgtcgagatcctatcccgcgcaaaacggccactcatggtgctcggctcacaagctctgctcactccaacttctgcagacaagttgcgggctgccgtagagacacttggggtaccctgttttctaggcggtatggcaagaggtctgctcggtcggaaccatcccctgcacatacgcgagaatcgctcagcagcgctcaagaaagcagatgtaatcgtcctcgcagggacggtgtgtgattttcggctctcatatggaagagtgctctcgcacagttctaagattattatcgttaaccgcaatagagaagaaatgctgctgaattccgatatcttttggaaaccacaggaagccgttcagggtgatgtggggtcctttgtactcaagctcgtggagggactgcaagggcagacatgggcgcctgattgggtcgaggaactcagggaagctgatagacaaaaagaacagacgtttcgtgagaaggcagcgatgcctgtcgctcaacacctgaatccggtacaggtgcttcagctggtcgaagagaccctccctgacaactccattctggttgtggacggaggcgacttcgtcggcaccgccgcacatctggtgcagccccgtggtccgttaagatggctagaccccggagcctttggcactttaggggtgggcgcaggctttgcccttggagcgaaactttgccgtcctgacgcggaggtctggtgtctctttggcgatggagccttcgggtacagcctgatcgaatttgatacttttgtgcggcataagatccctgttatggccttggtcgggaatgacgccggatggacacaaatttcccgcgaacaggtgccttcattaggtagtaacgttgcatgtggactggcgtacactgattaccataaggctgccatgggtctcggagccagaggcctcctcctcagccgggaaaacgaggatcaggttgtcaaagtcctccacgatgcccagcaacagtgccgggacggccatcccgtggtggtcaacattcttattgggagaacagattttcgtgatggctccattgcagtgtag

SEQ ID NO: 226616 - DNA, 678 bp, synthetic construct
  misc_feature 1..678: note = Description of Artificial Sequence: Synthetic coding sequence
  source 1..678: mol_type = other DNA
atggagactcccgctgccgcagcccctgctggttcactttttccaagttttctcttgctcgcatgtggaacccttgtcgccgcattgctaggggctgctcaccggcttggattgttctaccagctgctgcataaggtggataaggcctctgtccgtcacggcggagaaaacgtggccgcagtgctccgtgcccatggagttcgctttattttcaccctggtgggaggtcatatctcccccttacttgttgcttgtgagaaactgggaattagagtcgtagatacgcgacacgaagtgactgccgttttcgcagccgacgctatggctcgcttgtctggtacggttggcgtggctgctgtaaccgcaggacctgggcttactaacacagtgacagcggtcaaaaatgcccagatggctcagagccctatccttttgttgggaggggcagcatcgacattgctgcagaaccgaggggctctgcaggccgtagatcaactctctctcttccgtccaccccctgggtgcggacagcacccccactgggaagatgggctgcctcggtggctgcactgttgcattggaccttgcggatccggcaggctggccgcattcctgcccctggactgtgtgcaattagtgtggtctctgatcatcgcctgccctggaccgattccctag

SEQ ID NO: 226617 - DNA, 789 bp, synthetic construct
  misc_feature 1..789: note = Description of Artificial Sequence: Synthetic coding sequence
  source 1..789: mol_type = other DNA
atggagacaccagctgcggctgctcccgcaggatctctgtttccatcttttttactgctggcttgcggtactcttgtcgccgctctgttgggtgcagctcatcggctcggccttttctatcagctcctgcataaagtggacaaagccagcgttcgccacggcggagaaaatgtcgccgctgtcctgcgcgctcacggagtccgatttatcttcacgcttgtgggcggacacataagcccactgcttgttgcttgcgagaaacttggcatcagagtggtggacacacgacacgaggtgacagctgtgttcgccgctgacgcaatggcaagactgtctggaaccgtgggggtggcggctgtgacagctggacccggactgacgaacacggtgactgccgtaaaaaacgcccagatggcacagtcccccattctgctcttgggtggcgctgcatctacactcctgcagaaccgaggcgcactccaggctgttgatcaactgtcccttttccgcccactgtgcaagttttgtgtgagcgtaaggcgtgtgagggacattgtgcctactcttcgcgctgcaatggccgctgcacaatccggcacccctggccctgtcttcgtcgaactgcctgtagatgtgctgtacccatatttcatggtgcagaaggagatggtgcccgctaaacctccaaagggcctcgttggcagagttgtcagctggtatctagagaactatctcgcaaatctgtttgccggagcctgggagccccagccagaagggccactcccttag

SEQ ID NO: 226618 - DNA, 501 bp, synthetic construct
  misc_feature 1..501: note = Description of Artificial Sequence: Synthetic coding sequence
  source 1..501: mol_type = other DNA
atggagacgcccgcagccgctgcacccgcagggagcttgttccctagctttctgctgctagcctgcgggacgctcgttgcagctctgctcggcgctgcacataggctggggttgttttaccagctgctgcataaagtcgataaagctagtgtccggcacgggggagaaaatgtggccgcagtgcttagggcgcatggcgttcggttcatctttacgctggtaggaggacatatctcccccctgctggtggcttgcgagaaactgggcatcagagtggttgacacgaggcacgaggtgaccgccgtctttgcggcagatgccatggcccgtctttccggaactgtcggcgtggcggcagtgacagctggccctggattaactaacaccgtgacagcagttaagaacgcccagatggcgcagtcccccatactcctcctaggcggagctgcttccaccctgcttcagaaccgaggcgctctacaggctgtggaccagctttag

SEQ ID NO: 226619 - DNA, 621 bp, synthetic construct
  misc_feature 1..621: note = Description of Artificial Sequence: Synthetic coding sequence
  source 1..621: mol_type = other DNA
atggccgcaactagatgtttgaggtggggtctgagtagagcaggtgtgtggctgctacctcctccagcaaggtgcccccgaagagccttacacaagcagaaggacgggacagagtttaaatccatttattctctcgataagctttaccccgaaagtcaggggtccgatacagcctggcgcgtgccaaatggagccaagcaggctgactcggatatcccactggaccgccttaccatctcatattgtagatcatccgggccaggaggacaaaacgtcaataaagtgaattctaaggccgaggttagatttcacctggccaccgccgagtggatcgctgagcccgttcgccagaagatagctattactcacaagaataagatcaatcgactcggtgagctcatcctgacctcagaatcttcacggtaccagtttaggaatttggccgattgtttgcagaaaatcagagacatgattactgaagcctctcagacccccaaagagccaacaaaagaggatgtgaaactacatagaattcgcattgaaaatatgaatagggagcgcttacgccagaagcgcatccactctgcggtgaagactagccggagagttgacatggactag

SEQ ID NO: 226620 - DNA, 471 bp, synthetic construct
  misc_feature 1..471: note = Description of Artificial Sequence: Synthetic coding sequence
  source 1..471: mol_type = other DNA
atgtgccattcacgcagctgtcatcccactatgaccattctgcaggcacctacccctgcacctagtacgatccccggacccagacgtggctcgggacctgaaatcttcacctttgatcctctgcccgagcccgctgcggctcctgctggccgaccatccgcaagccggggtcaccgcaagcgtagcagaagggtgctttatcctcgagtagtccggagacagttgcctgtcgaagagcctaatcccgctaagagactgctgtttctgctgctaacaatcgtgttctgccagattctcatggctgaagagggagtgcctgcaccgttgccaccagaagacgctcctaatgccgcttccttagcccctacaccagtctctgcggtcttggagccgtttaacttgaccagcgagcctagtgattacgcactggacctcagcacttttttgcagcaacatccggcagctttctag

SEQ ID NO: 226621 - DNA, 417 bp, synthetic construct
  misc_feature 1..417: note = Description of Artificial Sequence: Synthetic coding sequence
  source 1..417: mol_type = other DNA
atgtgtcattctcggtcttgtcaccctacaatgacgattctgcaagcacccacccccgcacctagcactataccaggccctcgcaggggttcaggaccagagatcttcaccttcgacccccttcctgagcctgcagccgcacccgctggtaggcccagcgccagccgtgggcatcggaaaaggtctaggcgcgttttataccctagggtggtgagtattgcggaagtgggcattcgtggcgtccgatgtccgggagttactggcgaacggcctgactcacggggtctggacctgacctgcttactgttctgtttgcccctggggcctgcaccagctgcttctagaggtaccgagccctctcagaaagcatccctttccgccgctcaccaccgcttgctgccagacccggatggctag

SEQ ID NO: 226622 - DNA, 579 bp, synthetic construct
  misc_feature 1..579: note = Description of Artificial Sequence: Synthetic coding sequence
  source 1..579: mol_type = other DNA
atgtgtcattccaggagttgtcacccgaccatgactattctccaggcaccgactcctgccccatcaactattcctgggccacggagaggctcagggcctgagattttcacgtttgaccccttgccggaacctgcagccgcaccagcgggacgccctagtgccagccgcggtcatcgaaagaggtcccgccgtgtgttaccgtcgagcggagagtaccgacgctcagggcacagtaggggcgctctgccgtggagccattgggggaccacacgtctgcaggggcttgacctgacatgtctgttgttctgcctccccctggtgcggagacagttgcctgtagaggagcctaatcccgcaaagaggttgctgttcttactgttgaccatcgttttctgccaaattctcatggctgaagagggcgtgcccgcacccctcccacctgaggatgccccaaatgctgctagtctcgcacccaccccagtgagcgccgtgttggaaccgttcaacctcacaagcgagccgagcgactacgccctcgacctgagcacatttctgcagcaacaccctgccgctttctag

SEQ ID NO: 226623 - DNA, 471 bp, synthetic construct
  misc_feature 1..471: note = Description of Artificial Sequence: Synthetic coding sequence
  source 1..471: mol_type = other DNA
atgtgtcattcacgaagctgccatccaaccatgactattctgcaggcacctactcccgctccttccacaattcctggacctcgccgaggctcgggccctgagattttcactttcgatccactcccggagcccgcagctgcccctgctggtaggcccagtgccagcagggggcaccgcaaacggagtcgcagagtgttatatcctcgcgtggtaagacgccaacttcccgttgaggagccaaatcctgccaagagattgctcttcctgctacttacaatcgtcttctgccagattctgatggctgaagagggagtgcccgctccgctgcctccagaggacgcccctaacgcagcctccctcgcacccaccccagtcagccctgttctggagccctttaatttgaccagtgagccttctgattacgccttggatttgtcaacttttctgcagcaacaccccgcagctttttag

SEQ ID NO: 226624 - DNA, 417 bp, synthetic construct
  misc_feature 1..417: note = Description of Artificial Sequence: Synthetic coding sequence
  source 1..417: mol_type = other DNA
atgtgccactcgagatcttgccacccgaccatgacgatcctgcaggcacctacccccgctccctctacaattcctgggccaagacgaggtagcggcccagaaatattcacctttgatcccctgcctgaacctgccgcagctcccgcaggcaggccttccgcttctcgcggtcacagaaagaggagccgccgagtgttataccctcgggtggtgtcaatagctgaggttggaatcagaggtgtgcggtgccccggtgttaccggggagaggcccgacagccggggactggacctgacctgcctgctgttttgccttcctctcggccctgctcccgctgcatccagagggaccgagccatcccagaaagcttccttgtccgcagcgcaccaccggttactgccagatcccgatggatag

SEQ ID NO: 226625 - DNA, 417 bp, synthetic construct
  misc_feature 1..417: note = Description of Artificial Sequence: Synthetic coding sequence
  source 1..417: mol_type = other DNA
atgtgccatagtcgctcttgccatcctacaatgacaatattgcaggctcccacccctgctccttcaacgatcccagggccaaggaggggcagtgggccagaaatctttacctttgaccctttgccggaacctgccgctgcgcctgctggcagaccaagcgcgagtcgagggcataggaagcgctcgcggagggttctctacccacgagtggtgtcgatcgccgaggttggcatcagaggcgtacggtgtcctggagttacaggggagcggccagatagtagagggctggacctgacttgcctgctgttttgtctccccttgggccctgctccagccgcatctcgcggaaccgaaccctcccagaaagcgtctctcagcgcggcacatcataggcttctgcctgacccagacggctag

SEQ ID NO: 226626 - DNA, 471 bp, synthetic construct
  misc_feature 1..471: note = Description of Artificial Sequence: Synthetic coding sequence
  source 1..471: mol_type = other DNA
atgtgtcatagcaggtcttgtcatcctacgatgaccatcttgcaagcccctacccctgccccatcgactattccagggcctcggcgtggaagcggccctgaaatattcactttcgaccctttgccagaaccggctgccgcacctgctgggcgtccctcagccagccgcggtcatagaaagcgatcccggagagtgctctatccaagggttgtgcggcgacaactgcctgtagaagagccgaatcctgccaagagattgctgtttcttctcctgactatcgtgttttgtcagattctaatggctgaggaaggggtcccagcacccttacccccagaggatgcacccaacgcagcgtccctggcacctacccccgtgtctcccgtgctcgagccgttcaatttaaccagtgaaccctcagattatgccctggaccttagcaccttccttcagcagcaccccgcagcgttctag

SEQ ID NO: 226627 - DNA, 417 bp, synthetic construct
  misc_feature 1..417: note = Description of Artificial Sequence: Synthetic coding sequence
  source 1..417: mol_type = other DNA
atgtgccactctagaagttgtcatccaaccatgactattttacaggctcctactcccgctcccagtacaatacccggacctcgccgtggtagcgggcctgaaatctttacattcgatccgttgcccgaacccgctgccgcacctgccggtcggcctagcgcctcgagaggccataggaaaagatctaggagagtcctgtacccacgggtggtttctattgccgaagtgggaattaggggtgttcgctgtcccggagtcaccggagagcgcccagactccaggggactagacctgacatgtttactcttttgtctgcctctcggtccagctcccgcagcaagccgcggtaccgagccatctcagaaagcatcactgtctgctgcccaccaccgcctcctcccggaccctgatgggtag

SEQ ID NO: 226628 - DNA, 471 bp, synthetic construct
  misc_feature 1..471: note = Description of Artificial Sequence: Synthetic coding sequence
  source 1..471: mol_type = other DNA
atgtgccatagcaggagctgtcacccgactatgaccatcctccaggctccaactcccgcaccaagcacgatccctggaccccgaagggggtccggccctgagattttcacttttgacccgctacctgagcctgccgcagctcccgctggtcgaccgagcgcctcgaggggccacagaaagcgcagtcggagagttttgtatccacgggtggtgcgccgtcaactgcccgtggaggagccaaaccctgccaagaggctgctatttcttctcttgaccattgtgttttgccagatcctcatggcggaagagggagtacccgctcctcttccaccagaggacgcccctaatgctgctagcttagctccgaccccagtgtcacctgtgctggagcctttcaacctaacgagcgagccaagtgattatgctctggatctcagcaccttcctgcagcagcatcctgccgctttttag

SEQ ID NO: 226629 - DNA, 417 bp, synthetic construct
  misc_feature 1..417: note = Description of Artificial Sequence: Synthetic coding sequence
  source 1..417: mol_type = other DNA
atgtgccatagcagatcctgccatcccaccatgacgattctgcaagcccctactccagcacctagcacaatcccaggcccaagaagaggctccggcccagaaatttttactttcgaccctttgccagaacctgcagccgcacccgcagggagacccagtgccagccgcggacacagaaagcggagtcggagggtgctctatccaagagttgtgtctatagccgaggttggcatcagaggagtaaggtgcccaggagttacaggtgagagaccagacagccgcggtctggacctgacctgtctgcttttttgtttgcctctcggcccagcccctgctgcttctcgcggtaccgaaccttcccagaaagcctctctgtctgctgcccatcatcggctgttgccagacccagacggatag

SEQ ID NO: 226630 - DNA, 471 bp, synthetic construct
  misc_feature 1..471: note = Description of Artificial Sequence: Synthetic coding sequence
  source 1..471: mol_type = other DNA
atgtgccatagccgatcttgccacccaaccatgaccattctgcaggcccctactcctgcacctagtaccatcccgggaccccgtcgaggctccggaccagagatcttcacatttgacccacttcctgaaccagccgctgccccagccggaagaccctcagcaagccgtggtcatcgaaaaaggtccagaagggtgttatatccgagggtggtccggagacaacttcctgtggaggagccaaatccagccaaaagactactgtttctgctgctgacaatagttttctgtcagattcttatggccgaagagggcgtgcctgccccactgccccctgaggacgcccctaacgcggcaagtctcgcgccaactcccgtctccccggtacttgagccgtttaatctcacgagcgaaccaagcgactacgctctggacctcagtaccttccttcaacagcacccagccgctttctag

SEQ ID NO: 226631 - DNA, 417 bp, synthetic construct
  misc_feature 1..417: note = Description of Artificial Sequence: Synthetic coding sequence
  source 1..417: mol_type = other DNA
atgtgtcacagcagaagctgtcatcccaccatgactatactacaagccccaactccagcaccatcgaccattccaggtccccgaaggggttcagggcctgagatatttactttcgatcctctgcctgagcccgctgcagcccctgccggaagacccagtgcatcccgcggacacaggaagaggagccggcgagttctctacccacgcgtggtgtccattgcagaggtcgggatccggggagttcgctgtcctggggtgaccggggagcgcccagatagccgaggtctagatctcacatgtctgcttttctgcctcccactgggtcctgctccggcagcctcacgtggcacagagccatcacagaaggcctctctgtcggctgcccaccaccgtcttctccctgatccagacgggtag

SEQ ID NO: 226632 - DNA, 471 bp, synthetic construct
  misc_feature 1..471: note = Description of Artificial Sequence: Synthetic coding sequence
  source 1..471: mol_type = other DNA
atgtgtcactctcgctcatgtcatccgaccatgacgattctccaagctcctactcccgcaccttcaactatccccggaccccgacgaggaagcgggcctgagatcttcacattcgatccactgcccgaacctgccgcagcccctgctggcagaccatccgcctctcgaggtcacaggaaacggtcaaggagggtactatatccaagggttgttaggcggcagctgcccgtggaagagcctaacccagctaagagactactcttccttctcttgaccattgtcttctgccagatcctgatggctgaggagggggtacccgctcctctacctcctgaggatgcgcctaatgccgcttcactggctccaacccccgtcagtcctgtgctcgagccttttaatctgacgagcgagccctctgactatgctctggatctgtccacttttctgcagcaacaccctgccgctttctag

SEQ ID NO: 226633 - DNA, 249 bp, synthetic construct
  misc_feature 1..249: note = Description of Artificial Sequence: Synthetic coding sequence
  source 1..249: mol_type = other DNA
atggcgttcaccttatatagcctcctgcaggcagcactcctgtgtgtgaacgcaatcgcggttctgcacgaggaacgctttttaaagaacattggctggggaaccgaccaaggtattggcggattcggcgaagaaccaggaattaagtcccagcttatgaacttgatccggagcgtccgcactgtcatgcgtgttcctttgataatcgtcaatagcatagctattgtactgcttcttttgttcggctag

SEQ ID NO: 226634 - DNA, 984 bp, synthetic construct
  misc_feature 1..984: note = Description of Artificial Sequence: Synthetic coding sequence
  source 1..984: mol_type = other DNA
atggagtttaaattggaggctcataggattgtatccatctcattaggaaaaatatacaactcaagagtgcagcgaggtggaatcaaactgcacaagaatctgctggtctctctcgttctgagatcggcgaggcaagtgtacctttcagacccatgtcccggtctgtacctggctggccctgctggcacgcctgctcccccaccgcagcagcagcccggtgaacctgctgccggtcccccagctgggtggggggaaccgcctcctcctgccgctagagcaagctggccagaaaccgagccccaacctgaaagatcttctgtatcagatgctccacgggtgggcgacgaagtgccagttgctaccgtgaccggagtaggtgacgttttccagggtggcgaggccgacgcgaccgaggcggcttggtccagagtggaggggccacgacaggccgcagctagggaggcagagggaactgccggagggtggggtgtgttccccgaggtgtcaagagcagcgcgaaggccttgtggctgccctctggggggtgaggacccccctggaaccccggctgccacgccacgagcggcttgctgttgtgccccacagcccgctgaggacgagccgcctgcccctccagccgtttgccccaggaagcggtgtgcagccggtgtgggtgggggacctgcgggatgccctgctccaggctctaccccattgaaaaagccccgacgaaatctggagcagcccccatccggcggtgaagacgatgatgcggaggagatggagactggcaatgtggccaatcttatcagcatttttggtagcagttttagtggtctgctccggaagtcccctggcggaggtagggaggaggaggagggcgaggagtccggcccagaagccgctgagcccggtcagatctgctgtgataagcctgtgctcagggacatgaatccctggagcactgccatcgtggctttttag

SEQ ID NO: 226635 - DNA, 420 bp, synthetic construct
  misc_feature 1..420: note = Description of Artificial Sequence: Synthetic coding sequence
  source 1..420: mol_type = other DNA
atggaattcaagttggaagcccataggatagtctcaatttcactgggcaagatatataattccagagtgcagaggggagggatcaagctgcacaaaaatctgcttgtgagtttagtgttacggtctgcaaggcaggtctatctgagcgatccttgtccgggtctatatcttgcagggcctgcaggtacacctgccccacctccccagcaacaaccgggagagcccgctgctgggccacccgcaggctggggtgaaccgcctccgccagcagcccgtgcttcgtggcccgaaaccgagccacaaccggagaggagcagcgtgtctgatgcccctcgcgttggcgacgaggtccccgtggctactgtcactggagtgggggacgtcttccagggtcgatctgctgccattagtagatgttag

SEQ ID NO: 226636 - DNA, 546 bp, synthetic construct
  misc_feature 1..546: note = Description of Artificial Sequence: Synthetic coding sequence
  source 1..546: mol_type = other DNA
atggaggccatgaacgtggaaaaggcctccgcggatggtaatctccccgaagtcatcagtaacatcaaggagaccctgaagattgtgtctcggacgcccgtaaacattacaatggcaggggactccggcaatgggatgtcgaccttcatatccgctctcagaaacaccggccatgaaggcaaggccagcccaccgacagagctggtgaaggccactcagaggtgtgcctcctactttagcagccactttagcaacgtggtgctttgggaccttccaggcaccgggtccgcaaccactacacttgagaactaccttatggagatgcagttcaacagatatgattttatcatggtcgcttccgcacaattctcaatgaatcatgtgatgctggcaaagaccgctgaggacatgggcaagaaattttatatcgtgtggacaaaattggatatggatctgtccactggtgctctccctgaggtgcaactgttgcagattcgtgaaaacgtgctggagaacctgcagaaagagagagtgtgtgagtattag

SEQ ID NO: 226637 - DNA, 1020 bp, synthetic construct
  misc_feature 1..1020: note = Description of Artificial Sequence: Synthetic coding sequence
  source 1..1020: mol_type = other DNA
atggccgctgaagatgagttgcagctgcccagattaccagaattattcgagaccggtagacagcttctggatgaagtcgaggtggccactgagcccgcaggctcacgtatcgtgcaggaaaaagttttcaaaggactggatttactggagaaggccgcagagatgctgtcccagctcgatttgttctcacgcaacgaagatctcgaagaaatagcatctactgaccttaagtatttgctggtgccagcattccagggggctctgactatgaagcaagtgaatccctcgaagcgactggaccatttacagagggcccgagagcattttatcaactatttaacccagtgccattgctatcacgtcgccgagtttgagctgccgaaaaccatgaataacagtgctgagaatcatacagccaatagttctatggcatacccctctctggttgcaatggcgtctcagcgccaggccaagatacagagatacaagcagaagaaagaactggaacaccggcttagtgcgatgaagtcagctgtggaaagcggccaagccgacgatgagagagtgagggagtattacttactccatctgcagcgatggatagacattagcctggaggagattgaaagcattgaccaggagatcaaaatcctgagggaaagagattcttcccgggaggcctccacctcaaacagttcaagacaggaaagaccaccagtcaagccctttatcttgaccaggaacatggcacaggctaaggtgtttggagctggctatcctagtttacccaccatgacagtgtctgattggtatgaacaacaccggaaatatggcgctctgcctgaccagggaatcgccaaggcggctcctgaggagttcaggaaggcagcgcaacaacaggaggagcaggaagagaaggaagaggaagacgatgaacagacattacacagagcccgtgagtgggatgattggaaggacacacatcctcgcggttacgggaaccgccaaaatatggggtag

SEQ ID NO: 226638 - DNA, 1020 bp, synthetic construct
  misc_feature 1..1020: note = Description of Artificial Sequence: Synthetic coding sequence
  source 1..1020: mol_type = other DNA
atggccgcagaagacgagcttcagcttccaagactgccagagctgttcgagaccgggaggcagctgctggacgaggtggaggtcgccactgagccggctggctcgcgcatcgtgcaggaaaaggtgttcaagggcctggacctgcttgaaaaagcagccgagatgctatcgcagctggacttattcagtaggaatgaggacctggaggagatcgcctccactgatctgaagtacctgttagtaccagcctttcagggagccctaaccatgaaacaggtgaatccatcgaaaagactggatcatttgcagagagcacgcgagcatttcatcaactatctcacacagtgccactgttatcatgtggccgagttcgaactacctaagaccatgaacaactctgccgagaaccacaccgctaactccagtatggcttatccttcccttgtggccatggcttctcagaggcaggctaagattcagaggtataagcagaaaaaggaactagagcaccggctgtccgccatgaagagcgcagtggagtccgggcaggccgacgatgagcgtgttagagaatactacctgctgcacttgcaacggtggatcgacatttcgcttgaggagattgagtctatagatcaagagatcaagatcctgcgggaacgagacagtagcagggaggccagtacttccaactcttcaagacaagaacgaccacctgtcaaaccatttatcctaaccaggaacatggctcaggccaaggtgtttggggctggctatccgagcctgccgacaatgactgtgtccgactggtacgagcagcaccgcaaatacggcgctttacctgaccaaggcatcgctaaagccgctccggaagagtttcggaaggccgcacagcagcaagaagaacaggaagaaaaggaggaggaggatgatgaacagacactacatcgggctagggaatgggacgattggaaggacacgcacccaaggggctatggaaataggcagaatatgggctag

SEQ ID NO: 226639 - DNA, 480 bp, synthetic construct
  misc_feature 1..480: note = Description of Artificial Sequence: Synthetic coding sequence
  source 1..480: mol_type = other DNA
atgaaaaatcatcttcttttctggggcgtgttagctgtcttcataaaggctgttcacgtgaaggcgcaggaggacgaacgaattgtcctagtcgataataaatgcaagtgtgctagaattaccagtagaatcatccgaagttctgaagatcccaatgaggacattgtcgaaagaaatataaggattatcgtgccgctcaataacagggaaaatattagtgaccctacaagcccgctgaggacacggttcgtgtaccatctgagtgacctctgcaagaaatgtgacccaacagaagtggagttggacaatcaaattgttaccgccactcagtccaatatctgcgacgaagattccgctaccgagacctgctacacttatgatcgcaataaatgttacaccgccgtggttccactggtgtacgggggtgaaacaaagatggtagagactgctcttaccccagatgcgtgctaccctgactag

SEQ ID NO: 226640 - DNA, 213 bp, synthetic construct
  misc_feature 1..213: note = Description of Artificial Sequence: Synthetic coding sequence
  source 1..213: mol_type = other DNA
atgaaaaaccacctcctcttttggggcgtcctggcagtctttattaaagccgtgcatgttaaagcacaggaggacgaacgtattgttttagttgataataaatgcaagtgtgccagaattactagcagaatcatacgttcttctgaggatccaaacgaggatatcgtggaaaggaacattcggattattgtgcctctcaacaaccgcgagtag

SEQ ID NO: 226641 - DNA, 480 bp, synthetic construct
  misc_feature 1..480: note = Description of Artificial Sequence: Synthetic coding sequence
  source 1..480: mol_type = other DNA
atgaagaatcatttgctgttttggggcgtgctcgccgtgtttataaaagctgtccacgttaaggcccaggaggatgaaagaattgtgctggttgataataagtgcaagtgtgccagaatcacaagccgcataatccggtcatcagaggaccccaacgaagacatagttgagcgaaacattcgaattatcgttcccctgaacaacagggaaaatatttctgatcccacctcgccactgagaacacgcttcgtgtatcacttgtccgacctgtgtaagaagtgcgatcccacagaggtggaactggataaccaaattgtgacggctacacagagtaacatatgcgatgaagactcagcgactgaaacctgctatacttatgacaggaacaaatgttatactgcagtggttccacttgtatatgggggagagaccaagatggtggaaaccgcgcttaccccagacgcctgctaccccgattag

SEQ ID NO: 226642 - DNA, 528 bp, synthetic construct
  misc_feature 1..528: note = Description of Artificial Sequence: Synthetic coding sequence
  source 1..528: mol_type = other DNA
atgaaaaaccatctgctgttctggggcgttctggctgtgtttattaaggccgtccatgtgaagggcagccgtgattcctccgcgtccgcttctcgagtggctggtataacggctcaagaggacgaacggatcgtgcttgtcgataacaagtgtaagtgtgcgaggataacatcaaggatcatccgctcttccgaggacccaaacgaagatatcgtggaacggaacatcagaatcattgttcctctcaacaaccgggagaacatctctgatccaacctcaccactgagaacccgcttcgtttaccacttgtccgatttgtgtaagaaatgcgatccgaccgaagtggagctcgataaccagatcgttactgccactcaatccaatatctgtgacgaggactccgcgacagaaacctgttacacatatgacaggaacaaatgctacacagcagtggtgccgttagtttatggtggggagactaagatggttgagaccgctctcacacccgatgcttgctaccccgactag

SEQ ID NO: 226643 - DNA, 642 bp, synthetic construct
  misc_feature 1..642: note = Description of Artificial Sequence: Synthetic coding sequence
  source 1..642: mol_type = other DNA
atgcgtcctggaaccgggcagggtggccttgaggcccctggagaacccggaccgaatctcaggcagcgttggccccttttattactggggctggccgtggttacccacggtctgctacggccaaccgccgcatcccagtctagggccctgggcccaggagctcccggaggcagctctcgaagctcactacgaagtaggtggggtaggttcctgttacagcgcggatcctggaccggtcccaggtgctggccccgtggattccagtctaaacataattctgtgacgcatgtgttcggatctggcacccagttgactgtgctttcacagccaaaggccacaccatccgtcactctatttccaccatcctcagaagagcttcaggctaataaggccaccctcgtgtgcctgatgaatgacttttatcccggtatactgactgtcacctggaaagcagacggcacgcctatcacccagggggtggagatgaccaccccttcaaaacaatcgaacaacaagtatgccgcttcatcttacctctccttgactcccgaacagtggcgttctcgtaggtcctactcatgccaggtgatgcatgaggggagcacggtggaaaaaacagtcgcgcctgctgagtgctcctag

SEQ ID NO: 226644 - DNA, 255 bp, synthetic construct
  misc_feature 1..255: note = Description of Artificial Sequence: Synthetic coding sequence
  source 1..255: mol_type = other DNA
atgaggcctggcaccgggcaggggggacttgaagccccaggagaacctggccctaatctcagacagcggtggccactcctgttgttagggctggccgtcgtcactcatggactgttgcggcctacagctgccagccagagccgcgctttggggccaggcgctcccggaggatcttcacgctccagtcttcgatctagatggggtaggtcagctcagggacacccattgggacattccgtgccagctgttctgtag

SEQ ID NO: 226645 - DNA, 2982 bp, synthetic construct
  misc_feature 1..2982: note = Description of Artificial Sequence: Synthetic coding sequence
  source 1..2982: mol_type = other DNA
atggcgtcagctgctgtggagtcttttgtgaccaagcagcttgatttgctggaactcgaacgcgatgcggaggtcgaagagcggagatcttggcaggagaatatcagtctgaaggaacttcagagccgaggcgtctgtttgctgaagctccaggtaagttcccagagaactggactctatggcaggcttcttgtgaccttcgaacccagacgatacggatccgctgccgctctgcctagcaactcctttacctcaggagacatcgtgggtttgtacgacgctgcaaatgagggctcacagctggccactggcattctgacccgcgtcacccagaagtctgtcacagtggcctttgacgagtcccacgatttccaattgtcattggaccgtgagaatagctaccgactcttaaagttggctaacgacgtcacatatcggaggctgaaaaaagctctgatcgccctgaagaagtatcacagcggcccagcctcaagcttgatcgaggtgttgtttggcagaagtgccccatcacccgcaagcgagatacatccactcacatttttcaacacttgtctggatacaagccagaaggaagctgttctcttcgctttgagccagaaggaattggccatcatccacgggcctcccggaaccgggaaaaccacaacagtggtggagattattctgcaggctgtgaaacagggcctcaaggttttatgttgtgctcccagcaatatcgccgttgataacctggtggagcgtctggcgctatgcaaacagagaattctgaggctcggccatcctgccagactcctcgaatctatccagcagcactccctcgacgctgttctggccaggagtgactctgcccagattgtcgccgacatccggaaagatatagatcaggtgttcgttaaaaacaaaaaaactcaggataagcgggagaagtctaactttcggaatgagatcaaactcctccgcaaggagctcaaagaacgagaggaggccgcaatgcttgaaagtctgacttctgctaacgtagtgctagctactaacactggggcatcagcagatggacctctgaagctcctgcctgagtcctacttcgatgtggtggtcattgatgagtgtgcccaagcactggaagccagctgctggattcctctccttaaagctcgcaagtgcatccttgcaggagatcacaaacagctgcccccaactacggtcagccacaaagctgccttggccggactttcactgagtctgatggagagactggcagaggagtacggggcacgcgtggtgaggactctcaccgtgcagtataggatgcaccaggccatcatgagatgggcctccgacacaatgtacctgggacaactgacggcccactcaagtgtggcgcgtcatcttctccgggatctccccggagtagcggcaacagaggagactggggtcccactgttgctagtggacaccgccggatgcgggctgttcgagctggaggaggaggacgagcagtcaaagggcaatccaggggaagttcgactggtgtcgttgcacattcaggctcttgtcgatgccggagtgcctgcacgggacattgcagtggtcagtccatacaacttacaggttgatctcctccgccaaagccttgtgcaccggcacccagagctggaaatcaaatcagtcgacggcttccagggacgggaaaaagaggcggttatactcagttttgtgaggagcaatcgcaaaggagaggtgggcttcttagcggaagataggcgaatcaatgtggccgtgacaagggcaaggcgacacgtggctgttatttgcgatagcagaaccgtaaacaaccatgctttcctgaagacattggtggaatacttcacacagcacggggaggttcgtaccgcatttgagtacctagatgacatcgtccctgagaactatagtcatgagaattcccagggatcatcccacgccgcaactaagccgcagggcccagctacctccacccggacgggaagccaacgccaagagggcggacaggaagctgctgctccggctcggcaagggaggaagaagcccgcaggaaaatctcttgcttcagaggcgccatcgcaaccaagtctcaacgggggtagccctgaaggcgtcgaatcacaggatggtgtcgatcattttagggcaatgatcgttgagtttatggcctctaaaaagatgcagctcgaattcccgccttcactgaactcccacgaccggctacgtgtgcaccagatcgctgaagaacacgggcttaggcatgatagtagtggggagggtaagcgacgcttcattacagtatctaaaagggcacccaggcctcgcgctgctctgggaccgcctgcaggaaccgggggtcccgctccccttcagcctgtgccccctaccccagctcagacagaacagccacccagagaacaacgtggccctgaccagccagatctgcgcacactgcatctcgagcgcctgcagcgagtaagatctgcccagggtcagccagctagcaaggagcagcaggcttctgggcagcagaagctgccagagaaaaaaaaaaaaaaggctaagggtcatcctgccactgatcttcctaccgaggaagattttgaggcactggtctcagcagcagtgaaggctgacaacacctgcgggttcgcaaagtgcaccgctggggtgaccaccctaggacagttttgccagctttgcagtcgtaggtattgcctgtcccaccacttgccagaaattcacggttgtggcgagagggcgagagcccatgccagacagcgcatctcccgcgaaggtgttctttatgccggatcagggacaaaaaatggctcactcgaccccgctaaacgggcacagctgcaacggagactcgacaaaaaactctctgaattgagcaaccaacgaacttctagacggaaggagaggggaacttag

SEQ ID NO: 226646 - DNA, 1287 bp, synthetic construct
  misc_feature 1..1287: note = Description of Artificial Sequence: Synthetic coding sequence
  source 1..1287: mol_type = other DNA
atgcaggagttgcacctcctctggtgggccctgcttctggggctcgcccaggcttgtcctgaaccatgcgactgtggggagaagtacgggtttcaaatagcagattgcgcctaccgcgacctcgaaagcgtgccgccagggttccccgcaaatgtgacaactctctcattgtctgcgaaccggctgccaggactgccagagggggcatttcgagaagtaccgctgctccagtcactctggcttgctcataatgagatccggactgtggctgctggtgccttggcaagtctttctcatttgaaatctctggatctgtcccacaacctcatctcagatttcgcgtggagcgacctgcataatttgtcggctttgcagctcctgaagatggactccaacgaactgacgtttatccctagagacgccttccgctccttgagggccctccggagtctacagttgaaccacaatcgactccacactctcgccgaaggaacatttaccccactcaccgcattgtcccacctgcagatcaatgagaaccctttcgactgcacttgtgggatcgtgtggctgaagacctgggccctaactactgctgtttctatccccgagcaggacaatatcgcctgcacatccccgcatgtgctgaagggaactcccctctcaaggttgcctccactgccatgcagcgctccctcagtgcaattaagctaccaaccctctcaggatggggcagaacttcgccctggttttgtcctggctctacattgcgacgtggatgggcagccagcccctcagctacattggcacattcagatcccttctggaatcgttgagatcacaagtcctaatgttggtacagacggaagggcgctgccgggtactcctgtggcttccagtcaacctcggtttcaggcctttgccaatggttctttactgattcccgacttcggaaaactcgaggaggggacatatagctgtctggctactaacgaactcgggagcgcagagagcagcgttgacgttgcgctggcgacccctggggaagggggagaagatacccttgggaggaggttccatggtaaggccgtggagggaaaaggctgctacacagtcgataatgaggtgcaacctagtgggccagaggacaacgtagtgataatctatctgtcacgggctgggaatccagaagctgccgtggccgagggtgtgcctggccagcttccccctgggctgctcctactgggacaaagcctgctgcttttttttttcttgacgagcttctag

SEQ ID NO: 226647 - DNA, 1287 bp, synthetic construct
  misc_feature 1..1287: note = Description of Artificial Sequence: Synthetic coding sequence
  source 1..1287: mol_type = other DNA
atgcaggagctgcatttgctgtggtgggccctgctgttaggcctcgcccaagcttgcccagagccatgtgactgcggcgagaaatacggattccaaattgcggattgcgcctaccgggatttagaatcagtcccccctggctttcctgcgaatgtcacaacactgtccctttccgccaacagactgccagggctgcccgagggtgcattccgagaagtgcctctcctgcagtcattgtggttggctcacaacgagatccgaaccgtggccgcaggagcgcttgcatccctttcacacttgaaatcccttgacctgagtcataatcttatctcagattttgcttggagtgaccttcacaatcttagcgccttacagctcttgaagatggactctaacgaactgacattcatcccaagagatgcgttccggtcactaagggcactcaggagtttgcagctcaatcataacagactgcacacgcttgccgagggtacattcactccgttaacggcgctgagtcacttgcagatcaacgaaaatccctttgactgcacatgtggcatcgtgtggctgaagacctgggccttgaccacggccgtgtcaattccggagcaggataacatcgcctgcacttctccccacgttttgaaaggcacaccgttatcccgattgcctcccctcccttgtagcgcccctagcgtgcagctgagttatcagccaagccaggatggggcagaattgaggccaggtttcgtactggcgctgcactgtgatgtggacggccagcccgctcctcaactccattggcacatccagattcccagcggcatcgttgagattacaagccccaacgttggcaccgacgggagggctctccccggaaccccagtggcgagcagtcagcctcggtttcaagcctttgccaacgggtcactactaatcccggacttcggcaagctggaagagggtacatacagctgccttgccactaacgagctaggctcagccgaatctagcgtggatgtggccctggcaacccctggggagggcggagaggacacacttggtcgacgcttccatggcaaagcagtcgaggggaaaggctgctacaccgttgacaatgaggtacagccatcaggtcctgaagacaatgtcgtgatcatctatctatccagagccggtaacccagaagccgcagtggccgaaggcgtccctggccagctccccccaggcttgctcctgctgggccagtcattacttttattcttttttctcactagcttttag

SEQ ID NO: 226648 - DNA, 444 bp, synthetic construct
  misc_feature 1..444: note = Description of Artificial Sequence: Synthetic coding sequence
  source 1..444: mol_type = other DNA
atgcaggaacttcatctgttatggtgggctctgctgcttgggctggctcaggcatgtcctgagccttgtgattgtggggaaaagtatggcttccagatcgccgactgcgcctatagggatctcgagtctgtccccccaggcttccctgcgaacgttacaaccctgtctttaagcgcaaatagactgcccggtctacctgaaggcgcttttagagaagtacccctcctacagtctttgtggcttgcccacaacgagatccggaccgtggcagcaggagctctggctagcctgagccatttaaagagcctggacctgtcgcacaaccttatatctgattttgcctggtccgaccttcacaacctttctgccctgcagctgctcaaaatggactccaatgaactgacgtttatcccacgtgacgcgttcaggagcctgcgcgcttag

SEQ ID NO: 226649 - DNA, 552 bp, synthetic construct
  misc_feature 1..552: note = Description of Artificial Sequence: Synthetic coding sequence
  source 1..552: mol_type = other DNA
atgcaggagctgcacctgttatggtgggctctgctgctgggcctcgcacaagcctgccccgagccttgcgattgtggcgaaaagtacggattccagattgcagattgcgcctatcgagatcttgagtctgtcccaccaggcttccccgctaatgttaccaccctgtccctttccgccaatagactgcctggtctgcctgaaggcgcattccgcgaagttcccctgcttcagtctctttggctcgcgcataatgaaattcggacagtggccgctggggcactggcctccctcagccacctgaaaagtttggacctgtctcacaatttgatcagcgatttcgcctggtccgacttacacaatctttctgctctgcagttgttgaagatggactccaacgagctcacatttattcccagggacgccttccggagtttgcgcgctcttcggtcactgcagctgaatcacaaccgacttcacactctagccgaaggcacgttcacacctcttactgccctaagccaccttcaaatcaatgagaatccttttgactag

SEQ ID NO: 226650 - DNA, 2238 bp, synthetic construct
  misc_feature 1..2238: note = Description of Artificial Sequence: Synthetic coding sequence
  source 1..2238: mol_type = other DNA
atgttccctttgagagccctctggctggtttgggccctgctgggcgtggccggtagctgccccgagccttgtgcttgcgtggataaatatgcacaccagtttgccgattgcgcatataaagagttaagggaagtacccgagggcctgccggcaaacgtgacaactctgtcattgagtgctaataaaattacagtgctcagaaggggggcttttgccgatgtgacgcaggttacgtctctatggcttgcccacaatgaagtgcgaacggtcgagccaggcgcattggctgtgctgtcccagttgaaaaacctcgacctatcccacaattttattagctcgtttccatggagcgatctgcgaaatcttagcgcactgcagctgcttaagatgaatcataatagacttggaagcctccctagagacgctctgggcgcactcccggatctgcggtctctgaggattaataataatagacttagaacactggcgcctggcacattcgacgccctgtcagctctctcccatctacaactgtaccacaatccttttcattgcggatgcggtctagtatggctgcaggcctgggctgcatcgacacgggtgtcccttcccgagcccgatagcatcgcttgtgcaagcccacctgccctccagggcgtcccagtttacagacttcctgcactcccctgcgccccacctagcgtgcacttgtctgccgagccaccccttgaagccccaggaaccccgctgagagccggtttggcgttcgttctccactgcatcgccgacgggcatccaactccgagactgcaatggcaactacagattcctggcggtactgttgttctggaacccccagtgctgagtggcgaagacgatggcgtgggcgcagaagagggggagggagagggggatggggatctgctgacccaaacacaggcccagacccccactcccgctcctgcatggcctgcacctcctgcgactccccgtttcctcgcacttgccaacggatctttgttagtgccgcttctctccgccaaggaagctggggtatatacctgtagagcacacaacgagttgggcgcaaatagcacttcgataagagtagcagttgcagcaaccgggcctcccaaacatgcccctggtgccggaggcgaaccagatggacaggcccctacctccgagcggaaatcgacggctaagggtagaggaaacagcgttctgccctcaaaacctgagggcaagatcaaagggcagggtttggccaaagttagcattctgggggagaccgaaacagaaccagaagaggacacgtcagaaggagaggaagcagaagaccaaattcttgccgaccccgcagaggaacaaagatgtggaaacggagacccaagccgctatgtgagcaatcacgccttcaaccagagtgctgagctgaagcctcacgtgttcgagctcggcgttatcgctcttgatgtcgctgagagggaagccagggtgcaactgacaccacttgctgccagatggggccctggaccaggcggagccggtggggctccacgacctgggagacgcccactgaggctcctgtacttgtgtcccgcaggcggaggagccgctgtccagtggtccagggtcgaggagggagttaatgcatattggtttcgcggattgaggccaggaaccaattacagcgtctgtcttgctctggccggtgaggcttgtcatgtgcaagtggtctttagtacaaagaaggagctgcctagcctgctcgtcatcgtggcagtgagcgtgtttctgcttgttctagccaccgttcccctgcttggagcagcctgctgtcacctgctagccaaacatccagggaaaccataccggctaattttaaggccacaggcacctgatcctatggagaaaaggatcgccgcagactttgaccccagggcatcttatctcgaatccgaaaaatcttatccagctggtggtgaggccggtggggaagaacccgaagatgtgcagggcgaaggcctggatgaggacgccgaacagggcgatccctctggggatcttcagcgggaggagagcctcgcagcatgtagtcttgtagaatcccagtcaaaggcaaatcaagaggaattcgaggccggatccgagtactcggacagattacctctaggggcagaggccgtcaatattgcgcaggaaattaatggaaattaccggcaaacggctggatag

SEQ ID NO: 226651 - DNA, 1005 bp, synthetic construct
  misc_feature 1..1005: note = Description of Artificial Sequence: Synthetic coding sequence
  source 1..1005: mol_type = other DNA
atgtttcccctgcgagcgctttggttagtatgggcgctgctgggggtagctggctcctgcccagagccatgcgcttgtgtcgataaatatgctcatcagttcgcagactgcgcctacaaggagctgcgggaagttcctgagggcctgccagccaatgtaacaactttaagcctctccgccaataagattacagtcctgaggaggggcgcatttgccgacgttacccaggtgaccagcttgtggcttgcccacaacgaggtgcgcaccgtggaacccggagccttagcggttttaagccagctgaagaatcttgatcttagtcataatttcatctccagtttcccctggtccgacctcaggaacctgtccgcattgcaactactgaaaatgaaccacaatcgattgggatcgctccccagggacgcactgggcgctctgcctgacctgcggagcctgcggattaacaataatcgcctcgccggagaggcttgtcatgtccaggtggtttttagtaccaaaaaagaactgcccagtctgctggtaattgtggcggtaagcgtgttcttacttgtgctagctaccgtgccacttctaggagccgcttgttgccatctgctcgcaaaacacccaggcaaaccataccgcctgattctgcgcccacaagcgcctgacccaatggagaagagaatcgcggcagacttcgatccacgtgcatcttatctcgaaagtgagaagtcctacccggctggcggtgaagccggaggcgaagaacctgaagacgtgcagggggagggccttgatgaagacgccgaacagggtgatcctagcggagaccttcagagggaggagagccttgcagcctgctcccttgtggagagtcagagtaaggcaaaccaggaggagttcgaagccggatctgaatactccgatcggctgcctctaggagccgaagcagtaaatatcgcacaggaaattaatggaaattatagacagacggccggttag

SEQ ID NO: 226652 - DNA, 2238 bp, synthetic construct
  misc_feature 1..2238: note = Description of Artificial Sequence: Synthetic coding sequence
  source 1..2238: mol_type = other DNA
atgtttccgttgcgggcactgtggctggtgtgggctctcttaggagttgccggaagttgcccagaaccttgcgcctgtgtggataaatatgcgcaccagttcgccgactgcgcatacaaggaattaagagaagtgcctgagggactccctgccaacgtgacaacactctcccttagcgctaacaaaatcactgtgttgcggaggggggctttcgccgacgtaacacaggtgactagcctgtggctggcccacaatgaagtccggacggtagaacctggtgccctagccgtgctctcacagcttaaaaatttggatctgagtcataacttcatttcatcattcccctggtccgatctgaggaatttgagcgcacttcagctgctgaaaatgaaccacaacaggcttgggtctctgcctcgggatgcgctaggcgctctgcccgacctccgaagccttcggatcaacaacaaccgattgcggaccctcgccccaggcaccttcgatgctttgtcggctttgtctcacttgcagctgtaccacaatccttttcactgtggctgcgggctggtctggcttcaggcctgggcagcttccactcgcgtttccctgcccgaacccgactctatagcctgcgcttccccccctgcattgcagggtgtgcccgtgtaccgcttgccagcccttccatgcgcacctccttccgtacacctctccgccgaaccaccactggaggccccaggaacccctctgcgggctggcctggctttcgtgctgcactgcatagctgatggccacccaactcccaggctgcagtggcagttgcagatccccggtggcacagtcgtcctcgagcctccggtcttgagcggcgaagacgatggcgtgggggcagaggagggtgagggtgaaggcgacggggacctgctgacccagacacaggcgcagaccccaacacccgctcctgcctggcctgccccaccagccacacctagatttctggcactggcaaacggatccttgttggtacccctgctcagcgctaaggaggccggtgtctacacttgccgcgctcacaatgagctcggggcaaactcaacatctattagggtggcagtcgcagccactggcccaccaaaacacgctccaggcgcaggcggtgaacctgatgggcaggccccaacctcagagaggaagagcaccgctaaggggcgtgggaatagcgtgctccctagtaaaccagaggggaagatcaaagggcagggcctggccaaggtgagtattttaggcgagactgaaacggagccagaggaagatactagcgagggcgaggaagccgaagatcaaatcctggcagaccccgcagaggaacaacggtgtggaaatggggacccttcaaggtacgtgtccaaccatgcatttaaccagagcgctgaacttaagccccacgtgtttgaactcggcgttattgccctggacgttgcagagagagaagctcgcgttcagctcaccccgctcgccgcacggtggggcccaggtccgggaggggctgggggtgctccaaggcctgggagacgccctctgcggctgctctatttgtgcccagccggtgggggagccgcagtgcaatggtctagagtcgaggagggcgtcaatgcttactggttccgcggtctgagacctggcacaaattactctgtctgcctggccctcgctggagaggcctgtcatgtccaagtagtgttttccacaaaaaaggaattacccagcttgctggtgatcgtcgctgttagcgtgttcctcctagtgctggccaccgttcccttgctgggggcagcctgctgccatctgctggcaaagcaccctgggaagccataccgtctgatcctgcgaccgcaggccccagatccaatggagaagcggattgctgctgactttgatccacgggcatcataccttgaatccgaaaaatcgtaccctgctggcggagaggcgggtggtgaggagcccgaggatgtgcagggtgaagggctcgacgaggacgctgagcagggtgatccaagcggcgacctacagcgagaagagagtcttgctgcctgcagcttggttgagagtcagtctaaggctaatcaggaggaatttgaggcaggtagcgagtattctgaccgacttcccctcggggcagaagccgttaacattgctcaggagatcaatgggaactatcgtcagactgctggctag

SEQ ID NO: 226653 - DNA, 2238 bp, synthetic construct
  misc_feature 1..2238: note = Description of Artificial Sequence: Synthetic coding sequence
  source 1..2238: mol_type = other DNA
atgtttcctctcagagccctctggcttgtctgggctttgctcggagtggctgggtcctgcccagaaccttgtgcttgtgtggacaaatacgcccaccagtttgcagattgcgcttataaagagctgagagaggtgccagaaggacttcccgctaacgtgacaacactctccctctccgcaaataagattactgttctaaggagaggagcctttgctgatgtcacacaggttacatcactgtggctggcccataatgaggtgcgaacagtggagccgggagctctggctgtgctctcccagttgaagaacctggatttgtcacacaacttcatctcctctttcccttggagtgatctgagaaatctcagcgcccttcagttgcttaagatgaatcacaataggctcggcagcctgcctagagatgcactgggagccttgcccgaccttcgatccctgagaatcaacaataaccgactaaggaccctggcgcctggcacattcgatgccttgtccgcactgtcccatctgcagctgtatcataacccttttcactgtggctgcggcctggtctggttgcaggcctgggcagcgagtactcgggtcagcttaccagaaccggattctatcgcatgcgcatcaccgccagcacttcagggggtccccgtatacagattacctgcgctcccctgtgcccctcccagcgtgcacctgtccgctgaaccgcctctggaggcgccagggactcctctcagggccggtctggcattcgtgctgcactgcatcgccgatgggcatcccactccacggctccagtggcagctgcagatacctggaggaactgtagttctggagccacctgtcctgtcgggggaagatgatggcgttggcgctgaggaaggggagggggagggggatggcgacctgctgacccagacacaggcccaaactcctaccccagctcccgcatggcctgcccctccagccaccccaagatttttggcactggcaaacggcagcctccttgtccctctcctgagcgccaaggaagccggagtgtatacgtgcagggcacacaacgaactcggagccaattccacatcaatccgcgtagcagtggccgctacgggaccaccaaagcacgcacccggagcagggggagaacccgacggccaggctccgacatcagaaagaaaaagtactgccaagggacgtggcaactccgtgctgccatctaaacccgagggcaaaatcaagggccaaggtttagcaaaagtctcaatcctcggagagaccgagacagaaccagaagaagatacatccgaaggcgaggaagccgaagatcagattcttgcggaccctgcagaggagcagaggtgtggaaacggcgatccgagtagatatgtctcaaaccacgcttttaaccagtccgctgaactgaagccacacgtttttgagctgggagtaatcgcactggatgtggccgaaagagaagcccgagtccagctcactccactggccgcacggtggggacccggacccggaggagctggaggcgctcctcgacccggtcggaggccgctcaggttgctgtatctatgtcccgctggtggaggggctgccgtgcagtggtccagagtggaagaaggagttaacgcctactggtttcggggactccgccctggcaccaactattccgtttgcttggccctcgccggagaggcatgccacgtgcaggttgtgttttcaaccaagaaggagctccctagcctgctggtgatagttgctgttagcgtgttcctgttggtactggccacggtgccattactgggggcagcttgttgccacctcctcgccaaacatcctggaaagccatatagattgatcctcagaccgcaggccccagaccctatggagaagagaatagccgcagacttcgaccccagagctagctacttagagagcgagaagtcatatcctgcaggcggagaagccggtggagaggaacccgaggatgtgcagggggaaggccttgatgaagacgctgagcagggtgaccctagcggggaccttcagagagaggagagtttggccgcttgctccttggtcgagtctcagtccaaggccaaccaggaggagtttgaagcgggttccgagtatagcgacagactgcccctgggggcagaggcagtgaacatcgcgcaggagatcaatgggaactatcgacagaccgccggatag

SEQ ID NO: 226654 - DNA, 2238 bp, synthetic construct
  misc_feature 1..2238: note = Description of Artificial Sequence: Synthetic coding sequence
  source 1..2238: mol_type = other DNA
atgtttcctctgcgagccttatggttagtatgggcccttctcggcgtggccggatcctgcccggagccatgtgcatgcgtggataagtatgcccatcaatttgccgattgcgcatataaagaactacgggaggtgcctgaaggcctccctgccaatgtgactaccctgagtctttctgccaataaaatcaccgtcctccgcagaggggcatttgccgatgtaacccaggttacctccctctggttagcccacaatgaggtgcgtacagtagaacccggtgccctggccgtccttagccagcttaaaaatcttgacctcagtcataattttatctctagcttcccttggtctgatctccgcaacctcagcgcgctccagttgcttaagatgaatcacaacagactgggcagcctccctagggacgccctgggggctctccctgatttgcgttcactgcggattaataataatcgcctcaggaccttggctccaggcacattcgatgctctctctgccctgtcacacctgcaactgtatcataatccatttcactgtgggtgtggccttgtttggctacaggcctgggccgctagcacacgtgtctcgctgccagagccggatagtatcgcttgcgcttccccacctgccctgcagggggttccagtctatcggctcccggcactgccatgtgccccaccaagcgtgcacctgagcgccgagccacccctggaggctccaggcacccccctcagggctgggctggcgtttgtcttgcactgtatcgcagacgggcacccaactcctcggctgcagtggcagctccagatacccggtgggaccgtggtcctcgaaccccctgtgctgagcggcgaggacgatggagtgggagctgaagagggcgagggggagggagatggagatctgctaacacagactcaagcccagactccgaccccagcacccgcatggccagcccctccagccacccctcgctttcttgccttggccaatgggagcctgctggtaccattgctgtccgcaaaagaggctggcgtgtatacctgtcgagctcacaacgaattaggagcaaacagcaccagtatacgggtggccgttgcggcaacagggcctcctaaacacgccccaggcgcaggaggggaaccggacgggcaggctcccacgtctgaacgcaagtccaccgccaaggggagaggaaactctgtcctgcccagcaagcccgaaggaaaaatcaaaggccagggtcttgccaaggtgtccattctaggcgagaccgagacggagccagaagaagatacgtctgagggggaggaggccgaggatcaaattctcgcagacccggctgaggagcagcgctgcggtaatggagatccgtcaagatacgtcagcaatcacgcctttaatcagagcgccgaacttaaacctcacgtgttcgaactcggtgtgatcgccctggacgtcgccgagagagaagcacgggtgcaattgacccctctcgcggcacgatggggacccggaccaggaggcgctgggggagctccacgccctggcagacgtccattaaggctgttgtacctttgtccggcaggtggtggcgcagctgtgcagtggtcccgcgtagaagagggagtcaatgcctattggttccgcggacttaggccgggtactaactattccgtttgcttagccctggcaggtgaggcctgccatgtgcaggtggtattctcaaccaagaaggaattgccatccctgttagtgatcgtagctgttagcgttttcctgctcgttttagctacagttccactgctgggtgcagcctgctgtcatctgctggctaagcatccaggaaagccctatagactgattctgagaccgcaggccccagatcctatggagaagagaattgcagcagactttgatccacgcgcatcctacctggagtcagaaaagagttaccccgcaggtggagaagctgggggtgaggaacccgaggacgtgcagggagaaggcctcgatgaagatgccgaacagggggatccctccggcgatttgcaaagagaagagtcccttgccgcttgtagtcttgtggaaagccagagtaaggcgaatcaggaagagtttgaggctggtagtgagtacagtgacaggctcccgctgggagccgaagctgtcaacattgctcaggaaatcaatgggaactataggcagacagcagggtag

SEQ ID NO: 226655 - DNA, 2238 bp, synthetic construct
  misc_feature 1..2238: note = Description of Artificial Sequence: Synthetic coding sequence
  source 1..2238: mol_type = other DNA
atgtttcccctcagagcgctgtggctggtgtgggccttgctaggcgtcgcagggagctgtccggagccgtgcgcctgcgtggataagtatgctcaccagttcgccgattgtgcctacaaggagctgcgcgaggttcccgaaggacttcctgccaacgtcactacgctctcgttatcagctaataaaataaccgttttacggaggggagctttcgcagatgtcacccaggtgacatccctgtggttagctcacaacgaggtccggaccgtcgaacctggcgctttagcagttttaagccagttgaaaaatctggacctcagccacaacttcatctcttcatttccttggagtgatctgcgtaatcttagtgccctgcagctcttgaaaatgaaccataatcggctgggatccttacccagggacgcccttggggcattgccagatctgagatcgctccgcatcaataacaatagactgcggaccctggcgcctgggacattcgacgctctctccgccctgagccacctccagctgtaccataatccattccactgcggttgtggcctcgtgtggctgcaagcctgggctgccagcacacgcgtgtctctgcctgagccagattctattgcctgcgctagcccccctgcattgcagggcgttccagtctaccggttgccagcactcccatgtgccccaccttcggtgcacctgagtgccgagcctcctcttgaagcccctggtacccccctccgcgctggactagccttcgtgctgcactgtatcgcagatgggcacccgactccccgtctgcagtggcagctgcagatccctggcggtacagtggttcttgaacctcctgttctaagtggggaggacgatggggtgggggctgaggagggagagggagagggggatggagatctcctcacacagacccaagctcagacccctactccagctccagcatggccggcacctcccgctactccaaggttcctcgccttagccaacggatcactgttggtaccactcttatccgccaaggaggctggcgtgtatacctgcagagcccacaatgaactaggcgcaaacagtacaagtattcgggtagcagtggcggcaactggcccaccgaaacacgcacccggagcagggggagagcctgacggacaggccccaacctctgagcgtaagtcaaccgccaagggaaggggcaactcagtactgccgtccaagcctgaggggaaaattaagggccagggtttagcgaaggttagtatacttggagagactgagacagaaccggaggaggacacatccgaaggtgaagaagctgaggatcagattttggccgatcctgccgaggagcaacgatgcggcaatggcgacccttctcggtacgtgtcaaatcacgcgtttaaccagtccgcggagctgaagccccatgtgtttgaactcggcgttatcgctctcgatgtcgctgaacgggaggctcgtgttcaactcaccccgctggccgcacgttgggggccaggccctggcggtgctgggggagcccctcggcctggaagaaggcctctgagattgctctatttgtgccccgcaggaggaggagctgcagtgcagtggtctagagtggaggaaggagtgaacgcctattggttcagagggctcaggcctggaacgaactatagcgtgtgtcttgccctggctggtgaggcctgtcacgtacaggttgtcttctcaaccaagaaagagctgcctagcctgcttgtgatcgtagccgtaagcgtgttcctgctggttttggccactgtgcccctgcttggtgctgcctgctgccatctgttagccaagcacccagggaaaccctatagactcatcctgagacctcaggcccctgaccccatggagaagcgcattgcggcagatttcgaccctagagcgtcatacctggaatccgagaaaagctaccccgctggaggtgaggccggaggcgaggaacctgaggacgtccagggagaggggctggacgaggacgccgagcaaggcgacccttcaggtgacctccaaagggaggagagtctggccgcttgttcgctcgtagaatctcagagtaaggccaaccaagaagagttcgaggcaggcagtgagtatagtgacaggcttccattaggagccgaggccgtcaatatcgcccaagaaatcaatgggaactatcgccagaccgcagggtag

SEQ ID NO: 226656 - DNA, 4011 bp, synthetic construct
  misc_feature 1..4011: note = Description of Artificial Sequence: Synthetic coding sequence
  source 1..4011: mol_type = other DNA
atgaccctggaccgccctggcgagggtgccaccatgctgaagaccttcactgtgttgctgttttgtatccggatgtcactgggcatgacatccattgtgatggatccccaacccgagctgtggatagaatcgaattaccctcaggccccttgggaaaatattaccttatggtgccgaagtcccagcaggatcagttccaagtttttgcttcttaaagataaaactcaaatgacctggatccggccatcccacaaaacatttcaagtttcatttctgattggagctttgaccgagagtaacgccggtctctaccggtgttgttactggaaggagactggctggagcaaaccttccaaggtcttggaattggaggcccctggacagcttccaaagcccatcttttggatccaggcggaaacaccagctttgcccggttgcaacgtcaacattctgtgtcatggctggctgcaggacctcgtttttatgttgtttaaggaagggtacgccgagcccgtagactatcaggtcccaaccggcactatggctatcttctctatcgataatctgacacccgaagatgagggtgtatacatatgtaggacccacatccagatgctgcctacactgtggtcagaacctagtaacccgttgaagctcgttgtggccggactgtacccaaaacctacactaacagcacaccctggtcctattatggctccaggcgaaagtcttaacttgcggtgccaggggcctatatacggaatgacattcgccttaatgcgggttgaagacctcgagaaatctttttaccacaaaaagactatcaaaaacgaggccaatttcttttttcagtctctgaagattcaggatacgggccattatctgtgcttctactacgacgcaagctataggggctcactgctcagcgatgtgctgaagatatgggtgaccgatacattcccaaagacctggttgcttgccagacctagcgcggtcgttcaaatggggcagaatgtctctttgcgttgcagaggaccagttgacggggtgggactggcgctgtataaaaaaggagaggacaaacccctccaatttctcgacgcaacgtccattgatgataacacaagtttcttcttgaacaacgtgacttattcagatactgggatttattcgtgtcactatcttctcacttggaaaacctcaataaggatgcctagtcataacacggtggagctgatggtcgtggacaagccacccaagccctcgctgagtgcctggccctccacagtgtttaagctcggtaaggcgatcaccctgcagtgcagggtgagccatcccgttctcgaattctccttagaatgggaggagagggaaacgttccaaaaattcagtgtgaacggcgatttcattatctcaaatgtcgatggaaaggggaccggaacctatagctgctcttatcgggtggagacccatcccaacatctggagccatcgctccgagccgttgaaattaatgggcccagctggctacctcacgtggaactacgtcctaaatgaagcgatcagactgtccctgattatgcagctggtggccctgctgctagttgtgctgtggatacgctggaagtgtcggagacttagaatcagggaggcttggctgttgggcacggcacagggagtgactatgctattcatcgttactgcactcctctgctgtggcctatgtaatggtgtccttattgaggagacagaaatcgtcatgccaacacctaaacccgaactgtgggccgaaacaaatttcccgttggcgccatggaagaacttaacattgtggtgtcggtcaccatctggctctaccaaagaattcgtcttgctgaaagatgggaccggttggattgccacccggccagcatccgaacaagtgagggctgcttttcctctgggcgctctgactcagtctcacaccgggtcctatcactgtcatagctgggaggaaatggccgtgtcggaaccatccgaagccctggaactcgtcggcacagatattctgcccaagccagtgatatctgcatccccaactattcggggtcaagagctccagctccggtgcaagggatggctggccggaatgggttttgcactgtataaggagggcgagcaggagccagtccagcaactgggggcagtgggacgggaggccttttttaccatccagaggatggaggacaaggacgaaggtaactacagctgtcgaacacacactgagaagcgaccattcaaatggtctgagccatccgaacccctggaattggtaatcaaggagatgtaccccaaaccgtttttcaagacctgggccagtcccgttgtcacccctggagccagggtcactttcaactgttctaccccgcaccagcatatgtcctttatactgtacaaggacggtagcgagatcgcatcttccgatcgaagctgggctagtcctggcgcatctgcggctcacttcctcattatttcggtgggcatcggagatggcggaaattactcttgtcggtattatgatttctcgatctggagcgaaccctctgatcccgttgagttggtggttaccgaattctaccccaagccgacattgctggcccaacctggtccagttgtcttccctggcaagagtgtcattctacgttgccaggggacgtttcagggcatgcgttttgcattactgcaggaaggagcgcacgtgcccctccagttccgctccgtgagtggcaactccgccgactttcttcttcatacggtgggggcagaagactctggaaattatagctgtatctattacgaaaccaccatgagtaaccgcggaagttacctgtccatgcctctcatgatctgggtgacagataccttccctaagccttggttgtttgcagagccaagcagcgtcgtgcccatgggccaaaacgtgaccctgtggtgtcggggtcctgtgcacggggtggggtacattctgcacaaggaaggtgaagctacatcaatgcagctttgggggtccacaagtaatgacggcgctttccccataaccaatatttctggcacctccatggggagatacagctgctgttatcaccccgactggacctcctcaatcaaaatccaacctagcaatactctggagttgctggtaacaggcctcttgcccaagccatccctgctggctcaacccggaccgatggtcgctcccggagagaacatgacactgcagtgccagggagagttacccgactctacattcgttctgttgaaagagggcgcacaagaaccactggaacagcagaggcccagtggataccgcgcagacttttggatgcccgctgtacgaggagaggacagcggtatttactcttgcgtttattacctcgactccacgccctttgcagcatcgaatcactccgactctctggaaatctgggtgaccgacaaaccacctaaaccatcattgagtgcttggccatctaccatgtttaaactggggaaggacatcacactacagtgcagggggcctctgcctggcgtggaattcgtgctggagcacgacggtgaggaggcgccacagcagttctcagaagatggggacttcgtgattaataacgttgaaggcaaggggatcggaaactacagctgcagctacagacttcaggcctaccccgacatctggtcagagccctcagacccactagagctcgtgggtgcggcaggacccgtcgcgcaggaatgtactgtgggcaatatcgtgaggagttcactcatcgtggtggttgtcgtggctctgggagttgtgctggctattgaatggaagaagtggcccaggctcagaaccagaggctcggaaactgacgggagagatcagaccattgcgctcgaggagtgcaaccaggaaggcgagccaggaacacccgctaacagtccttctagcacatcacagcgtatatcagtggagctgcccgtgccgatatag

SEQ ID NO: 226657 - DNA, 729 bp, synthetic construct
  misc_feature 1..729: note = Description of Artificial Sequence: Synthetic coding sequence
  source 1..729: mol_type = other DNA
atgaccctggacaggcccggtgagggcgctaccatgctcaagacatttacagtgcttctgttttgtatcagaatgtcgctgggcatgacctctatcgtgatggatccacagccggaattatggattgaatctaactatcctcaggctccctgggagaacattaccctctggtgccgttccccctcccgaatctcgtcgaagtttctgttgctcaaggacaagactcagatgacatggatccggccaagtcacaaaacatttcaggtgtccttcctaatcggagctctcaccgagtcaaacgcaggcctgtaccggtgctgctattggaaggaaacaggttggtccaagcctagcaaggttttagaactggaagctcccggtcagttgccaaagcctatcttttggattcaggcagagaccccggcattacctggctgcaacgtaaatatcctttgccacggatggctgcaggacctggtgtttatgctgtttaaggagggctacgccgagcccgttgactaccaggtgcccactgggaccatggccatcttctccattgacaacttgaccccagaggacgagggcgtgtacatctgccggactcacatccagatgttgccaacactctggagcgaacctagcaatccgctgaaattagtggttgcagggggatgcggctatggctgttggcacctggccattgtggtccccggaataatggccggatag

SEQ ID NO: 226658 - DNA, 729 bp, synthetic construct
  misc_feature 1..729: note = Description of Artificial Sequence: Synthetic coding sequence
  source 1..729: mol_type = other DNA
atgacactcgatcgacctggggagggggctaccatgctcaagacctttaccgtcctgctcttttgtataagaatgtcgctgggaatgacttcaattgttatggatccacaacccgaactgtggatcgagtccaactatcctcaggccccttgggagaatattacactgtggtgcagatcaccgagtcgaatcagtagcaagtttctgctgctgaaagacaaaactcaaatgacatggattcgccctagccataagactttccaggtgagttttctgatcggagccctgactgagtccaacgctggcctttacagatgctgttattggaaagaaacggggtggtccaaaccttctaaggttttagaactcgaggccccaggtcagctgccaaagcctatcttctggattcaagcagagacccccgcactgccaggttgcaacgtgaacatactgtgccatggctggctgcaggacctggtgttcatgctgttcaaagaggggtatgccgaacctgtggactaccaggtgcccaccgggactatggccattttcagcattgacaatctcacccctgaagacgagggcgtttacatatgcagaactcatatccaaatgctccccacgctgtggagcgagccatccaatccactaaaactggtagtggctggaggctgcgggtacgggtgctggcacctggccatcgtagttccgggaattatggctggatag

SEQ ID NO: 226659 - DNA, 4026 bp, synthetic construct
  misc_feature 1..4026: note = Description of Artificial Sequence: Synthetic coding sequence
  source 1..4026: mol_type = other DNA
atgaccctggatagacctggcgaaggcgcaacaatgctcaaaactttcacagtgcttttgttttgcatccggatgtctctcggcatgacctccatcgtgatggacccgcagccggaactatggatcgagagtaattacccacaggcgccttgggagaatattactctgtggtgccggtcaccgtccagaatatccagcaagtttctgttgcttaaggacaagacacagatgacttggatccgcccttctcataagacctttcaggtcagcttcctgattggtgcccttacagagtccaatgccggattgtaccgatgctgttactggaaggagactggatggtctaaaccaagcaaggtgctagagttggaggccccagggcagctccctaaacccattttctggatccaggctgagactcccgcattacccggatgcaatgttaatatcctgtgccacggatggctgcaggatttggtgttcatgctcttcaaagaggggtacgcagaaccagtggattatcaggttccgaccgggaccatggcaattttctccatcgataatttgaccccagaggacgagggcgtttatatctgcaggacccatatacagatgctgcccaccttgtggtccgaacccagcaatccactgaagctggttgtggccggactgtacccaaaacccactttaacggcacatcccggacccattatggcacccggagagagcctcaatctacggtgccagggcccaatatatgggatgactttcgccttgatgagagtagaggacctggagaaaagtttttatcacaagaagacgatcaagaatgaagccaatttttttttccagagcctgaaaatacaagataccggacattatctttgtttctactatgacgcctcctaccgcggatccctgctgagtgatgtgttgaagatctgggtgacagatacctttcccaaaacctggctgttggctcgtcctagcgcggtcgtccagatgggacagaacgtttctttgaggtgtcgtggacctgttgacggcgtaggactagccttatataaaaaaggcgaggacaaacccctgcaatttcttgacgccacatcaatcgacgataatacctccttcttcctgaacaacgtcacctacagcgatacagggatctatagttgccactatctcctgacgtggaagactagcattcgcatgcccagccacaacaccgttgagctgatggtggtagacaagccacctaagccctcactcagcgcttggccttccacagtatttaaattgggcaaggctattactttgcagtgtcgggtctcccacccggtgctggaattttccctcgagtgggaggaacgagagacctttcagaaatttagcgttaacggcgattttattatctccaacgtggacggcaaaggcacaggaacctatagttgttcttacagggtggagacccacccaaacatctggagtcaccgaagcgagcctcttaaactgatgggaccggctggctatctgacatggaactacgttctgaacgaggccataaggctgtccctaatcatgcaactagtcgctcttctgttggtggtattgtggatcaggtggaaatgcaggagactccgaattcgggaggcatggttattgggcaccgcgcagggggtcaccatgctgtttattgtgacggcactactttgctgtgccatcagctttgctggactgtgcaacggagttcttatcgaagaaaccgagatcgtgatgcccacacccaaacccgagctctgggcagaaacaaattttcctctggctccatggaagaatctgacactctggtgcaggtcgccatcaggatccaccaaggagttcgtcctactgaaggacgggacaggatggatagcaacaaggccagcatcagaacaggtgcgcgcagccttcccattaggggcattgacgcagagccataccggctcataccactgtcacagttgggaagaaatggcagtgagtgaaccatcagaggccctggaactggtgggtacagatatcctccccaaacctgttattagtgcctctccaactatcagaggacaggaactgcagctgcgatgcaaggggtggctggcaggaatggggttcgcactgtacaaggaaggcgaacaggagccagtccagcagctgggagcagtcggcagagaggcatttttcacaatccagagaatggaggataaggacgaaggaaactattcatgtcgaacgcacaccgagaaacgccctttcaagtggtcggagcctagcgagcccctggagctcgtgatcaaggagatgtatcctaaacccttttttaagacttgggccagccctgttgtcactcctggggctagggtaacctttaactgcagcactccccaccaacatatgtcattcattttgtacaaggatggaagcgagatagcatcctcagaccgtagttgggcctcacctggggctagcgcagcccacttcttaattataagtgtgggtattggcgacggtggcaattatagttgccgctactatgactttagcatctggagcgagcccagtgatccggttgagttggtcgtcaccgagttttacccaaagcctacccttcttgctcagcctggccctgtggtttttccaggcaagtcagtgatcctacgctgtcaaggtaccttccaggggatgagattcgctttgttacaggagggcgctcacgtgcccctccaatttcgaagcgtcagcggcaactcagccgactttctgctgcacacagttggagcagaggactctggaaactatagttgtatttactacgagaccacaatgtccaacaggggttcttacttgagtatgcccctcatgatatgggtgaccgacacttttccaaaaccgtggctgtttgcggaaccatcgagcgtagtgcccatgggtcagaatgtgacgctttggtgtaggggccctgtccacggcgtcggatacatcctgcacaaggagggcgaggcaactagtatgcagctgtggggctccacctcgaacgatggcgcttttcctataactaacatctctggcactagcatgggcaggtactcctgctgttaccaccccgactggacctcatcaatcaagatacaaccctccaatacactcgaactcctggtgacaggcttactgccaaaaccatccctgctggctcagcctgggcctatggtggcgcctggagagaatatgacactccagtgccaaggggaactgcccgacagtacgttcgtgcttttaaaagagggggctcaggagccattggagcaacaacgtccgtccggctatcgagccgacttctggatgccagctgtgcgcggtgaggactctgggatctactcctgcgtttattaccttgactccaccccattcgctgcgtcaaaccatagcgactcgcttgagatttgggtcacggacaaacccccaaaaccatctttaagcgcgtggccatccactatgtttaagctgggaaaggatataactctgcagtgtcggggacctcttcctggtgttgagttcgtcttggaacatgatggtgaggaggctccacaacagttctccgaagatggagactttgtaataaacaatgtggagggcaagggcatcgggaattattcatgctcctatcggttacaggcatacccagacatctggtcggaaccatctgaccctctggaactggttggggctgccggtcccgtcgcgcaggaatgtactgtcggcaacatagtgcgatcttcgttgattgtggtggtagtggtagcgctgggggtggtcttggctattgagtggaaaaagtggcccagattgagaacacggggatccgagaccgatggcagagaccagactatcgccctggaggagtgcaatcaggaaggagaaccaggcacccctgccaatagcccctcttccacaagccagagaatcagcgttgagttaccagtacccatatag

SEQ ID NO: 226660 - DNA, 3984 bp, synthetic construct
  misc_feature 1..3984: note = Description of Artificial Sequence: Synthetic coding sequence
  source 1..3984: mol_type = other DNA
atgaccctggatagacccggagaaggggcaaccatgttgaagacctttactgtactcctgttttgtatactgatggatccacagcccgaactatggattgaatccaattacccgcaggctccatgggaaaatataacattatggtgccggagcccgagcagaattagtagtaaatttctgttgctcaaagacaaaacccagatgacatggattagaccaagtcacaaaacctttcaagtaagcttcttaatcggagcacttaccgagagtaacgccggtctttaccgctgctgctactggaaggagaccggatggtctaagccttctaaggtgctggagctcgaagcgcctggtcaattgcccaagcctatcttctggatccaggcagagaccccggctctgccagggtgcaacgttaatatactctgccacgggtggctgcaggacttggtgttcatgcttttcaaggaagggtacgcagagcctgttgactaccaggtgccgaccggtaccatggctatattcagcattgataacctgactcccgaggacgaaggtgtctacatttgccggacccacatccagatgctccctactctttggagcgaaccgtctaacccgctgaagctggtggttgccggactgtacccaaagcctacactgaccgcacaccctggccctataatggccccaggtgaatccctgaatctgcgctgccagggaccaatctatggaatgacattcgctttaatgcgggtcgaagacttagaaaagtctttctatcacaagaagacaatcaaaaatgaagccaacttcttctttcaaagtctgaagatccaggacactgggcattatctttgcttctactacgacgccagctatcgcggatctctgctgtcagacgttcttaagatttgggtcacagatacctttcccaagacatggttgctcgcgaggccgtcggcagttgtgcagatgggccagaatgttagtctgcgttgcagggggccagtcgacggggtgggattagccttgtacaagaagggtgaagataaaccactccaattcctcgacgcaacctccatcgatgataatacatcttttttcttgaacaatgtgacttattctgatacaggaatctactcctgccactacctactgacttggaagaccagcattagaatgccttctcataacacagtcgaactgatggtggtcgacaagcccccaaagccgagcctcagcgcatggccgtctacagtgtttaaactcggcaaggccattactctccagtgcagagtgtcccacccagtgctggagttttcactagaatgggaggagcgggaaaccttccagaagtttagcgtgaacggagatttcataatcagcaatgtggatgggaaagggactgggacctacagctgctcataccgcgtagaaacacaccctaacatctggtctcacagatctgagcccctgaaattaatgggacctgccggatacttgacctggaattacgtgcttaatgaagccatccgcctatctctgattatgcagctggtggccctcctcctggtagtgctgtggatcagatggaagtgcagacgacttcgaattcgggaagcttggcttctggggacagcccagggcgtcacaatgctcttcattgtcactgccctgctgtgctgcgggctctgcaacggcgttttgattgaggaaactgaaattgtgatgcccacacccaagcccgagttgtgggctgaaacaaatttcccgttggcaccgtggaagaaccttactctgtggtgtcgaagtccctctgggtctacaaaggagtttgtcctgctaaaagatgggactggctggatagcaacaaggccagccagtgagcaggtcagggccgcattcccgctgggggcactgacccagagccatacagggtcgtaccactgtcattcctgggaggaaatggcagttagcgagccctcagaagcgctggagctggtcggcacagatatcctgccaaaaccagttatcagtgcttctccgaccatccgcggtcaggaactacaattgcgctgtaaggggtggctagctggaatgggcttcgctctttataaggaaggcgagcaggagccagtacagcagctgggggcagtggggcgtgaggcatttttcactatccaacggatggaggataaggacgaagggaactactcttgcaggacccacacagagaaacgaccattcaagtggtctgaacctagcgagcctctcgaactggtcattaaggagatgtatccgaagcctttcttcaaaacatgggcatcccctgtggtcacccccggtgcccgagtcacttttaactgcagcacccctcatcagcatatgtctttcattttgtacaaagatggttctgaaatcgctagttcagaccgctcatgggcctctccaggggcaagtgctgctcattttctgataatctcagtagggatcggtgacggcggaaactactcctgtcggtactacgatttcagtatatggagcgaaccatccgatcccgtcgaattggttgtcaccgagttctatccaaagcccacccttctggcacagcccggacctgtagtgttcccgggaaagtcagtgatcttgagatgccaaggaactttccaggggatgagattcgccttattacaggagggggcacacgtaccgcttcaatttcgtagcgtgtctggtaatagcgctgatttcctcctccataccgtgggagctgaggattctggaaattactcatgtatatattatgagaccacaatgtccaacaggggctcttacctttcaatgcctctcatgatctgggtgacagatacctttcccaaaccttggctgttcgccgagccatctagcgtcgtgcccatggggcagaatgtgactttgtggtgcagagggcctgtccatggcgtagggtacatcctgcataaagagggtgaggctacatccatgcagctgtggggctccacaagcaatgacggcgcatttccgattacgaacatttccgggaccagcatgggtaggtattcctgctgctaccaccctgactggacttcaagtattaaaatccagccaagcaatactctcgagctgctcgtgactggactgctgccaaagccgtccttactggctcagccaggaccaatggtagcacctggagagaatatgacactgcaatgtcaaggtgagctccccgattcaaccttcgtactgctcaaagaaggcgcacaggaaccgttagaacagcaacgccctagcggctatcgggcagatttctggatgcctgccgtgcgcggagaggactctggaatctatagctgcgtgtattacttggattctactccgtttgccgcttctaatcactcggacagtctggaaatttgggtgaccgataaaccacctaagccatcgttgtccgcctggcctagtaccatgttcaaactggggaaagacattaccctccagtgcaggggacccttaccaggagtagaattcgtcctggagcatgacggcgaagaagccccacagcaattttctgaagatggggacttcgtgattaataatgtggagggaaaaggtatcgggaactatagttgcagttatcgactgcaggcctaccccgatatttggagtgagccatctgatcccctggagttggtcggggctgccggtcccgtggcccaagagtgtactgttgggaatatcgtacgtagctccttgatcgtggttgttgtggttgcccttggggttgtgctggccatagaatggaagaaatggcctcgactcaggacccggggttcagagacagatggcagggaccaaaccatcgctctggaagaatgtaaccaggagggcgaacccggaacgccagcaaacagcccctcatctacctctcaacggattagcgttgagttgcccgttcccatctag

SEQ ID NO: 226661 - DNA, 3984 bp, synthetic construct
  misc_feature 1..3984: note = Description of Artificial Sequence: Synthetic coding sequence
  source 1..3984: mol_type = other DNA
atgacactcgaccgccctggcgaaggggctacaatgctgaaaaccttcaccgtgctgctgttctgcatcctgatggatccccaacccgagttatggattgagtctaactatccacaggcaccatgggaaaatattacactttggtgtaggtcccctagtcgtatttctagcaagtttttgctgcttaaagacaaaacccagatgacctggatcaggccatcgcacaagacttttcaggtgagtttcttgattggcgctctgacagagtccaatgcgggactgtaccgctgctgctattggaaagaaactggttggagcaagccaagcaaggtgctggaactcgaagctcccggtcagttgcccaagccgattttttggattcaggcggagacccccgcactgcctggctgcaacgtaaacatactgtgccatggctggctacaggatctagtgttcatgctgttcaaggaaggttatgcggaacctgtcgactaccaggtccccacgggcactatggcaattttttctatagacaatttgactcccgaagacgaaggcgtgtatatctgcagaacgcacattcagatgctgccgacactgtggtctgagccgtctaaccctcttaaattggtcgtggcaggcctgtaccctaaaccaactttaacagcccatccaggcccaatcatggcccctggagaaagtctgaatcttcggtgtcaagggcctatttacgggatgacatttgccctgatgcgggtggaggatctggaaaaatcattctaccacaaaaagacaattaaaaatgaggcaaacttctttttccagtctctcaaaattcaggatacgggccactacctttgtttctactacgatgcatcataccgcggtagcctcctgtcagatgttcttaagatatgggttacggataccttcccaaagacctggctgctggccaggccatccgccgttgtgcagatgggccagaacgtcagcctgagatgtagagggccagttgacggagttggattggctctatataaaaagggtgaagataagcctctgcaattcttggacgcgacaagcatcgacgataatacctcttttttcctgaataacgtgacgtacagcgataccggcatttacagctgccactatctgctcacctggaaaacatctatcagaatgccgtcacacaacacagtagaactgatggtcgttgacaagccgcctaagccaagcctgtcagcctggcccagcaccgtgttcaagctgggaaaagcgattaccctgcaatgtcgggtctctcacccagttttagagttcagtctagaatgggaagaacgcgagacgtttcaaaagttctctgtaaacggtgactttataatttcaaacgttgacggcaaggggaccggcacctacagctgttcgtacagagtggagacacatcccaacatctggtcccatagatccgagcccctgaaactgatgggccctgccggttacctcacctggaattatgtcctaaatgaggcaattcgtctgagcctgatcatgcagctcgttgctttgctcctcgtggtactatggatcagatggaaatgccgacgtctccgtattcgagaggcttggctcttggggacagcccagggtgtgaccatgctatttatcgtcaccgccctcctgtgttgcggactttgcaatggggtgttgatagaggaaactgagatcgtgatgcccacaccaaagcccgagctgtgggctgaaaccaactttcctttagcaccttggaaaaatctgaccctttggtgtagatctccgagcgggtccactaaggagttcgttttactcaaagacggtacaggatggattgctactaggcccgcaagcgaacaggtgcgggctgccttccccctgggcgctttgacccagtctcataccgggtcctaccactgccacagctgggaggaaatggcagttagtgagcccagcgaagccctggagctcgtgggaactgacatcttgcccaagcctgtgataagtgcatccccaacaattagaggccaggaactgcagctgagatgcaagggctggttagctggcatgggttttgccttgtacaaagaaggcgaacaggagcccgtacagcagctcggagcagtgggcagggaggccttctttaccatccagagaatggaggacaaagacgagggcaattacagctgtcggacccacaccgagaaaaggccgttcaagtggtccgagccctctgaaccacttgagcttgtcatcaaggaaatgtatcccaagccattcttcaagacctgggcctcccctgttgtgacccctggagccagagttacgttcaattgcagcactccgcatcagcacatgagtttcatcttgtacaaagacgggagcgagatcgcctcctctgaccgaagctgggccagtcctggtgcatcagctgcacactttttgatcatctccgttggaatcggggatggagggaactactcatgccgctactacgacttttccatctggagtgaaccttctgacccagtggaactggtagtgacagagttctatcccaagccaacgctcctcgcacagcctggtccagtggtgttcccgggaaagtccgtcatactgaggtgtcaaggaacattccagggtatgcggtttgcactcctgcaagaaggtgcccacgtgcctttacagtttcgctcggtcagcggcaattcggcagactttctcctgcatacggtgggagccgaggatagcggcaattattcatgcatatactatgaaacaaccatgagcaatcgcggtagttacttgtctatgcccctcatgatctgggtcactgatacgttccctaagccttggctctttgccgagccaagctctgtggtcccgatgggccaaaacgttactctgtggtgtagaggcccagtacatggtgtgggatacattcttcataaggaaggtgaagctacctctatgcagctgtggggaagcacctccaacgacggcgctttccccatcacaaatatctctggcacaagcatggggcgatactcctgttgttaccaccccgattggacctcttctatcaaaatacagccaagcaataccctcgaactcttagtgaccgggctacttccgaaaccatccctgttagctcagcctggccctatggtggccccaggcgagaacatgaccctgcagtgccagggtgaacttcccgatagcacctttgtccttctgaaggagggggctcaggagcctctggagcaacagcgaccatccggatatcgcgcagatttctggatgccagctgtgaggggagaggactcaggcatttacagctgcgtgtactatcttgactctaccccgttcgccgcatccaaccacagcgactcccttgagatctgggtcaccgacaagccaccaaagcctagcttgagtgcctggccgtctacaatgtttaagctggggaaagatataactttgcagtgccggggtccactgcccggtgttgaatttgtcctggaacacgacggcgaggaggcccctcaacagttttcagaggacggggactttgtaattaacaatgttgagggcaaggggatcgggaattatagttgtagctatcgcctacaagcttaccctgacatttggtctgaaccttcagatcctcttgagctagttggggctgctggccctgtggcccaggaatgtacggtcggcaatattgtgcgatcctctctcatagtggtggtagtggtagctctgggtgtggttctggctatagagtggaagaaatggcccaggctgagaacgcgcggatccgagaccgacggccgagaccagacaatagcactggaggagtgtaaccaagaaggggagcctgggactcccgctaacagtccatcctctacgtcacagcggatcagcgtcgagctgcctgtgccaatctag

SEQ ID NO: 226662 - DNA, 3645 bp, synthetic construct
  misc_feature 1..3645: note = Description of Artificial Sequence: Synthetic coding sequence
  source 1..3645: mol_type = other DNA
atgaagtgtttttttcccgtgctctcttgccttgctgtgctcggtgtcgtgtcagcccagcgtcaggtcacggtgcaggaaggccctctttataggactgaggggtcacacatcactatctggtgcaacgtgtcgggctatcaaggacctagtgagcagaacttccagtggagcatatacctgccttcttcccctgaacgcgaagtgcagattgttagtacaatggactcctccttcccgtatgcaatatacacacaaagagtgcgcggtgggaagatcttcatagagcgggtacaaggaaattctacactgttacacataactgacctccaggccagggacgctggcgaatatgagtgccatacaccaagtaccgataaacagtatttcggatcttattccgcaaaaatgaatctggtggttataccagactccctgcagacgacagcaatgccacagaccctccatcgggtcgagcaggacccgctggaactcacctgtgaggttgcctctgagaccattcagcacagccacttgtccgttgcctggttacgacaaaaggtcggtgagaagccagttgaagtgatctccctctcacgggacttcatgcttcacagctctagcgagtacgctcaaaggcagtcgttgggagaggttcgcctggataagcttggtagaactacctttagattgacaattttccatctgcaaccatcagaccagggggagttttactgcgaagccgctgagtggatacaggatcctgatggttcctggtatgccatgacccggaagaggagtgaaggtgccgtcgttaatgtccagccgaccgacaaggagtttaccgtcagactggagactgagaagcgcctccacacggttggagagcccgtggaatttaggtgcatcctcgaggcgcaaaacgtgccagaccgctatttcgccgtctcgtgggcattcaattcttctctgatagctacgatgggacctaatgccgtgcccgtgctgaactccgagtttgctcaccgggaggccagaggccaactgaaagtggcaaaagaaagtgattctgttttcgttttaaaaatatatcatctgcggcaggaggacagtggcaagtataattgccgggtgacagagcgagagaagacagtcaccggtgagtttattgacaaggaatccaagaggccaaaaaatattccaatcattgtactccccttaacagataactgggttgttaaggttcctcagcatcaccagctcctgtcacagggacatctggagagcagtatatccgtggaggtggcgtcaaatgccagtgtcattctagaaggtgaagatttaagattctcttgttctgtgcgaacagcgggacgacctcaaggacggttctccgtgatctggcagctggtggatcgacagaaccggagatctaacataatgtggcttgatagagatggtacagttcagccaggctcctcctattgggaacgttcctctttcggcggagtgcagatggagcaggttcagcccaattccttctcacttggaatctttaactcccgaaaagaagatgaagggcagtacgaatgtcacgttacagagtgggttcgggctgtggatggagagtggcagatcgtcggcgaaagaagagcaagtacaccaataagtataaccgcccttgaaatggggtttgccgttaccgccattagtcgtactcccggagtgacctatagcgatagtttcgacctacagtgtatcatcaagcctcattatccagcctgggtgccagtttcagtgacatggaggtttcagcccgttggaaccgtggaattccatgacctagtgacattcacccgagacggaggggttcagtggggagatcgctcttctagctttcgaaccaggactgctattgagaaagccgaaagcagcaataatgttaggctgagcatctcacgggcttccgatactgaggcagggaaatatcaatgtgttgcggagctgtggaggaaaaattacaacaacacctggacaaggctggctgagcgcacctccaatctcctcgagattagggtactgcagcctgtgaccaagcttcaggtctccaaatctaagcggactctcaccttagtcgagaacaaacccatccaacttaattgtagcgtgaaaagccagacgtctcagaattcccatttcgcagtcttgtggtacgtgcacaagccctccgacgccgacggcaagctcattctcaaaacaacccacaactccgcatttgaatacgggacatatgccgaagaggaagggctaagagctcggctccaatttgaacgccatgttagtggcggactgtttagccttaccgttcagagggccgaagtctctgattctggcagttactattgtcacgtggaagagtggctcctgagccctaattatgcgtggtacaagctcgctgaggaagtatccgggaggaccgaggtgacggttaagcagccggattcccgtctgaggctgagtcaggcccaagggaatttaagcgttctcgagacccgacaggttcagctcgaatgtgtggttttgaatcggacgtctatcacgagtcagctcatggtagaatggttcgtatggaaaccaaatcatcccgagcgcgagaccgtggccagactgtcacgggatgctaccttccactacggggaacaggccgctaagaacaatctgaaggggaggctccacctagagagcccaagcccgggagtgtatcgactgtttattcagaacgtggcagtccaggactctggcacctattcctgtcacgttgaagagtggcttccttccccatctgggatgtggtataaaagagccgaggacaccgcagggcagaccgccctcactgtcatgaggcccgacgctagcctgcaggtcgacacagttgtgcccaatgcaaccgtttccgagaaagccgcatttcaacttgactgttctattgttagtaggtctagccaggactcaaggttcgcagttgcttggtactccctaaggacaaaagctggcggtaagcgttcttcccctggtctcgaagaacaggaagaagagcgcgaggaagaggaagaagaggacgacgacgacgatgacgatccgactgaaaggacagcccttctgtctgtcggtccggacgccgtcttcggccctgaaggttcaccttgggagggcaggctccgtttccaacgcctgagtcctgttctgtatagactaacagtactgcaggctagccctcaagataccggaaactactcttgccacgttgaggagtggttaccgtccccacagaaggagtggtacaggttaacggaggaggaatccgccccaatcggaataagggtgctggatacctcaccaactctacagtcaattatatgttcgaacgatgccctgttctacttcgtcttcttttatcctttccctatcttcggaattcttattattactattcttttggtgcgctttaagtcacggaactcctccaaaaacagcgatggcaaaaatggggtgcctctgctgtggattaaagagccccacctaaactatagccccacatgcctggaacctcccgtgctttctattcaccccggagcgatagattag

SEQ ID NO: 226663 - DNA, 3645 bp, synthetic construct
  misc_feature 1..3645: note = Description of Artificial Sequence: Synthetic coding sequence
  source 1..3645: mol_type = other DNA
atgaaatgtttctttccggtgctgtcatgtcttgcggtgctaggagttgttagcgctcaaagacaggtaacggtgcaggagggcccactttacagaactgagggcagtcatatcactatctggtgcaacgtgtccggctaccagggaccctctgaacagaattttcagtggtccatttacttacccagttcccccgagcgcgaagtgcaaattgtaagtacaatggattcctccttcccatacgccatttatacccagagggttagaggaggtaagatattcatcgaacgggtgcaaggcaactcgacattgctgcacatcaccgacctccaggccagagacgccggagaatacgaatgtcacactccatccacagataagcagtacttcggatcctacagtgccaaaatgaacttggtcgttatccctgactctcttcagacaaccgctatgccccagaccttgcatcgggtggagcaggacccactggagctgacatgcgaggtggcgtccgagaccattcagcactcccacctgtccgtggcctggctgagacagaaagtcggtgaaaaacccgtggaagtaatatcactgagccgcgattttatgctgcacagctcttctgagtacgcccaacggcagtctctcggcgaggtaaggctggacaaactgggacggacgacattccgcctgacgattttccatctccaacccagtgaccagggcgagttttattgcgaggccgcagaatggatccaggatcccgatggctcatggtacgccatgacaaggaaacgatccgaaggcgctgttgtcaatgtccagcctactgacaaggagtttacagttcggctcgagactgagaagcgccttcataccgttggagaacctgtagaattccggtgcattttggaagcccagaatgtacccgacaggtattttgctgtttcctgggcattcaactcatctctgatcgcaactatgggcccaaatgctgtgccggttctgaactcggaattcgcccatagagaggcaagaggccagctaaaggtcgccaaagagtcagacagtgtcttcgtgctcaagatttatcatcttcgacaggaagattcaggtaagtacaattgcagagttacagagcgagagaagaccgtgactggagagttcatcgataaagaaagcaagaggcctaaaaacattcctatcattgtcctgccactgacagataactgggtggttaaggtacctcagcaccaccaactgttgtctcaaggccacctggagagtagcatcagcgtggaagttgcatctaatgcatccgtcatactcgagggagaggaccttcgcttctcatgctcggtgcggactgccggtcggccacagggcagattctctgtgatttggcagctcgtcgaccggcagaacagaaggtccaatatcatgtggctcgatcgcgatggcaccgtgcagcccggttcatcttactgggaaagatctagttttggcggtgtgcagatggagcaggttcagcccaattctttctctctgggcatctttaattctcgaaaggaggacgagggacagtacgagtgtcacgtgactgaatgggtgagagcagtcgatggcgagtggcagatcgttggggagagacgagcatctacgccaatttccatcaccgcacttgagatgggttttgccgtcactgccatctcaaggacacccggagtcacttatagtgattctttcgatctccaatgcattatcaagccccactacccagcgtgggtgcccgtctctgtgacttggcgctttcagccagttgggactgtggaattccatgatcttgtaacattcacccgcgatggtggcgttcagtggggggacagatctagttcatttcggacgcggaccgccatagaaaaggcggagtcctcaaataacgtaaggttgtctatctcccgtgcctctgacactgaagctgggaagtatcagtgcgttgctgaactttggaggaagaattataacaatacctggactcggctcgctgagagaaccagtaatctgttggagatccgagtcctccaacccgtgactaagctgcaggtgtccaagtccaaaaggactctgactctggtggagaataagccaattcagctgaattgctcagtgaagtcacagacatctcagaacagccattttgcagtcttatggtatgttcataagcccagcgatgctgacggaaaacttattctcaagacaactcacaattctgcctttgaatacggaacttatgctgaagaagaagggctcagagcacggctccagtttgagcgtcacgtgtcgggcggtttgtttagcttgacagtccagcgcgcagaggtgagcgactctgggtcctactactgccacgtcgaagagtggctcttgtctcccaattacgcttggtacaagcttgccgaagaagtctccggccgaactgaggttacagtcaaacagcctgattcacgcttacgtttgagccaggcccagggtaatttgagtgttctagagactcggcaggttcagctggagtgcgtcgtcctgaaccggaccagtatcacgtcacagctgatggtggaatggttcgtttggaaacctaaccatcctgagcgagagactgttgccaggctgtcccgggatgctacatttcattacggcgagcaagcagccaaaaacaatctgaagggccgtctgcacctcgagagcccctcccctggggtgtaccgtctgtttatccagaacgtcgctgtccaggatagtggcacatactcttgccacgtggaagaatggctcccctcaccctccgggatgtggtataagagagctgaagacaccgctggtcagacagccctcacagtgatgcgccctgacgcctctctgcaggtcgatacggttgtgcccaatgccaccgtctcagaaaaggcagctttccaactggattgctctatcgtctcaaggtcatcacaggatagccgatttgcagtcgcctggtactccctgaggaccaaagccggaggtaagagatcctcacccggacttgaggagcaggaggaggagagggaggaggaggaggaggaagatgatgacgatgacgatgatcccacagagcgaacggcgttgctctcagtggggccagacgcagtgttcggacctgaggggtcaccatgggaaggaagactacgcttccaaagactatctcctgtcctttaccgtctgacagttctacaggcctccccacaggatacaggaaactattcctgccatgttgaggagtggctaccctctcctcagaaagagtggtataggctgaccgaagaggagtcagcgccaatcggaatacgtgtgctggatacctctcccacgttacaaagcataatctgttccaatgatgccctgttttactttgtgtttttctacccatttcccatttttggaatcttaatcatcacaatactcttggtgagattcaagtcacgcaactcgtcaaaaaactccgacgggaaaaacggtgttccactcctctggattaaggagcctcatctcaactactctccgacctgtttggaacccccagtattgtccattcacccaggtgcaatcgattag

SEQ ID NO: 226664 - DNA, 3585 bp, synthetic construct
  misc_feature 1..3585: note = Description of Artificial Sequence: Synthetic coding sequence
  source 1..3585: mol_type = other DNA
atgaaatgctttttccccgtgctgtcttgcctggccgtgctcggtgtcgtgagcgcccagcggcaggtaactgttcaggaggggcctctgtatcggacagaaggtagtcacataacaatatggtgtaacgtgtccggctaccaggggccatcagagcaaaacttccaatggagtatctatctgccatctagcccagaacgggaggtgcagatcgtgagtacaatggattcctcctttccgtatgccatctatacacagcgtgttagagggggtaagattttcatcgagcgcgtacaaggcaattctacacttctgcatatcaccgacctccaggccagagacgccggtgaatatgaatgtcacacccctagcactgataaacagtattttgggagttatagcgcaaaaatgaacttggtggtgatcccagactcactccagactaccgcgatgccccaaactctgcaccgcgttgagcaggaccctttagaactaacatgtgaagtggcatcggaaaccattcaacatagccacctgtctgtggcctggctgagacagaaggtcggagagaagcctgtcgaggttatcagcttgtctcgggattttatgctgcattctagtagcgagtacgcccagcgccagtcattgggggaagtccgcctagacaagctggggcgaaccacatttagactgaccatctttcatttgcagccgagtgatcagggcgagttttattgcgaggctgcagaatggatccaggacccagatggctcgtggtacgctatgaccaggaagcgttctgaaggcgctgtagtcaacgtgcaaccgacagacaaagaatttacagtccgactggaaactgaaaagcggctccacactgtgggggagcccgtggaatttcgctgtattcttgaggcccagaatgtgcccgatagatatttcgcggttagctgggccttcaacagctctctgatcgctaccatggggccaaatgccgtccctgtgcttaactcagaatttgcacacagggaggccaggggccagctcaaggtggccaaagagtctgactccgtttttgtactgaaaatctatcacctaaggcaagaagacagcgggaagtacaactgccgtgtgaccgaacgagagaaaaccgtcacgggagaatttatcgacaaggagtccaagaggcccaagaatatccctatcatagtgctccccctgaagagcagcatctccgtggaggtggctagcaatgcgtccgtcatactagaaggcgaggatctccgcttttcttgttccgtgcgcaccgcagggcgacctcagggtcggttctccgtgatttggcagctcgtagataggcaaaacagacgctctaacatcatgtggcttgacagggacgggaccgtacagccagggagctcttactgggagcggtccagtttcgggggagtgcagatggagcaggtgcagcccaatagtttctccctggggatcttcaactcccggaaggaagacgaaggccagtacgagtgtcacgtcactgaatgggtgcgcgcagtggatggagagtggcaaattgtgggcgaacgccgtgccagtacgccaataagcattaccgctctggagatgggattcgcggttacagctatctctcggacgcccggtgtaacatattcagacagtttcgacttgcagtgcataattaagccccactaccccgcatgggtccccgtctctgtaacctggcggtttcaacccgtcggcaccgtcgaattccacgatctggtcacttttaccagagatgggggtgtgcagtggggggatcgcagctctagcttccgaactaggacagctattgagaaagccgagtcctccaataacgttcggttgtcaattagcagagctagcgacaccgaggcaggcaagtatcaatgtgttgcagaattgtggcgtaagaattacaataatacttggacccgcctagcagaacgtaccagcaacctgctggaaatccgggtgctccagcccgtgacaaaactgcaagtgtcaaaatctaaacggacactcaccctggttgaaaacaaacccattcagctcaattgcagcgtgaagtcacagacctctcagaactcacactttgctgttctctggtacgtgcataaaccatctgatgccgacggaaagctcatcttgaagaccacacataactcggcattcgagtatggtacctacgcagaggaggagggtctgagggcaagactccagttcgagcggcacgttagcggcggattatttagcctcactgtacagcgcgctgaagtgagcgactctggttcctattactgtcacgttgaggagtggctcctgtcccccaactacgcgtggtacaagcttgccgaggaagtctccggccgtactgaagttacagtgaagcagcccgactcacggctccgacttagccaggcccagggaaacctgtctgtgctggagacccggcaggtgcagctggagtgcgtcgtattgaaccgcacaagtattacttcccagctgatggtcgagtggttcgtatggaagcccaatcatccagaacgcgagactgtggccagattaagcagagacgccacctttcactacggggagcaggctgccaagaacaacttgaagggacggttacacctggagtccccaagccccggtgtctacagactcttcatccaaaacgtggctgtccaggatagcgggacctactcatgccacgtagaggaatggctgccttctcccagcggtatgtggtacaagcgggcagaagatacagcgggacagactgctctgacggtgatgaggcccgacgcctccctacaggtcgacacagttgtgccaaacgctacggtgtccgaaaaggcggcattccaactcgactgctctatcgtgtcccgaagtagccaagatagtaggttcgccgttgcctggtattctctcaggaccaaggctgggggaaagcgctcctccccaggactagaagaacaggaggaggaaagagaggaggaggaagaagaggatgatgacgatgacgacgacccaactgagagaaccgccctgctatcagtgggtccagatgcggtctttggcccagaagggtccccctgggagggtcgcctcagatttcagcgactgtccccagtgctgtaccggctcaccgtgctacaggcctccccacaagacacagggaattatagttgtcacgtggaggaatggctgccgtcccctcagaaagagtggtataggctgaccgaagaagaaagtgccccaatcggaatccgggtgctcgacaccagccccaccctgcagagcatcatctgttctaacgacgccttattttatttcgtgttcttctaccccttccccatctttgggatcctgattattaccatcttgctggtcaggttcaaatcccgtaatagctccaaaaattccgatggcaagaacggcgtgccactcctgtggatcaaagaacctcacttgaattactcccccacctgtcttgagccacctgtgttgtctatccaccccggtgctattgactag

SEQ ID NO: 226665 - DNA, 726 bp, synthetic construct
  misc_feature 1..726: note = Description of Artificial Sequence: Synthetic coding sequence
  source 1..726: mol_type = other DNA
atgggaacagcctcacggtcaaatatagcacgccatttgcaaaccaacctgatcctgttctgcgtgggcgctgtgggggcttgtacgctaagtgtcactcaaccttggtatctagaggtcgattacacccatgaagccgttaccatcaagtgtactttctctgctacagggtgccctagcgagcaaccgacctgcctgtggtttcgctacggcgctcatcagcccgagaatctgtgtttggatggctgcaaatccgaggcagacaagttcacggtgcgtgaggccttaaaggaaaatcaagtgagcctgaccgtaaacagagtgacttctaacgattctgccatctacatctgtggcattgctttccccagcgtgcctgaagctcgagctaaacagacgggcggtggcaccacactcgtggttagggaaattaaactcctgtccaaagaattgagatcctttctgactgcactggtttcactgctgtcggtatatgtaacaggggtttgtgtcgcttttatccttctgagtaagtctaaatcaaatcctttacgtaacaaagaaataaaggaggattcccagaaaaagaagtccgcccgaaggatcttccaagagatcgcacaggagctctatcataaaaggcacgtcgagacaaaccaacagagtgagaaagacaacaacacgtatgagaaccgccgtgtacttagcaactacgaaagaccctag

SEQ ID NO: 226666 - DNA, 1842 bp, synthetic construct
  misc_feature 1..1842: note = Description of Artificial Sequence: Synthetic coding sequence
  source 1..1842: mol_type = other DNA
atgggcgctcttaggcctaccctgttacctcccagcctcccattgctgctcctcctgatgcttgggatgggctgttgggctcgcgaagttctggtaccagaggggcctctgtaccgcgttgcaggaaccgcagtctctatttcttgcaatgtgaccggttatgaggggcctgctcagcagaacttcgagtggttcctgtaccgtccagaggctcccgacacggccctcggtattgtgagcaccaaggacacccagttcagctatgcagtgtttaaatccagggtcgttgctggtgaggttcaagtgcagcgcctacagggtgatgcagttgtgctgaagattgccaggctgcaggctcaagatgcaggaatttacgagtgtcacacccccagcactgatacgcgttatctcgggagctattccggaaaggtcgaactgagggtcctaccagacgtgctacaagtgtcagccgctccacccggaccaagagggagacaggcccctacctcacctccaaggatgacggtccacgaaggtcaggagctggccctaggttgtctcgcaaggacatcaactcaaaagcatactcatcttgctgttagcttcggcagaagcgtccctgaagcccctgtgggacgatccaccttacaggaagtagttggaattcgatcggacctggccgttgaggcgggtgccccatatgccgaaagactggccgcaggggagctgaggcttggcaaggaaggaaccgacaggtatcgtatggtggtggggggagctcaggccggtgatgcgggaacttaccattgtaccgcagccgagtggatccaggacccagatgggtcgtgggctcagatagcggagaagcgtgcagtgctggcccacgttgatgtccagacactgagtagccagttagccgtgacggtcggcccaggcgagcgtcggatcggcccaggagagccgctggaactactatgtaacgtgtccggggctctccctcccgcaggaaggcacgcagcatactctgtcggctgggaaatggcacctgcaggcgcaccaggccctggtaggcttgtggcacagctggatacagagggcgtgggaagcttgggcccagggtatgagggtcggcatatagccatggaaaaggtggcctctcgtacgtatcgactgagactggaagccgctcggccaggggacgctggcacttacaggtgcctggccaaagcttatgtgaggggttcgggcacacgtctgcgcgaggcagcttctgcgagaagccgtcccctgcccgtgcatgtgcgcgaggagggtgtcgtactcgaggccgtcgcttggctcgccggagggactgtctatcgcggtgaaacagcctctttactttgtaacataagcgtgcggggtggacctcctggtctgcggcttgccgcaagctggtgggtcgaacggcctgaagacggagaactatcatctgtgcccgcacaactcgtgggcggtgtagggcaagacggagtggctgagctcggggtccgccctggcggtggaccagtttcggtggagcttgtgggcccacggagccaccggttaagactgcatagtctaggcccagaagacgagggcgtctatcattgtgccccaagcgcctgggtccagcatgcggattattcttggtaccaggctggctccgcccgaagcggaccagtcaccgtgtatccctatatgcacgcgttggatactctgtttgtgccgctccttgtcggaaccggagtcgccctcgtaaccggtgccaccgtgctgggcactatcacctgctgttttatgaagaggctgagaaaacgctag

SEQ ID NO: 226667 - DNA, 1581 bp, synthetic construct
  misc_feature 1..1581: note = Description of Artificial Sequence: Synthetic coding sequence
  source 1..1581: mol_type = other DNA
atgggagcactgcgtccgacgttactgccaccgagtctgccactcctgctacttctcatgttgggaatgggctgttgggcacgagaggtcctggtcccagaaggccctctttaccgggtggctggaaccgcagtgtcgattagttgcaacgtgacgggatatgagggcccagcccagcagaactttgaatggtttctttataggcccgaggcccctgacactgccctcgggattgttagcactaaggacactcaattctcctatgcggtgttcaaatcgcgagtggtagccggagaggtccaggttcagagacttcaaggggatgctgtcgtgctgaagatcgccagacttcaggcccaggacgcagggatttatgagtgccatactccatctaccgacacaaggtatctgggctcttacagcggcaaggttgaattgcgtgtactccctgatgtgctgcaggtgtccgcggcaccacctggcccaagaggccgtcaggctcctacatctccaccccgaatgaccgtgcacgaggggcaggaactggccctgggttgcctggcaagaacctctactcagaagcacacacaccttgcggtctcttttggacggtctgtgcctgaggccccagtgggacggtccacactgcaggaagtggtgggcattagatcggacctagcagtggaagctggcgcaccatatgctgagagactggctgctggagaactcaggctgggtaaagaaggtacagataggtatagaatggtggtaggtggtgcacaggctggagacgccggaacttaccactgtacggctgccgaatggatacaggacccagatggtagttgggcgcaaatcgctgagaagcgtgcggtcctggcccacgttgacgtccagaccctctcaagccagctcgctgtgacagtcggcccaggggagcggaggatagggcctggagaacccctggaactactttgtaatgtgagcggagcactgcccccagcagggagacatgcggcttactctgtgggttgggaaatggctcctgcgggagccccaggacccggtcgacttgtggcacaactggatactgagggggtcggaagcctagggcctggttacgagggacggcacatcgcgatggaaaaggtggccagtcgcacttaccggttgaggctcgaggctgcaagacccggtgatgcaggaacatatcggtgtcttgccaaggcctacgttcggggatctggaacacgactaagggaggcagctagtgctcgatcccgccctctacccgtgcacgtccgagaagagggcgtggtcttagaggccgttgcctggctggcaggcggaacagtttataggggcgaaactgcaagcttactctgtaacatttctgtgcggggaggccctccagggctcaggagtgctcggtctgggcctgttactgtatacccttacatgcacgctctggacacgctattcgtcccgctgctagtcggtacaggcgtagcacttgtcaccggtgctaccgttctgggaacaataacctgttgtttcatgaagcgtttgcgcaagaggtag

SEQ ID NO: 226668 - DNA, 1842 bp, synthetic construct
  misc_feature 1..1842: note = Description of Artificial Sequence: Synthetic coding sequence
  source 1..1842: mol_type = other DNA
atgggtgctctcaggcccacccttttaccacctagcttgccacttctgcttctgctgatgctgggcatgggctgttgggcccgtgaagtgctggtccccgaggggccactgtaccgtgtcgccggaacggccgtctcaatcagctgtaatgtcacaggatacgaggggccagcccagcagaatttcgagtggttcctttatcgcccagaggcaccggacacagccctgggcattgtaagcacaaaagacacacagttttcctatgcggtttttaagtcacgggtcgtggcgggtgaggtgcaggtgcagaggctgcaaggggatgcagtggtcttgaaaattgctcggcttcaggcgcaggatgccggaatatatgagtgccatacaccatcaacagatacacggtatctcggctcatattctggaaaagtcgagctgagagtcctccctgatgtactgcaggttagcgctgcacccccaggtcccaggggacggcaagccccaacctccccccctaggatgacagtgcacgaaggacaggagctcgccctgggctgcttagccagaacatcaacccagaaacacactcatctggccgtcagttttggacggtcggttccagaagcacctgtcggtcggagcactttgcaggaggtggtgggcatccgctcggatctggctgtggaagcaggtgccccttatgctgaaaggcttgcagccggagaactaagactcggcaaagagggcacagacagataccgcatggtggtgggaggagctcaggcgggagatgccggtacctaccattgcactgccgctgaatggatacaagatccagatggctcatgggcgcaaattgcagagaagagagccgtgctggctcatgttgacgtgcagaccttgagtagccagctggctgttaccgtgggaccgggagaaaggagaatcggcccaggcgaacccctcgaacttctgtgtaacgtgtcaggcgcactccccccagctggaagacacgcagcttactccgtaggctgggaaatggctcctgccggtgcccctggcccagggcgactggtggcccaattggatacagaaggagtaggcagccttggacctggctacgagggcaggcacatcgccatggaaaaagtggcttctagaacttacaggttacgcctggaggctgcaaggccaggggatgcagggacttacaggtgcctggccaaggcttacgtgcggggatccggcacccgcttaagggaggcagcgtccgctcgctccaggcctcttccagtgcacgttagagaggagggggtggtactggaggccgtcgcatggctagctggagggactgtgtaccgcggagagaccgcatcactcttgtgcaacattagtgtgcgtggtggcccacccggtctccggcttgcggctagttggtgggttgagcgcccagaagatggcgaacttagttccgtcccggcacaattggttggcggagtcggccaggacggggtcgctgagctgggtgtcagacccggagggggtccggtaagcgttgaactggtcggccctcggagtcacaggctacgactacactcccttggccctgaagacgagggtgtttaccattgtgccccttccgcttgggtccagcatgccgactactcctggtaccaggccggtagtgccagaagcggacccgtcacagtctatccctacatgcacgccctggataccctgttcgtgcctttgctggtgggcacaggcgtggcccttgtaaccggggcaaccgttcttgggaccatcacttgttgcttcatgaagcggctgaggaagaggtag

SEQ ID NO: 226669 - DNA, 906 bp, synthetic construct
  misc_feature 1..906: note = Description of Artificial Sequence: Synthetic coding sequence
  source 1..906: mol_type = other DNA
atgggagctctgagaccaacacttctcccaccaagtctacctctcctgctgctacttatgctggggatggggtgctgggccagagaagtcctggttccagagggtcccctctaccgggtggccggaaccgcagtctctatatcttgtaacgtaaccggctacgaaggaccggcacagcaaaactttgaatggttcctttaccggcctgaagcacccgatacggccttagggatcgtctctacaaaggacacccagttcagttatgctgtgtttaaaagcagagtagttgctggtgaagtgcaagttcaacgattgcagggcgacgccgttgtgctgaagatcgctcggctccaggctcaggacgctggtatttacgagtgccatacaccaagcactgatacacgctatcttgggagctattccgggaaggtggaactccgggtactaccagatgtgctgcaagttagcgccgctcccccaggcccacgtggccgtcaggctccaacttcacctcctagaatgactgtacacgagggccaggaactggccctcggctgtctggcccgtacttcgacacaaaagcatacccaccttgccgtatccttcgggagatctgtcccagaagccccagtgggcagatccaccctccaggaagttgtgggcatcagatctgaccttgcagtggaggccggagctccttatgccgagcggctcgcagccggtgaactcaggcttggtaaggaggggacagaccggtacaggatggtggttggcggagcccaggctggtgacgctggcacctatcactgcaccgcagccgagtggatccaggatcccgacggctcctgggcccagatcgccgagaagcgtgctgttcttgcccatgtcgacgttcagacactctag

SEQ ID NO: 226670 - DNA, 2154 bp, synthetic construct
  misc_feature 1..2154: note = Description of Artificial Sequence: Synthetic coding sequence
  source 1..2154: mol_type = other DNA
atggtgtggtgcctggggcttgctgtgctcagtctcgtaataagccaaggggctgatggcagaggtaagcctgaagtggtgagcgttgtcgggcgtgccggtgaatcagtggtgttaggctgcgatctacttccacctgcagggaggccaccacttcacgtgattgagtggttgcgctttggattcctgctgcctatctttatccaattcggcctttacagcccacggattgaccccgactacgtcggcagagtgagactccagaagggcgcttcactgcagatagaggggcttcgagtggaggaccagggctggtatgagtgtcgcgtcttcttcctggaccagcacattcccgaggatgactttgctaatggtagctgggtccatttgacagtgaattcccctccccagttccaggaaacgccacccgctgttctggaggtgcaagaactggaaccagttacactgaggtgcgtggctaggggaagtccgctccctcatgtgacctggaaattacgaggaaaggacttgggacaggggcaggggcaggtacaagtacagaacggcaccctaagaatcagaagagtcgagcgcggtagcagcggcgtgtatacttgtcaggcttccagtacagagggatccgccacgcacgcaactcagctcttggtcctgggccctcctgtgatagttgtgccccctaaaaattccaccgtaaatgcttcacaggatgtcagcttggcatgtcacgcagaggcttacccagctaacctgacatattcttggtttcaggataacataaacgtgttccacatttccagattgcagcccagagtgcgcatccttgtagacgggtcactccgattgctcgccacacagccagacgacgccggatgctatacatgtgtgccctctaatggcctactccaccccccttcagcttctgcatacctgactgtgctttaccctgcccaggtgactgccatgcccccagagacaccactgcccattgggatgcccggagtcattcggtgccccgtgagagcaaacccgccactgctgtttgtgtcctggaccaaagatggtaaagcgcttcagttggacaaatttcctggttggagccagggaactgaaggctccttaatcattgctctgggaaatgaggacgccctgggtgagtactcttgcactccgtacaactctctgggaactgctggacctagccccgttacccgtgtgcttctgaaggctcccccagccttcattgaaaggcccaaagaagagtattttcaagaggtggggcgagagctgctgattccttgcagtgcgcagggggacccccctcccgctgcccctccgtcacccctccctggcccaggccctctgctgcagtatctgtcactgccttttttccgggaaatgaacgttgatggtgactggccacctcttgaggaaccgagccctgcagccccacccgactacatggacacacgtcggtgccctaccagttccttcctgcggtcacccgagaccccaccagtgtcgccgagggagtctctgcctggcgcagtggtgggggctggagctacggcagagccaccatacaccgctctggctgactggactttgagagagcgcctcctgcccggactgctgccagccgctccacgcggatctctcacctcacaatcttctggcagaggatctgcttctttcctaaggccaccttccaccgcacctagcgccggtggatcctatctgtcaccagcacctggggatacatctagctgggccagcgggccagaaaggtggcccagacgggaacacgttgtaaccgtgagcaagcgcagaaatacatctgtagacgaaaattatgagtgggattccgaatttccaggtgacatggagctgctagaaaccctacatctcggcctggccagcagcaggctgaggcccgaggctgaacctgagctgggcgtgaagactccagaggagggctgcctgctcaatactgcacatgtgactggcccagaagccaggtgcgctgctctgcgcgaagaatttcttgcctttcggagaaggcgcgatgccacacgtgcccgtctacccgcttaccggcagcccgtgccccatcccgaacaggcgactctgctttag

SEQ ID NO: 226671 - DNA, 3492 bp, synthetic construct
  misc_feature 1..3492: note = Description of Artificial Sequence: Synthetic coding sequence
  source 1..3492: mol_type = other DNA
atggtctggtgtctggggttggccgtgctcagcttggtgatatctcagggcgcagacggacggggaaagccagaagttgtatccgtggttggacgggctggtgaatctgtggtgttagggtgtgacctactcccgcctgccggaaggcctcctctacacgtgatcgagtggctgagattcggttttctgctgcccatctttattcagtttggtctttattctccccgtattgacccagactatgtcggacgggtgcgactgcagaagggcgcttctctccagatcgagggtttgcgggttgaggaccaaggctggtacgaatgcagggtctttttcctggaccagcatatccctgaagatgacttcgcaaatggatcgtgggtccatctcaccgtgaactccccaccccaattccaggagaccccccctgctgtcctcgaagtccaagaactggaacccgtcactctgaggtgtgtcgccagaggttcgccccttccacacgtgacttggaaacttcgcggaaaggatctgggacagggccagggccaggtccaagttcagaacggcacactgcgcatccggcgtgtcgaacgtggctcatccggtgtttatacctgccaggccagtagtaccgagggaagtgcaacccacgccacacaactgttggtactgggacctcccgtcatcgtagtgccccctaaaaactctaccgtgaacgcgagccaagatgtctcactagcatgtcatgctgaagcatacccagccaacctgacttactcctggttccaggataatattaatgtcttccatataagccgattacagcccagggtacgcatattggtcgacggctctctcagactgctagccacgcaacctgatgacgcaggatgttatacatgtgtgcccagtaatggactgctccaccccccaagcgcgagcgcctacctcaccgttctgtgtatgcctggagtcatccgctgcccggtccgcgcaaatccaccgctcctgttcgtttcttggactaaagacggaaaggcactgcagctcgataagtttcctggttggtcccagggcaccgagggtagccttatcatcgccctcgggaatgaagacgccctcggtgagtattcgtgcactccttataacagcctgggcaccgccggtccctcccccgtgacccgggtgctcctgaaggcaccacctgctttcatcgagcgaccgaaggaggaatacttccaggaggtcgggagagaattgctgattccctgttctgcccagggcgacccccctcccgtggtgagctggacaaaggtgggtcgaggccttcagggccaagcgcaggtggacagtaacagttcactcatcctccgcccactcaccaaagaggctcatggccactgggaatgctctgctagtaatgctgtcgctagagtggctacttcgaccaatgtatacgtgttgggcacctccccacatgtcgtcactaacgtcagtgtcgtggccctccctaaaggagccaacgtctcctgggagcctgggtttgatgggggatatctccagcgttttagcgtttggtacactcccttggcgaaacggcctgataggatgcaccacgattgggtgagcctggctgtgcctgtaggcgctgctcatctcctagtgcccggactgcaaccgcatactcagtatcagttttccgtcctagctcagaacaagctaggttcaggtccatttagcgagatagttttaagtgcgccagagggcctacctactactcccgctgcccctggcttgcccccaacagagatacctccaccattaagccctccacggggtcttgtggcagtcagaactcccaggggagtgctgctgcattgggaccccccagagctggtacctaagcgcctggacggctatgtcttagaggggcgtcagggatcacaggggtgggaagtcctggatcctgcggttgccggaactgagaccgagttgcttgtgccaggcctgatcaaggatgttctctacgagttccgcctggtagcattcgccggttccttcgtgtctgacccctccaacacagcaaacgtgagcacaagcggccttgaggtttacccgagtcgaactcagcttcctggcctgctgccccagcctgtgctcgctggagtggttgggggagtatgttttttaggagtagctgtgctcgtgagcatcttggctggctgcttattgaaccggcgacgggctgcacggcgacggcgtaaacgtttgagacaggatccccctcttattttctccccgacaggcaaatcagcagccccttctgccctgggctcggggtctcccgattccgtagccaaacttaagttgcaggggtcgcccgtgcctagtttacggcagagcctgctgtggggggatccagccggaactccctctcctcatcccgaccccccttcatctcgcggtccactcccactggaaccaatctgccggggacccgatggacgcttcgttatgggaccaaccgtcgcggcaccacaggagagaagtggtcgcgagcaggcagaaccgcgtacacccgcacagaggctggcgcgatcttttgactgctctagttcaagcccatcaggcgctcctcagcctttgtgtatcgaggacatctccccagtggccccacctcctgctgctcctccctcacctttgcctgggcctggtcctcttctgcaatatctctcactcccctttttccgggagatgaatgttgacggcgattggccacccctggaggaaccatcacccgcagcgcctcccgactacatggatactcgtcgctgtcctactagctcttttctcaggtcacccgagaccccaccggtaagtcccagggagtctcttcccggtgctgtcgtgggcgctggcgctacagccgagcccccttacaccgcactcgctgactggacactgagggaacgattactgcccggactactcccagcagctcctcggggatcgcttacatcccagagctctgggagaggttcagcatcgtttctgcgcccaccctctaccgcaccctcggccggaggcagttacctgagtccagctcccggagataccagcagctgggcctccgggcctgagcggtggccacgccgagaacacgtcgttactgtgagtaaacgtagaaatacttccgtagatgagaattacgaatgggattcagaatttcccggagacatggagctgctggagacattgcatctcggacttgcctcctctagattacgccctgaggccgagccggaactgggggtgaaaacgccagaggagggttgcctgctaaacacagcacacgtaacgggacccgaagccaggtgtgcagccctgagagaagaatttctggcttttcgccgtagacgggatgcaacccgcgctcgactcccagcctacaggcaacccgtccctcaccccgaacaggccacattgctttag

SEQ ID NO: 226672 - DNA, 3540 bp, synthetic construct
  misc_feature 1..3540: note = Description of Artificial Sequence: Synthetic coding sequence
  source 1..3540: mol_type = other DNA
atggtttggtgccttgggcttgcagtgcttagcctggtgatttcacagggagccgatggcaggggcaagcccgaggtcgtgagcgtagtgggaagagcaggcgaatcagttgtcctcggttgtgatctgctccctccagcaggtcggccaccgctccatgtgatcgagtggttacgtttcggtttccttctcccaatttttattcaattcggattgtactcaccacggatcgatcctgattatgtcggcagggttcgcttgcagaagggggcaagtctgcagatcgagggactgagagtggaggatcagggctggtatgaatgcagagtattttttttagaccaacacattcccgaagatgatttcgccaacggaagttgggtccatctcacagtcaacagcccacctcaatttcaggagaccccaccggcagtgctcgaggtccaggaactggaaccagtgacactgcgatgtgtcgcacgagggtctcctttgcctcacgtcacctggaagctgcgcggtaaggatctggggcagggacaaggtcaggttcaggttcagaacggtacattgaggatcaggcgcgtcgagaggggatcctccggtgtgtacacttgccaagcatcatccactgaaggcagcgctactcatgcaacccagctgctggtgctggggcctccagttatcgttgtaccccctaagaattccactgtgaacgctagtcaagacgtctcactggcatgccatgccgaagcataccctgccaatctgacgtattcatggtttcaagataacatcaacgtctttcatatcagccgactgcagcctagagtaagaattctcgtggacggaagcctgagacttctggctacacagccggatgatgcagggtgctacacttgcgtgcctagcaacggtctcttgcacccaccatccgctagtgcgtatcttaccgtcctctaccccgctcaagtcacagctatgccccctgagactcctctccccattggaatgcccggtgtcatacggtgcccagtgagagccaatccaccgctcctctttgtcagctggaccaaggatgggaaagcattacagctggacaagtttcctgggtggtcccagggaactgaaggatcactgataattgcattaggcaacgaggatgccctaggtgaatacagctgcaccccatacaacagcctgggcaccgctggcccttcccccgtcacaagggtcctattgaaggctcccccagcatttattgagagacccaaggaagaatactttcaggaagtcgggagggagttactgataccctgctccgctcaaggagatccccctccagtggtttcttggactaaagtaggcagggggttgcaggggcaagctcaggtggattctaacagcagcttaatcctcagacccctgacaaaggaggcacatgggcattgggaatgttctgcatccaacgccgtcgctcgggtggcgacgtccaccaacgtgtacgtgctgggaacctccccgcacgtagtgactaatgtctctgtggtcgccctacctaagggagccaacgtgtcttgggaaccgggattcgatggcggttacctccagcggttctccgtttggtacacccctcttgcgaagagaccagaccgcatgcaccacgattgggtgtccctcgctgttcccgtcggagctgcccacctgctggttcctggccttcagccgcacacccaataccaattctccgtcctggctcaaaacaagctcgggtctggtcccttctccgagatcgtcctgtccgcgcctgagggattaccaactactccagcggctcccggactaccacctacggaaatcccaccaccactcagtccaccccgtggtctggttgctgtgagaactccaagaggcgtactgctccactgggaccccccagagctggtccctaagagactggatgggtatgtgctggagggccgtcaggggagccagggctgggaggtgctggacccagcagttgctggaacagagaccgaactacttgttccaggtctgatcaaggacgtcttatacgaattccggttagtggcctttgccggatcattcgtgtccgatccttccaacacagctaacgtttccaccagcggtctggaggtataccccagcagaacacaactgcccggactactgcctcagccggtgctcgcgggagtcgttggcggagtttgctttttaggagtggcagtgctggtgtccatcctggcaggctgtctgttgaaccgtcgtagggctgcccgtcgtaggagaaagcgattaaggcaggacccaccgctcatctttagtcccactggcaaatcggccgctccctcagctcttggatccggaagccctgacagcgtggcaaagcttaagctgcaaggctctcccgtcccgtccctcagacagagtttgctgtggggagaccccgcagggactccatccccgcaccccgatccacctagctcacgcggacccctgcctctcgagcccatttgccgtggacctgacggcagattcgttatgggcccaacggtggctgctccccaagaaaggtccggaagagaacaagcagagccaaggactccggctcagagactggcgagatctttcgattgctcttccagtagcccaagcggtgcaccacagccactttgcatcgaagatatctcccctgtggcgccaccgcctgccgcaccaccctctcccttgcctgggcctgggcctctccttcagtacctcagtctgccgttcttccgggagatgaacgttgatggagattggcctcctctcgaagaaccaagccccgctgcccctccagactacatggacacaaggcggtgccccactagcagcttcctgcgttctcccgagacaccaccagtgtcccctcgcgagtctctcccgggtgccgtggttggagctggagcaacggctgaaccaccttatactgccctcgccgattggaccctccgcgaaaggctgcttccaggcctactgcctgccgcacccagaggtagcctgacctcccagagcagtggtcggggaagtgccagtttcctccggccacctagtaccgccccaagtgccggaggcagttacctctctcctgcgcctggagatacatccagctgggctagcggtccagagaggtggcctcggcgagagcacgtggtgactgtatcaaaaaggaggaacacatcagtggatgaaaattacgagtgggactccgagttccctggagacatggagctgttggagaccttacacttaggacttgcatcctcgagactgagacccgaagctgaacctgagctaggagtgaagacgcccgaggaagggtgtctgcttaataccgcccacgttactggacctgaggctcgatgtgcggcacttcgcgaagaattcctggcgtttcgacgaaggagggatgcaacgcgagcacgcttgcctgcttatagacagcctgtcccacatccggaacaagccaccctcttgtag

SEQ ID NO: 226673 - DNA, 4050 bp, synthetic construct
  misc_feature 1..4050: note = Description of Artificial Sequence: Synthetic coding sequence
  source 1..4050: mol_type = other DNA
atgatctggtacgtggcaacttttatcgcttccgtcattggaacaagggggctggctgcagagggcgctcacggactgagggaggagcctgagtttgtgacagcccgagcaggagaatcagtggtcctgagatgtgacgtgattcacccagtgacgggtcaaccgccaccatacgtggtggaatggtttaaattcggggtgcctatcccaattttcatcaaattcggttattacccgccacacgtggatccggaatacgctggccgtgcctctcttcacgataaggccagcctccgccttgagcaagttcgcagcgaggatcagggctggtatgagtgcaaggtgcttatgctcgaccaacaatatgacacttttcacaatgggtcctgggtgcacctgacgattaatgcaccacccacattcacggagacacccccacagtacatcgaagcaaaagagggcggttcaattacaatgacctgtaccgcctttggcaatccaaagcccatcgttacctggcttaaggagggcacgctgttgggagcctccggcaagtaccaggtctctgatgggtccctaacagtcacatcggtctctagagaggatcgcggagcttacacatgccgagcttactcaattcaaggagaggccgttcacactacccatctgcttgtgcagggccctccattcatagtatcgccacccgaaaatataactgtgaacatttcgcaggacgctttactgacatgcagagccgaggcctaccccggtaacctcacatacacatggtactggcaggatgagaatgtttatttccagaatgacctgaagctacgcgtaagaatcctcattgacggcactcttatcatcttccgggtgaagccggaggatagcggtaagtacacctgtgtcccctctaactcactcgggagaagcccgtccgcctctgcctatctcactgtgcagtatccagctcgggttctgaacatgccaccagtcatatacgtgccagtgggaatccatggttacattcgctgtcctgtggacgcggaaccccctgccactgtggtgaagtggaacaaggatggtcggccactgcaggtcgagaaaaatctaggctggactctgatggaagatggcagtattagaatcgaggaggccacggaagaggcactcggtacctatacttgtgtgccatataataccctgggcaccatgggacagtcagccccagctaggctggttttaaaggaccccccttattttaccgtgcttccaggctgggaatatcggcaggaagccggacgggagctgctcataccgtgtgcggctgccggagatccgttccctgtcattacctggcgaaaggtgggtaagcctagtaggtccaagcatagcgcgctgccttccgggtctctccagtttcgagccctgtcaaaagaggaccatggagagtgggaatgtgtcgctaccaatgtagtaacgtctatcacagcctccacccacttgacagtgattggcacgagccctcatgcacctggctccgtgcgcgtccaggtgtctatgacaacggctaacgtgagctgggaacccggatatgatggcggatatgagcagacctttagtgtgtggatgaagcgagcccagttcgggcctcacgactggctgtccctgcccgtcccaccgggtccctcctggctgttagttgacacactggagcctgagaccgcgtatcagtttagcgtcctggcccaaaacaagcttggcacctcggcgtttagtgaggtggtgactgtgaacaccctcgccttccccatcaccacaccagaacccctcgtgctcgtgacgccgcctcgctgcttgattgcaaatagaacacagcaaggagtattgctgtcatggctgcccccagctaatcattcctttcccatcgatcggtacatcatggagttcagggtggcagagcgctgggaacttttagatgatggtatacctgggaccgaaggtgaattctttgcaaaagatctgtctcaggatacctggtatgagtttcgagtcctcgccgtgatgcaggatctgatttccgagccatctaacatcgcaggtgtgagctctacggatatcttcccccagcccgatctcactgaggatgggctcgccaggcctgtactagcaggcatcgtcgcaactatatgcttcctggccgctgcaattctcttcagtacactcgccgcttgcttcgtgaacaaacagcgaaagcgcaaactgaaacggaaaaaagaccctccgctgtctattacacactgtaggaaatctttagagtctccacttagttcaggtaaagtgagcccagaatccatcaggacgttacgggctccgtccgagagctcagatgatcaagggcaacctgccgctaaaagaatgctgtcacccacgcgggaaaaagaactgtcactgtataaaaaaacaaagagagcgatatcttctaagaaatactccgttgcaaaggccgaagctgaagcagaagctacaacccccatcgaattaatcagccggggaccggatgggcgttttgtgatggacccggcagaaatggagccttccctgaagtctagaaggattgaaggatttcccttcgctgaggagactgatatgtatcctgaattcaggcaaagcgacgaagagaacgaagatcctttagtccccacctccgtcgctgcgctaaagagccagctcactccattgagttccagccaggagagctaccttcctcctcccgcatattcacctaggttccagcccaggggattggaggggcctggcggactcgagggcagactacaagctacggggcaagcgcgaccaccagctcccagacctttccatcacggccagtactacgggtatttaagctcctcttcccctggggaagtcgagcctccccctttttatgtacccgaggtcggatcacccctgtctagtgtgatgtcctctccacccctgcccaccgagggcccatttgggcaccctacaattcccgaagagaacggcgagaacgccagcaactcgactctgcctctgacacagaccccgactggaggcaggtctcccgagccttggggcaggcccgagttccctttcggtgggctagaaactcctgcgatgatgttcccccatcaactccctccttgtgacgtcccagagtccctgcagccaaaagccggactgccacggggtctgcctccaacctctttacaagtgccagctgcataccccggaatcctgagcctggaagcacctaagggctgggccggtaaaagcccaggaagggggccagtaccagctcctcccgctgcaaagtggcaggatcggcctatgcagcccctggtctcgcagggacaattgagacacacctcacagggcatggggatccccgtgctaccctatccagaacctgccgaacccggtgcacacggcggtccttctacattcggtttggatacaagatggtacgagccccagccacggcctcgcccatcccctagacaggctcgacgtgccgaacccagcctccatcaggttgttctgcagcccagtcgcctgagtccactgactcaaagccccctctctagccgcacaggctctccagagctggcggctagagccaggcccagacccggacttctacagcaggcggagatgtcagaaattactctgcagcccccagcagcagtctctttctctcgcaagtcaactccgagcaccggatcaccatcccagtccagcaggtctgggagcccatcgtatagacccgcaatgggcttcacgaccctggccactgggtatccctcaccgccaccaggtccagctccagctggcccaggagactctctggatgtgtttgggcaaacaccctctcctcgcagaactggggaggagctgttgcgaccagagacgcccccacccaccctgcccacatcgggtaagttgcagagggaccggccagcaccggcaacatcaccacccgagcgcgcattgagcaaattgtag

SEQ ID NO: 226674 - DNA, 1509 bp, synthetic construct
  misc_feature 1..1509: note = Description of Artificial Sequence: Synthetic coding sequence
  source 1..1509: mol_type = other DNA
atggcttggccaaagctgcctgccccttggctgctgctttgcacgtggctgcccgctggctgcctgtcacttttggtgactgtccagcatactgaaaggtacgtgactttattcgcctctatcatcttgaagtgtgattatacaacctctgcccaattacaggacgtggtggtgacatggaggttcaagagtttttgcaaggacccgattttcgactactactccgcctcgtatcaagccgctttatctctgggacaagatccttccaacgattgcaatgataaccagagggaagtacggatagttgcccagcggcgaggacagaatgagcctgtgctgggtgtcgactaccgacagcgaaaaatcactatccagaatagggctgatctggtgattaacgaggtgatgtggtgggaccatggggtgtactactgcactatcgaggccccaggagacactagtggggatccagataaggaggttaaactcatcgtgctacattggttgacagtaatattcattatcttgggagccctgcttctcttgcttctcattggcgtgtgttggtgtcagtgctgcccacagtattgctgctgctacattaggtgtccgtgctgccctgcacactgttgctgtcctgaggaggatcttagcctcccttccagccttccccagatgccaatgacgcaaacaacaaaccagccccctatagcgaacggcgttctcgaatacctcgagaaggaattgagaaatctcaacctggcccagcccctgcctcccgatcttaaagggagattcggccatccctgttcaatgctcagctcacttggcagcgaagtagtggagcgcagaattatccacctgccgcctcttatccgggacctgtccagttctcggcgtacaagcgactccctccaccagcagtggctgaccccaattccttccagaccctgggatctgagagaggggagatctcaccaccactaccctgactttcaccaggaattgcaggatcggggaccaaagagttgggccttagagagacgggagctggacccttcctggtccggcagacaccgatccagtcgcctaaacgggtcgcctatccattggagcgatcgagatagtttgagcgacgtgccttcatcctccgaagctcgatggagacccagtcaccccccatttcggagtaggtgccaggaaaggcctcggaggccatcaccacgggagagtacccagaggcacggacggcgacggcgtcacaggtcatatagtcccccacttccctcggggcttagttcctggtcctccgaggaagataaagagaggcagccacagtcatggcgggcacacaggcgcggtagccacagtccccactggcctgaggagaagccaccaagctaccgatccctagatattaccccaggcaaaaatagcagaaagaagggctcagtggaaaggcggagtgaaaaggacagttctcattcgggaaggtccgtcgtgatatag

SEQ ID NO: 226675 - DNA, 1641 bp, synthetic construct
  misc_feature 1..1641: note = Description of Artificial Sequence: Synthetic coding sequence
  source 1..1641: mol_type = other DNA
atggcctggccaaagcttcccgcaccttggcttctgctgtgtacctggcttcctgctggttgcttgtccctgttagtcaccgtacagcacaccgagcgctacgtgaccctgttcgcctcaataatacttaaatgtgactacactacatcagcacagctccaagatgtggtagtgacgtggaggtttaaaagcttttgcaaggatcctatctttgactactacagcgccagttaccaggcagctctgagcctgggtcaggatccttccaacgactgtaacgacaatcagcgtgaggttcgaatcgtcgcgcagcgaaggggccagaacgaacccgtcttgggcgtcgactatagacagcggaagatcacaatccagaaccgggcagacctcgttataaatgaggttatgtggtgggaccatggggtctactactgtaccatagaagcccctggagacacttcgggcgacccagacaaagaggtaaaactgattgtgctgcattggttaacggtgatcttcatcatcttgggagcactgctgctgcttctgttaatcggagtttgctggtgtcagtgctgcccccagtactgttgctgttacatcagatgcccttgctgccctgctcactgctgctgtcccgaggaagccctcgcaagacatcggtacatgaaacaagcacaggctctgggacctcaaatgatgggcaaacccctgtattggggagcggatcggtcttctcaggtatccagctatcctatgcaccccctccttcagcgcgatctgagcttaccctcaagtctgccgcagatgcccatgactcagaccaccaatcagcccccaatcgccaatggggtgttggagtacctggagaaagaactgcggaatctgaatctcgcacagcccctacctccagacctgaaagggcgttttggccacccttgctccatgttgtcatccctcggatctgaagttgtcgaacgccgaattatccatctcccaccgttgatacgcgacctgtctagctcaagaaggacgtcagactcattgcatcagcagtggcttacacctataccgtcaaggccttgggatcttagagaagggcgttcacaccaccattaccctgatttccaccaagagctccaggatagagggccaaaaagttgggctctggagcggagggagctggaccccagctggagtgggagacacagatcatcccgcctgaacggctctcctatccattggagtgacagagactccttgtccgacgtaccttccagcagtgaggccagatggaggccatcccaccccccatttcgaagccgctgtcaagagcgcccaaggcggccttcaccgcgagagtctacccagcgacatggaagacgtaggagacaccgatcatacagtcccccactccctagcggcttgagctcttggagctccgaggaggataaagaacgccaaccacagagttggagagcacacaggagaggaagccattccccacactggcctgaagagaaacccccaagctaccgctcgctagatattacacccggtaaaaactctcggaaaaaaggttcggtggagaggcggtccgaaaaagactcaagtcattctggacggtcagtcgtgatctag

SEQ ID NO: 226676 - DNA, 639 bp, synthetic construct
  misc_feature 1..639: note = Description of Artificial Sequence: Synthetic coding sequence
  source 1..639: mol_type = other DNA
atggcctggccaaaactgccagctccgtggctgcttttatgtacctggctgcctgctggctgtctgtcacttctggtaaccgtccagcatacagaacggtatgtgacactttttgccagcatcatattgaaatgtgactatacgaccagtgcccagctgcaggatgtcgttgtgacgtggcgcttcaagtccttttgcaaagaccccatcttcgactattacagtgccagttatcaagctgcactgagtctaggccaagatcctagcaacgactgttgctgttgtccagaagaggctctggccagacatcgctatatgaagcaggcccaggccctaggaccgcaaatgatgggtaaaccgctgtactggggtgccgaccgtagctcgcaggtgtctagctatccaatgcatcctcttttacagagagacttgagcctcccaagttccctaccccaaatgccaatgactcagactaccaaccagccaccgatcgcaaacggagtgctggagtacctggagaaggagctgaggaacctcaacctagctcagcctttgccacctgacctgaagggcagatttggccatccttgctcaatgcttagctccctgggtagcgaaaaccagatcgaggagttctag

SEQ ID NO: 226677 - DNA, 1374 bp, synthetic construct
  misc_feature 1..1374: note = Description of Artificial Sequence: Synthetic coding sequence
  source 1..1374: mol_type = other DNA
atggcctggcctaagttacctgccccttggctcctcctgtgcacttggctgcctgccggatgcctttcattactggtaactgtgcagcacaccgaaaggtacgtcaccctgtttgcttccatcatcttgaagtgcgactataccacctctgcacagcttcaggacgtggtcgtgacatggcgatttaagtcattctgtaaggatcccatatttgattattattccgctagctatcaggcagctctatctctggggcaggatcccagcaacgattgcaatgacaatcagagagaagtaaggatagttgctcagaggcggggacagaacgagccagttctgggcgtggattacaggcagagaaaaattaccatccaaaacccacttgctcgccaccgctacatgaagcaggcccaagccttaggaccgcagatgatggggaagcccctttactggggtgcagacagaagcagtcaggtgtcgtcatacccaatgcatcccttgctgcagcgcgatctgtccttgccttctagtctacctcagatgcctatgacacagaccaccaatcagccacccatcgcaaatggagtcttagaatacctcgaaaaggaactgcggaatctgaaccttgctcagcccctgccacccgatcttaaaggcagatttgggcatccctgctccatgctgtcgagcttgggctctgaagtggtagagagacgaataatccatcttcccccactaatacgggacctctcaagtagccgtcgcacaagcgacagccttcatcagcaatggctcaccccaattccatcgagaccctgggatctcagagaaggaaggagccatcaccactatcccgatttccaccaagagctgcaggatcggggtccgaagagctgggcgctggagaggagagaattggaccctagctggtccgggaggcaccggtcttcacggctgaacgggagccccatccattggagcgacagagattcattgtccgatgtgccaagcagttccgaagctcggtggagacccagtcatcctcctttccggtcaaggtgccaagaaagacccaggcgtcctagtcccagggaatctacccagcgtcacggcagaagacggcgacataggagttattccccaccgttgccgagcggactgtcatcatggagcagtgaagaagataaggagcggcagccccaaagttggcgggcacacagacgtggttctcatagtcctcattggcccgaggagaagccgccatcgtataggagcctagatatcacgccaggcaaaaatagtagaaaaaaaggttctgttgagagaaggagtgagaaggattcctctcactcgggacgatcagttgtgatctag

SEQ ID NO: 226678 - DNA, 1545 bp, synthetic construct
  misc_feature 1..1545: note = Description of Artificial Sequence: Synthetic coding sequence
  source 1..1545: mol_type = other DNA
atggctggcaacatcttctgcccttttgctctgttttttctgccgatgagtagagttggccacctgcagcattttctgttgctgttggcgctggggtgtttaagcctgctggtaaccgtgcagcatactgaaagatatgtcacgctgtttgcatctattattctcaagtgcgattataccacaagcgcccagctgcaagacgtggttgttacctggcgctttaaaagtttttgcaaggaccccatttttgactattattctgcaagctaccaggctgcactaagcttaggacaggatccgtctaacgactgcaatgacaatcagcgcgaagtgagaattgtggcacagcgtcgaggccagaacgaaccagtgctgggggtcgactaccggcagcgcaaaattacaattcagaaccgcgcagatttagtgatcaacgaggtgatgtggtgggaccacggtgtgtactattgcaccattgaggcaccgggagacacgtcaggcgatcccgacaaggaggtgaagctgatcgtgcttcactggttaaccgtgatatttattattcttggagccttgctgttgctcttgctcatcggggtttgctggtgtcagtgctgccctcagtattgttgttgttatatccggtgcccgtgctgccccgctcactgttgctgtccagaggaagatctgtctctgcccagctctctgcctcaaatgcctatgactcagacaacaaatcaacctcctatcgcaaatggcgtactggagtaccttgagaaggagttaaggaatctcaacctcgcccagccacttcccccagatctgaaaggccgattcggccatccttgctccatgctgtcctccctggggtctgaggtcgttgagcgtaggatcattcacctgccccctcttatccgtgacctgtcttcttcaaggagaacgagcgacagcctacaccagcagtggctgacccccataccaagtagaccctgggacttgcgcgaggggcgatcccatcatcactatcctgattttcaccaggagctgcaagaccgcggaccgaagtcatgggcactggagcggagggagctggaccccagctggtccggccgtcaccgcagtagtcgcctgaatggttctcccatccattggtcagaccgagattccctgtcggatgtgccatccagctcagaggcaaggtggcgtccaagtcacccgccatttcgctccaggtgccaggaaagacccaggcgcccttcaccacgagaatccactcaacgccatggacgtaggcggagacaccgatcttatagcccccctcttccttcaggactgtcatcatggtcaagtgaagaggacaaagagcggcagcctcaaagctggcgggctcaccggaggggcagtcactcgcctcattggcccgaagagaagcccccttcctataggagcttagatatcacaccaggcaagaacagtcggaagaaagggtctgtggagcgaaggagtgagaaagacagcagtcactcaggtcggtccgtcgtgatttag

SEQ ID NO: 226679 - DNA, 1800 bp, synthetic construct
  misc_feature 1..1800: note = Description of Artificial Sequence: Synthetic coding sequence
  source 1..1800: mol_type = other DNA
atggaggggcctctgacgcctccgccactccagggtggtggcgcagctgccgtccccgaacccggtgccaggcaacacccaggtcatgaaactgcagcccagcgctatagcgcgaggcttctccaggccggatatgagccagaatcccccagactcgaccttgcaacccacccgaccactccaaggtctgaactgagctctgtggttctgctggctggcgtgggcgtacagatggacaggctgcgtcgcgcttccatggctgattatctgattagcggcggtaccggatacgtgccagaggatggcctgaccgcccagcagctgtttgcctctgcagatggcttaacctataatgattttctgatcctgcctgggtttattgattttatcgcggatgaggtcgatctaacaagtgctctgacaaggaagattactctgaaaaccccattgatctcctcccccatggacaccgtgactgaagccgacatggcaatcgccatggctctgatgggagggatcggttttatccaccataattgtacccctgagtttcaagctaacgaagtgcggaaggttaagaagtttgagcaggggttcataactgatcctgtggtactgtctccatcgcacaccgtgggtgacgttcttgaggccaaaatgagacacggcttttcagggattccaatcacagagacaggaactatgggctcaaagttagtgggcatcgtgacctctagagacattgactttctcgctgagaaggatcacactacactgctgagcgaggtgatgacacctagaattgaacttgtggtggccccagccggagtcaccctgaaagaggcgaatgaaattttacagcggtcgaagaaaggcaaactgcccattgtgaatgattgtgatgaactagtggccattattgcccgaactgacctaaaaaaaaatcgggactatccactggcctccaaggattcacagaaacagctgttatgcggcgcagctgtgggtaccagggaagatgacaaataccggctcgacctcttaacgcaagccggagtagacgtgattgtcctcgatagttcacagggaaatagtgtgtaccagattgccatggtgcactacatcaagcagaaatacccccatctccaggtgatcgggggaaacgtggtcaccgccgcacaggcaaagaatctgatagatgctggggtggatggactcagggtcggaatgggatgcggatccatctgtatcacccaagaggtgatggcatgtggccgtccgcaaggcaccgccgtgtacaaagtcgccgagtacgcaagaaggtttggcgtcccaataatagccgatggcggtatacagaccgtgggtcacgttgtgaaagctctagcccttggagcctctacagtaatgatgggatctctgcttgcagccaccactgaggcacccggagaatatttctttagtgatggggtgagactgaagaagtaccgcggtatgggcagtctggacgcgatggaaaagtctagcagctcccagaaaaggtatttctcagagggggataaggttaagatcgcccagggcgtctccggaagtatccaggacaagggatcgatccagaagttcgtcccttacctgattgcaggcattcaacatggttgtcaggacattggcgctcgctccctgagcgtcttgcgttcaatgatgtacagcggagagctgaaatttgagaagaggactatgtctgctcaaatcgaggggggagtgcacggcctgcattcttatgaaaaacggctatactag

SEQ ID NO: 226680 - DNA, 1470 bp, synthetic construct
  misc_feature 1..1470: note = Description of Artificial Sequence: Synthetic coding sequence
  source 1..1470: mol_type = other DNA
atggccgactacctaattagtggcggaactggatacgtaccagaagatggtcttacagcccaacaacttttcgcaagcgccgatggccttacatataacgacttcctgattctgcccggattcatcgactttatagctgatgaggtggacctcaccagtgcactgacacgaaagatcacactaaagacccctcttatctctagccccatggacacagtgacagaggctgatatggcgattgctatggcaaaattcgagcaaggcttcattacagatccagtcgtgctatctcccagccacactgtcggggacgtgctggaggccaagatgagacacggcttctcaggcatccctataacagagacgggaaccatggggagcaagctggtgggtatcgtaacttctcgtgatattgatttcctggcagagaaagatcacaccacacttctttccgaggttatgactcccaggattgagttggtcgtcgctcccgctggcgttactctgaaggaagctaacgaaatcctgcagcgaagcaagaaggggaaactgcccattgttaatgactgtgacgagctggtggcgatcatagcccgtaccgatctgaaaaagaaccgagattacccactggcatccaaagactcacagaaacaactgctgtgcggggcagcggtgggaaccagggaggatgacaaatataggctcgaccttctaacccaggccggagtggatgtgatcgttctcgattcgagtcaaggaaactcagtatatcaaatcgctatggtgcactacattaaacagaagtacccgcaccttcaggtgattggaggcaacgtcgttactgcagcgcaagcaaaaaacttaatcgatgccggtgtggacggattgcgggtggggatgggttgtgggtcaatttgtatcacacaggaggtaatggcatgtggtcggccacaagggactgcagtttacaaagtcgccgaatacgcccgtagatttggagtacccatcatagccgacgggggaatccagacagtaggtcatgtggtcaaggctttggcccttggagccagtaccgtcatgatgggctcccttcttgctgcaacaactgaggctcccggtgagtatttcttttccgatggggttcgactaaaaaaatacaggggcatgggctctctggacgccatggagaagagctccagctctcagaagcggtacttctccgaaggcgacaaagtgaagattgcccagggagtctctggatccattcaagacaaaggaagcatccaaaaattcgtgccctatctgatcgccggaatccagcatgggtgtcaagatatcggtgcgcgatcgctctcagttttgcggtctatgatgtattccggagaactgaaatttgaaaaaagaacgatgtcagcacaaatcgaaggcggtgtgcatggtctgcattcttacgaaaaaaggctttactag

SEQ ID NO: 226681 - DNA, 1692 bp, synthetic construct
  misc_feature 1..1692: note = Description of Artificial Sequence: Synthetic coding sequence
  source 1..1692: mol_type = other DNA
atggaggggcctctgacaccacccccattgcaaggtggtggggcagccgctgtgccagaaccgggtgctcgccagcacccgggacatgaaactgcagcacagagatacagtgctcggctgctccaggccggatacgagccagaaagcatggccgattacctgatcagcggtggcaccggctatgtgcctgaagatggccttaccgcgcaacagctgtttgcaagtgcagacgggctaacatataacgactttcttatcctcccaggattcatagacttcattgctgacgaagtggatctgacctccgccctcacgcgcaaaattacacttaaaacacccctgattagctcaccaatggacactgttacagaggccgatatggctatagccatggccctcatggggggtataggatttatacatcacaactgcactccagaattccaggccaatgaggttcgcaaggtcaaaaagttcgagcagggtttcattactgatccggtggtgctgtctccttctcatacagtcggggatgttctggaggctaagatgaggcatgggttttcaggcatcccaataaccgaaacaggcactatgggctcaaaactcgtaggaattgtgacatctcgggatatagatttcctggccgaaaaggatcacaccacactgttgtctgaagtgatgacaccacgaattgaacttgtggtagcgcctgccggagttacactaaaggaggccaatgagatactgcaacggtcaaagaaaggcaaacttccaattgtgaatgactgtgatgagctggttgcgattatcgctcggacagatctgaagaagaatagagattaccccctggccagcaaggactcccagaagcagctcctgtgcggcgcagctgtgggaacacgggaggatgacaaatatcgcctggacttactaacccaggcgggagtggacgtgatcgtgctggactcatctcagggaaattccgtgtatcagattgccatggttcattatattaagcagaaatacccacacttacaggtcattggtggtaacgtagtcactgcagcccaggcgaaaaatctcatcgatgcgggagtcgacgggctaagagtgggaatggggtgtggaagcatatgcatcacccaggaagtgatggcatgcgggcgacctcagggaacagcagtttataaggtggcagagtatgctagacggttcggcgtgcccattatcgcagacggcggaattcagaccgtcggccacgtagtcaaggccctggccctcggcgcatctacagtgatgatgggcagcctgctggcagcaactacagaggcaccaggtgaatacttctttagcgatggcgtgcgactcaagaagtatcgcggtatgggaagcttagatgccatggagaagagcagcagctcacagaaacggtatttctcggaaggagataaggtaaaaatcgcacagggcgtaagtggctcaattcaagataagggctcaattcagaaatttgtgccatatctgattgctggcatccaacacggctgccaggacatcggggctcggtcgctatccgtgctgagaagtatgatgtactctggcgagctgaagtttgagaaacggaccatgtcagctcagattgaggggggtgtgcacggtctgcactcttatgagaagaggttgtactag

SEQ ID NO: 226682 - DNA, 1770 bp, synthetic construct
  misc_feature 1..1770: note = Description of Artificial Sequence: Synthetic coding sequence
  source 1..1770: mol_type = other DNA
atggagggcccactgaccccacccccactgcaagggggaggagccgcagcggtgcccgagccaggtgcgagacaacacccaggccacgagaccgcagcccagaggtactccgcacgcctgcttcaagctggttatgagccagagtcttgttttctcctggagttgtcttctgtcgtactcctggcaggcgtaggcgttcaaatggatcgcctcaggcgtgcgtctatggctgattatttgatctccggcggaacaggctatgtgcccgaggacggactgacagcacagcagctctttgcaagcgccgatggcctgacatacaacgacttcctgattctgccagggttcattgactttattgcagacgaagtggatctgacatccgctctgacacggaagataacacttaagactccgctgatttcatctcccatggatactgtcaccgaggcggatatggcaatcgccatggccctgatggggggtatcggcttcatccaccataattgcactcctgaatttcaggcgaatgaggttcgcaaggtcaagaaatttgagcaaggttttattacagatcccgtggtcctgtcaccaagccacacagtaggtgacgtcctggaagctaaaatgcgtcacggcttttctggcatcccgatcaccgagaccggaactatgggaagtaagctcgtgggcatcgtcacctcgcgtgacatcgattttcttgctgagaaggatcatacaacactgttatccgaggttatgactcctcgtattgagctcgtagtggcgcctgccggagtaaccctcaaagaggctaacgaaatcctgcagagaagtaaaaaagggaaactcccaatagtaaatgattgtgatgaattagtcgcaataattgcccgaaccgacctgaagaagaatcgggattatcccctcgcctcaaaagattcccagaagcagttgctgtgtggggctgccgtcgggacgagggaggatgacaaatacagactggacctgctgacacaggctggagttgacgtgatcgtcctcgatagtagtcagggcaatagcgtctatcagatcgcaatggtgcactacatcaagcagaagtacccacacctgcaagttatcggaggcaacgtggtgaccgccgcacaggcaaaaaacctgattgacgcaggtgtcgacggacttcgcgtggggatgggctgtgggagcatttgtataacgcaggaggtgatggcctgcgggagaccacaaggcacagcagtgtacaaggttgcagagtatgccaggcgctttggcgtgcctatcatcgcagatggaggtattcagaccgtcgggcatgttgtaaaggccctcgccctgggcgcttctactgttatgatggggagtctactggctgccacaacagaggcccctggtgagtacttctttagcgacggtgtcagactgaaaaagtatcgcggaatgggtagtctggatgcaatggaaaagagtagcagctctcagaagcggtacttttctgaaggggataaagtaaagatcgctcagggagtctctgggagtatccaggataagggatccatccagaagttcgtaccatacttaattgctggcattcaacatgggtgccaggacattggagccaggagcctgtctgtgcttagatctatgatgtatagtggggagttgaagttcgaaaagcgcaccatgagtgcgcagatagagggcggagtgcacggtctgcactcttacgaaaagaggctctactag

SEQ ID NO: 226683 - DNA, 1593 bp, synthetic construct
  misc_feature 1..1593: note = Description of Artificial Sequence: Synthetic coding sequence
  source 1..1593: mol_type = other DNA
atggagggacccctgaccccgcctccgttgcaagggggaggcgcagctgcagtgcctgagcccggtgccagacaacacccaggtcacgaaacagcagcacagcggtatagcgctaggctcctgcaggccggatacgagcccgaaagtgacttccttatcttgcctggcttcatagactttatcgccgacgaagtagatctgacatccgccctgacaagaaagatcaccctgaagactcccctgatctcttcacccatggataccgtaaccgaggctgacatggccattgcgatggccctgatgggcggtatcggcttcatccaccacaattgcacaccagagtttcaggccaacgaagtacgaaaggtcaagaagttcgaacagggcttcatcacggatcctgtggtgctgagtccttcccacaccgttggggacgtgcttgaggccaaaatgcggcatggcttcagcgggattccaattacggagacagggacgatgggttcgaagctggtcggcatcgtgactagccgagacatcgatttcctggccgaaaaggatcacaccacactgttgtcggaggttatgacacccagaattgagttggtcgtggcccctgccggtgtgactctcaaggaagctaatgagattctgcagagatcaaagaaaggcaaacttcccatagtcaacgactgtgacgaactggtcgctatcatagcgcgtaccgacctgaaaaaaaatagggactaccccctcgcttctaaggattcacaaaagcagttgctgtgcggagcggcagtgggaacccgggaggacgataaatatagacttgacctcttgacccaggctggagtagatgtgatcgttttggattcctcgcaaggcaattccgtgtatcagattgccatggtgcactacattaagcaaaagtacccacatcttcaggtcatcggcggaaacgtagtaactgcagcccaagccaaaaacctgatcgacgccggagtcgatggactgagggttgggatgggctgcggctcaatttgcataactcaggaggttatggcctgcggtcggcctcagggcaccgctgtttacaaagtggctgagtatgcacgacgattcggggtgcccatcatcgctgacggtggcatacaaacagtgggacatgtggttaaggccctcgccttaggcgcttctacagtgatgatgggctccctcctggccgcaacaactgaggcccctggggagtatttcttttccgacggcgttcgattgaagaaatatagaggcatggggtcattggatgcgatggaaaagtctagctcctcacagaagaggtacttcagtgagggcgacaaggtgaagatcgcacagggtgttagcggaagtatccaggataagggttccatacagaaatttgtcccttacctgatcgcgggaatccaacacggttgccaggacatcggggcacgttctctctcagtcctccgaagcatgatgtattcaggagaactgaagtttgagaaaagaacaatgtctgcgcaaatagagggtggagtacacggtctgcatagctacgagaagcgcctctattag

SEQ ID NO: 226684 - DNA, 1701 bp, synthetic construct
  misc_feature 1..1701: note = Description of Artificial Sequence: Synthetic coding sequence
  source 1..1701: mol_type = other DNA
atggaagggcctcttaccccacccccactgcaaggcggtggtgcagctgccgttccagaaccaggagcgaggcagcaccccggacacgagactgcggcacagcggtactcggcacgactgcttcaggcgggttacgaacctgagtcccccagactagacctggcaactcatcctacaacacctagatccgagcttagttctgtagtgttgctggccggagtgggagtacagatggaccgcttgaggcgtgcctctgactttctcatcctgccaggttttattgatttcattgctgacgaggttgatctgacatcagcacttacaaggaagatcactctcaaaactccactaatctcctcccctatggatactgttacagaagctgacatggcaatcgctatggctctcatggggggtatcgggttcatacaccataactgtacccccgaattccaggcaaacgaggtgagaaaagtcaaaaagttcgagcaaggattcataactgatcctgttgtgttatccccgagccatacagtgggggacgtgctggaagctaaaatgcggcatggttttagtggcatccctatcaccgagactggaaccatggggtcaaagctggtgggcatcgtgacttctcgtgatatcgactttttagcagagaaagatcataccacgctgctgtctgaggttatgacccctaggatcgagctagttgtggctccagccggagttactctcaaggaggccaacgaaatcctccagaggtccaaaaaaggtaagctgcctatcgtgaatgactgcgacgaactggttgcaattattgcccgtaccgatctcaaaaaaaaccgagactacccacttgcgtccaaggactctcagaagcagctgctctgcggcgcagcagttggaacaagagaggatgataagtaccgtttagacctgctcacacaggcaggtgtggatgtaatcgtgcttgattcttctcagggcaatagtgtgtatcagattgccatggtgcattatatcaagcagaagtatccccatcttcaggtgatcggcggaaatgtagtgacagctgcgcaggcaaagaatttgattgacgcaggcgttgatggtctccgcgtcggcatggggtgtgggtctatttgcataacccaggaggtcatggcctgcgggagaccccagggtaccgcagtgtataaggtggccgaatatgctaggagattcggtgttcctatcattgctgacggcggtatccagactgtgggccacgttgtgaaggcattggcccttggggcttctacggtaatgatggggtcgttactcgcagccactacggaggcaccaggagagtactttttttcagacggcgtcaggctcaagaaataccggggtatgggctctctcgacgccatggaaaagtcatcgagttctcagaagaggtacttttctgagggggataaggtgaaaatagcccagggggtatcaggatccatacaggataaaggttctatacagaagtttgtgccatacttgatcgctggcattcaacacggatgccaggatatcggcgcaagatcacttagtgtgctaaggtccatgatgtacagcggagagctcaaatttgagaaaaggaccatgtccgctcagattgagggtggcgtccatggcctgcattcctatgagaaaaggctctactag

SEQ ID NO: 226685 - DNA, 1530 bp, synthetic construct
  misc_feature 1..1530: note = Description of Artificial Sequence: Synthetic coding sequence
  source 1..1530: mol_type = other DNA
atggccgattatctgatcagtgggggaacagggtatgtccccgaagacggactcaccgcacagcagctgttcgcctccgccgatggactcacttacaatgacttcctcatcttgcctggattcatagacttcatcgccgacgaggtagatctgacttcagcactgacccgaaagattacactgaagactcccctaatcagcagccctatggacacagtcacggaggccgatatggccatagcgatggctttaatgggtgggatagggttcatacaccacaattgcacccccgagtttcaggccaacgagaagtttgaacaaggattcataaccgatcctgttgtgctctctccctctcatacagtcggcgacgtgttggaggctaagatgcggcacggcttctcaggcatccccatcaccgaaaccgggactatggggtccaagctcgtcggcattgttacctcacgggacatagacttcctggctgagaaggatcacaccacgctactctcagaggtgatgacccccagaatcgagttggtggtggcccctgcaggggtaaccctgaaagaggccaatgagatattacagcgctctaagaaaggcaaactacctatcgtgaatgactgtgacgagttggttgctattattgcacggactgatctgaagaaaaatagagactacccgttagcaagcaaagactcccagaagcagttgctctgtggagccgcagtaggaacccgagaggatgataaataccgcctagacctcctaactcaggctggggttgatgttattgtactggattcatcacaaggcaactcggtttaccagatcgcaatggtacactacatcaaacagaaatatcctcatctgcaagtgattggaggcaacgtcgtcactgcagcgcaggctaagaacctgattgatgccggtgtcgacggactgagagttggaatggggtgtggaagcatttgcatcacacaggaagtgatggcttgcggcaggccgcaaggcacagccgtgtataaagtcgctgagtacgcgcgacgcttcggagtgccaattattgccgatgggggaattcaaactgtcgggcacgtggtgaaagcgctggccttgggagcaagcactgttatgatgggtagtttgctggcagcaaccacagaagcccctggcgaatattttttttccgacggtgtacgcctcaaaaagtatcggggtatgggcagccttgatgccatggaaaaatcttcctcctcacagaaacggtatttctctgagggggacaaagttaaaatcgcgcagggcgtgagcggctcaattcaggataaaggatcaatacaaaagttcgtcccttacctgattgcagggatacagcacgggtgccaggacatcggcgctagatccctctcagtgctgcgctccatgatgtactccggagagttaaagtttgagaagcgaaccatgagcgcacagatagaaggcggtgtccatggactgcattcctatgaaaagaggctgtattag

SEQ ID NO: 226686 - DNA, 1470 bp, synthetic construct
  misc_feature 1..1470: note = Description of Artificial Sequence: Synthetic coding sequence
  source 1..1470: mol_type = other DNA
atggcagattatctgatttctggaggcaccgggtacgtgccagaagatggtcttactgcccagcagctttttgcttcggcggatggattaacctacaacgattttttgatcctgcccggattcatagattttatcgcagacgaggtcgacttaacctccgcattgaccaggaaaattacactaaagacccctctgatttcttcccctatggataccgtgacggaggctgacatggcaatcgcgatggctaagttcgagcaggggtttattaccgaccccgtcgtcctcagtccctcacatactgtgggcgacgttctggaggccaaaatgcgccatgggtttagcggtattcccattacagagacgggaacaatgggctccaaactggtgggaattgtgacgagtcgggatattgactttctcgcagagaaggaccataccaccctcttgtccgaagtcatgacacccaggatcgagctggtagtcgctccagcgggagttaccctgaaggaggccaatgagatcctgcaacgctccaagaagggaaaactgccgattgtgaacgactgtgatgaactggttgctattatcgccagaaccgatttgaagaagaatcgggattaccccctcgcaagcaaggacagccagaagcagctgctatgtggggctgctgtaggcacacgcgaggacgataagtaccggctggacttattgactcaagcaggcgtggatgtgattgttcttgacagctcgcagggcaattctgtctatcagattgccatggtgcactacattaagcaaaaatacccacacctccaagtaatcggcggaaatgtggtgactgccgctcaggccaagaatttgatcgatgcaggcgtcgacggcctgcgagtgggtatgggttgtggaagtatctgtatcacacaagaggtgatggcctgcggcagaccccaggggacagcagtgtataaggtagcggagtatgctcgccgttttggggtgccaataatcgccgatggtggcattcagaccgttggacatgttgtgaaagcccttgccctaggtgcaagtacagttatgatgggaagtcttctcgctgccactacagaggcccctggggaatattttttcagcgatggtgtccgtctcaagaaataccggggtatgggaagtctggatgcgatggaaaaatcaagctcatcacagaagagatactttagtgaaggcgataaagttaagatcgcacagggtgtaagcgggagcattcaggataaggggagcatccagaagtttgtgccatatctgatagctgggattcagcatggctgccaggacattggcgctagaagcttgtccgtgctgcggtcgatgatgtactcaggagaactgaagttcgaaaaaaggactatgtccgcccagatagagggaggtgtgcatggacttcacagttatgaaaagaggctctactag

SEQ ID NO: 226687 - DNA, 1545 bp, synthetic construct
  misc_feature 1..1545: note = Description of Artificial Sequence: Synthetic coding sequence
  source 1..1545: mol_type = other DNA
atggccgattatctaatctctggaggaacctcctacgttcccgacgacggactcacggcacagcagctgttcaactgcggagacggcctcacgtataatgacttcctgattctgcctggatacattgactttaccgcagatcaagtggaccttaccagcgcgcttaccaaaaagattactctgaaaacgcctctggtcagtagccccatggacactgttactgaggctggcatggcgattgcgatggccctgaccggaggcatcggatttattcaccataactgcacgcccgagttccaagccaacgaagtccggaaggtaaaaaagtacgaacagggcttcatcacagatcccgtggtgctcagccctaaggaccgcgtgcgggatgtgttcgaagccaaggctcggcatggattctgtggtattcccattaccgataccgggcgtatgggctctcggctcgtgggtattatctcatcccgggatatcgactttctcaaggaggaggagcatgattgcttccttgaggagataatgaccaagagggaggatctagtggttgcacctgctggtatcacactcaaggaggcaaatgaaattctgcagcgaagcaagaaaggaaaacttccgattgttaatgaggatgacgagcttgtggccatcattgccaggaccgatctgaaaaaaaaccgcgactacccacttgcatctaaggacgctaaaaaacagctgctctgtggcgcagcgattggtacccacgaggatgacaaatacagactcgatctgctggctcaggccggagtggatgtcgtggttctagacagctcccaggggaattcgatatttcagattaatatgataaagtatatcaaggacaaatatcccaatctccaggtgatcggaggtaatgttgtaaccgcagcacaggctaagaatctgattgatgcgggagtcgacgcgctgagggtgggcatgggatccgggtcaatttgcatcacacaggaggttctcgcatgtggccgtccacaggctactgccgtctataaagtgtcagagtacgcaagaaggtttggggtccccgtaatcgcagacggcggaatacagaacgttggccacattgctaaagcgctagctctcggggcttccaccgtaatgatgggaagtctcctggctgctacgaccgaagcccctggggagtactttttctccgatggcattagactgaagaaatatagaggaatgggctccctggatgcgatggacaagcatctgtccagtcagaatcgctacttctctgaagccgacaaaattaaagtagctcagggcgtttccggtgccgtgcaggacaaaggttcaatccacaagtttgtgccatatctcatagcaggcatacagcattcttgccaggacatcggcgcaaagagtctcactcaagttcgtgccatgatgtactctggcgagctgaaatttgagaaaagaacttcctccgctcaggtggagggaggcgtgcatagccttcactcttacgagaaacgcctgttttag

SEQ ID NO: 226688 - DNA, 1074 bp, synthetic construct
  misc_feature 1..1074: note = Description of Artificial Sequence: Synthetic coding sequence
  source 1..1074: mol_type = other DNA
atggctgattatttaatttctgggggaaccagctacgtgccggacgatggtctgacagcacaacagttgttcaactgcggcgatgggctgacatacaacgacttccttattctaccgggatacatcgattttaccgccgatcaggtggacctaacctctgctctgacaaaaaaaatcacattgaagactcccctggtttcgagccccatggacactgtgaccgaggccggtatggccattgctatggcactgacaggaggcattggattcattcaccacaattgcactccggagttccaagctaacgaagtgcgaaaggtcaaaaaatacgaacaggggttcattaccgaccctgtggtgctctcaccaaaggatagggttcgagatgtttttgaagccaaagctcggcatggcttttgcggcatcccaattactgatacaggacgcatgggaagtagattagtggggatcatttcttctagagacatagattttctgaaggaagaagaacacgattgcttccttgaagagattatgactaaacgcgaggacctcgtggtagcaccggcaggaatcacactgaaggaggcgaacgaaatccttcagcggtcgaagaagggcaagcttcccatcgtgaatgaagacgatgagctggtggctattatcgctcggactgacttgaagaaaaacagagactaccccctggcctctaaggatgctaaaaaacagttgctgtgtggtgccgctatcgggacgcatgaggacgacaaatatcgactggatctactcgctcaagccggagtagatgtagtcgtgctggactcatctcaagggaattctatatttcagatcaacatgattaagtacattaaggataaataccccaatctgcaagtaattgggggaaacgtcgtgaccgctgcccaagcgaaaaacctgattgacgctggtgtcgatgcactgcgggtcggcatgggcagcggttctatttgcatcactcaggaagtgctggcctgtggccgtccacaggccacagctgtttgtactcagaagcaacacccacactttcagtag

SEQ ID NO: 226689 - DNA, 501 bp, synthetic construct
  misc_feature 1..501: note = Description of Artificial Sequence: Synthetic coding sequence
  source 1..501: mol_type = other DNA
atgcttagaggggtcttaggtaaaacgtttagactcgtcggctataccatacaatacggctgtatcgcacactgcgcattcgagtatgtgggtggagttgtgatgtgctccggaccttctatggagccaactattcagaacagcgatatcgtgttcgcggaaaatctgtctagacacttttacgggatacagcggggagatatcgtaatcgccaagtcgccctcagaccctaagagcaacatctgtaagagggtgattggactggagggagacaaaatactgactacctctccaagtgacttcttcaagagtcattcttacgtgcctatgggtcatgtttggctggagggtgataatctgcagaatagcactgactcgagatgttacggcccaatcccttacggtttaattagaggtcgaatcttttttaaaatttggcccctgagcgattttggttttctaagagcaagccccaatggacaccgcttctctgatgattag

SEQ ID NO: 226690 - DNA, 324 bp, synthetic construct
  misc_feature 1..324: note = Description of Artificial Sequence: Synthetic coding sequence
  source 1..324: mol_type = other DNA
atgctccgaggcgtactcgggaaaacttttcggctggtggggtatacaattcagtatggctgtatcgctcactgcgcatttgagtatgtgggcggtgtggttatgtgttctggtccctctatggaacccacaattcagaatagcgacatcgtctttgccgagaatttatcaaggcacttttacgggattcagaggggcgacatcgtgatcgctaaatcaccctcagaccccaaatccaatatctgcaaacgggttatcggactagagggtgataagatcctcacaacctctccctcagattttttcaagtcccactcctattag

SEQ ID NO: 226691 - DNA, 291 bp, synthetic construct
  misc_feature 1..291: note = Description of Artificial Sequence: Synthetic coding sequence
  source 1..291: mol_type = other DNA
atgctgcggggtgtcttggggaagacatttcgactggtcggctacactattcaatatgggtgtattgcccactgtgccttcgagtatgtcgggggagtcgtgatgtgtagcggcccatctatggagccaaccatccagaatagtgacatagtgttcgccgaaaatctttctcggcacttttacggtattcagcgcggtgacattgtcatcgcaaagtctccgtctgacccaaagagcaatatttgcaaacgagtgatcggcctggagggcgacaaaattttaacaacctag

SEQ ID NO: 226692 - DNA, 501 bp, synthetic construct
  misc_feature 1..501: note = Description of Artificial Sequence: Synthetic coding sequence
  source 1..501: mol_type = other DNA
atgttaaggggtgtgttgggtaaaacatttaggctcgtcggctataccatacagtatggctgcatcgctcactgtgcatttgagtacgtaggcggagtagtcatgtgcagcgggccatcaatggaaccgaccatccagaactctgatattgtcttcgcagaaaacctgtctaggcatttctacggaattcagagaggggatattgtgatagccaaatcccccagtgatcctaagtcaaacatctgtaagagggtgattggtctcgagggcgataaaatcctgaccacgagcccctctgatttcttcaagtcgcatagttacgtccccatgggacacgtgtggctcgagggcgacaatctgcagaatagtactgattctcggtgctatggccctattccttacggcctgatcagggggagaatcttcttcaagatatggcctctttctgatttcggatttctccgagctagccctaacggccacaggttcagtgatgattag

SEQ ID NO: 226693 - DNA, 528 bp, synthetic construct
  misc_feature 1..528: note = Description of Artificial Sequence: Synthetic coding sequence
  source 1..528: mol_type = other DNA
atggcccagtcgcagggttgggtcaagcgctacatcaaggctttttgcaaggggttctttgttgcggtcccggtggctgtgacctttctggatagggttgcctgcgtggccagggtggagggggcaagtatgcagccctccctgaatccaggtggatcccagagctctgacgtcgtgctacttaaccattggaaggtccgtaacttcgaagtgcataggggggacattgtgtccctggtatctcccaaaaatccggaacagaagattattaagcgggtgatcgcgttggagggcgatatagtacgcacaatcgggcataaaaacagatatgtgaaagtcccccgaggccatatctgggtggagggagaccatcacggtcactcgttcgattccaacagttttggccctgtgagtcttgggttactgcatgcacatgccacccacatcctttggcccccagagcgatggcaaaaacttgaaagcgtcctacctcctgagcggttaccagtccagcgcgaggaggaatag

SEQ ID NO: 226694 - DNA, 528 bp, synthetic construct
  misc_feature 1..528: note = Description of Artificial Sequence: Synthetic coding sequence
  source 1..528: mol_type = other DNA
atggctcagtcccagggctgggttaaacggtacattaaggccttctgcaaagggttcttcgttgctgtgcctgtggcagtgacattcctggatagggtagcgtgtgtggccagggtcgaaggtgctagcatgcagccctccctgaaccccggaggctctcaaagttctgatgtggtcttgttgaatcactggaaggtcagaaattttgaggtccaccgaggggacatcgtgagccttgtaagccctaaaaaccccgagcaaaagattatcaagagagtcattgccctggaaggcgatattgtccggacaattgggcacaaaaatcgttacgttaaggttccacgcggacatatttgggtggagggggaccaccatggacattcctttgacagcaactctttcggtcccgtgtctctagggctgctccatgctcacgcgactcatatcctgtggcctcccgaaagatggcaaaagctggagtccgtgctgcccccagagcgcttacctgtacagagggaggaagagtag

SEQ ID NO: 226695 - DNA, 528 bp, synthetic construct
  misc_feature 1..528: note = Description of Artificial Sequence: Synthetic coding sequence
  source 1..528: mol_type = other DNA
atggcccaaagccaaggatgggtcaaaaggtacattaaggccttctgtaagggctttttcgtggcggtgccagtggcagtgacattccttgatagagtggcctgcgtcgccagggttgagggcgcatcaatgcagccctccctgaatccaggtggatctcaaagttccgacgtcgtactcctcaatcactggaaggtccgtaattttgaggtgcatcggggtgacatcgtctctctggtgagtcctaagaatcctgagcagaaaataataaaacgggtgattgccttggagggagacatcgttcggacaatcgggcacaaaaacagatatgtcaaagtgccgcgtgggcacatatgggtcgagggagaccaccacggccacagttttgacagcaactccttcggtcccgtatctctgggcctgcttcatgcccatgctacccatattctatggccacccgagcggtggcagaagctagaatctgtcttgccccctgaacgccttccagtgcagagggaggaagaatag

SEQ ID NO: 226696 - DNA, 333 bp, synthetic construct
  misc_feature 1..333: note = Description of Artificial Sequence: Synthetic coding sequence
  source 1..333: mol_type = other DNA
atggcccagagccaaggctgggtgaaacgttacatcaaggcgttctgcaaagggttcttcgtcgcggttccagtggccgtcacatttctcgatagggtcgcctgtgtggcaagggttgagggtgcctccatgcagccctccttgaacccaggcggttcgcagagcagcgacgtagtgctgttgaatcattggaaggtgaggaattttgaagtgcatcgaggagacatcgtgagtctggtttcacccaagaatcctgaacagaagatcatcaagcgcgtcatcgcccttgagggcgatatcgtgagagacggtaggaaactgaagaggatctag

SEQ ID NO: 226697 - DNA, 240 bp, synthetic construct
  misc_feature 1..240: note = Description of Artificial Sequence: Synthetic coding sequence
  source 1..240: mol_type = other DNA
atggctcagtcacaaggctgggtgaaacgatatataaaggccttctgcaaaggcttttttgtcgctgtgcccgttgccgtaacctttctcgatcgagttgcctgtgttgctagagtagaaggcgcttccatgcagccgagcttgaaccctggcggaagccaaagctcagacgtggtcctcctaaaccattggaaggtgcgcaatttcgaggtccatcgcggagatattgtctccctctag

SEQ ID NO: 226698 - DNA, 528 bp, synthetic construct
  misc_feature 1..528: note = Description of Artificial Sequence: Synthetic coding sequence
  source 1..528: mol_type = other DNA
atggctcagagccaaggctgggtcaaaagatatattaaagccttctgtaaaggcttctttgtggcagtccccgtggccgtcaccttccttgaccgagttgcctgtgttgcaagggttgagggcgcttccatgcagccttcactgaacccagggggaagccagagttccgacgtcgttctgcttaatcactggaaggtgcgtaatttcgaggtccatcgaggtgacatcgtatccctggtcagccctaaaaatcctgaacagaagatcattaaaagggtgattgctctggaaggtgacattgtgcggacaatcgggcacaaaaacagatacgtgaaggtccccaggggacatatctgggtggagggcgaccaccacggccactcctttgattcaaactccttcggtcctgtttctttagggctcctccacgcccatgctacccacatcttatggccgccagagagatggcaaaagctggaatcggtactgccccctgaacgcctacctgtgcagagggaagaagagtag

SEQ ID NO: 226699 - DNA, 555 bp, synthetic construct
  misc_feature 1..555: note = Description of Artificial Sequence: Synthetic coding sequence
  source 1..555: mol_type = other DNA
atggtccgcaaactcaagtttcatgagcaaaaattgttgaaacaagttgacttcttgaactgggaggttacagatcataatctgcacgagctgagggtccttcggagatatagactgcagcggagagaagactacactcgctacaaccagctgagtcgtgctgtcagagagttagcacgtcgcctccgcgatctccccgagcgcgaccagttccgagttagggcaagcgcagctctcttggacaagctttatgctctcggtctcgtgccaacacgaggctctttggagctatgcgactttgtcactgccagtagcttctgccgcagaagactacctactgtgttgctcaaactgagaatggcacagcacctgcaagctgcggtggcatttgtagaacaggggcacgtgcgtgtcggccctgacgtggtgaccgatcctgctttcctggtgactagatctatggaagatttcgtgacgtgggtagactcttcaaagattaagaggcacgtgctcgagtacaacgaagaaagagacgattttgatcttgaggcttag

SEQ ID NO: 226700 - DNA, 555 bp, synthetic construct
  misc_feature 1..555: note = Description of Artificial Sequence: Synthetic coding sequence
  source 1..555: mol_type = other DNA
atggtgagaaagctcaagttccacgagcaaaagctactgaaacaggtcgatttcctcaactgggaggtaacagaccacaacctccatgagctcagagtcctcagacgctatcggctgcagaggcgtgaagactatactcgctacaatcagctgagccgggctgtccgagaactcgctaggagactccgggatctgccagagagagatcagttccgggtcagagcttcagctgcattgctggacaagctgtacgctttagggctcgtcccaacaaggggcagcttggagctttgcgacttcgtgacagcgtcttctttctgcagacggagactgccaacagtgctactgaagctcaggatggctcagcatcttcaagccgcagtagcttttgttgagcaaggacatgtaagagtgggcccagacgtcgttactgatccggcttttctagtgacccgtagcatggaggacttcgtgacatgggtggatagttccaagatcaagagacacgttctggaatacaacgaagagcgcgatgacttcgatctggaagcatag

SEQ ID NO: 226701 - DNA, 96 bp, synthetic construct
  misc_feature 1..96: note = Description of Artificial Sequence: Synthetic coding sequence
  source 1..96: mol_type = other DNA
atggaagatttcgtgacttgggttgattcgtctaagataaagaggcatgttctcgagtataatgaagaaagggatgactttgatcttgaagcatag

SEQ ID NO: 226702 - DNA, 876 bp, synthetic construct
  misc_feature 1..876: note = Description of Artificial Sequence: Synthetic coding sequence
  source 1..876: mol_type = other DNA
atgctcaggcgggaagctcggttaagaagggagtacctctatagaaaagccagggaggaggctcagcggagcgctcaggagaggaaggagagattgagaagagccttggaagaaaatagactgattcctaccgaactgaggagggaagctctggcactccaggggagtctggagtttgatgacgccggtggcgagggtgtgacttcccacgtcgacgacgagtatagatgggctggcgtcgaagacccaaaggtgatgatcactacctcaagagatccatcatctcgcctcaaaatgtttgctaaagaactcaaactcgtgtttcctggggctcagcgcatgaaccgaggcagacatgaagttggggctctagtgagagcgtgcaaagcaaacggtgttaccgacctgttggttgtgcacgagcataggggtacacccgtcggcttaatcgtatctcacctcccattcggcccaaccgcttactttactctgtgtaatgttgtcatgagacacgacataccagatctcggaacaatgtccgaagcaaagccacatttaattacccacgggttctcctctcgactgggcaaacgtgtttcggacatcctgagatacttgttcccagtcccgaaagatgatagccaccgtgtgattacatttgccaaccaggacgattatatcagtttcagacatcacgtgtataaaaaaaccgatcataggaacgttgagctcaccgaggttggtccccgattcgagctgaaactgtatatgatcagactgggcacccttgaacaggaagcaactgctgacgtcgaatggagatggcatccttatacaaacactgccagaaagcgggtgttcctgtctacagagtag

SEQ ID NO: 226703 - DNA, 2928 bp, synthetic construct
  misc_feature 1..2928: note = Description of Artificial Sequence: Synthetic coding sequence
  source 1..2928: mol_type = other DNA
atggatctaaactcagccagtacagtggtgcttcaagttctgacccaggcaacctctcaagacacagccgtgctcaagccagcagaggagcaactgaagcagtgggaaacacagcctggtttttattccgtcctgttgaatatctttacaaatcacaccctggatatcaacgtacggtggctcgctgtcctatactttaagcacggaattgaccggtattggcggcgtgttgcgccacatgcactctcggaggaggagaagacaactctgcgcgcaggtttgattacgaacttcaatgagcccattaatcaaatcgccacgcagattgccgtgctgatagcgaaggtcgcaaggctggattgccctagacaatggcccgagcttattcctactctaatcgaatcagtcaaagtacaggacgacctccggcagcatcgcgcactgttgacattctaccatgtgactaagaccctagctagcaaaagactggcggctgacaggaagttgttttacgatttagccagcgggatctacaacttcgcctgttcgctgtggaaccaccatactgacacttttctgcaggaggtgagcagcgggaatgaggcagccatactgtctagtctcgagcgtacactacttagcttgaaagtgcttagaaagctcacggtcaatggatttgtggaaccgcataaaaacatggaagtaatgggtttcctgcatggtatttttgagcgcctgaagcaattccttgaatgcagtcggtcaattggcaccgataatgtgtgtcgcgatcggctcgaaaagaccattatccttttcaccaaagtgctgctggatttccttgaccagcacccattcagcttcacccccctaattcaaaggagcttagaattttctgtttcttacgtctttaccgaggtgggcgagggcgtcacgttcgaacgttttatcgtgcagtgcatgaatctcattaaaatgattgtcaagaactacgcctacaaacccagtaaaaattttgaagactcctcccccgaaacactggaggcacacaagatcaaaatggcctttttcacatacccaaccttgaccgagatctgtcgcagactcgtgagccactattttctcttaaccgaggaagaactgaccatgtgggaagaggacccagaaggctttacggtcgaagagaccgggggagactcatggaagtactcactgaggccatgtaccgaggtcctgttcattgatatctttcacgaatacaatcaaactctgacccccgtgctcctggaaatgatgcagacactgcaaggaccgaccaacgtcgaagatatgaacgctctgctcatcaaagacgcagtatataacgctgtgggcctggccgcatacgagctctttgatagcgtggacttcgaccaatggttcaagaatcaactgctgccagagcttcaagtcatccacaacagatataaacctctgcggcgacgggtcatttggcttattggacaatggatctccgtgaagttcaaaagcgatctgaggccaatgctctacgaggcaatctgcaatctgctacaggaccaggatttggtggtgaggatcgagactgcaacaactctgaagctgactgtagatgacttcgagttccggaccgatcaattcttaccatacttggagacaatgttcacactgctcttccagctgttgcagcaggtgacagagtgcgataccaagatgcatgtcctgcatgtcctatcttgcgttatcgaaagagtgaatatgcaaatacgcccttatgtagggtgcctagtccagtacctgccattactttggaagcagtcagaagagcataacatgcttagatgcgccattctcaccaccctgattcacctggtgcagggcctgggggcagattcaaaaaatttgtacccctttttactacccgtcatccagttatccacggacgtcagtcaacctcctcacgtgtatcttctggaagatgggctcgagctgtggttagtaacactcgagaacagtccttgtatcaccccagagctcctgcgcatatttcagaacatgagtcccctgctggaacttagctcagagaacctccggacctgtttcaagataatcaacggttacatcttcctcagttccacggagttcctacaaacgtacgctgtgggcctctgccagtccttctgtgaactcttgaaagaaattacaaccgaaggacaagtccaggtgctcaaagtcgtggagaatgccctcaaggtaaatcctatacttggccctcaaatgttccagcccattctaccgtatgtcttcaagggcatcattgagggcgagaggtaccctgtggttatgtcaacttatctgggggtgatggggcgagtactgcttcaaaacaccagtttcttttcctctctcctgaatgaaatggcgcacaaattcaaccaagagatggatcagttgctgggaaatatgatcgagatgtgggtggacagaatggataatataacccagcccgaacgtaggaagctatcagccttggcattgctctcactactgccttcagataacagcgtgatccaagacaagttttgtggtatcatcaatatcagcgtcgagggactgcacgatgtgatgaccgaggatcctgaaacaggcacttacaaagactgcatgttgatgagccacctggaggaaccgaaggtaaccgaagatgaagaaccgcctaccgaacaagataagcggaaaaaaatgctggccctgaaggatcccgtgcacaccgtgagtctccaacaatttatatacgaaaagctcaaggcccagcaggagatgctgggggaacagggattccaaagcttgatggagacggtagacactgagatagtgacccaacttcaagaatttctgcagggcttctag

SEQ ID NO: 226704 - DNA, 3048 bp, synthetic construct
  misc_feature 1..3048: note = Description of Artificial Sequence: Synthetic coding sequence
  source 1..3048: mol_type = other DNA
atggtgcagcctatcattcatcttggctacgttgtctactctcttctatacttgggctacaagccggttcagcatgtcaccgctctcaacacggtgtcctcatgccacaagatggtttccatggatttgaactctgcctcaactgtggtgttgcaggttctgactcaggctacctcccaggacactgcagttctcaagcccgctgaggagcagttgaaacagtgggaaactcagcccggattctattccgtgcttctgaacatattcactaaccacactttagatatcaatgtccgctggttggccgtcctctacttcaagcacggaatagatagatactggagacgggtggcccctcacgctttgtcagaggaggaaaagaccactctgcgtgccggtttaatcactaacttcaatgagcctataaatcagattgccacacaaattgccgtgcttatcgccaaagtggcccgattagattgcccgagacaatggcccgagctgatcccaactctcatcgagagcgtgaaagtacaggatgatctgcgccagcacagggcacttcttactttctaccatgtcaccaaaacgctggctagtaaacgtcttgccgctgaccgaaagctgttttatgacctggccagcgggatctacaacttcgcatgttccctgtggaatcaccacacagacacattcttgcaggaggtatcgtctggtaacgaggcggctatcctgagcagtttggaacggactctgctaagcttgaaagtactgaggaaattaacagtgaacggcttcgtggagccgcacaagaatatggaagtgatggggtttctccacggcatttttgagagactgaaacagttcctggagtgctcccgaagcataggcacggataatgtatgtcgcgaccgtttagagaaaacaatcatcctgttcacaaaggtgttgttggatttccttgatcagcatcctttctcttttactcccctcatacagcggagtcttgaattcagtgtgagctacgtattcactgaagtgggcgagggagtcacattcgagcgttttattgtacagtgcatgaacttaataaaaatgatcgttaagaattacgcctataagcctagcaagaatttcgaggatagttccccagagacgctcgaggctcataagataaaaatggcatttttcacctatccaacattgacagaaatctgccgcagactagtatcacattactttttactgacagaggaagagcttaccatgtgggaagaagatccggaaggattcactgtcgaggagacgggcggagactcctggaaatattctctgcggccttgcacggaagtgcttttcattgatatctttcacgaatataaccagactcttactcccgtgctgttggagatgatgcaaaccctccagggccctacaaatgtggaggatatgaacgctttactcataaaagacgccgtgtataacgcggtcgggctggctgcttacgagctattcgatagcgtagactttgatcaatggttcaagaatcaattactccccgagctccaggtgatccacaaccggtataaaccactgcgccgaagagttatatggctaataggacagtggatctcagtcaagttcaaaagcgacctgcgaccaatgttatacgaagcaatctgcaacctgctgcaagaccaagacttagtagttagaatcgagacagctaccacgctgaagctgacagtggacgatttcgaattccgaaccgatcagtttctcccctatctcgaaacaatgttcacattgctctttcagctccttcaacaagtgacagagtgcgacactaagatgcacgttcttcatgtgctctcgtgcgtcatagaaagagtgaacatgcagattcgcccttatgtaggttgtcttgtccagtatttgccactcctgtggaaacagagcgaggaacataacatgctgaggtgtgccatcttgaccaccctgatccacttagttcagggtctcggagcagattccaagaatctgtacccttttctgctcccggtcatacagctctcaactgatgttagccagcctcctcatgtgtatctgctggaggatgggcttgagctctggctcgtgaccttagagaatagcccctgcatcacacctgaactgttgagaatcttccaaaatatgtctccgttgctggaactcagttcggaaaatttgcgcacctgcttcaagattatcaacgggtatatattcttatcatccaccgagttcctgcagacatacgcagtgggcctgtgccagagcttctgcgaattgctgaaggagataaccactgagggccaagttcaggtccttaaagtggttgagaacgctctcaaagttaatccgatcctgggaccccagatgttccaacctattctgccctacgtcttcaaaggcattatagagggggagcgctaccctgtcgtaatgagcacatatctgggagttatggggagggttttattacagaatacctccttttttagcagcctgcttaatgaaatggctcacaagttcaaccaggagatggatcagctgctgggcaatatgattgaaatgtgggttgaccgcatggacaacattactcagccggaacggcgaaagctcagcgccttggccttgttgtcactgctgccttctgacaactccgtcattcaggacaagttctgtggcattatcaacatttcagtggagggactgcatgacgttatgactgaagatccagaaactggaacgtacaaagactgcatgctcatgagccacctggaggaaccaaaagtgacggaggacgaggaaccacctaccgagcaggacaagagaaagaagatgttggcccttaaggacccagtccataccgtgagcctccagcagttcatctacgagaaactcaaggcccagcaagaaatgctgggcgaacagggcttccagtctttaatggagaccgtcgacactgagattgtgacccagttgcaggagtttctgcaagggttttag

SEQ ID NO: 226705 - DNA, 195 bp, synthetic construct
  misc_feature 1..195: note = Description of Artificial Sequence: Synthetic coding sequence
  source 1..195: mol_type = other DNA
atggacctcaactctgcttcaactgtggtgctgcaagtgctaacccaggccacctctcaggacacagctgttctgaaacccgcagaagagcagctgaaacagtgggagacccagcccggattttacagtgtgctgcttaatatctttaccaatcatacccttgatattaatgttcgctggcttgctgtgttatag

SEQ ID NO: 226706 - DNA, 489 bp, synthetic construct
  misc_feature 1..489: note = Description of Artificial Sequence: Synthetic coding sequence
  source 1..489: mol_type = other DNA
atggacctgaactcagccagcaccgtagtgctgcaggtactaacacaagccactagtcaggacacagccgtgctcaagcctgcggaggaacagcttaaacagtgggagactcagcccggattctacagtgtgctgctgaatatttttacaaatcacactctcgacatcaatgtgagatggctggcagtgctctactttaaacatgggattgatagatactggcgcagggtggcgcctcacgctctgtcagaagaagagaagaccactttacgggctggtctgattacgaattttaatgagccaattaatcagatcgcaacccagattgcagtgctcatcgccaaggtggcgagattggattgtccaagacagtggcctgaacttatacccacccttattgagtccgtgaaggtgcaggacgacttgcgccagcatcgagcactgctgacgttttaccacgtcactaagactctagcaagtaaacgctag

SEQ ID NO: 226707 - DNA, 450 bp, synthetic construct
  misc_feature 1..450: note = Description of Artificial Sequence: Synthetic coding sequence
  source 1..450: mol_type = other DNA
atggacctcaatagcgcttctactgtggtattgcaggtgcttacacaggctacctcacaggacacagcagtgttaaagcccgctgaagaacagctcaaacagtgggaaacacaacccggtttttatagcgtgttattgaacatctttactaaccatacattggacataaacgttcgatggctggccgtcttgtacttcaagcacgggatcgatcgatattggagacgcgtggcgccacatgccctgagtgaggaggaaaaaaccaccttgagagcaggcctaattactaatttcaatgaacccatcaatcaaatagccacacagatcgcagtcttaattgcgaaagttgctcgattggattgccccagacagtggcccgagttgatacccacgttaattgaatcagtgaaggttcaggatgacttgcggcagcatcgtgccctgctctag

SEQ ID NO: 226708 - DNA, 1425 bp, synthetic construct
  misc_feature 1..1425: note = Description of Artificial Sequence: Synthetic coding sequence
  source 1..1425: mol_type = other DNA
atgatgcagacactgcaagggcctaccaatgtagaggacatgaacgccctgctgataaaggacgcggtgtataatgcagttggccttgctgcctacgagctatttgactctgtcgacttcgaccaatggtttaagaaccagctgctgcccgagctgcaggttatccataatcggtataaacctctgaggcggcgtgtgatttggttgattgggcagtggatttccgttaagtttaaaagcgacctgaggccaatgctatatgaagccatctgtaacttactgcaggaccaagatctagtggtccggatcgagacagcaaccactttaaagcttacagttgatgacttcgaattccgcacagatcaatttctcccttacctcgaaaccatgtttacactgctgttccagctgttacaacaggtgaccgaatgcgacacaaagatgcacgtcttacatgtgctctcctgtgtgatcgaacgagtcaatatgcagatccgcccttatgtagggtgcttggtgcagtacctgcccctgttgtggaagcaaagcgaagaacataatatgttgaggtgtgccatcctgactaccctaatccacctcgtgcagggcctgggagcagattcaaagaacttgtacccattcctgcttccagtaatccagctatctactgatgtgtcacaaccaccccacgtctacctcctggaggatggcctcgagctctggctggtcacccttgagaactcaccctgcattactcctgagctcttaaggatctttcagaacatgagcccactcttggaactgagcagtgagaacctccgaacctgcttcaagatcatcaacggctacatcttcttgtctagtactgaattcttgcagacctatgccgtgggcttgtgtcaaagcttttgtgagttactgaaggagatcactacagaggggcaggtgcaggtgcttaaagtcgttgagaacgcgctgaaagtcaatcctattttgggccctcagatgtttcaacccatcctgccgtatgtgtttaaaggcatcatcgaaggcgagcggtacccagtggtgatgtccacctacctgggcgtgatgggacgggttctgctgcagaatactagtttctttagcagtctactcaatgagatggcacataaattcaaccaagagatggaccagctcttaggcaatatgatcgagatgtgggtagaccgaatggataatatcacccagccagagagacgcaagctaagcgccctggctcttttaagccttctgcccagcgacaatagcgtgattcaggataaattctgtgggatcatcaatatctccgtcgagggcctacacgacgtgatgacagaggaccccgagaccggcacatacaaggattgtatgcttatgtcccacctcgaggaacctaagtag

SEQ ID NO: 226709 - DNA, 3117 bp, synthetic construct
  misc_feature 1..3117: note = Description of Artificial Sequence: Synthetic coding sequence
  source 1..3117: mol_type = other DNA
atggatccgaatactattattgaggccctgcgtggaacaatggaccccgcactgcgtgaagccgctgagcgtcagctgaacgaggcccataagtctctcaacttcgttagcactctgctacagatcacgatgtctgagcagctggatctgcccgtgcgacaggccggagtgatatatctgaaaaacatgatcacgcaatactggccagatagagagaccgccccaggggacatttcgccatatactattccagaagaagaccgtcattgtatacgagaaaacattgtggaggctataatacactctccagaacttatccgcgtgcagttaaccacttgtatacaccacattatcaaacacgactacccctctaggtggactgcaatcgtggataagatcggattctatctgcagagcgataactctgcttgttggctggggattctgctgtgcctatatcagcttgtgaagaactatgaatataagaagcccgaggagagatctcccctggtagctgcaatgcagcattttctcccagtcctgaaagatcggttcatccagttattgtctgatcagagtgatcaaagtgtgttgatccagaagcagatttttaaaattttttacgccctggtccaatacaccttacctttagagttgatcaatcagcaaaatctgaccgagtggatcgagattttgaagaccgtggtaaaccgagatgtgccaaacgaaaccctgcaagtggaggaggacgatcggcctgagttaccctggtggaaatgcaagaagtgggctctgcacatattggcccgtctttttgagagatacggaagtcccggaaacgtctccaaggaatacaacgagttcgccgaggtgttccttaaagcgtttgcagtaggggttcagcaggttcttctgaaggtgttgtaccagtacaaggaaaagcaatatatggcacctcgcgtgctgcagcagaccctgaactacatcaaccagggggttagtcacgcactcacctggaagaatctcaaaccccacattcagggaatcattcaggacgtaatttttcccttgatgtgctatacggacgcagacgaggagctctggcaagaggatccatatgaatacattaggatgaaattcgacgtattcgaagattttatatcccccaccaccgccgctcaaaccctcctgttcacagcctgttctaagcgtaaggaggtgctgcagaaaactatgggcttttgttaccaaattcttaccgagccaaatgcagaccccagaaaaaaagacggagccttacacatgatcggctccctggctgagatactccttaagaaaaaaatttataaggatcagatggagtacatgctgcagaaccacgtctttcccctgtttagtagcgagctgggctacatgcgagcacgtgcctgctgggtgctgcattatttttgtgaagtaaaattcaagtctgatcagaacctgcagactgccctagaactcaccaggcgttgcctcattgacgatagggaaatgcccgtgaaggtggaggccgcaattgctctgcaggttttgattagcaatcaggagaaggccaaggaatatataacccccttcattagaccagtaatgcaggctctgctccacattatcagagaaacagaaaatgatgatctgacaaacgtgattcaaaagatgatttgcgagtacagcgaagaagtaacacctatagcagtcgagatgactcagcacctggctatgacgtttaaccaagttattcagacagggcctgacgaggagggaagtgatgataaagcagtgacggcaatgggcatcctgaatactatcgataccctgctgagcgttgtggaggaccacaaggagatcacacagcagcttgagggtatctgtcttcaagtgattggaacagtgttgcagcagcatgtcctcgagttctacgaagagattttctcattggcgcacagcctcacttgccagcaggttagccctcaaatgtggcagttgctacctctggtgttcgaagtgttccaacaggatggtttcgactatttcacagatatgatgcctctgctgcataactacgtgactgtggataccgacaccctgctgagcgatacgaaatatcttgagatgatatactctatgtgcaagaaagttttgaccggggtcgcaggagaagacgcagaatgccacgcagctaaacttctcgaagtcatcatcctccagtgtaaggggaggggcatagatcagtgtatccctttgttcgtagaagcagctctcgagagactgaccagggaggtgaaaacgtctgaactgagaactatgtgtcttcaggtcgccatagcggctctctattacaacccacacctcctgctgaatactctggagaacctacgctttcccaataacgtggagcccgtcaccaatcacttcatcacacagtggctgaacgacgtggactgttttctaggacttcacgatcgcaagatgtgcgtactcgggctgtgcgcattgattgacatggaacaaatccctcaggtcctcaatcaggtgtcaggccagattttgccagccttcattcttctgttcaatgggttgaaaagggcctatgcatgccacgctgagcatgagaacgatagcgacgacgatgacgaagccgaggacgatgacgaaacagaagagctgggatctgacgaagatgacattgatgaagacggccaggagtaccttgaaatcctggccaagcaggccggagaggatggagacgatgaggactgggaagaggatgatgcagaagaaaccgccctggagggatacagcacaatcattgatgatgaggataacccggttgacgaatatcagatctttaaagctatttttcagacgatccaaaatcgcaaccccgtgtggtaccaggccctgactcatggtctcaacgaggaacagcgcaagcagttgcaagacattgcgacgctggctgaccagcgcagggccgctcacgaaagcaagatgatcgaaaagcacggaggatataaattcagtgcgcctgtggtgccaagcagctttaattttggaggccctgctcccggaatgaactag

SEQ ID NO: 226710 - DNA, 3114 bp, synthetic construct
  misc_feature 1..3114: note = Description of Artificial Sequence: Synthetic coding sequence
  source 1..3114: mol_type = other DNA
atggatcttaatcggattatacaagcgttaaagggaaccatcgatcccaagctaaggatagcagctgaaaatgaactgaaccagagctataaaatcataaactttgcgccatcattgctgcgcatcatcgtctcggaccatgtggagtttccagttcgccaggctgcagctatttatttaaagaatatggtgacccagtactggccggatcgtgaaccaccccctggcgaagcgatattccccttcaatatccatgaaaatgatagacagcagatacgcgacaacattgtggagggcattattcgctcccccgatctggtaagggtgcaactgaccatgtgtcttcgcgctattattaagcacgacttcccaggccactggcccggagtagtggacaaaatagattactatttgcagtctcagtccagcgcctcatggctggggtctctgctgtgcctgtatcagctggtcaagacctacgagtacaaaaaggcagaggagagggaaccccttataatagcgatgcagatctttttgccgagaatccaacagcaaatagtccagttgctgccggacagcagttactatagtgtgctgctccagaagcagattctcaaaatattttacgctcttgtacagtatgcactccccttgcagttggtcaacaaccaaacgatgaccacgtggatggaaatctttaggacaatcatcgaccgaaccgtaccacccgagacactgcatattgacgaggacgacagacccgagcttgtttggtggaaatgcaagaaatgggccctgcacattgttgcaagattgtttgaacgatacggttccccgggaaacgttaccaaagaatattttgaattttccgagtttttcttaaagacttatgcagtgggtatccaacaggtgttactcaagatcctggaccaataccggcagaaggagtacgttgcccctagagtgcttcaacaggcttttaactacctgaatcagggcgttgtgcactcaattacctggaagcagatgaaaccccacatacagaacatctccgaagatgtgatcttcagcgtgatgtgttacaaggacgaggatgaggagctgtggcaggaggacccgtacgagtacatcagaatgaagttcgacatattcgaggactacgcatctcctacgaccgccgcacagaccttactgtatacggccgctaagaagcgcaaggaagtcctgcccaaaatgatggctttttgttaccagattctcacagacccaaattttgaccctcgcaagaaagatggcgcattacacgttattgggtcgctcgcagaaatactgctgaaaaagtccttgttcaaagaccaaatggagctgttccttcagaaccacgtattccccttattgctgtccaatttagggtatctaagggctcgcagctgttgggttctgcacgcattttcctcactcaagttccacaacgagctcaatttgcgcaatgcagtggaactagctaaaaaatccctcattgaggataaggagatgccagtcaaggttgaagctgccctagccctgcagagcttaatttctaatcagatccaggctaaagaatatatgaaaccccacgtgaggcccatcatgcaagaactgctccatattgtcagggaaactgagaacgacgatgtgacgaacgtgattcaaaagatgatctgtgaatattctcaagaggtggcatcaattgccgtggacatgacgcagcacctggcagagattttcggaaaggtgctgcagagtgacgagtacgaggaagtcgaggacaaaacagttatggccatgggaatcctgcacacaatcgatactattctcactgtcgtggaagaccacaaagagatcacccagcagctggagaacatctgcctgcggatcatagaccttgtgctccagaagcacgtgattgaattctatgaggaaattctctctctggcttatagcctaacatgccatagtatttctccacagatgtggcagctgttaggcattctgtacgaggtgttccaacaggactgtttcgagtatttcactgacatgatgccactgctgcacaactacgtgacaattgatacagataccctcctgagcaacgccaagcatttggaaattttgttcacaatgtgccgtaaagtcctttgcggagatgccggagaggacgcggagtgccacgccgctaagctactggaggtcataattctccagtgcaagggaagaggaatcgaccagtgcattcctctcttcgtccagctcgttctggaaaggctgacaagaggagtcaagacaagtgaactgagaacaatgtgcctacaggtggctatcgctgcactgtactacaaccccgatctgcttctgcataccctggagcgaatacagttaccacacaaccctgggcctatcaccgtgcagttcatcaatcaatggatgaatgacactgactgttttctgggacaccacgacaggaagatgtgcattattggtctttcgattcttttggaactgcagaaccgcccaccagcagtcgatgccgtcgtagggcagatagtcccaagcattctttttcttttcttaggactcaagcaggtgtgcgctacccgccagctggtgaatcgtgaagataggtcaaaggcagagaaggccgacatggaggagaacgaggagatttcctcagatgaggaggaaactaacgtaaccgcccaggcgatgcaatcaaacaacggccgaggggaagacgaggaggaggaggatgatgattgggatgaagaagtcttagaggagacagcgcttgagggcttttcaacacctctggacctggacaacagcgtggacgaataccaattcttcacacaggctttgattaccgtccaaagtcgcgatgccgcttggtaccagctgctgatggcccctctgagcgaggaccagcgaactgcactccaagaggtgtacaccctcgcagaacaccgacgcaccgtcgcggaggccaaaaagaagatcgaacagcaggggggtttcacgtttgaaaataaaggcgtgctatcagcctttaactttggtactgtgccatccaataattag

SEQ ID NO: 226711 - DNA, 2499 bp, synthetic construct
  misc_feature 1..2499: note = Description of Artificial Sequence: Synthetic coding sequence
  source 1..2499: mol_type = other DNA
atggagtcccttacccttaagggctatgctcttccgttgcagctggttaacaatcaaactatgaccacctggatggagatttttcgcactattatcgaccggacagtgccaccggagactctccatatcgacgaagatgatcgacccgaattagtgtggtggaaatgcaagaagtgggcccttcacattgttgccagactgttcgaacgctacggaagccccggaaacgtcaccaaagaatactttgagttttcggagttcttcctaaagacctacgccgtagggattcagcaggttttgttaaagatcctggaccagtaccggcagaaagagtatgtcgcaccgagggtgctgcagcaggccttcaattacctgaatcagggggtggtgcattcaattacatggaaacagatgaagcctcacattcagaacatctcggaggatgtgatcttttcagtgatgtgctataaggatgaagacgaggaactgtggcaggaggacccttatgagtacattagaatgaaatttgatatcttcgaagactacgcttccccaaccactgctgcccaaaccctgttgtacactgctgccaaaaagaggaaagaagtgctgccaaagatgatggctttctgttatcagattctgacagacccaaactttgaccccagaaaaaaggatggagctctgcatgttattggatctctggcagagatactcctgaaaaagtccctgttcaaggaccaaatggaactctttttgcaaaatcatgtgtttcctctgctgttaagcaatctggggtacttgcgagctaggtcctgctgggtcctccacgccttctcgagtctgaagtttcacaacgagctgaatctacgtaatgctgttgaactggcgaagaagtcattgattgaggataaggaaatgcccgttaaagtggaagctgcactggctttacaaagtctgattagtaaccagatccaagcaaaggagtacatgaaacctcatgtgcgccctattatgcaggagcttctgcacatcgtacgcgagacagaaaatgacgacgttaccaatgtgatccagaagatgatctgtgagtattctcaggaagtagcctccattgccgttgatatgacacagcacctcgcagaaatcttcggaaaggtccttcagtctgatgagtacgaggaggtggaagacaaaaccgtcatggccatgggcatactgcacaccatagatactatacttactgtcgtggaggaccacaaagaaattacacagcagctcgagaacatatgcctgcgcatcatagatttggttctgcaaaagcacgttatcgagttctatgaagagatcttgtccctggcatacagcctgacctgtcacagcatctcaccccagatgtggcagttattaggcatactatatgaggttttccagcaagattgttttgaatacttcacggatatgatgccgctgttgcacaattatgtgaccatagacacggacacacttctgtctaacgcgaaacatctcgaaatacttttcacaatgtgccgtaaggtcctgtgcggggatgcaggcgaggacgcagagtgccatgctgccaaactgcttgaagtgatcatcttacagtgcaagggtaggggaattgaccagtgcatacccctgttcgtccaattagttcttgagagattgactcgaggagtcaaaacaagtgagctgcggaccatgtgcctgcaagtcgccattgctgctttgtattataatcccgatctccttctccacaccctggaacgaatccagctgcctcacaatcctgggcctataaccgtccagttcattaaccaatggatgaacgatactgattgtttcttgggacatcatgatagaaagatgtgtatcataggattatccatcctgctggagcttcagaatcgcccaccggctgtcgacgccgtggtgggccagatagtgcccagcattttgttcctgttcctgggactaaagcaggtgtgcgcaacccgccagctggtcaaccgcgaagacagatcgaaggccgagaaagctgacatggaggaaaatgaggaaatctccagcgacgaggaggaaaccaacgttaccgcacaggctatgcaaagcaataatggtcgcggagaagatgaagaagaagaagatgatgactgggatgaagaggttctggaggaaacggctcttgagggcttctctactcctttggatcttgacaattccgtagatgaatatcagtttttcactcaggctctgatcacagtgcagtcacgtgacgctgcgtggtaccagcttctgatggcccctttgagcgaggatcagagaacagcgctccaggaggtgtatactctcgcggaacatcgacggaccgttgccgaagcaaagaagaaaatagagcaacaaggaggattcacatttgaaaacaagggcgttctgagcgcgtttaactttggaacagttccttccaataactag

SEQ ID NO: 226712 - DNA, 1542 bp, synthetic construct
  misc_feature 1..1542: note = Description of Artificial Sequence: Synthetic coding sequence
  source 1..1542: mol_type = other DNA
ctatccagtggacacgaactggctaaggaatatatgaagccacatgtcagacctatcatgcaggagctcctccacattgtgagggaaactgagaatgacgatgtgactaacgttatccagaaaatgatttgcgaatacagtcaggaggtagccagtatcgctgtggatatgacccagcacctcgctgagatttttggaaaggtgttacagtccgatgaatacgaggaggtcgaggataagaccgttatggccatgggcatcctgcatacaattgatacaatcctgacggtcgttgaggatcataaggagataacacaacagttggaaaatatctgcctgcgcataatcgatctcgtacttcagaaacacgttatcgagttctacgaagagattctgtcactagcctattcactgacttgccactccatttctccccagatgtggcagttgctagggattctgtatgaagtgttccagcaagattgtttcgaatacttcaccgacatgatgccactgctgcacaattatgtgactatcgatacagacaccctcctctcaaacgcgaaacacctcgaaatactttttacgatgtgtaggaaggtgctgtgcggcgacgcaggtgaagacgctgagtgccacgccgcaaagctgcttgaggtgataattttacaatgtaaaggtcggggaatcgatcagtgtattccactcttcgtccaattagttcttgagcggcttacccgaggggtgaaaacttctgagcttaggactatgtgcctgcaggtagccattgcagctctctattataaccctgacttgctcctgcacacactcgaacggattcaacttccacacaatcccggtcccatcaccgtgcagttcattaaccagtggatgaatgatacggattgttttctgggacaccacgatcggaagatgtgcattataggactctccatcctgctggaactgcagaatcggcctcctgcagtggacgccgtggttggccagattgtcccctccattctcttcttattcctggggctgaagcaagtgtgtgccactcgccagctggtcaaccgcgaagatcgttccaaagccgagaaggctgatatggaggaaaacgaggagataagctctgatgaggaggagaccaatgtcacggcccaggctatgcagagtaataacggacgcggtgaagacgaagaggaggaggatgacgattgggacgaggaggtgctcgaggaaacagcactggagggctttagtacccctctggacctcgataactccgtggatgagtaccagttcttcacgcaagccctgattaccgtgcagtctcgagacgccgcatggtatcagctactgatggctcctttgtctgaggaccaacgtaccgccctgcaggaagtgtatacccttgcagagcacaggcggacagtggctgaagctaagaagaaaatcgaacagcaaggtggattcacttttgaaaataagggagtgctgagcgcttttaactttgggacagtaccttccaataactag

SEQ ID NO: 226713 - DNA, 3546 bp, synthetic construct
  misc_feature 1..3546: note = Description of Artificial Sequence: Synthetic coding sequence
  source 1..3546: mol_type = other DNA
atgccggagaatcctgctacggataaactgcaggtgctgcaggtattggaccggctcaagatgaagctccaggagaaaggggacacctcccaaaacgagaaactctccatgttctacgagactctgaagtcacccctgtttaatcagatccttacactgcagcaaagcattaagcagctgaaggggcagttgaatcacataccgtcggactgcagcgctaactttgatttctcgaggaaggggcttttggtcttcacagacgggagtattactaacggaaatgttcatcgcccttcaaacaactctactgtcagtggactgtttccatggacccccaaacttggaaatgaagactttaatagcgtgattcagcagatggcccaaggtaggcagattgagtatatagatattgagagacctagcactgggggtctgggtttctccgtggtagccctgaggtcacagaatttgggcaaagttgacatatttgtgaaggacgtgcagcctgggagcgtagcagaccgggaccagagactaaaagagaacgatcaaatcctagcgataaaccacacgccattggatcagaacatcagccaccagcaggccattgccctgctccaacaaaccaccggttcattacgcctcattgtcgctcgggaacctgtgcacaccaaatcttcaacttcttctagccttaatgataccacactgcccgaaactgtctgttggggacacgtcgaggaagtcgagctcattaatgatgggagcggcctcggcttcggcatagtgggcggaaaaacctcgggcgttgtggtgcggaccattgttcccggtggactggctgatagggacggaaggctgcaaacaggggaccacatacttaagatcggaggcaccaacgttcagggcatgacatctgaacaagtcgcccaagtacttcgtaattgtggcaattctgtgagaatgcttgtggcccgagaccccgctggcgatatctccgtgaccccccctgctccagcagccttacctgtcgccctccccactgtggcgagtaaggggccagggagtgattcctctctctttgagacttataatgtagaattggtgcgcaaggacggacagagcctcggcatacgtattgttggatacgtgggaacctcccatacaggagaagcgtccgggatctatgttaagtcgatcatccctggttctgcggcataccacaatggacatattcaagtgaatgataagatcgtggctgtcgacggagtgaacattcagggctttgcaaaccacgatgtagtggaggtgctcagaaacgctggtcaggtggtccaccttaccctcgtcagacgcaagactagctcctccacttctccccttgaaccaccatcagatcggggaacagtagtggagcctctgaagccacctgctctctttctgaccggcgcagtcgaaactgaaacaaatgtggacggtgaagatgaggagatcaaggaaagaatcgacacactcaagaatgataatatccaggcgctggagaagttggagaaggtgccagattcacccgaaaatgagctcaaatcgcggtgggaaaatctgctggggcctgactatgaggtgatggtggccactctcgacacccaaattgcagatgacgccgagctgcagaaatacagtaagctactccccatccatacactaagactgggcgtagaggtggattcatttgacggccatcattatatctcatcaatcgtaagcggtggccctgtcgataccctcggcttgctacagcctgaggatgaattgctcgaggtgaatggcatgcaactgtatggaaagtctcgccgagaagccgtcagctttctgaaggaggtaccaccacccttcacactggtgtgttgcaggcgcctgttcgacgacgaggcatctgtcgacgagccccgtcgcacagagaccagcctgcccgaaaccgaggtggatcataatatggatgttaacactgaggaggatgatgacggagagttagccctgtggagcccagaagtgaagatcgttgaactcgtgaaggattgcaagggtctgggattctccattctcgattatcaggatcctctggacccaacacgttctgtgatcgtgatccggtcgctggtagccgacggagtcgctgagcgatccggcggtctgctacccggtgatagactagtctcagtgaacgagtactgtctggataatacgagcctcgctgaggctgtggagatcctgaaggcggtgccccctgggctagtccacctgggcatctgtaaaccactcgtcgaagataacgaggaggagtcctgctacatactgcattcgtcctccaatgaggacaaaacagaattctctggcaccatccacgatatcaactcaagtctcatcctcgaagccccaaagggcttccgcgatgaaccgtacttcaaggaggagttagtggacgagccctttttagacctcggcaaaagcttccacagccagcagaaggagatagaacagagcaaagaggcctgggaaatgcacgagtttctcacccctagactgcaggaaatggatgaagagagggaaatcttggtggacgaagaatacgagctgtatcaggacccatcaccttccatggagctctacccattgagccacattcaggaggcaactcccgtgcctagtgtcaatgaattacacttcggcacccagtggctgcacgacaacgagccctccgagagccaggaggcacgaacaggcaggaccgtgtactcccaggaggcgcagccgtatggatactgccctgagaacgtgatgaaagaaaacttcgttatggagtcgctgccgtctgttcccagtaccgaaggcaattctcagcaaggccgattcgatgatcttgagaatctgaatagcctcgccaagacttctctcgatctgggtatgataccaaacgatgtgcagggaccatctctgctgattgatttgcctgtggtcgcccagcggagggaacaggaggacctccccttgtaccagcaccaggcaactcgagttattagcaaagctagtgcgtacacagggatgctttccagcaggtacgccactgatacatgtgaactgcccgaaagggaagagggtgaaggagaggagacaccgaacttttcccattgggggcctccccgtatagtggaaatattccgcgagccaaatgtcagccttggaatctcaatcgtaggaggtcagactgtcatcaaaagactgaagaatggagaggaactgaagggcattttcattaagcaggttctggaggacagtcccgcaggaaagaccaatgccctaaagacaggagacaagatcttggaggtgtcaggggtcgacctacagaacgcctcgcactccgaagccgtagaggccataaagaacgccggtaatcctgtagttttcatagtgcagtctctgagtagtacaccagcttgggtgactgagcaggactcggtgtcgaaaaaaaagaaaaaccatgaggggtag

SEQ ID NO: 226714 - DNA, 600 bp, synthetic construct
  misc_feature 1..600: note = Description of Artificial Sequence: Synthetic coding sequence
  source 1..600: mol_type = other DNA
atggtgcaaggcggttttcccgaaaagatccggcagagatatgccgacctgcccggagagcttcatattatcgagctagagaaggacaagaatggcctcggcctgagtttggccggtaacaaagatcggtcacgcatgagcatcttcgtggtgggtatcaaccccgaaggacccgctgcggcagatggtagaatgagaataggagacgagctactggagatcaacaaccagatcctttacgggaggtcccaccagaatgccagcgctatcatcaagactgctccttcaaaggtgaagctggtctttatcagaaacgaagacgctgtcaatcagatggccgtgacccccttccccgtgccttcaagttccccttcctccatcgaggatcagagcggcactgagcctatctcttcagaggaggatggctcagtcgaggtgggcatcaaacagttaccagaatccgagtcctttaaattggccgtgagccagatgaaacaacaaaaatatccgaccaaggtgtccttttcaagtcaggaaattcctctggcacccgcatcctcctaccacagtacagatgcagacttcactggctacggttag

SEQ ID NO: 226715 - DNA, 4745 bp, synthetic construct
  misc_feature 1..4745: note = Description of Artificial Sequence: Synthetic coding sequence
  source 1..4745: mol_type = other DNA
atgccagaaaaccctgcaacggacaagctacaggttcttcaggttctggataggctgaagatgaagcttcaggaaaagggagatacaagccagaatgagaagctgtcaatgttctacgagactttaaaaagccccctcttcaaccagatccttacccttcagcagtctattaaacaacttaaagggcagctgaatcacattccctccgattgttccgctaatttcgacttttcccgaaaaggtctgttagtgtttactgacggcagcatcacaaatggaaatgtgcatcgcccaagcaacaactcaacagtgtccgggctatttccctggacccctaagctcggcaatgaagatttcaattccgtgatccagcagatggcccagggacgccaaattgagtacattgatattgaaagacccagtaccggtggactaggtttcagtgtcgtcgctctcagatcgcaaaacctgggtaaggtggacatcttcgtcaaggatgtacagccaggctctgttgctgatcgggatcaaaggcttaaagagaatgatcagattttggccattaaccacacccctctggatcagaatatcagccaccagcaggccatcgccttgctccaacagactaccggatccctgaggctgatagtggctagggagccagtacataccaagagcagcacatcttcctctctgaatgacacaactctccccgaaacagtctgctggggtcacgtggaagaggtcgaattgatcaatgatggctccggcctaggatttgggatcgtcggtggcaaaaccagtggtgtggtggtccggaccatcgtgcccggtggcttggcggacagagatggtcgattgcagaccggggatcatatcttaaaaataggaggcaccaacgtgcaggggatgaccagtgaacaagtggcccaagtgttaagaaactgcggcaatagcgtgagaatgctggtcgcaagggaccctgctggggatatctctgtgacaccaccagcacctgcagccctgcccgtagcactgccaacagtggcttctaaaggacccggtagcgattctagcttgttcgagacttacaacgttgagcttgtgcggaaggatggccagtctctcgggatcaggattgttggatacgtgggaactagtcatacaggtgaagcatccggtatatatgtaaagagcatcattccgggatccgccgcttaccacaacggacacatccaagtgaatgataagatcgtggccgtggacggggtgaatattcagggttttgccaatcacgatgttgtcgaggttctgagaaatgccggacaggtggtccacctaacactagtgcggcgaaagacctcatctagtacatcacctctggagcctccatccgatcggggaacagtcgtagaacccctgaaaccccctgcgctttttcttacaggtgccgtggaaactgagaccaatgtcgacggtgaggacgaagaaattaaggagcgtattgacacactgaaaaacgataatatacaggccctcgagaagctggagaaggtgccggattcccccgaaaatgaacttaagtcaagatgggagaacctgctcggccctgactacgaggtcatggtggcaacactggacacccaaattgcagatgatgctgaactgcaaaaatactcaaagcttctacccattcacactctgagactgggggttgaggtagattcttttgatggacaccactacatctcatctatcgttagcgggggacctgttgatacactcggcctgttacaacccgaagatgaactgctcgaagtgaacggtatgcagctatacgggaaatctcgtcgggaggccgtgtctttccttaaggaagtaccgcctccatttaccctggtctgctgtcggagactgttcgatgacgaagcctctgtcgatgagcctcgacggacggagacgtccctccccgagactgaagtggatcacaacatggatgtcaacacagaggaagacgatgatggtgaattagcactctggtcacccgaggtcaaaatcgtggagctcgtcaaagattgtaaggggctgggtttctcgattctggactaccaggacccgctagatcccacgcggagtgttatcgtgattcgatctctggttgcagacggagtagctgaacggtccggagggctgctgccaggcgacaggcttgtctcggtgaacgagtattgtctggataacacaagtctggccgaagccgtggagatccttaaggctgtccctccaggccttgtgcacctcggtatctgtaaaccacttgtggaagataacgaggaggaatcatgctacatcctccacagctcttcaaatgaggataaaacagaattttcaggcacgatacacgatattaattcctcccttattttagaagctccgaaggggtttagagacgaaccatacttcaaggaagagttggtggatgagccctttctggatctgggtaagagcttccactcccagcaaaaagaaatagagcagagcaaggaagcttgggagatgcacgaattcctgaccccaagactccaggaaatggacgaggagcgcgaaattttagtagacgaagagtacgagctctaccaggatccatccccttctatggaactgtatccgctgtcacatattcaagaagccacccctgttccaagtgtgaacgagctccacttcggaactcagtggctgcatgataatgagccatctgagtcccaggaggcaaggacaggcagaacagtgtattcccaagaagctcagccttacggttattgcccggagaacgtgatgaaggagaacttcgtcatggaaagcctcccgagcgtcccatccacggagggcaacagccaacagggtagattcgacgacttggagaacctgaactctttagccaaaacaagcctggatttaggcatgattcctaacgacgtgcaagggcctagcctcctgatcgatttacccgtagttgcacaaaggcgcgaacaggaggatcttcctttatatcagcaccaagcaacccgggtgataagcaaggcatctgcatacacaggaatgctaagcagccgatatgccacggacacctgcgagcttccagaacgggaggaaggagagggtgaggagacccctaatttctcacactggggcccaccgagaattgtcgagatctttagggagccaaatgtgtcactcggcatttcgatagttggtggacagaccgtgatcaagcgcctcaagaacggagaagaacttaaaggcatcttcatcaagcaggtccttgaagattctcccgcaggaaagaccaacgccctcaaaacaggcgataaaattctcgaggtcagcggggtcgacctacagaacgcaagtcacagtgaggcggtggaggcgatcaaaaacgcgggaaatcccgtggtttttattgtccagtctctgtcatccacaccacgcgttatcccaaacgtccacaacaaagctaataaaattacaggcaaccagaaccaggacacacaggaaaaaaaagagaagcggcaaggaacagctccgcctcctatgaagctacctcctccatataaagcccttacagacgatagcgacgagaacgaggaagaggacgcattcacagatcagaaaatcagacaaagatacgccgacttgccaggagagctacacatcatcgagctggagaaagacaagaacggcttgggcctctcactggcaggaaataaagaccgcagcagaatgagcatctttgtagtgggcattaatcccgagggaccagcagccgctgacgggagaatgaggataggcgacgagttgctcgagattaataaccaaatcctgtacggaagatcccaccagaatgcatccgccattataaagaccgcaccaagtaaggtaaagctggtgttcatccgtaatgaagatgcggtaaatcaaatggcagttacaccctttccggtccccagctcaagcccgagttccattgaggatcagtccggcaccgagcccatctcctccgaagaggacggcagtgtggaggtgggtattaagcaactgcctgagtccgagagttttaagctggccgtttcacagatgaagcagcagaagtaccctaccaaggtttcattttcttcccaggaaattcccctggctcccgcatctagttatcacagtaccgacgccgactttaccggctacggcggatttcaggccccactcagcgtcgaccctgctacttgtcccatagtgccgggacaggagatgatcatagaaatcagtaaggggcgttccggactgggtctcagcatcgtgggaggtaaggatactccactgttttggcggctcggctctccaagagcgtggtctcaacacctcgtgcgggcattcatgctgcatcatcccgtcactgaggtagaaggccaaaatgcaattgtgatccatgaggtctatgaggagggcgcagctgccagagatggacgtttatgggccggtgatcagatcctggaggtgaatggggtcgacctacgcaacagttcccatgaagaggctattactgccctgaggcagactccacagaaagtcaggcttgtggtgtacagagacgaggcccactaccgcgatgaggagaatctcgagattttcccagttgacctccagaaaaaggctggcagaggcctgggcctcagtattgtgggtaaata

SEQ ID NO: 226716 - DNA, 5405 bp, synthetic construct
  misc_feature 1..5405: note = Description of Artificial Sequence: Synthetic coding sequence
  source 1..5405: mol_type = other DNA
atgcctgaaaacccagctacagacaagctgcaggtgctccaggtactcgatcgtctcaagatgaagctgcaggaaaaaggcgatactagtcagaacgagaagctgtctatgttctatgaaaccctgaagtctcccctattcaaccagattttgacgctccagcagagtataaaacagctcaaagggcaactgaatcatatcccctcagattgcagcgccaattttgacttcagtagaaagggactcctggtgttcaccgacggctccattactaatggcaacgtgcacaggcccagcaacaatagcaccgtatcgggcttgttcccatggacacccaaattgggtaacgaggatttcaactctgttatccagcagatggcccagggcagacagattgagtatattgacatcgaacgacctagtacaggaggactgggttttagcgtggtcgcattgcgctcacagaacctgggaaaggtcgatattttcgttaaagatgtccagccgggatccgtggccgacagggaccaaagattgaaagagaacgatcaaattttagcgattaaccatacccctctggaccagaacataagtcatcagcaggcgattgctttgctgcagcaaacaacagggtccctgcggttgatcgtagcccgagagccagtacatactaaaagtagcacatcttccagcctcaatgacacaaccttgcctgaaactgtttgttgggggcacgtcgaggaggttgagctgattaatgacggatccggcctcgggttcggtattgtcgggggaaagacatccggtgtcgtcgtgagaaccatcgttccgggaggcttggccgaccgcgacggacggctgcagaccggagatcacatattaaagattggtggaacgaatgtgcaggggatgaccagcgaacaggtagctcaagtcctgcgtaattgcggaaactccgtgaggatgttggtcgctcgggacccagctggcgatattagtgtgacaccaccggctccagcagccctgcccgtcgcactgccaaccgtcgcaagtaagggtccagggtcagactcgtccctgttcgagacttacaatgtggagttggtgaggaaggacggccagtccctgggaatcagaatcgtaggttatgtgggcaccagccacactggcgaagctagcggcatttatgttaagtctatcatccctggaagcgctgcataccacaatggtcacattcaggtgaacgacaaaatcgtcgcagtggatggcgtgaacatccagggttttgctaatcacgacgtggtggaagtgttgagaaatgccggacaggtagtacacctgacattagtcagacggaaaacgtcaagcagtacctcacctttggaacctccgagcgatagaggtacagttgtggagccactgaagccccctgctctgtttctgaccggcgcagttgaaacagaaactaacgtagacggagaggacgaagagattaaggaacgaattgatacacttaaaaacgacaatatccaggctctcgaaaagctggagaaggttcccgatagcccggagaacgaacttaagtctcgatgggagaatctgctgggaccagactatgaggtcatggtggcaaccctcgacactcaaatcgcggatgacgccgagctgcagaagtattccaagctgctgccaatccatactctacgattaggagtagaggtagattctttcgacggacaccactatatcagttctattgtctccgggggacccgttgacaccctcgggcttctgcagcctgaggacgaattgctcgaggtgaatggaatgcagctttacggcaaatcgcgccgagaggcagtgtccttcctgaaggaagtgccaccgcctttcacgcttgtttgttgcagacggctctttgacgatgaagcatccgtggacgagcctcgcagaaccgagaccagcctgccggagacagaggtcgaccacaacatggacgtcaacaccgaggaggatgatgacggggagttggcactttggtcaccagaagtgaagatagtggagcttgtgaaagattgtaaggggctgggtttctctatactggattatcaggaccctcttgatccaacaaggagcgtgattgtgattagatctctcgtagccgatggagtggcggagagaagtggaggattactacctggagatcggctagttagcgtgaacgagtactgcctggataacacttcactggccgaagcagtggagatactgaaggctgttccgccagggctcgttcatctgggaatttgtaagccattggtggaggacaatgaggaagaatcgtgttatattcttcacagctcctccaatgaagataagaccgagttttcaggcaccatccatgacataaactcatccctgattctggaagcaccaaagggcttcagggacgaaccctacttcaaagaagaattggttgacgaacctttcctggatctggggaagtcctttcattcccagcagaaggaaatcgagcagagtaaggaggcgtgggaaatgcacgaattcctgacaccacggctgcaggagatggatgaagagagagaaattctcgtcgatgaggagtacgaactgtatcaggatccttcaccctctatggaattatacccactctctcacattcaggaagccaccccggtgccctccgttaacgaactccacttcggaacacagtggctgcacgacaatgaaccaagcgaatctcaagaggctcgaaccggcagaactgtgtactcccaggaggcccagccttatggctactgccccgagaatgtaatgaaggaaaacttcgtgatggagtccttgccaagtgtcccatctacggagggaaatagtcaacaggggaggttcgacgatcttgaaaacctcaattccctcgcaaaaacatctctggatttaggtatgataccaaatgatgtccaggggccttcacttcttatagatcttcccgtcgtagcccagcgacgagagcaggaggatctgccgctctatcaacaccaggctactcgggtcataagtaaagcctcggcttacacggggatgttgtcatcccgctacgctacagacacttgtgagctgccagaacgagaggagggagagggcgaggagacacctaacttctcccactggggcccacccaggattgtcgagatcttccgagaacccaacgtgagcctgggaataagcattgtcgggggacaaactgtcatcaagcgactcaaaaatggtgaagagctgaaaggtatctttatcaagcaggtacttgaggattctccagctggtaaaacaaacgctctgaaaacgggcgacaagatcctggaagtaagcggagtggatctccagaacgccagccacagtgaggctgtggaagcaattaaaaatgcaggaaaccccgtggtgttcatcgttcagagccttagctccacgcctcgggtgattcctaacgtgcataataaggctaataaaattactgggaatcagaatcaggacacacaggaaaaaaaggagaaacgccaagggacagcaccaccacctatgaagctgcctccaccctacaaagcgttaaccgacgattctgatgagaatgaggaagaagacgcattcaccgaccaaaaaatcaggcagagatacgcggacctgccaggagaacttcacatcatcgagctggagaaagacaagaacggacttgggctgtctctggccggaaataaagaccgctcacgcatgagtatcttcgtggtcggaattaatccagaagggccagccgcagcagacggcaggatgagaattggcgatgagttgctggaaattaataatcagatcctgtatggacggtctcatcagaacgccagcgccatcattaagacagcaccttctaaagttaaactggtgttcatccgaaatgaggatgctgttaatcaaatggcagttactcctttcccggtcccatcctcaagtccgtcaagcattgaagatcagtcaggcactgagcccatctcatcggaggaggatggctccgtcgaagtaggcattaaacagctgcctgaatcagagagctttaaactcgccgttagccagatgaaacagcagaagtacccaaccaaggtcagctttagctcacaggagatcccgctggctcccgcttccagttaccacagtacggatgcggactttactggctacggtggcttccaggccccacttagcgttgaccctgctacctgtcctattgttcctggacaagaaatgataatagagatcagcaagggtaggtcaggcctgggtctctccatcgtaggaggtaaagacacacccttgaatgcaattgtgatccacgaagtgtacgaggaaggagccgcagctcgagatggacggctgtgggctggggaccaaattctcgaggtcaacggggtcgaccttcggaactcatcccacgaggaggccattactgcgctgcgacagaccccccagaaggtgaggctggtggtgtatcgtgacgaagcccactacagagacgaggaaaatctggagatttttcccgtagatctgcagaaaaaggccggaagagggttgggactgtccattgttggcaagcgcaatggttctggtgtgtttattagtgacatagtgaagggaggcgctgccgacctggacggccgtctcattcagggggaccagattttgtcggtaaacggagaagacatgagaaacgcgtctcaggaaaccgtggccacaattctaaaatgtgcgcagggccttgtgcagctggagataggacggttgagggccggaagttggacctcagcccgtacaacctctcagaactcccaaggcagccagcagagcgctcacagctcttgtcatcccagtttcgctcccgtgataactggtctgcaaaacttggttggaaccaagagggtgtcagatcctagtcagaagaactccggcaccgatatggagccacgcactgttgaaatcaatagagagcttagcgatgccctggggatctcgatcgcagggggtcggggatcgcctctgggcgacatcccggtgtttattgcgatgatccaggcatctggagttgcagcccgaacccagaaactcaaagtgggggatcgaatagtgagtatcaacggccagccactggatggactttctcacgctgacgtggtgaatctgctgaaaaacgcctacggacgcattatactgcaggtggtcgccgataccaatatcagtgcaattgctgctcaattggagaatatgtccaccggataccacctcggctcacccactgctgaacaccaccctgaagacaccgaagagcagctccagatgacagccgacta

SEQ ID NO: 226717 - DNA, 4571 bp, synthetic construct
  misc_feature 1..4571: note = Description of Artificial Sequence: Synthetic coding sequence
  source 1..4571: mol_type = other DNA
atgcctgaaaatcccgctacagacaagctacaagtcctgcaagtgctcgaccgtttaaagatgaagctccaagagaaaggtgacacgtctcagaatgagaaactgagcatgttttatgagaccctgaagtctcccctgttcaatcagatcctgacactgcagcagtctattaagcaattgaaagggcagctcaaccacatcccctcagattgttctgcaaatttcgatttcagccgcaagggactgcttgtcttcacggacggatcgattaccaacggaaacgtccatcgcccatctaacaactctaccgtgtctgggctgtttccttggacacccaagctgggcaacgaggattttaacagtgttatccaacagatggcccaagggaggcaaattgaatacattgacatagagcgcccatccactggcggtttgggcttctccgtggtcgccttaaggtcacagaatctgggcaaggtcgacatttttgttaaggacgtgcaacctgggagcgtggcagacagagaccaacgtctgaaggagaatgatcagatcctggcgatcaatcatacaccactcgatcaaaatatctcgcatcagcaggcgattgccctcttgcagcagaccacgggttccctgaggttgattgtagcccgtgagccggtccacaccaaatcttcgacgtctagcagcctgaatgacactaccctgcccgagacggtgtgctgggggcacgtggaagaggtggagctgataaacgatgggagtggcctgggcttcggaatagtcggcggaaaaacctctggagtggtggtacggactatcgtcccaggaggcttggccgatagagatgggcgtctccagaccggtgaccacatcttaaaaattggcggaaccaacgtccagggaatgaccagcgagcaagttgcccaggtgctgagaaactgcggaaacagtgtgcggatgctagtcgccagagaccccgctggagatatctcagtaacacctccagccccagccgctctgcccgtggcactgcccaccgtagcatcgaagggcccaggctccgattcatccctgttcgagacttataatgtggagctggtgcgaaaagatgggcagtcactgggcattcgcattgtgggctacgttgggacaagccatacaggtgaggcatccggaatatacgttaagtcgataattcccggatcggcagcttaccacaacggccatatccaggtgaatgataagatagtggcagtggacggcgtgaacatacaaggattcgctaaccatgacgtggttgaagtgctgcgcaatgcaggccaggtggtgcatctaactctggttaggagaaaaacaagctcttcgacatctccattggagcctccttccgacaggggaacagtggtcgaaccactgaagccaccagctctgttccttacaggcgcagtagaaacagaaacgaacgttgatggcgaagacgaggaaatcaaggagcgaatcgatacacttaagaacgataatattcaggcactcgaaaagctcgagaaggttcctgattcccctgaaaacgagctaaagtccagatgggagaatttgctggggccagactatgaagtaatggtcgccactttggacacccaaatcgctgacgatgcagaattacagaaatatagcaaactgttgcctatccacactctgcgcctgggtgtcgaagtcgactcattcgacggacatcactacatcagttcgatcgtgtccggaggccctgtggataccctcggattgctgcaacctgaggacgaattgctcgaggtgaacggaatgcagctttacgggaaaagtaggcgtgaagccgtgtcttttcttaaagaagtcccgccaccctttaccctggtgtgttgtaggcggctctttgatgacgaagcttcagtggacgagcccagacgcaccgagaccagcctgccggaaacagaggtggaccataacatggacgtgaatacagaagaagatgatgacggtgaactggcactctggtcacctgaggtcaaaatcgtagagctggtgaaagattgtaagggcctgggatttagcattctggattatcaggatcctctggacccaaccagatcggtgatcgtaatcagatcgctggtggccgatggagttgccgagcgaagcggagggttgttgcctggagaccggctcgtgtcggtcaatgagtactgtttagataatacttccctggctgaagctgttgagatactaaaggctgtgcctcctggccttgtgcatctgggtatctgcaaacctctggtggaggacaacgaagaagagagttgctacatcttacattcttctagtaatgaagacaagaccgagttttccggcacaatccacgacatcaattcgagtctgattctcgaagccccaaaagggttccgcgacgagccctacttcaaagaagaactagtcgacgagcccttcctcgacctgggcaagagtttccacagccagcagaaagagattgagcagtcaaaggaggcttgggaaatgcacgagttcttgaccccacggttgcaggagatggacgaggaacgggaaattctcgttgacgaagaatacgagctctatcaggatccatctccatccatggagctgtaccccctctctcacatacaagaagcgactccggtgccaagcgtgaacgagttacacttcgggacacagtggctgcatgacaacgaaccctctgaaagtcaggaagccaggacaggccgtacggtgtactcacaggaggcgcaaccctatgggtactgcccagagaacgttatgaaggaaaactttgttatggaaagtctcccctctgtcccatctaccgaggggaactcccagcagggcagattcgatgatctcgagaacctgaactcgctagccaagacctccctagacctgggaatgataccaaatgacgtgcaggggcctagcctgctcattgatctccccgtggttgcccagcggagagagcaggaggacctgccgctctaccagcaccaggccacgcgtgtaataagcaaagcgtcagcctataccggcatgcttagctctcgctacgctacagatacctgcgaactacccgaaagagaagagggagaaggtgaggaaacccccaattttagccattggggaccaccaagaattgtcgagatttttagagaacctaacgtgtctttgggcattagcattgtgggagggcagaccgtcattaagagactgaagaatggcgaggagctgaaagggattttcattaagcaggttctggaagacagccccgcaggtaagaccaacgcactgaaaaccggcgataagatcttggaagtatcgggtgttgatctacagaatgccagccactcagaggccgtggaggccataaagaacgcaggtaaccccgtcgtcttcattgttcaatctctgagcagcacaccacgcgtgatccccaatgtccacaataaggctaataaaattacaggtaaccagaatcaggatactcaggagaaaaaggagaaaaggcaaggcacagctcctccacccatgaagctgccccctccctacaaagcacttacggatgacagtgatgagaatgaagaggaagacgccttcaccgaccagaaaattcgtcagcgctatgcagatctcccaggcgaattacatataattgaactcgagaaggataaaaatggtctgggactgtcgctggccggtaacaaggacaggtcaagaatgtccatcttcgtcgtaggtattaacccagaggggcctgctgccgctgatggtaggatgcggatcggggatgagttgctggagattaataaccagatattgtacggcagatcacaccaaaacgcttctgccatcatcaagaccgcccctagtaaagtaaagctcgtgttcatccgcaatgaagacgctgtcaaccagatggctgtgaccccttttcctgtcccctcgtctagcccaagctccatcgaagaccagtcaggtaccgagccgatctcttctgaggaagatggaagcgtcgaggttggaatcaagcaactccccgagagtgagagctttaagctggcagtttcccagatgaaacagcagaaataccctacgaaggtgtctttttcctctcaggagatccccctcgcgcctgccagtagttatcactccacagatgccgattttactggctacggaggcttccaggctcccctgtcagtcgatcccgctacctgtccgatcgttcccggacaggagatgattattgaaatcagcaagggtagatcaggtctcggtctctcaatcgtcggcggaaaagatactcctcttgttaacggagtggatctacgcaatagttctcacgaggaagccatcactgctttgaggcagaccccccagaaagtaaggctggtcgtgtacagagacgaggcacactaccgtgacgaggagaatctagaaattttccccgtagacctccaaaaaaaagctgggagagggcttggcctgtccattgttggtaaata

SEQ ID NO: 226718 - DNA, 1359 bp, synthetic construct
  misc_feature 1..1359: note = Description of Artificial Sequence: Synthetic coding sequence
  source 1..1359: mol_type = other DNA
atggttcagggcggtttccccgaaaagatccgacaacggtatgctgatctccccggagagttgcacataatagaactggaaaaagacaaaaacggtctcggtttgagcctcgctggcaacaaagacagatctcgcatgtccatctttgtggtggggattaatccagaggggcctgcggctgcggatggtaggatgcggattggagacgagctgctggagattaataaccagattttgtatggccgatcacaccaaaatgcgagcgccattattaagaccgcccctagcaaagtcaaattagtctttatccggaatgaagacgcagtgaatcaaatggccgtcacacctttcccggttccaagctctagtccgtccagcatcgaagatcaatcaggtacagaaccaatcagtagcgaggaggacggctccgtggaggtcgggatcaaacagttacctgagagcgaatctttcaagctggctgtgtctcagatgaagcagcaaaagtacccaacaaaagtgtcattctcctcacaggaaatacccctggcgccagccagctcctatcactcgacagatgccgactttacaggctacggaggctttcaggcacctctgagcgttgaccccgctacctgcccgatcgttcccggtcaagagatgatcatcgagatttccaagggacggtcgggcctgggacttagtatcgttggcggaaaagatactccgctgttctggcggttgggtagcccaagggcgtggagccagcacctggtccgggcattcatgcttcatcatcctgtcacggaggtcgaagggcagaatgcaatcgtaatccacgaagtctatgaagaaggcgcagccgcacgggacgggaggctctgggctggcgatcagattctcgaagttaatggagtggatttgcgcaacagctcgcacgaagaggccatcacagcactgcgacagacacctcaaaaagtcagactggtggtgtaccgagatgaggcccactacagggacgaagagaacctggaaattttccctgttgatttgcagaagaaggcaggccgaggtctgggtttgtctattgtcgggaagagaaacggttctggtgtgtttatatctgacatcgtcaagggcggtgctgctgacctggacggtcgccttattcaaggcgatcaaatcctgtctgtaaacggcgaagatatgcggaatgcatcccaggaaacagtggccacaatcctgaagtgtgcccaagggttggttcagcttgaaatcggtcgcctgcgagctggctcctggaccagtgcccgaacaacatcccagaattcccaggtagtggatggattctcgtccgactag

SEQ ID NO: 226719 - DNA, 594 bp, synthetic construct
  misc_feature 1..594: note = Description of Artificial Sequence: Synthetic coding sequence
  source 1..594: mol_type = other DNA
atggccgtaactccctttcccgtgccttctagctctccaagtagcatcgaagaccagtctggaaccgagcctatttccagtgaagaggacgggtctgttgaggtaggaatcaaacagttacccgagagcgagtcattcaaactcgccgtcagccaaatgaagcagcagaaatatccgaccaaggtcagtttctcttctcaggagataccacttgccccagcaagttcctaccactcaacagacgccgacttcaccggatacggcggtttccaggcgcctctgtcggttgacccggctacttgtcccatcgtgcctggacaggagatgattattgagattagcaaaggcagatccggcctgggcctgtccattgtgggcggaaaagacacaccactcgtcaatggcgtcgaccttaggaatagctcacacgaggaggccattactgcactcagacagaccccacagaaggtgaggctggttgtctaccgcgacgaggcacattacagagatgaagagaacctggagatttttccagtcgaccttcagaaaaaggctggcaggggactgggactgagtattgtaggaaagagatag

SEQ ID NO: 226720 - DNA, 1236 bp, synthetic construct
  misc_feature 1..1236: note = Description of Artificial Sequence: Synthetic coding sequence
  source 1..1236: mol_type = other DNA
atgagccccgcacggttgagacctcggttgcacttttgtctcgtgctcttgcttcttcttgttgtgccagctgcctggggatgcggacccggacgggtcgtgggctctaggagacgcccacctcggaaacttgttccgctagcttacaaacagtttagcccgaacgtaccagagaaaacactgggagcctcgggcaggtatgaggggaaaatagcccgtagtagcgagcgcttcaaagagctcacccctaactacaatcccgacattattttcaaagatgaggaaaatactggagcggacaggctgatgacacagaggtgtaaagaccgcctcaactcccttgccataagcgtaatgaatcagtggccaggcgtgaagctgagggtcaccgaagggtgggatgaagatggtcaccattccgaagagagcctacattacgaaggcagagcagtcgacattactacctctgaccgcgacaggaacaaatatggactgttggccaggctggccgtcgaggccggattcgattgggtgtactacgaaagcaaggctcacgtgcattgtagtgtgaaaagtgagcattctgccgcagcaaaaacagggggatgcttccccgcaggcgctcaggtgcgcctggagtccggtgcacgagttgctctttctgctgttcgacctggcgacagagtgttagccatgggcgaagatggaagcccgaccttctcagatgttctgatcttcttggaccgggaaccccacagactgcgagcctttcaggttatcgaaacacaggacccccctaggcggctggctctgacgcccgctcacctattattcactgccgataaccatactgaaccggcagcacgttttcgcgcaaccttcgccagccacgtccagccaggacagtatgtgctggtagcaggagttcctggcctgcaaccggctcgggtggcggctgtgtccacacacgtggctctcggcgcttacgcacccctaaccaaacacggcaccctggttgtagaagacgttgtggcttcctgtttcgctgccgtagccgaccatcacttagcccagctcgcattttggcccttgagattgttccattcgttggcatgggggtcttggaccccgggtgagggggttcactggtacccacaactgctctatagacttgggaggcttcttctggaggagggctcattccatcccctcggcatgagcggcgctgggtcttag

SEQ ID NO: 226721 - DNA, 1212 bp, synthetic construct
  misc_feature 1..1212: note = Description of Artificial Sequence: Synthetic coding sequence
  source 1..1212: mol_type = other DNA
atggctcacgccatggaaaacagctggacaatcagtaaggaataccacattgacgaggaagttggattcgccctcccgaacccacaagaaaatctgcctgacttctataacgactggatgttcatcgccaagcatcttcccgatttaatcgagagtggacaattgcgcgaacgcgtggaaaaactgaacatgctgtcgatagaccacttgactgaccacaagtcccagcgcttggcccgattggtgttgggttgcatcaccatggcgtatgtgtggggaaaaggacacggggacgtcaggaaggtcctccctagaaacattgccgttccctactgccaactgagcaaaaaattggagcttccacccatccttgtgtacgcagactgcgtgcttgctaactggaagaagaaggaccccaataaacccttgacctacgagaacatggatgtcttgttcagcttcagagatggtgactgtagcaagggcttttttcttgtgtccctacttgtagagatagctgcagcgtcagcaatcaaagttatccccacagtatttaaagccatgcaaatgcaagagcgggacaccctcctgaaggcactcttggaaattgccagctgcttggaaaaagctctgcaagtcttccaccaaattcatgaccatgttaacccaaaggccttctttagtgtgcttcggatctatttgagtggctggaagggaaatccccagttgtccgatggcctagtctacgaaggcttttgggaagatcctaaggagtttgccggagggtcagccggacagtccagcgtcttccagtgctttgacgtactgctgggcatccagcagaccgctgggggaggacacgctgctcagtttctccaggacatgaggaggtatatgccccctgcccacagaaatttcctgtgttctctggaatccaatccctcagtacgggagttcgtcctctccaaaggtgacgccggtctcagagaggcatacgacgcgtgtgtgaaagctcttgtctcactccgcagctaccacctgcagatagttaccaagtatatactgatacccgctagtcagcaaccgaaggaaaataagacatccgaagacccatccaagctggaggctaagggcactggaggcactgacctcatgaactttctgaaaacagtcagatctactactgaaaaatccctgctgaaagaaggttag

SEQ ID NO: 226722 - DNA, 237 bp, synthetic construct
  misc_feature 1..237: note = Description of Artificial Sequence: Synthetic coding sequence
  source 1..237: mol_type = other DNA
atggcgcacgcgatggaaaactcttggactatttcgaaggaataccatatcgatgaggaagtgggtttcgcactgcccaatccacaggaaaaccttcccgatttctataatgattggatgtttatagctaagcacctccccgatctgatcgaaagcggccagttaagggaacgcgtggaaaaactgaatatgctgtctatagaccacttaactgaccacaagtcacagcggctttag

SEQ ID NO: 226723 - DNA, 543 bp, synthetic construct
  misc_feature 1..543: note = Description of Artificial Sequence: Synthetic coding sequence
  source 1..543: mol_type = other DNA
atggcacacgcgatggagaatagttggaccataagcaaggaatatcatatagacgaggaagtggggttcgccctccccaatcctcaggagaatctgcctgacttttataatgattggatgttcatagccaaacacctcccggaccttatagagagtgggcagttgagagagcgggtcgaaaaactgaacatgctctccatcgatcatctcacggaccacaaaagccagcgcttggccagactagtgctggggtgtatcacaatggcatacgtgtggggaaaggggcatggggacgtgcggaaggtcctcccacgtaatatcgctgttccctattgtcagctcagcaagaagctcgaactccctccgattctggtgtacgccgattgtgtcctggctaattggaaaaagaaggacccgaacaagccactcacttatgagaacatggacgtcctcttcagtttccgtgacggagattgttccaagggcttttttcttgtctcattgttagtggaaattgctgccgcttcagctattaaggtctag

SEQ ID NO: 226724 - DNA, 1212 bp, synthetic construct
  misc_feature 1..1212: note = Description of Artificial Sequence: Synthetic coding sequence
  source 1..1212: mol_type = other DNA
atggcccatgccatggaaaattcctggacgatttcaaaagaatatcacattgacgaggaggttggatttgccctacccaacccccaggaaaatcttcccgacttctataacgactggatgtttatcgccaaacacctaccagatctgattgaatcaggccagctccgggaacgggtcgaaaagctgaatatgctttctatcgaccacctcactgatcacaaaagccagcgccttgctcggctagtccttggatgcataactatggcttatgtgtggggaaagggacatggagatgtccgcaaagtactgccccgaaatatagcagtaccttactgtcaattgtccaagaaactcgagctgccacctatcctggtgtatgcggactgtgtgttagccaactggaagaagaaagaccccaacaagcccctcacgtacgagaacatggatgttctgttcagctttagagatggtgattgttctaaagggttttttttggtgagccttcttgtggagatcgccgcagccagcgcaatcaaggtgatacccacagtgtttaaggcaatgcaaatgcaagaaagggatacgctcttaaaggccttgctcgagattgcttcatgcctcgagaaggcactccaggttttccatcagatccatgatcacgttaaccctaaagcgtttttctctgtcctgcgcatctacctgtcagggtggaaaggcaaccctcagttatctgacgggctggtttacgaggggttctgggaggacccgaaggagtttgccggaggatccgccggacagtcatctgtgttccagtgttttgacgtactgctgggtattcagcaaactgccggtgggggacacgccgcacagtttctgcaggacatgcggagatatatgcccccagcccacagaaactttctgtgttcactggagagtaacccatcagtccgtgagttcgtgttaagcaagggggatgccggactgagggaggcctacgacgcctgcgttaaagcgttggtaagcttgcgctcgtatcacctacagattgttaccaagtacatcctgattcctgcctcacagcagccaaaggagaacaagacctcagaagatccaagcaaactcgaagcaaagggcaccggcggaacagaccttatgaattttcttaaaacagtcagatcaactacagaaaaaagcctcttaaaagagggctag

SEQ ID NO: 226725 - DNA, 144 bp, synthetic construct
  misc_feature 1..144: note = Description of Artificial Sequence: Synthetic coding sequence
  source 1..144: mol_type = other DNA
atggcccacgctatggaaaactcatggaccatctcaaaagaatatcacatagatgaggaggtcggctttgctctccccaatcctcaagagaatctgccagatttttataacgactggatgtttattgcaaaacacctgccatag

SEQ ID NO: 226726 - DNA, 1224 bp, synthetic construct
  misc_feature 1..1224: note = Description of Artificial Sequence: Synthetic coding sequence
  source 1..1224: mol_type = other DNA
atggaaccacatcggccaaacgtgaagacagcggtaccgctctccctcgagtcataccacatttctgaggagtacggatttctgttgccggattcactgaaagaacttcctgaccactacaggccctggatggagatcgctaacaaactgccccaactgatagacgcccaccagctacaggcccacgtggacaaaatgccacttttatcgtgccaatttctgaagggtcatagagagcaacgcttagctcatctggttctgtcgtttctcaccatggggtacgtgtggcaggagggggaggcccagcccgctgaggtgttgccccgaaatttagctttgcccttcgtggaggtgtcccgcaatctgggcctgccacccatcctggtgcatagcgatttagttctaaccaactggaccaagaaagatccagacggcttcttagagattgggaacttggagacgattatctccttccccggaggagagtctctccacgggtttattcttgtgacggccctcgtggagaaagaggcggtccccggaatcaaggcgctggtgcaggcaaccaatgctatactgcagcctaaccaagaagccttgctgcaggccctccagaggctgcgactgtccattcaagacatcaccaagacactaggacagatgcacgactacgtggacccggatattttttatgccggaatccgcatctttctgtccgggtggaaggacaacccggctatgcccgcaggtctgatgtacgagggagttagccaagaacctttgaagtacagcggtggatccgctgcacagagcaccgtgttgcatgcttttgacgaatttctcggaatccgccacagcaaagaatccggagacttcctctaccggatgagggactacatgccaccctctcacaaggcttttatcgaggatatccactctgcgccaagcctcagagactatatcctgtcctctgggcaggatcatctgttaacagcatataatcagtgcgttcaggccctcgcagagctgcgttcatatcacatcaccatggtcacaaaatatctgattacagcggctgctaaagccaaacatgggaagcctaaccaccttcccggaccgcctcaggcgttaaaagaccgaggaaccggaggcacagctgtcatgtcattcttgaagtcggtgagagataagacccttgagagtatcctgcatccgcgtggttag

SEQ ID NO: 226727 - DNA, 1263 bp, synthetic construct
  misc_feature 1..1263: note = Description of Artificial Sequence: Synthetic coding sequence
  source 1..1263: mol_type = other DNA
atgcttcacttccactactacgacacaagtaacaaaatcatggagcctcaccggccaaacgtcaagacagcggtgccacttagtttggaatcatatcatattagcgaggaatacgggtttttgttgccagacagcctcaaagaactcccagatcactataggccttggatggaaatcgcgaataaactgccccagctgattgacgcccatcagctgcaggcccacgttgacaagatgccactactgtcatgccagttccttaagggtcatcgggagcagcgactagctcatttggtgctttcatttctgacaatgggctacgtgtggcaggagggagaagcacagcctgctgaggtgctgccacggaacctggcattaccctttgtcgaggtttcacgtaatttggggctgccccctattctggtgcactctgacctggtgctgacgaattggactaaaaaggaccccgatgggttcttggagatcgggaacctggaaaccattataagcttccctgggggagagtctcttcatggtttcattctcgtgaccgcacttgtggagaaagaagccgtaccagggatcaaggcacttgtccaagcaactaacgcgatattgcagccaaaccaggaggccttactgcaggcgctgcagcgattgagattgagcattcaagatattacaaaaactctgggccagatgcatgactacgtggatcccgacattttttacgccggaataaggattttcttgtctggctggaaagacaatcctgccatgcccgcagggctgatgtatgagggtgtgagtcaggaaccccttaaatacagcggaggatctgcagctcagtctaccgtcctgcatgcctttgacgaattcttaggcatcagacattccaaagagtcaggagatttcttgtaccgcatgcgcgattatatgcccccttctcataaggctttcattgaggatatccactctgctccctctctccgggattatattctctcctctggccaagaccaccttcttacagcttacaatcagtgcgtgcaggctctcgcagagttacgctcctaccacattacaatggtgacgaagtacctcatcactgccgcagctaaggctaagcacgggaaaccaaatcacctaccaggtcctccacaggcactgaaagataggggtactggaggcactgccgtcatgtctttcctcaagtcggttagagataagaccctcgagtcgattttgcaccctcggggttag

SEQ ID NO: 226728 - DNA, 792 bp, synthetic construct
  misc_feature 1..792: note = Description of Artificial Sequence: Synthetic coding sequence
  source 1..792: mol_type = other DNA
atgaaaggcggattcacaggcggagatgagtaccagaagcatttcctaccacgggactacctggctacttactattctttcgatggctccccatctcccgaggctgaaatgctcaagtttaatctggagtgtctgcacaagacattcgggcctggcggattgcagggtgatactttaattgatatcggctccggtccaaccatctatcaggtgctcgctgcatgcgactccttccaagacattaccttgagtgattttactgatcggaatagggaggaactggagaaatggctaaagaaagagcccggtgcctacgactggacgccggctgtgaaatttgcctgcgaacttgaagggaacagcgggcgatgggaggaaaaggaagagaagctccgagccgctgtcaagagagtgctcaagtgtgacgtgcacctgggcaatcctctggcaccggcagtcttgcctcttgctgactgcgtcctgactctgttggcaatggagtgtgcctgttgcagcctggacgcctaccgagccgctttgtgtaacctcgcctcattgttaaagccgggaggccacctggttacaactgtgaccctacggttaccatcctacatggtggggaaaagagaattcagctgcgtggctctggagaaagaagaggtggagcaagctgtgctggacgccggatttgacatcgaacagttgcttcactcaccccagagttattccgtcactaacgctgccaataacggagtgtgcttcattgtagcccgtaaaaagcctggcccttag

SEQ ID NO: 226729 - DNA, 789 bp, synthetic construct
  misc_feature 1..789: note = Description of Artificial Sequence: Synthetic coding sequence
  source 1..789: mol_type = other DNA
atgaagggtggatttacaggaggtgatgaatatcagaaacactttttgcctagggactatctcgccacctactattcttttgatgggtctcccagccccgaggccgagatgctgaagttcaatctcgaatgtctgcataagacctttggtcctggcctgcagggagacacactgatagatatcggcagcgggcctaccatatatcaagttctggccgcttgcgatagctttcaggacattaccctgtcagacttcaccgaccgcaaccgggaggaattggaaaaatggctgaagaaagagcccggagcttatgactggactcccgcagtaaaatttgcatgcgagttagaggggaactccggccgttgggaagagaaagaagagaagctgcgtgccgcagtgaagcgagtattaaagtgcgacgtccatttaggcaatcccttagcacccgctgtgctgcctctagccgattgcgtgcttactctgttggctatggaatgcgcttgctgtagcctggatgcatatcgagcagctctgtgtaacttggcgtcacttttgaaaccaggaggccacctcgtaacaacggtcactctgagacttcccagctacatggtggggaagcgggaattttcatgtgtagctctggaaaaggaagaggtcgagcaggcagtcctggacgcagggtttgacatcgagcagttactccactccccccaatcttattcagttaccaatgctgccaacaatggtgtctgcttcattgtcgcgagaaaaaagccaggcccatag

SEQ ID NO: 226730 - DNA, 600 bp, synthetic construct
  misc_feature 1..600: note = Description of Artificial Sequence: Synthetic coding sequence
  source 1..600: mol_type = other DNA
atgaagagcggactgtggtactttttcctattctgcctcagaatcaaggtcctgaccggggagatcaacggatcagctaattacgaaatgttcatctttcacaatggcggagtccagatcttatgcaaataccctgatatcgtgcaacagttcaaaatgcagttgttgaaggggggacagatcctctgcgacttaactaaaactaagggatctggcaatactgtgtcaatcaagagtcttaagttttgtcactctcaacttagcaacaacagtgtctcctttttcttgtataatttagaccactctcacgccaattattatttctgcaacctgagtatctttgatccccctccatttaaggtgacattgacagggggttaccttcacatatacgagtcccaattgtgctgccagctgaagttctggttaccgattggatgtgccgcttttgtggtcgtttgtattcttgggtgcatcttgatctgctggttgacaaagaaaaaatacagtagcagcgtgcacgacccgaacggggaatacatgttcatgcgcgcagtgaataccgccaaaaaatcccggttgaccgatgtgactctgtag

SEQ ID NO: 226731 - DNA, 507 bp, synthetic construct
  misc_feature 1..507: note = Description of Artificial Sequence: Synthetic coding sequence
  source 1..507: mol_type = other DNA
atgaaaagtgggctgtggtatttcttcctgttttgtctcaggattaaagtgctcaccggggagatcaacggatccgccaactacgagatgttcatttttcataacggaggggtgcagatcctgtgtaaatatccagatattgtgcaacagttcaagatgcagctactgaaagggggacagatcctctgcgatctgacgaagaccaagggcagcggaaatacagtgtccatcaaatccttaaagttttgtcatagccagctctctaataactcagtcagtttttttctctataatctggaccatagccacgctaactattatttttgcaacctaagcatattcgacccccctccattcaaggttacactaaccggaggatacctgcatatttacgagtcgcagctttgctgccagttgaaattctggctccccattggatgcgctgcctttgtggtggtctgtatcctcggatgtatcctgatttgctggctaactaaaaaaatgtag

SEQ ID NO: 226732 - DNA, 930 bp, synthetic construct
  misc_feature 1..930: note = Description of Artificial Sequence: Synthetic coding sequence
  source 1..930: mol_type = other DNA
atgcgtctgggctcccctggcctactgttcttgctgtttagttcccttcgagcagacacacaggaaaaggaggtgagagctatggtcggctcagacgttgaattatcatgtgcgtgcccggaagggagcaggtttgacctcaatgatgtatatgtgtactggcagacttctgaaagtaaaactgtggtgacataccatataccacaaaacagtagcctggagaatgtggactcacggtatagaaatcgggcacttatgtccccagctggcatgctgcggggagatttttctctgaggctctttaatgtgacacctcaggatgaacagaagtttcattgcttggtcctgtcccagtccctgggctttcaggaagtgctgtccgtggaagtgactttgcatgtcgcggcaaatttctccgtccccgtagtaagcgcaccccattcaccctctcaggacgagttgacattcacatgtacaagtataaatgggtaccccagacccaatgtgtattggattaataagactgataactccctactcgaccaagccctccaaaatgataccgtgtttctcaatatgcgtggcctatacgatgtggtttccgtgctgcgtatcgcacgcacgccgtccgtgaatattgggtgctgtatagagaatgtgcttctacaacagaacctcacggtgggttcccagaccggcaacgatataggcgaacgggataaaatcactgagaatcccgtgtcaacaggggagaagaacgctgctacatggtccatcctggctgtgctgtgcttgctggtcgtagtggcagtggctattggctgggtgtgccgggatcgatgcctccagcatagctacgctggggcttgggctgtgagtcccgagacagagctgactgaaagctggaacttgcttctgctgctgtcttag

SEQ ID NO: 226733 - DNA, 558 bp, synthetic construct
  misc_feature 1..558: note = Description of Artificial Sequence: Synthetic coding sequence
  source 1..558: mol_type = other DNA
atgaggctcggcagtccgggactgttgtttcttctgttttcatcactaagggccgctaactttagcgtgcctgttgtttccgcgcctcactctccgagtcaggacgaactgacttttacctgcacaagcattaatggttatccccgaccaaacgtctactggattaataaaaccgacaattctctgctggatcaggctttacaaaatgataccgtgtttctaaacatgaggggactgtatgatgtcgtctctgtgctgcgaattgcacgtacacctagcgtcaatatcggctgctgcatcgagaatgtgctgctgcagcaaaacttgactgtgggctcacagacagggaacgatattggcgagcgcgataaaattactgaaaacccagtgtcaacgggggagaaaaatgccgctacttggagcattctggcagtgctatgtctgctggtggttgtggccgtcgctataggatgggtctgccgtgacaggtgtttgcagcattcctacgcaggggcatgggctgtgagcccggaaacggagctcactggacatgtgtag

SEQ ID NO: 226734 - DNA, 909 bp, synthetic construct
  misc_feature 1..909: note = Description of Artificial Sequence: Synthetic coding sequence
  source 1..909: mol_type = other DNA
atgcgcctggggtcacccggtctgttgttcttgttattttcaagtctccgcgctgatacgcaggagaaagaggtgcgcgcaatggtgggcagtgatgtcgagctctcttgcgcttgccccgaaggtagcaggttcgatcttaacgacgtgtacgtgtactggcagacaagtgaatctaagactgtggtgacataccacatccctcaaaacagcagtttagagaacgttgactcccgttaccggaacagggccctgatgagccccgcaggcatgctgcgcggagacttttccctgagattgtttaacgttacaccacaggatgaacagaagttccactgcctggtgctgagccaatcactgggattccaagaagttctcagtgtggaagtcactctccacgtggcggcaaacttctccgtgcccgtcgttagcgcaccacactctcccagccaggatgaattgaccttcacctgtacatctataaatggctatccacgccctaatgtctattggatcaataagacagacaactccctactggaccaggcacttcagaacgatacggtcttcttgaacatgaggggcttgtatgatgttgtgtcagttctccgcatagcaagaacaccttccgtaaacatcggctgctgcatcgagaacgtgctgctccagcagaatctcaccgtgggtagccagactgggaacgacataggcgagcgcgataagattacggagaatccggtgtccacaggcgaaaagaacgctgctacctggagcatacttgccgtgttatgcctcttggtcgtagtggctgtggctatcggctgggtgtgtagagatcggtgtctgcagcacagttatgcaggcgcttgggcagtgtccccagagactgaactgaccggacatgtgtag

SEQ ID NO: 226735 - DNA, 1101 bp, synthetic construct
  misc_feature 1..1101: note = Description of Artificial Sequence: Synthetic coding sequence
  source 1..1101: mol_type = other DNA
atggtcctacacctcttgctgtttcttctcctcacgcctcagggcggtcactcctgtcagggcctggagctcgccagggagctggttctggccaaggtgcgcgcattgttcctagacgcccttggacccccagcagtcacccgagaaggtggtgacccgggtgttcgcagacttccaaggagacacgccctgggcggtttcactcataggggctccgaaccggaggaagaggaggacgtgtctcaggctatcctctttccggctacggacgctagctgtgaagataagagcgcggctaggggactggcccaagaggccgaggagggtctcttcagatacatgttccgccctagccagcacaccaggtctaggcaggttacatccgcgcagttatggttccatactgggctggataggcaaggcaccgccgctagcaactcctctgaaccccttcttggcctacttgccctcagccccggaggacccgtcgctgtgcctatgtcacttggtcacgccccaccacactgggccgtcttgcatctagccacatccgccctctctcttctgacccatcccgtgctggtgttgctgcttaggtgtcctttatgtacttgttcagccagacccgaggcaacaccattcctggttgcccatacccgtacacggcctcctagtggaggtgagcgggctagaagatccacccccctgatgtcttggccgtggtcccccagcgccctccgattgctgcagaggccgcctgaggagcccgctgcacacgcgaactgtcaccgtgtcgccttgaacatcagtttccaggaactcggatgggagagatggatcgtttacccaccttcctttatttttcactactgccatggcggttgcgggctccacattcctcctaacttaagtcttccggtgcctggtgctcctcccactccggcacagccctacagtttgcttccgggagcgcaaccctgctgcgcggcactccccggtaccatgcggcctttgcacgtccggacaacatccgacggcggttactcattcaaatatgagactgtgccaaatcttctcactcagcactgtgcttgtatatag

SEQ ID NO: 226736 - DNA, 1281 bp, synthetic construct
  misc_feature 1..1281: note = Description of Artificial Sequence: Synthetic coding sequence
  source 1..1281: mol_type = other DNA
atgcccctactatggcttcgaggcttcttacttgcctcttgttggataatcgtgcgcagttcccctaccccgggttctgaagggcactccgccgctcccgactgccccagctgtgccctggccgctttgccgaaggatgtgcctaattcccaacctgaaatggtggaagccgttaagaaacatatcctgaacatgcttcacttaaagaagcgccctgacgtcacacaaccagtgccgaaggcagcattgctcaacgcaattagaaagctgcacgtcggcaaggtgggcgagaatggctacgtcgagatcgaggacgatatcggtcggagagcggaaatgaatgagctgatggaacagaccagcgaaatcattaccttcgctgaaagcggtacagctcggaaaaccctgcattttgagatctccaaggaggggtccgacctgagcgttgttgaacgagccgaggtatggctgtttcttaaagtacccaaggcaaacaggacgagaacgaaggtgacgattcgcttattccagcagcagaagcaccctcagggctcgcttgacacaggagaagaggctgaagaagtgggcctgaagggggaacgttcagagcttcttctttccgaaaaagtcgtcgacgcgaggaaaagtacctggcatgtgttcccggtctccagttccatacaaaggcttctcgaccagggtaagtcttccttagatgtaagaattgcttgtgaacaatgtcaggagtctggtgccagtttagtcctcctcgggaaaaaaaaaaaaaaagaagaggagggggaaggaaagaaaaagggagggggagaggggggtgcaggggctgacgaagagaaggagcagagccatcgcccattcctcatgctgcaggctaggcagtccgaggatcacccccacaggcgtagaagacgaggcctagaatgcgatgggaaagtaaacatctgctgtaaaaagcaattctttgtctctttcaaggatatcggctggaatgactggattattgctcccagcggctatcacgctaattactgtgagggcgaatgcccctcacacatcgccggaacctccggtagtagccttagtttccactcaaccgtgatcaatcactacagaatgcggggtcatagcccattcgccaaccttaagtcgtgttgtgtaccaaccaagctccgacctatgagtatgctgtattacgatgatggacagaatataattaaaaaagatattcagaacatgatagtcgaagagtgcggatgctcttag

SEQ ID NO: 226737 - DNA, 1281 bp, synthetic construct
  misc_feature 1..1281: note = Description of Artificial Sequence: Synthetic coding sequence
  source 1..1281: mol_type = other DNA
atgcctctgctgtggctaagaggattcctcctcgccagctgctggataatcgtcaggtctagtccaacccccggtagcgaagggcacagtgccgctcctgattgtccgtcctgcgccctcgccgctctgcccaaagacgtccccaattctcagcctgaaatggtggaagctgtaaagaagcatattctgaatatgcttcacttaaagaaaaggcctgatgtgactcagccggtacctaaggccgcactgctgaacgccatccgcaagctccacgtgggtaaggtcggtgaaaacggctatgttgagattgaggatgatattggaaggagagcggagatgaatgagctcatggagcagacaagcgaaatcattaccttcgctgaatctggaacggctcggaagacgttacacttcgagatttccaaggagggatccgacctcagtgtagtcgagcgcgcagaagtttggctattcctgaaggtacccaaagccaaccggacacgcactaaagtcacgatcaggctgttccagcagcaaaagcacccacaaggatcactcgatactggagaggaagcggaagaagttgggttaaagggagaacgctctgaattacttctgtccgagaaagtggtggacgctcgcaaatcgacctggcacgtctttccggtgtcctctagcatacaaaggttactggatcaaggtaaaagctcccttgatgttcggattgcttgcgaacagtgccaagaatccggggcatccctggtgctgttgggcaaaaagaagaaaaaggaagaggaaggcgagggcaaaaagaagggcggtggtgagggaggggcaggcgctgatgaggaaaaggaacagtcccaccgtccattcctcatgctgcaggcacgccagagtgaggatcacccacacagacggcgaaggaggggcctggagtgtgacggaaaggtgaatatttgttgtaaaaagcagttcttcgtgagctttaaagatatcggatggaacgactggatcatcgcgcctagtggttaccacgccaactattgtgaaggcgaatgccctagccacattgctgggaccagtggctcaagtctgagtttccacagcaccgtgatcaaccactaccggatgcgaggtcactcacctttcgccaacctgaaatcttgctgcgtccccacaaaactgcggccaatgagcatgctctactatgatgatgggcaaaacataattaagaaagacatacagaatatgatcgttgaagagtgcggctgttcatag

SEQ ID NO: 226738 - DNA, 1224 bp, synthetic construct
  misc_feature 1..1224: note = Description of Artificial Sequence: Synthetic coding sequence
  source 1..1224: mol_type = other DNA
atggatggactgccaggcagggcactcggggcagcctgcttactgctcctggccgcaggatggctggggcctgaggcatggggcagcccaactccacctccaacgcctgcagcaccgccaccgccacccccacctggaagccctggaggtagccaggacacatgcaccagctgcggtgggttccgcaggccagaggagctaggtcgagtggatggggacttcttagaggcagtgaaacgacacatactgagtagactgcaaatgcgcggacgccctaatatcacacacgctgtccctaaagctgccatggtcacggcactccgtaaactgcacgccggtaaagtaagagaggatggtagggtcgaaattccacacctagacggtcacgctagtcccggtgcggacggtcaggagcgggtatccgagattatctctttcgccgaaacagatggccttgccagttccagagtgcgcctgtatttctttatcagtaatgaaggaaaccagaatcttttcgttgttcaggcttctctgtggctgtatttaaagctgttgccctatgtgctcgagaaaggcagccgaagaaaggtgagagtgaaggtctatttccaggaacagggacacggcgatcgctggaacatggtggaaaaacgcgtcgacttaaaacgcagcggctggcatacattccctttgaccgaagccattcaagcgcttttcgagcgaggcgagcgtaggcttaatctcgatgtgcagtgtgactcatgccaagaactcgccgtggttcctgtttttgtcgaccccggtgaggaatctcacaggcccttcgtcgttgtgcaagccaggctgggcgattccagacacagaatacgtaagagggggttggaatgtgacggacgtactaacctttgttgccgccagcagttcttcatcgacttccgacttattggctggaacgattggatcatagccccaactggttactacggcaactactgtgaggggagctgtcccgcatacctcgctggcgttcctgggagtgcctcctccttccatacagctgtggtcaaccagtatcggatgaggggtctgaacccaggaaccgtcaacagttgttgtattccaactaagttgtccacaatgagtatgctatactttgatgatgaatacaacatcgtcaaacgggacgttcccaacatgatagtggaggagtgcggatgtgcttag

SEQ ID NO: 226739 - DNA, 1059 bp, synthetic construct
  misc_feature 1..1059: note = Description of Artificial Sequence: Synthetic coding sequence
  source 1..1059: mol_type = other DNA
atgacctcttctctgttactcgctttccttcttttagctcctactaccgtggccacgccaagggccggaggccagtgccccgcttgtggcggacctacgctcgaactggagagccagcgagaactgttgctcgatctggctaaaagatccatcttagataaactacacctcacacaacgaccgacgctaaaccgccctgtctctcgggctgcactgcggactgccctccagcatctgcacggagtgccacagggcgcattattggaggacaaccgggaacaggaatgcgaaattataagctttgcagaaaccgggctttccaccattaatcagacacggctcgacttccacttttcaagcgatcggaccgctggcgacagagaagttcagcaagcatcccttatgttttttgtgcaattacccagtaacactacctggactctgaaggtgcgcgtgctggtgctgggacctcataataccaaccttacattagcaacacaatatctactggaggtggatgcatcaggctggcaccagctaccacttggtccagaggcccaggctgcatgtagtcaggggcacctgacattggaactggtccttgaaggccaggtggcccaatctagtgtgattctgggcggagcggctcatcgaccattcgtcgcagcgcgagtcagggtgggtggaaagcaccagatccacaggcgcggaatagactgtcaaggcggatcaagaatgtgttgccgccaagaatttttcgtcgattttcgggagattggttggcatgattggatcattcagccggaaggttacgcgatgaacttctgtatcggccagtgtcctttgcacatcgccggaatgcccggaatcgcagcctccttccacacagccgtgttaaacctgttgaaggctaacactgcagccggaacaacagggggagggtcctgttgtgttcccacagccaggagaccactatctctcctgtactacgaccgtgactctaacatcgtgaagacagacatacccgacatggttgtggaggcatgtggatgttcctag

SEQ ID NO: 226740 - DNA, 1053 bp, synthetic construct
  misc_feature 1..1053: note = Description of Artificial Sequence: Synthetic coding sequence
  source 1..1053: mol_type = other DNA
atgaggctgcctgacgtgcagctatggcttgttttgctatgggctctggtcagggcacagggtacaggttcagtctgcccctcctgtggtgggtccaaactcgcgcctcaggccgagagagcattggtcttggagcttgctaagcagcagatactcgacggtctccatctaacatcccggcctagaatcacacaccccccacctcaggcagctttaacccgggctctgagaagattgcagcccggtagcgtggcccctgggaatggcgaagaggttattagctttgccaccgtgaccgatagcacatctgcatattcttctctgttaacctttcaccttagcacacccagaagccaccacctgtaccatgctcgtctctggctgcacgtgctcccaacactgccgggtactttgtgcttgcgaatctttaggtggggcccacgccgtaggcgtcaaggttctcgcacccttctcgccgagcaccacatcaccaacctgggctggcatactctcaccctgccatcttctgggttgcggggagaaaagtctggagtgttgaagcttcagctcgattgccgtcctttggagggaaactccacggttactggccagccaaggaggcttctggacaccgccggacatcagcaaccctttttggaacttaagatccgcgcaaacgaacctggggctggcagggctagaagacgaacaccaacctgtgaacctgccacgcccttatgctgcagacgggaccattatgtagacttccaggaactcggctggagagattggatcctccaacccgagggatatcagcttaactactgctccggccagtgcccaccccacctcgctggcagtccaggtattgcagcctccttccatagcgctgtcttttcattgctcaaggcaaataacccctggcctgcctcgacgagttgttgtgttccgacagcgaggagacccctctcccttctgtacttggatcataacggcaatgtggtcaaaaccgatgtacccgacatggtggtggaagcctgtgggtgctcttag

SEQ ID NO: 226741 - DNA, 4062 bp, synthetic construct
  misc_feature 1..4062: note = Description of Artificial Sequence: Synthetic coding sequence
  source 1..4062: mol_type = other DNA
atgtcctcacccatgcccgattgtactagcaagtgccggtccctgaagcacgctctagacgtgctgtctgttgtgacaaaaggctctgaaaatcagattaaagcgttcttgtcctcgcactgttataacgccgcaactatcaaggatgtgttcggcaggaatgctctgcatctagtgagtagctgcggaaagaagggggtgcttgactggctcattcaaaagggcgtggacctgctcgtaaaggacaaggaatccggctggaccgcccttcataggagcatcttttatgggcacattgactgcgtttggagtctgctgaaacatggagtgagtctctacatacaagataaagaggggctgtctgccctggatttagtgatgaaggaccggccaacacatgtggtctttaagaacacggacccaacggacgtttacacgtggggggacaacaccaatttcaccttagggcatgggtcacagaatagcaagcaccaccctgaacttgtggacctgttttctcgaagcggaatttatatcaaacaagttgttctgtgcaaatttcactctgtcttcctctcccagaagggccaggtgtacacatgcggtcatggaccgggaggtaggctgggacatggcgacgagcagacctgcctggtgcccagactagtggagggcctgaacgggcataattgttcccaggtcgccgcagccaaggaccacactgtggtgcttaccgaggatggttgtgtctacacgttcggactcaatatcttccaccaacttggcataatccccccaccttccagctgcaatgtccctagacaaattcaggctaagtacctgaagggcagaactatcataggtgtcgccgctggacggtttcacaccgtgctgtggactcgcgaagctgtgtacaccatgggtctaaatgggggacaactgggatgcctactcgatcctaatggggaaaagtgtgttacggcgcctagacaggtgtctgcacttcaccataaagatatcgccttaagtctggtcgctgcctccgatggcgcaaccgtgtgcgtcaccaccagaggcgacatctacctgctggccgattatcagtgcaagaaaatggcctctaagcagctcaatttaaaaaaggtcctggtgagtggagggcacatggagtataaggtcgaccctgagcacctcaaggagaacggaggccaaaaaatctgcattctcgcaatggacggggctggccgagtcttctgctggcgcagcgttaatagtagcctgaagcaatgcaggtgggcctatcccagacaggtcttcatttcagacattgccctgaatagaaacgagatactttttgtgactcaagacggggaggggttcaggggtaggtggttcgaagaaaagcgaaaatccagcgagaagaaagaaatcttgtctaacctgcataattcgtcatccgacgtctcctacgtgtcagatatcaactccgtgtacgagcgtatccgactcgagaaactgactttcgcacatagagcagtgtcagtgtctactgacccaagcgggtgtaattttgcaatcttacaatctgatccaaaaacatccttgtacgagattcccgcagtgtcctcctcctcctttttcgaagagtttggaaaactcctccgcgaggccgacgaaatggattcaattcacgacgtcacatttcaggtaggaaaccgactctttcctgcccacaagtatatcctggccgttcactccgatttctttcagaaattgttccttagcgacggtaatacgtccgaatttaccgatatataccaaaaggacgaagatagtgctggctgccaccttttcgttgttgagaaggtgcatccagatatgtttgagtatctcctgcaattcatctacacagatacctgtgactttttgacccacggcttcaagccgaggatccacttaaataagaatcctgaagaatatcagggcactttgaattcccatctgaataaggtgaactttcacgaggatgacaatcagaaatccgccttcgaggtgtataaatccaaccaggcacagacagtcagcgaacggcagaaaagcaaaccaaagtcatgtaagaagggcaaaaatatacgcgaagacgacccagttcggatgttgcagaccgtggctaaaaagtttgacttttccaacctgagcagtagactggacggcgtcagatttgaaaacgaaaaaatcaatgtgatagcgaaaaatactggtaacaagttgaagctttctcagaagaaatgcagtttcctgtgtgatgttaccatgaagtcagttgatggaaaggaattcccctgccataagtgtgtgctctgtgcacggctggaatactttcactcaatgctgagcagctcctggatagaggcctcttcatgcgcagctctggagatgcccatacacagcgacatcttaaaagttatcttagactatctgtacacggatgaagcagtcgtgatcaaggaaagccagaacgttgactttatttgcagcgtgttagtggtagcagatcaattactcatcacaagattaaaagagatctgcgaggtggcccttaccgagaaactgactctgaagaacgccgctatgctgctggagtttgcggctatgtattcggccaagcagctgaaactgagctgcttacaattcatcggtctcaacatggcagctctattggaagccagatctctggatgtattatctgacggagtgctcaaggacctctccgagttctaccggaagatgattccggcaatggaccggagagttattaccccataccaggacgggcctgatattagctacctcgaagtagaagacggggatatttttctgaaggaagaaatcaacatggaacagaaccactccgagactatgttcaagaaagcgaaaaccaaggccaaaaaaaaacccagaaaacgatctgactcatcgggaggctataacctcagtgatatcatacagtcgccgtccagtacagggctgctcaaatcaggaaaaaccaattccgtggagagcctgccagaacttctgacatccgattcagagggctcctacgccggtgtgggcagcccccgagacttacagtcccccgattttacgactggattccattccgataagatcgaagcgaaggtgaagccatatgtcaacggcacgagcccagtctacagccgcgaggatctgaagccctgggaaaagagtcccatcctcaaaatcagtgcaccccagcctatccctagcaaccgcatcgacaccacatccagtgcttcctgggtcgcgggttctttctcacccgtgtccccccctgtagtcgatctgagaaccatcatggagatcgaggagtctcggcagaaatgcggagcaacccccaaaagccatctcgggaagacagttagtcacggagtgaaactttcccaaaagcagagaaaaatgattgctcttactactaaggaaaataattccggcatgaactccatggagacagtgctgttcactccatctaaggctcctaaacccgttaatgcatgggcgtcatccctacactctgtttcctccaagtccttccgcgacttcctcttggaagagaaaaaatccgttacttcccacagtagcggtgaccatgtgaagaaggtgagtttcaaaggtatcgagaattctcaggcaccaaagattgtccggtgcagtactcacggaactcctggacccgagggcaaccacattagcgatctgccactgctcgacagtccaaatccctggctttctagtagcgtgacggcccctagcatggtagcaccagtgacgttcgcatcgatcgtagaggaagagttgcagcaagaggcggcactcataagatcaagggagaagccactggcattaatccagatcgaggagcatgctatccaggacttattagtgttttatgaagcgtttggcaatccagaggagttcgttatcgtcgagcgcacgccccagggaccactcgctgtgccgatgtggaacaaacatggctgctag

SEQ ID NO: 226742 - DNA, 1386 bp, synthetic construct
  misc_feature 1..1386: note = Description of Artificial Sequence: Synthetic coding sequence
  source 1..1386: mol_type = other DNA
atgtggcagttaacttcacttctgttgttcgtcgcaacctggggcatcagtggaacaccggctccacttgatagtgttttctcaagctccgaacgtgctcatcaggtgcttcggatccggaaaagggctaacagtttcctggaggagctgcgccattcgtcattggagagagaatgcattgaggaaatctgtgatttcgaggaggccaaagaaatcttccagaatgtggacgatacactcgctttctggagcaagcatgtcgacggagaccaatgcctggtgcttccccttgaacacccttgtgccagtctgtgttgtgggcacggtacgtgcatagacggcattggttcattctcctgtgactgtcgcagcgggtgggaaggacggttctgtcagcgggaggtaagcttcctcaattgcagcctcgacaacggtgggtgtacccactattgcctcgaggaggtcgggtggagaagatgtagttgcgcacccggatataagcttggggacgaccttctccagtgccatcctgctgtgaagttcccttgcgggaggccttggaagcgcatggaaaagaaacggagtcacctcaagcgggacacagaagaccaggaggatcaagtcgaccctcggcttatcgatggaaaaatgacccgtcggggtgattctccctggcaggtcgtactgttggactcaaaaaaaaagttagcctgcggagctgtgctgatccacccatcttgggtgcttactgcggcacactgcatggatgagagcaaaaaacttctcgtcaggctgggggagtatgatctgcgccgttgggaaaaatgggaactggatctggatataaaggaggtgtttgtgcatcctaactactcaaaatctacaaccgacaacgacattgcgctgctgcacctggcgcagcccgctactctctcccagaccatcgtgccaatttgtttgccagattccggacttgccgaacgtgagctgaaccaggccggacaggaaacattggtgaccggatggggctatcactcctccagagagaaggaggctaagcgaaataggaccttcgtgctaaattttatcaagattcctgtggtgccccataatgagtgtagcgaagttatgtccaatatggtctcagaaaacatgctctgtgctgggattcttggcgatcgccaggacgcctgtgaaggcgacagcggtggcccaatggtggcatcttttcacggtacatggttcttagtgggcctggttagttggggtgaagggtgcggtttacttcacaattatggcgtgtacactaaagtgtcacgttatttggactggatccacggccatataagagacaaggaggctcctcagaaatcgtgggccccatag

SEQ ID NO: 226743 - DNA, 405 bp, synthetic construct
  misc_feature 1..405: note = Description of Artificial Sequence: Synthetic coding sequence
  source 1..405: mol_type = other DNA
atgaaggcttttagccctgtgcggtccgtccggaaaaacagtttgagcgaccactcactgggcatttcaaggtctaaaactcctgtcgacgatccaatgagtctcctatacaatatgaatgattgttactcaaaactcaaagagctggtgccgagcatccctcagaacaagaaggtttcaaaaatggagattctccagcacgtaatcgactacattctcgacctgcagatcgccctggactcccacccgaccattgtgagtcttcatcatcagaggcccggacaaaaccaggcgagccgcactcctctgaccactctcaacaccgacatctccatcctctccctccaggcctcagagtttccctctgaactgatgtcaaatgatagcaaggccctctgtggctag

SEQ ID NO: 226744 - DNA, 405 bp, synthetic construct
  misc_feature 1..405: note = Description of Artificial Sequence: Synthetic coding sequence
  source 1..405: mol_type = other DNA
atgaaggcctttagcccggttcgcagtgtgagaaagaattcgctgagcgaccattctttaggaattagtaggagcaaaacgccagttgacgacccaatgtccttgctctacaacatgaatgactgctattcgaagctcaaggagctggtgcctagcattccccaaaacaaaaaagtctccaagatggaaatattacagcatgtgatcgactatattctcgatctgcaaatcgccctggatagtcacccgaccattgtgagccttcatcatcaacggccaggtcaaaatcaggcatccagaacgccattaaccactctgaatactgatatttctattcttagcctacaagctagcgagtttccaagcgagctaatgtctaatgatagtaaggctctatgtggctag

SEQ ID NO: 226745 - DNA, 360 bp, synthetic construct
  misc_feature 1..360: note = Description of Artificial Sequence: Synthetic coding sequence
  source 1..360: mol_type = other DNA
atgaaggccctcagcccagtgcgtggttgctacgaagcagtgtgctgtctgtccgagcgatctctggccatcgcccgaggcagagggaaggggcctgctgccgaggaacctctatctctgctggatgacatgaaccactgctattctagacttcgggagctcgtgccaggcgttccacgcggaacacaactgagccaggtggagatacttcaaagggtgatcgattacatcctagacttgcaggtcgtgctcgccgaacctgctcccggacctcccgatggcccacatctgccaatccagaccgctgagctcacaccagagctggtgatttctaacgacaaaaggtctttctgccactag

SEQ ID NO: 226746 - DNA, 486 bp, synthetic construct
  misc_feature 1..486: note = Description of Artificial Sequence: Synthetic coding sequence
  source 1..486: mol_type = other DNA
atgaaagcagtaagcccagtcaggccatccggaaggaaagctccgtctggctgcggtggcggagaactggccctgcggtgtctagcagaacacggtcacagccttggcggttcggccgcagccgcagccgctgccgcagccgctcgctgtaaggcagccgaggctgctgccgatgagcctgccctgtgtctccaatgtgacatgaacgactgttatagcaggctgagacgcctcgtgccaaccattcccccaaataagaaggtctccaaagtggaaatcttacagcatgtcatcgactacatcctggatctgcaactggctcttgaaacccacccagccctcctccggcagcccccacccccagcccctcctcatcacccggcaggaacctgtcctgcggcacctccacggacccccctgacagccttgaacactgatcccgctggggcagttaacaaacagggagattccattctctgcaggtag

SEQ ID NO: 226747 - DNA, 843 bp, synthetic construct
  misc_feature 1..843: note = Description of Artificial Sequence: Synthetic coding sequence
  source 1..843: mol_type = other DNA
atgctcggtcagcagcaacaacagctctactcttccgccgctctgttaaccggggaaagatccaggctgctgacatgttatgtgcaggactatctggaatgcgttgaaagtctgcctcacgatatgcagcggaacgtaagcgtgctaagggaactcgacaacaagtaccaggagaccctgaaagagatcgatgacgtttacgagaagtataaaaaggaggatgaccttaaccaaaaaaagcggctgcagcaattactgcagcgggcactgataaactcccaagaacttggtgacgagaaaattcaaattgtgacccaaatgttagagctcgttgagaatagagccaggcagatggaactccattctcagtgtttccaggatcctgccgaatctgaacgggcatcagacaaggccaaaatggactcatctcagcccgagaggtcttccagacgacctcgtcgacaaaggacctccgaatcaagagacttgtgtcatatggccaatgggatcgaagattgcgacgaccagcctcctaaggaaaagaagtccaaatcggcaaagaagaagaaacgaagcaaagccaagcaagaacgggaagcctcacctgtcgagttcgccatcgaccccaatgagccaacttactgtctgtgtaatcaggtctcttacggagagatgattggatgtgataatgagcagtgtcccatagagtggtttcacttttcatgtgtgtccctaacttacaaaccgaaaggaaagtggtattgtcccaagtgtcggggtgataacgagaagacgatggacaagagcaccgagaaaacaaagaaagacagacgctctcggtag

SEQ ID NO: 226748 - DNA, 723 bp, synthetic construct
  misc_feature 1..723: note = Description of Artificial Sequence: Synthetic coding sequence
  source 1..723: mol_type = other DNA
atggatcaggatggagatcagcaactggggccttctaggatcctggccccacagacgctcaaggagatcgacgacgtgtatgagaagtacaaaaaagaagacgacttaaaccagaaaaagagacttcagcaactcctccagagggctttgattaactcacaggagttgggcgacgagaagatccagatcgtaacacagatgcttgaactggtggagaatagggcaaggcagatggagcttcatagtcagtgctttcaagaccccgcagagtctgagcgcgcatccgataaggccaagatggactcaagtcagccagaacggagctctcgtcgaccaagaaggcaaaggacctccgaatcacgcgatctctgtcatatggctaatgggatcgaggattgcgatgatcagcccccaaaggaaaaaaagagcaaatccgcaaagaagaagaagcggtcaaaggctaagcaggaaagagaagctagtcccgtggagttcgccattgatccgaatgagccaacctactgcttgtgcaatcaggtaagttatggcgagatgataggctgtgataatgaacagtgtcctatcgaatggtttcacttttcctgtgtgagtctgacgtataagcccaaaggaaaatggtattgtcctaagtgtagaggtgataacgaaaagacaatggacaagagcaccgaaaagacaaagaaggataggagatctcggtag

SEQ ID NO: 226749 - DNA, 1257 bp, synthetic construct
  misc_feature 1..1257: note = Description of Artificial Sequence: Synthetic coding sequence
  source 1..1257: mol_type = other DNA
atgctctatcttgaagattatctcgagatgatcgagcaactgcctatggatcttcgcgacaggtttactgagatgcgagaaatggacttgcaagtccagaacgccatggatcagctggaacaaagagtcagtgagttttttatgaacgcaaagaaaaataaaccagaatggagggaagagcaaatggccagcatcaagaaggattactacaaagcgttggaagatgcggacgaaaaagtgcaactggctaaccagatttatgatctggtggaccgtcatctccgcaagctggaccaggagctggctaaatttaagatggaattggaggcggacaacgcaggcattacagagattctcgagaggcggagcctcgagctcgacacgccctcacagccagtgaacaatcatcacgctcactctcatacccccgtagagaaacgtaagtataacccaacaagccaccatacgaccacagatcacatccctgagaaaaaatttaaatctgaagcacttctgagcactctgacctcagatgcatctaaagagaatacgctcggctgccggaataacaatagtactgcgagctcaaataacgcctacaacgtaaatagctcacaaccactaggctcatacaatattggttcattgtccagcgggacaggcgctggcgcaattactatggccgcagctcaggcggtccaggccactgcccaaatgaaagaaggacgcagaacatcctccctcaaggcctcctatgaagcctttaagaacaatgacttccaactgggtaaagagttcagtatggctagagagacggtaggatatagcagctccagcgcgctcatgaccacactaacacagaatgccagcagctctgccgctgacagcaggagtgggcgaaagtccaagaacaataacaaaagcagcagccagcagtcctcgtcctcttcgtcttcatccagcctgtcaagctgttcctcatcgtccactgtggttcaggaaatatctcagcagacgactgtggtcccagagtccgattccaattcccaggtggactggacctacgacccaaacgagcccaggtactgcatttgtaatcaggtgagctatggcgagatggttggatgtgataatcaggactgccctatcgagtggtttcattacggctgcgtcggcctgaccgaagcacccaagggcaagtggtactgtcctcagtgtactgccgctatgaagcggaggggatcacgacataaatag

SEQ ID NO: 226750 - DNA, 279 bp, synthetic construct
  misc_feature 1..279: note = Description of Artificial Sequence: Synthetic coding sequence
  source 1..279: mol_type = other DNA
atgctgtaccttgaggattacctcgagatgatagaacagcttcccatggatctgcgggacaggttcactgagatgagagaaatggatttgcaagttcaaaacgccatggatcagctcgagcagcgtgtcagcgagttctttatgaatgctaaaaagaataagcccgagtggagggaggagcagatggcttctattaagaaagattactacaaggccttggaagacgcagatgagaaagtccagctcgctaaccaaatctacgatctgcaacacttctag

SEQ ID NO: 226751 - DNA, 723 bp, synthetic construct
  misc_feature 1..723: note = Description of Artificial Sequence: Synthetic coding sequence
  source 1..723: mol_type = other DNA
atggccaccgccatgtaccttgagcattaccttgattccattgagaatctgccatgtgaattgcagagaaattttcagctcatgcgggaactggatcagcgaacggaggataagaaagccgagattgacattctggctgcagagtatattagtacagtaaagacgctgtctccggaccaacgggtggaaagactccagaaaatccagaatgcctatagcaagtgcaaagagtacagcgatgacaaggtgcagttagctatgcagacctatgagatggttgacaaacatattaggcgattagacgctgacctcgccaggttcgaagccgatctgaaagacaagatggaaggcagtgacttcgagagttcagggggaaggggcctgaaaaagggaagggggcagaaagaaaagcgaggcagtcggggaagaggacgcaggacttctgaggaggacacacctaagaagaaaaagcacaagggaggaagcgagtttaccgataccattctgagcgtccacccttcagacgtgctggacatgcccgtggatccaaatgagcccacctattgcctatgccatcaagtgtcctatggggaaatgattgggtgcgacaatcccgattgtcctatcgaatggttccacttcgcttgtgtcgacctcaccactaagcctaaaggcaaatggttctgccccagatgtgtgcaagaaaaaaggaagaagaaatag

SEQ ID NO: 226752 - DNA, 681 bp, synthetic construct
  misc_feature 1..681: note = Description of Artificial Sequence: Synthetic coding sequence
  source 1..681: mol_type = other DNA
atggccactgccatgtacttggagcactacctagattccattgaaaacctgccttgtgagcttcagcgaaacttccagctgatgagagagctggatcaacggaccgaggataagaaagcagagattgacattctggctgcagaatacatctccaccgtgaagactttgtcacctgatcagagagtggagaggctgcagaaaattcagaatgcttactccaaatgtaaagaatattccgatgacaaggttcagctggctatgcagacttacgagatggtcgacaagcacattagacgactcgacgcagatctggccagattcgaggccgaccttaaggacaaaatggaaggaagcgatttcgagtcgtctgggggacgtggactgaagaagggaagaggccagaaggaaaagagaggctcaagagggaggggcagaagaacctctgaggaggatacccctaagaaaaagaagcacaagggcggatcggaattcactgatacgatactgtcagtgcatccttcagatgttttagacatgcctgtggaccctaacgaaccgacttactgtctatgccaccaagtttcctatggggagatgattggctgcgataacccggactgtcctattgagtggtttcactttgcttgcgtggatctgacaacaaaacccaagggcaaatag

SEQ ID NO: 226753 - DNA, 2265 bp, synthetic construct
  misc_feature 1..2265: note = Description of Artificial Sequence: Synthetic coding sequence
  source 1..2265: mol_type = other DNA
atgtttagcggcggatgccatagccccggattcgggcgtccgtcacccgctttccccgcacctggaagcccgcctcccgcaccacgaccatgcaggcaagaaacgggagaacaaattgcaatcaaacagtgccgacaagaactctccccaaggaacagggagagatggtgtcttgagattcagatcatgcgacgcttaacccatccaaatgtggtggctgctcgggacgtgcctgagggaatgcagaatctagccccaaacgacttaccgctgcttgccatggagtactgccaaggcggtgacttgcggaagtatctcaatcagttcgagaattgttgtggcctgcgcgaaggagcaattctgacccttttgagtgacattgcttctgctctcaggtatcttcatgagaaccgcatcattcacagagacctgaaacccgaaaacatcgtgctgcaacagggggagcagaggcttatccataagattatcgaccttggttacgcaaaggaactggaccagggctccctctgtacctccttcgtcggaacgctgcaatacctggcaccagagctgctggagcagcagaaatacacggtcactgtagattattggagtttcggtactctcgcttttgaatgcataaccgggtttagaccctttctccccaattggcagcccgtgcagtggcacagtaaagtcagacagaagagcgaagtggacattgtggtttccgaggatctgaacggtaccgtaaagttttcatccagtctgccctacccaaacaacctcaatagcgtcctcgcagaacgtttggaaaaatggctgcagctcatgctcatgtggcatccacgacaaaggggtactgaccccacatacggtcccaatggctgctttaaggctctggatgacatcctgaacttaaaactggttcatatcctgaacatggtaactggaacaattcatacataccccgtaactgaagatgagtccttacagagcctgaaagcacgtatccagcaggacaccgggatcccggaagaagaccaggagctattgcaggaggcaggcctcgccctgattccggacaagcccgcaacccaatgcatcagcgacggaaaacttaacgagggccatactctcgatatggatcttgtgtttctgttcgacaattcaaagatcacctatgagacgcagatctcccccaggccccagcctgagagcgtgagttgtatcctccaggagcccaagcgcaatctcgcattcttccagctgagaaaagtatggggccaggtctggcactccattcagaccctcaaggaggactgtaatagactgcaacaaggacagagggcggcaatgatgaacctactccgcaataattcttgtctgtctaagatgaagaattctatggcctccatgagccaacagctgaaggcaaagcttgattttttcaagacctccatccagattgatctggagaaatattctgagcagacggaatttgggattacaagcgataaattgctgctggcatggcgcgaaatggagcaggccgtcgagctgtgtgggagagagaacgaggttaagctgttggttgagagaatgatggccctacagaccgatatcgtagacttgcaaagatccccaatgggacggaagcagggcggaacactggatgacttggaagagcaagctcgcgagctttacagaaggctaagagagaaacccagagatcagagaacggagggagattctcaggaaatggtgaggttactcttgcaggctattcaaagctttgaaaaaaaggttcgggtaatttatacgcaactgagtaagacagttgtgtgcaagcagaaggctctggaactgctaccgaaggtggaggaggttgtgagccttatgaatgaggacgaaaagactgtcgtgaggcttcaggaaaaaaggcaaaaagaactttggaatttactcaagattgcttgcagcaaggttcggggaccagtctcaggcagtcctgattccatgaacgcctctaggctttcccagccgggacagctcatgtcgcagccatccaccgcatctaactcactgcccgaacctgctaagaagagtgaagaactggttgcagaagcccataatctgtgcacactgctggagaacgccattcaggacacagtgcgagaacaggatcaatcgttcacggcactggactggtcttggttgcaaactgaggaagaagagcactcttgcctcgagcaagcctcttag

SEQ ID NO: 226754 - DNA, 963 bp, synthetic construct
  misc_feature 1..963: note = Description of Artificial Sequence: Synthetic coding sequence
  source 1..963: mol_type = other DNA
atgaacaggcacttgtggaaatcacagctgtgtgagatggtgcaacctagcggtgggcctgccgcagaccaagacgtacttggcgaagaaagtccattgggaaaacccgcaatgctgcatctgccaagcgagcagggtgcgcctgaaaccctccagcgatgtttggaagagaaccaggaactgcgggacgcaatcagacaatcaaatcagattttgagggagcgttgcgaggaattgctgcacttccaggccagccagcgcgaggagaaagaatttctgatgtgcaagtttcaggaggcacggaagttggttgaacgactgggcctggagaagctcgatctcaaacgacagaaagagcaggccctccgcgaagtggaacacctgaagagatgtcagcagcagatggccgaggacaaggcctccgtcaaagcccaggtgaccagtttgctaggtgagctgcaggaatcccagagcagactcgaggctgccacaaaggagtgccaggctctggaggggcgtaggaaattggcacagctgcaggtcgcctaccatcagttgtttcaagaatatgataatcacatcaaatcttctgttgtgggttcagagcggaagagagcggatatctacaaggctgatttccaggctgaacgacaggctcgagagaaactggcagaaaaaaaggagctcttacaagaacagcttgagcagctacaacgcgagtactcaaagctgaaggcatcttgccaagagtctgccagaattgaggatatgagaaagcgacacgtggaagtgtcacaagctcctctgcctccggctccagcctatctgagtagcccactggctttgccttcccaaaggagatcaccgccagaggagccacccgacttctgttgtcccaagtgtcaataccaggctcccgatatggacaccctccagatccatgtgatggagtgtattgaatag

SEQ ID NO: 226755 - DNA, 1602 bp, synthetic construct
  misc_feature 1..1602: note = Description of Artificial Sequence: Synthetic coding sequence
  source 1..1602: mol_type = other DNA
atgtcgtccgacgggaccatccgccactccaaggtaagacagaagtcggaggtggatattgtcgtctccgaagacctcaatggcacagtgaagttcagctcatcgttgccttaccccaacaatttaaacagcgtgttggccgaacggcttgaaaaatggctacagctgatgcttatgtggcaccctcgtcagcgcggtactgatcccacgtacggacctaacggctgttttaaggcccttgatgacattctgaacttgaaacttgtgcacattttgaatatggtgactggtaccatccatacctatccggtaactgaggatgagagtctgcagagccttaaggcacggatccagcaggatacaggcattccagaggaggatcaggagctcctgcaggaagcaggactggccctcataccggataaaccagcgacgcagtgcatcagtgatggaaaacttaatgaagggcataccctcgatatggacctggtgttcctgtttgacaattccaaaattacctacgaaacgcagatcagtcccagaccccagcctgagtctgtgtcatgtatcctacaggagcccaaacgtaacctggccttctttcaactgcgtaaggtttggggacaagtctggcactcaatacagacccttaaggaagattgtaataggttgcagcagggacagagagcagctatgatgaatttacttcgcaataactcgtgcctgtctaaaatgaaaaactctatggctagcatgtcccagcagctcaaagctaaactggatttcttcaagacatccatccagatagatttggagaagtactcagaacagacagaattcggaataacatcggacaagctattattagcgtggcgcgaaatggagcaagcagttgagttgtgtgggcgagagaacgaggtaaagctgctggtcgagaggatgatggccttgcaaactgacattgtcgatctgcagcgcagtcctatgggcagaaaacagggagggacgctggacgacctcgaagagcaggcaagggaactgtatagaaggctgagggaaaagcccagagaccaaaggaccgaaggcgattctcaggagatggtccgactgcttctgcaagcgattcagtcattcgaaaaaaaggtgagagtgatctacactcagctatccaagactgtggtgtgtaagcagaaggctctggaactgctgcccaaggtcgaagaggtcgttagcttgatgaatgaagacgagaagactgtggtgcgacttcaggaaaagagacagaaagagctgtggaatctccttaagatcgcatgttcaaaggtacgcggacccgtcagtggctcacctgatagcatgaatgccagccggctgagccagcccggacagttgatgagtcagccatcgaccgcgtccaatagtctgcccgaacctgctaagaagagtgaagaattggtggccgaggcccataacttatgtacactgcttgagaacgccatacaagatactgttcgagagcaagaccaaagctttacagcgctagactggtcatggctgcagacagaggaggaggagcacagctgtctcgaacaggcctcatag

SEQ ID NO: 226756 - DNA, 2094 bp, synthetic construct
  misc_feature 1..2094: note = Description of Artificial Sequence: Synthetic coding sequence
  source 1..2094: mol_type = other DNA
atgagttcggacggtaccattcgactgacacatcccaacgttgttgcagccagagacgtaccagaaggtatgcagaatctcgctcctaatgacttgcctttactcgcaatggagtactgtcagggcggagacctcaggaagtatctcaaccagtttgaaaactgctgtggccttagggagggcgctatattaacgttactgagtgatatcgcgtctgccctcaggtacttgcacgagaatcgcatcatccaccgcgacctgaagcccgaaaatatagttctgcaacagggtgaacagcgcttaattcacaagatcattgatctgggctacgccaaggaacttgaccaaggcagcttgtgtacctctttcgttggaactctgcagtatctggcacctgaactcctggagcagcagaagtacacggttaccgtggattattggagtttcgggacactcgccttcgaatgtatcacgggctttcggccatttttgccaaattggcagccagtccaatggcactccaaagtgaggcagaagagcgaggtggacattgtcgtgtccgaggatctgaatggaacagtcaagttttcctcttccctgccttaccccaacaatctgaacagtgttttggccgagcggctggagaaatggttgcaactcatgctcatgtggcaccccaggcaacggggaacagaccctacctatgggcctaatggctgcttcaaagccctcgatgacatcttaaacctgaaacttgtccatattttgaatatggtaaccggaactattcatacttaccccgtgacagaagacgaatctttgcagagcctcaaggctcggatccagcaggacaccgggattccagaggaggaccaagagctgctgcaggaagcgggattggccctaatccccgacaaacccgcaactcagtgtataagtgacggcaaactcaatgagggccataccctggatatggacctggtttttctgttcgacaactccaagattacttacgagacgcaaatttcacccaggcctcagccagagtccgtatcctgcattctgcaagagcccaagcggaacctggctttttttcagctgagaaaggtttgggggcaggtctggcatagcatccaaactctgaaagaagattgtaaccgactgcaacaaggacagagggctgcaatgatgaatctactgaggaataactcttgcctgtctaaaatgaaaaatagcatggcatcgatgagccagcaactgaaagctaagttggatttcttcaaaacatccatccaaatcgacctcgagaagtactccgagcagaccgagtttggaataacaagtgacaaactactgctggcctggcgcgagatggaacaggcagttgagctgtgcggaagagagaatgaggtcaagctgctggtcgagcgcatgatggctttgcagaccgacattgtggacctgcagcgctctcctatgggaaggaagcaaggtggcaccctcgacgatcttgaggagcaggcccgtgaattatatcgccgacttagagaaaaacctagggaccagagaactgagggcgatagtcaagaaatggttagactcctccttcaggccattcagagcttcgaaaagaaagtaagggtgatttacactcagttatccaagacagtcgtctgtaaacagaaggcactggaactactccctaaagtggaagaggtggtctctctgatgaatgaagacgaaaagacggtggtccgccttcaggagaagagacagaaggagctatggaatctcctgaaaatcgcatgttccaaggtgagaggccctgtgagtggctctcctgattccatgaacgcttctcgtctcagtcagcccggtcagttaatgtcacagccctccaccgcctctaactctctccccgaaccggctaaaaaaagtgaggaattagtcgcagaggctcataatctgtgtacccttctcgagaacgccatccaagatacggtaagggagcaggaccagtcatttacggctctcgattggagctggctccagacagaggaggaagagcatagctgtcttgagcaagcctcatag

SEQ ID NO: 226757 - DNA, 2271 bp, synthetic construct
  misc_feature 1..2271: note = Description of Artificial Sequence: Synthetic coding sequence
  source 1..2271: mol_type = other DNA
atgagctggtcccccagtttgaccacccaaacttgcggagcgtgggaaatgaaggaacggctcggtacgggcggattcggtaacgtgatacgttggcacaatcaggagaccggcgagcagattgctattaagcagtgtagacaggaacttagtcctcgaaaccgcgaaaggtggtgcctggagattcagattatgcgcaggctaactcacccaaatgtagtggccgctcgggatgtccccgaaggaatgcagaatctggccccaaacgatttacccctattggcaatggaatattgccagggaggcgaccttagaaaatacctgaatcagttcgaaaactgctgcggattgagagagggggctatcctgactttactctcagatattgctagtgctctgaggtatctccatgaaaatagaatcatccacagggacctgaagccagagaacattgtactgcagcagggcgaacaaaggctcatccacaagatcatcgacctggggtacgcaaaagaacttgaccagggatctctgtgcacaagcttcgtgggcaccctgcaatacctagccccagaactgttagagcagcaaaagtacactgttactgttgactattggtctttcggcaccttggcatttgaatgcattacgggatttcgtccattcttgccaaactggcaaccagtgcaatggcattcaaaggttcgccaaaagagtgaggtggacatcgtggtgtccgaggacctgaacggaaccgtcaaatttagtagctcattgccctaccccaacaacctgaacagcgtcttggccgaacgcctggagaagtggttgcaactgatgctgatgtggcatcccagacaacgtggaactgaccccacgtacggccctaacggctgtttcaaggctctcgacgacattttgaatcttaaattggtgcatatcttgaatatggtgacagggaccatccatacttatcctgtcaccgaggacgaaagcctgcagtctctcaaggcccgaatacagcaggacaccgggataccagaagaagaccaggagctgttgcaggaggccggtctggctctgataccagataagcccgctacacagtgtattagtgatggaaaactgaacgaggggcacaccctggatatggaccttgtgtttctttttgataattcaaaaattacctatgagacccagatttcaccacgcccacaacctgagtcagttagctgtatactgcaggagcccaaacggaacctggctttctttcaactgcgaaaggtatggggacaggtatggcactccatccagaccttgaaagaagactgcaatcgactccaacagggccagcgagccgcaatgatgaacctgttgcgtaacaactcctgcctgagcaagatgaaaaactcgatggcctctatgtcccagcagctgaaagcaaaactggactttttcaagactagcatccagatcgacctggagaaatactccgaacaaaccgagttcggtataacatctgataaattgctattagcttggagagaaatggagcaagccgtggagctgtgcggcagggaaaacgaggtgaagcttctagtggagcggatgatggcgcttcagactgatatcgtggatctccagaggtcacccatgggaagaaagcagggaggcacacttgacgatttggaggagcaggctcgagaactgtatcggagattgagggagaagccaagggaccaacgcaccgagggcgactcacaagaaatggtgaggctactgctccaggctattcagagtttcgagaagaaggtgagggtcatctatactcagttgtcaaagacggtggtgtgtaagcagaaagccttggagctactgcccaaagtcgaggaggtggtgagccttatgaatgaggatgaaaaaacagtggtacgtctacaggaaaaacgccaaaaggaactgtggaacctgcttaagatcgcctgtagcaaagtccgcggaccggtttctggctcgccggattctatgaatgcttcccgcctcagtcagcccggtcagttaatgagtcagccgtcaaccgcatccaacagtttgccggaaccagctaagaagtcagaggaactcgtggcggaggcacataatctgtgtaccctgctggagaatgccatacaggacaccgtcagggagcaggatcagagcttcaccgctctagactggagctggttgcaaactgaggaagaggagcactcttgccttgagcaggcaagttag

SEQ ID NO: 226758 - DNA, 3999 bp, synthetic construct
  misc_feature 1..3999: note = Description of Artificial Sequence: Synthetic coding sequence
  source 1..3999: mol_type = other DNA
atgcggaacctaaaactgttccgtaccctggaattccgggatatacaaggtccaggcaaccctcagtgtttcagcctccgcactgagcagggcactgtgctgattggcagcgagcacggtttgatcgaggtggaccccgtatcaagggaggtgaagaatgaggttagcctggtagctgaagggtttctgcccgaagatggctcaggcagaatcgtcggggtgcaggatctgctagaccaagaaagtgtttgtgttgccacagcttctggggatgttatcctgtgtagtctgagcactcagcagctggagtgtgtagggagcgtggcaagtgggatttctgttatgtcctggagcccggatcaggagctggtgctgctcgctaccggccagcagacattgattatgatgacaaaagacttcgagcccatcctcgagcagcaaattcaccaagacgatttcggcgagtctaagttcatcacggttggatgggggcgtaaggagacccaattccatggaagtgaggggagacaggcggctttccagatgcagatgcatgaatcagccctcccttgggatgaccacagaccgcaagtgacctggaggggggatggacagtttttcgctgtgtctgtcgtgtgcccagagaccggcgcaaggaaggtacgcgtttggaatcgagagtttgcactccagagcacatctgaaccggttgctggactgggacctgctctcgcgtggaagccaagcgggtccctgattgcctctacacaggacaaacctaaccaacaggacatcgtgtttttcgaaaagaacggtctgctccacggccatttcaccctcccgttcctgaaggatgaggtgaaggtgaacgacctgctgtggaatgctgattctagcgtgttggccgtctggttggaggatctgcagagagaggagagcagcattcccaagacatgcgtgcagctgtggacagttggcaattatcactggtacctgaaacagtctctgtcctttagcacctgtggcaagagtaaaatagtatcactgatgtgggaccctgtgacaccatatcgcttacatgtcctttgccagggatggcactatcttgcctatgattggcattggactacagaccggtctgtgggagacaatagttctgacttgtcaaacgtggccgtcattgacgggaatagagtcctggttacagttttccggcagacagtcgtgccaccccctatgtgcacttatcaactgttgttcccacatccggtgaatcaggtaactttcttggctcatccccaaaaaagtaatgatctggcagtcctcgatgccagcaaccagattagtgtgtataagtgcggcgattgtccgagcgctgatccaactgttaaactgggtgctgtcggaggcagtgggttcaaagtctgtctgcggacgccgcaccttgaaaaaaggtacaaaatacaatttgagaacaacgaggaccaggacgtcaaccctcttaagcttggcctacttacttggattgaagaggatgtgttcttggcagtgtctcattccgaattttcccccaggtctgtgattcaccacctgaccgcagcctccagtgagatggacgaagaacacgggcagttaaacgtctcttcctcggctgccgtggacggcgtaataatctcactgtgttgtaatagcaaaactaagtccgtggtcctgcagttggccgacggacagatcttcaaatacttgtgggagtctccgtctctggctatcaagccctggaagaactctggcggattccctgttagatttccttatccgtgcacacagaccgagctggcaatgatcggtgaagaggaatgtgtcctgggcctgactgataggtgtagattctttattaacgacatcgaggtcgctagcaatattactagcttcgccgtgtacgatgagttcttgctgctgaccacgcacagccacacctgtcagtgtttttgccttcgggatgcatcttttaaaaccctgcaggccggactcagcagcaaccatgtgagccacggtgaggtcttgcggaaagtggaacgtggctcccgcattgtgacggtggtgcctcaggatacaaaacttgtacttcagatgccccgaggtaatctcgaagttgttcatcatcgggctctagtcttagcacagatcaggaaatggctagataaactgatgtttaaggaggcattcgagtgcatgaggaagctgcggatcaatctgaatcttatctacgaccacaatcctaaggtgttcctgggaaatgtggagacttttattaaacaaatcgactcagttaaccatattaacctattctttactgagttaaaggaggaggatgtgaccaagaccatgtaccctgccccagtgacaagctctgtttacttaagtcgggatcctgatggaaacaaaatcgatctggtgtgtgatgccatgagagccgtaatggaatctattaatccacataagtactgtctgtcgatcttaacaagtcacgttaagaagaccactcccgagttggagatagtgctgcagaaggtacacgaacttcagggcaacgctccgtcggaccctgacgcggtctctgccgaggaggctctcaaatatctgctgcacctggtggacgtgaacgagctgtatgatcacagcctaggcacctacgactttgatctggtgttgatggtggccgagaagagtcagaaggatcccaaagaatacctgccattccttaacactctgaagaaaatggagaccaactaccagaggtttaccatcgacaagtatctcaagagatatgaaaaagcaattggccacctttccaaatgtggacctgagtactttcctgagtgcctgaaccttatcaaagataagaacctgtacaacgaagcgttgaaactctacagtccctcgtctcaacagtatcaggacatatcaatcgcatacggcgagcatttaatgcaagagcacatgtacgagcctgcaggtctgatgtttgccaggtgtggagcacacgaaaaagctctgtcagcttttctcacatgtggaaactggaagcaggcactctgcgtggcggctcaactgaacttcaccaaggaccaattggttgggcttggtaggaccctggctggcaaactggtcgaacagcgaaagcacatcgacgctgcgatggtgctcgaagaatgcgctcaagattacgaagaggccgtgctccttttgcttgagggcgctgcttgggaagaagcgctgcgactggtgtacaaatacaaccgtctggatatcatcgaaacgaacgtgaagccctccattcttgaggctcagaaaaactatatggccttcttggattcccagaccgctacattcagcagacacaagaagcggctgctggtagtgcgcgagctgaaagaacaagcgcagcaagctggtctggatgacgaggtgccacatggccaggagtccgatctgttcagcgagacctctagtgttgtctcaggctccgaaatgagcggtaagtactcacactctaacagtagaatctctgcgaggtccagcaaaaaccggcgtaaggcagagaggaagaaacattcccttaaggagggatccccactggaggatttagccctgttagaagcgctgtcagaggtggtgcagaatacagaaaatcttaaagacgaggtctaccacattttgaaggtgctgtttctcttcgagtttgacgagcagggtagggaactgcagaaggcttttgaggacaccctgcagctgatggaacggtctctacctgagatctggactctcacataccagcagaatagcgccactcccgttctggggcctaatagcacagccaactcaattatggcaagttatcagcagcagaagacatctgtgcccgtgctcgacgctgagttgttcattccacccaaaatcaacaggagaacacagtggaaactgtcactactcgattag

SEQ ID NO: 226759 - DNA, 2952 bp, synthetic construct
  misc_feature 1..2952: note = Description of Artificial Sequence: Synthetic coding sequence
  source 1..2952: mol_type = other DNA
atgtgggatccagtgaccccttaccgtctgcacgtattatgtcagggctggcactaccttgcttatgactggcattggacgaccgaccggtcagttggagataacagctctgatctgagcaacgtggccgtgattgacggcaacagagtgcttgtgacggtattccgccagactgtggtgcctcccccaatgtgcacctaccaactgctgttcccccaccctgtgaaccaagtaacatttctcgcccatccccagaaaagcaacgacctggcagtactggacgcctccaaccaaattagtgtgtacaagtgcggggactgtcctagtgcagatcccaccgtgaaattgggtgcagtcgggggttctgggtttaaggtgtgccttcgcacaccccacctcgagaaaagatacaagattcagtttgagaacaatgaggatcaggacgtgaatccacttaagctgggcctgctcacgtggatcgaagaggacgtgttcctggctgtttctcacagcgagttctccccccgatctgtgatacatcatctgacagctgcctctagcgaaatggacgaggagcacggccagctgaatgtgtcaagctcagccgctgttgatggcgtaatcatttcactgtgctgtaactccaagaccaaatctgtggtcctccagctcgcggatggacagatctttaaatacctctgggaatccccatccctggccatcaaaccctggaagaactccgggggatttcctgtaaggtttccatacccttgtacacagacagaactcgctatgattggggaagaggaatgcgtcctgggactgactgatcgatgccgtttctttatcaatgatattgaagtggcttccaatattacatcttttgcagtgtacgatgaatttctgctgctgactacacactctcacacctgccagtgtttctgcctgcgggatgcctccttcaaaaccctccaggcaggtctaagttctaaccacgtctctcacggagaggtgttgcgaaaggttgagcgcggtagtcgcatagttaccgttgtgccgcaagacactaaactggtcctccagatgccccgtggcaacctggaagttgttcaccatagggccttggtgctggcccaaatccgcaagtggctcgacaagcttatgtttaaagaagcctttgaatgtatgaggaagctgagaattaatctgaaccttatctatgaccacaacccgaaggtattcctcggaaatgtggagacattcataaaacagatcgactcagttaatcacattaatttgttcttcactgaactgaaggaggaggacgtgaccaaaacaatgtaccccgcaccagtgaccagctcggtgtacctttctcgcgacccagacggcaacaagattgacttggtctgcgatgccatgcgcgcagtcatggagagtataaacccacataagtactgcctttctatcctgacttctcatgtgaagaagaccaccccggaactggagatagtgttgcagaaggttcacgagctgcagggtaatgccccaagtgacccagatgcagtaagcgccgaggaggctctgaagtacctgcttcacctagtggatgtcaacgagttgtacgaccactcgcttggcacctatgacttcgacctggtcctgatggtggctgagaaaagtcagaaagaccccaaagagtacctgccattcttgaataccctgaaaaagatggaaaccaactaccagcggtttactatcgacaaatatctgaagagatatgagaaggcaattggacatttaagcaagtgtggacctgaatattttccagagtgtctcaatctgatcaaggataagaacctgtataacgaagctctgaagctctatagtcctagctcacagcagtatcaggacattagtatagcttacggggaacacctgatgcaggaacatatgtatgagcctgccggactcatgttcgcacggtgtggcgctcatgaaaaggccttgagtgcctttttgacctgtgggaactggaagcaagccctttgcgtggctgcacagttgaactttaccaaagatcagttggtgggactgggccgtactctggcaggcaaactggttgaacagcgaaaacacatagatgcggcaatggtcctggaggagtgcgcccaagattatgaggaagccgtgctcttacttctcgaaggggctgcttgggaggaagccttaaggctcgtttataagtataatcgcttggatattatcgagacgaatgtgaagccgagtatactggaggctcagaagaattacatggccttcctggactctcagaccgccaccttcagcagacacaagaagcgtcttcttgtcgtgagagaactaaaagaacaagcccagcaggccggactggacgatgaggtacctcacggtcaggagtcagacctgttttcagagacctcttcagtcgtctctgggtccgagatgagtggcaagtactctcacagtaatagccgcataagcgcgaggtccagtaagaataggcgtaaggccgagagaaagaagcactcgctgaaggaaggatcacctctcgaggatcttgcactgctcgaagccctcagtgaggttgtgcagaacactgaaaatcttaaagatgaggtttaccacatactgaaggtgctgtttctgtttgagtttgatgagcagggccgtgaactgcagaaggcctttgaggatactctgcagctcatggaaagatcattaccagagatatggacccttacgtatcagcagaactctgcaacgccagtgctgggtccgaattcaactgcaaactctattatggcctcttaccagcaacagaagacaagcgtacctgtgctggacgccgagctgttcattcccccaaagatcaatagaagaactcagtggaagcttagtcttctggactag

SEQ ID NO: 226760 - DNA, 2151 bp, synthetic construct
  misc_feature 1..2151: note = Description of Artificial Sequence: Synthetic coding sequence
  source 1..2151: mol_type = other DNA
atgcagtcaactgccaattacctctggcataccgatgacttgcttggacagggggcaaccgcgagcgtatacaaggcacgtaataagaagtctggcgagctggtggctgtcaaggtgttcaacaccacgagttacctacgaccacgtgaagtacaagtcagggagttcgaggtcctccggaaactgaaccaccagaacatcgtgaaattatttgccgtggaagaaacaggcggatccagacagaaggtgctggtgatggaatactgcagctctgggagccttctgtccgtgctcgagagcccagagaatgcatttggacttcccgaggacgagtttctggtggtattaaggtgcgttgtcgctgggatgaaccatctgagggaaaacggtatcgtccacagagacatcaaacccggaaatatcatgcggttggtcggggaggagggtcaatcgatatataaattaacagactttggagctgccagagagctcgatgatgacgagaaattcgtgtcagtgtatggcacggaggagtatttacatccagacatgtacgaaagagcagtgttgcggaagccccaacaaaaggccttcggggttaccgttgacctgtggagtattggggtgacgttatatcatgctgccactggcagcctcccttttattcctttcggcggtcctcggaggaacaaggaaatcatgtaccgcattaccaccgagaaaccagctggggcaatcgcaggggctcagcgtcgggagaatgggccactcgagtggtcctacactctgccaattacatgtcaattaagcctgggactccaatctcagctagttcctatacttgccaatatcctggaagtggaacaggccaagtgttggggttttgatcagttttttgctgagacctcggacatcctacaacgggtggtggtgcacgttttttcccttagtcaggcagtcctgcatcatatctatatccatgcacataacacgattgccatttttcaggaggcagttcacaaacagacctctgtggctcctcggcaccaagaatacctgttcgaggggcacctgtgcgttctcgagccgtctgtctccgctcaacatattgcccacactacagctagctcaccactcacattgttttcaactgccattccaaaggggttggcatttcgagacccagcgctggatgttcctaaattcgtgcccaaggtagacctacaggcagattacaatacggcgaagggagtcctgggggcaggctaccaggctctgcgattggctagagccctgctggacggacaggagctgatgttcagaggtctgcattgggttatggaggtgctgcaggcaacctgcaggcgcactctggaggtggcccgtacaagcttgttgtatctgagcagttcccttggaaccgagagattctcatcagtggccggaacgccggagattcaggaacttaaagctgcggctgagttaaggagtcggttgcgaacactggccgaggttctgtccaggtgtagccagaacatcacagagacccaggagtccctgtcttcccttaaccgggaattggtgaaaagcagagaccaggtgcatgaggacaggtctatccagcagattcagtgctgtttggacaaaatgaacttcatctacaaacagtttaaaaaaagccgaatgcggccaggtctgggctacaacgaagagcagattcacaagctggacaaggtgaatttcagccaccttgcgaagagactgctgcaagtgttccaggaagaatgcgttcagaaatatcaggccagcctcgttacccacgggaaacgaatgcgcgtcgtgcacgaaaccaggaaccacctaagactggtaggctgctcagttgctgcctgcaacacagaagcccaaggcgttcaggagtccctatctaagctgctggaagaactgtcacatcagcttcttcaagatcgcgcaaagggtgcacaagcctcccctccacccatcgcaccatacccctctcctactaggaaagacctcttattacatatgcaggaactgtgtgagggaatgaagctgctggcctctgacctactcgataataacaggatcatcgaacgactgaatcgggtaccagcccctccagacgtctag

SEQ ID NO: 226761 - DNA, 1896 bp, synthetic construct
  misc_feature 1..1896: note = Description of Artificial Sequence: Synthetic coding sequence
  source 1..1896: mol_type = other DNA
atggagtactgtagtagtggatcccttctgtcagtactggaatcccctgagaacgccttcgggctcccagaagatgaattcctggtagtgttaagatgtgtggtagccggaatgaatcatctgcgcgaaaacggtattgtgcacagggacatcaaaccaggaaacataatgagattagttggagaagaagggcaatctatctataagctgacagacttcggagctgcccgtgagctcgatgatgatgagaaattcgtgtctgtctatggaaccgaagagtacttgcatccggacatgtacgagagagctgttctgcgaaagccacagcaaaaggctttcggggtcactgtggatctatggtcaatcggggtgacactttatcacgccgctacggggagcctaccctttatcccgtttggcggacctcgcagaaataaggaaattatgtaccggattacaacagaaaaaccagcaggcgcaattgccggagcacaacgcagagaaaacggacccctagagtggagttacacgttacctattacctgtcagttatccctgggactacaaagccaactggttcctattctggcgaacattctggaggttgaacaagccaagtgttggggattcgaccaattcttcgcagaaacatctgatattctgcagagagtcgtggtccacgttttcagtctttctcaggctgtactccatcatatctatattcacgctcacaataccattgccatatttcaagaggcagtgcacaaacagacatctgtggctcctcgccaccaggagtacctgttcgaaggccacctgtgtgtgctcgaaccttccgtttccgcccaacacatagcacacacaaccgcatctagtcccctgactttgttttccaccgcaattccaaaaggtctagcctttagagaccctgccttggatgtccccaaatttgtgcccaaagttgatctccaggctgattacaacaccgctaaaggcgttctcggcgctggttatcaggctctgcggctcgctagggccttattggacggccaggaactaatgtttagaggcctgcattgggttatggaggtgttgcaagccacatgccggcgtactttagaggtggccaggacctctctactgtatctgagctctagcctggggacggagagatttagctctgtcgctggcactccagagattcaggagctaaaggccgctgcagagttgcggagcaggctgcgcacccttgccgaagtgctgtcaagatgctctcagaacattaccgaaacccaggagagcctctctagccttaacagggagctggtgaagtctcgtgatcaagtgcacgaggatcgcagcatccagcagatccagtgttgccttgacaagatgaatttcatctacaaacagttcaagaaaagtagaatgcgcccagggctcggctataacgaggagcagatccacaaactggacaaagttaatttcagccacctcgcgaaacggttgcttcaggtgtttcaagaagaatgtgtccagaaatatcaggctagcctggttactcatggaaagcgtatgcgcgtcgtccacgagaccaggaaccatctccgattagtcggatgcagcgtcgctgcttgtaacactgaggctcaaggggtacaggagagcttgtcaaagttgttggaagaactgagccatcaattgttacaggaccgcgcaaaaggtgcgcaggcgtccccgccacccattgccccatacccctctcccactcgcaaggatctgctgctgcacatgcaagagttgtgtgaggggatgaaattgttggcgtccgacctcttagacaataaccgcattattgaaaggctgaatagggtacccgcacccccagatgtctag

SEQ ID NO: 226762 - DNA, 1107 bp, synthetic construct
  misc_feature 1..1107: note = Description of Artificial Sequence: Synthetic coding sequence
  source 1..1107: mol_type = other DNA
atgaaccggcacttgtggaaaagtcagctatgcgaaatggtgcagccctctggcggaccagccgctgaccaggatgtgctgggggaggagagcccgctcgggaagcccgcaatgctccatctcccttcagaacaaggagccccagagacattacaacgttgcttggaggaaaaccaggagctgcgcgacgccatcagacagagcaatcagatcttacgggagcggtgcgaggaacttcttcattttcaggcatctcagagggaagagaaagagttccttatgtgtaagttccaagaagctaggaaactggtggagagattagggttagagaaactggatctgaagcggcagaaggaacaggcgctgagagaggttgaacacctgaagcggtgccagcagcagatggctgaggacaaggcatccgttaaggctcaagtcaccagcctgctgggggagctacaggaaagccagagcagactggaagctgccaccaaagagtgtcaggcgctggaaggaagacggaagttggctcagttacaagtggcttatcatcagctgttccaagagtatgataaccatataaagtccagcgttgtggggtctgaaaggaagagaggcatgcaactggaggatttgaaacagcagctgcagcaggccgaagaagccctcgttgcgaagcaggaggtcattgacaagctgaaagaagaagctgagcagcataaaatcgttatggagacggtgccagttttgaaagcccaggccgacatctacaaggcagactttcaagcggagcgccaggcccgagaaaagctggcggaaaagaaggaactccttcaggagcagctagaacagttgcaacgcgaatatagtaaactgaaagcaagttgtcaagagtccgccaggattgaagacatgcgcaaaagacacgtggaggtgtcccaggctccattacctccagcccctgcatacctgagcagccctttagcattgcctagccaaagacgatcgccacccgaggagccacctgacttttgctgtccgaagtgtcaatatcaggcccctgacatggataccctgcaaatacatgtgatggaatgcatcgagtag

SEQ ID NO: 226763 - DNA, 1260 bp, synthetic construct
  misc_feature 1..1260: note = Description of Artificial Sequence: Synthetic coding sequence
  source 1..1260: mol_type = other DNA
atgaatcgccacttatggaaaagtcaactgtgtgagatggtccagccaagcggaggaccagctgctgaccaggacgtgctgggtgaggagtccccgcttggcaaacccgcaatgctgcaccttccatcggaacagggggctcccgagacgctgcagcggtgcctcgaagagaaccaagagcttcgcgacgccatcagacaaagcaaccagatactgcgggagaggtgcgaggaattattacatttccaggcgtctcagagagaggagaaggagttccttatgtgcaaattccaggaggcaagaaaacttgtagagagattgggcctggagaagctggatctgaagcggcagaaagagcaggccttacgagaggtggaacatctcaaaagatgccagcagcagatggcggaggataaagcctcggtgaaggcccaagtgactagtcttctcggtgaacttcaggagtcacagtccagactggaggctgctaccaaggaatgccaggcgctggaggggagggcacgagccgcaagcgagcaggctagacagttagagtctgagcgcgaggcacttcagcagcaacatagcgtccaggttgaccagcttcgaatgcagggtcagagtgtggaggcggctcttagaatggaaagacaggccgcttcagaggagaaacggaagttggcccaactccaggtggcgtaccatcaactgtttcaagaatatgacaatcatatcaaaagtagcgtggtcggatcagaaagaaagaggggcatgcagcttgaggatctgaaacagcagttacagcaagctgaggaagcccttgtggctaagcaggaagtaattgataaactgaaggaggaggccgagcagcacaaaattgttatggagacggtgccagtcctgaaagcccaggccgacatctataaggccgatttccaggctgaaaggcaggcccgtgaaaaattagccgaaaaaaaggaactcctgcaggaacagctggagcaactgcagagagagtatagcaaattgaaggcctcctgtcaggaaagtgccagaatagaggatatgaggaagcgacatgtagaagtcagccaggcaccgctgccaccagctcccgcatacctaagtagccccctagccctcccttcgcagcgcagatcaccccctgaggagccccctgacttttgctgccccaagtgtcagtaccaggcccctgacatggatacattacaaattcatgtgatggaatgtatcgagtag

SEQ ID NO: 226764 - DNA, 1260 bp, synthetic construct
  misc_feature 1..1260: note = Description of Artificial Sequence: Synthetic coding sequence
  source 1..1260: mol_type = other DNA
atgaatcggcacctatggaaatcacagctgtgtgaaatggtacaacctagtggcggtcctgcagcggaccaagacgtgctgggagaggaatctccactgggcaaacccgctatgctgcatctgccttccgagcagggagcccctgaaacgctgcagaggtgtttggaagagaatcaagagttacgcgatgccattcgccagagtaaccagattcttagagaaagatgtgaggagttgctgcactttcaggccagccagcgggaagaaaaagaattcctgatgtgcaaattccaagaagcccgaaaattagtggagcgcctgggactcgagaagttggatcttaagcggcaaaaggaacaggccctcagagaggtcgagcatctgaagagatgccagcagcaaatggctgaagataaggcctccgtaaaagcccaagtcaccagcctgcttggggagctgcaagagtctcagtcgcgactagaggccgcaacgaaggagtgccaggctctcgagggaagagccagagctgcctccgaacaggcccgtcagttggaatcagagcgcgaagccctacagcagcagcattccgtccaggtggatcagcttaggatgcagggacagtcagtggaagctgccctcaggatggagaggcaggctgcttctgaggaaaaacgtaaactcgctcaactgcaggtggcctatcatcaactatttcaggaatacgacaatcatataaagagtagcgtcgtcggatccgagaggaagagaggcatgcaactggaggacctgaaacagcagctgcagcaggccgaagaggccctggtagccaaacaggaggttatagacaaattaaaagaggaagctgaacagcataagatcgtgatggaaactgtgccggtactgaaggcccaggctgacatttataaggcagattttcaggcagaacgtcaggctagggagaagctcgcagagaagaaggagctgctgcaggaacagttggagcagcttcagagagaatattcgaagctgaaggcctcttgtcaggagtctgctcgtatcgaggacatgcgcaagcgacacgttgaagtgagtcaggccccattaccaccagctcccgcatatctttcctcccctttggcactgccgtctcaacggcgaagccctccagaagagcctccagacttctgttgtcccaaatgtcagtatcaggcccctgacatggatacgctgcagatacatgtgatggaatgtattgagtag

SEQ ID NO: 226765 - DNA, 1260 bp, synthetic construct
  misc_feature 1..1260: note = Description of Artificial Sequence: Synthetic coding sequence
  source 1..1260: mol_type = other DNA
atgaaccgccacctgtggaagtcccagctgtgcgaaatggtgcagcccagtggaggacccgctgctgaccaggacgttctaggcgaagagtccccgttgggcaaaccagctatgctgcacctcccaagtgagcaaggtgccccagagactctccagcgctgcctggaggagaatcaagagttgagagacgcaatcaggcagagcaaccaaatcttaagagaaagatgcgaggagcttctgcatttccaagcctctcagagagaagaaaaagagtttctgatgtgtaagtttcaagaggcccgaaagctcgtggaaagactgggcctcgagaagctggacctgaagcgacagaaagaacaggcactcagagaagtagagcatctgaagagatgtcaacaacaaatggctgaagataaggcctcagttaaagctcaggttaccagtctcctcggggaactccaggaatcccagtctagattggaggccgctacgaaggagtgtcaggccctcgagggcagggctcgggctgcaagcgagcaggcccgacagcttgaatccgaaagggaagctctgcagcagcagcactctgtgcaagtggaccagctccgcatgcagggacagagcgtcgaggctgcactgagaatggaacgccaggctgcgtctgaagagaaacgaaagttggcccagctgcaggtggcctatcatcagttgtttcaggagtatgataatcatatcaaatcttctgtggtgggttctgaacgaaagcgtgggatgcagttggaggatctgaagcaacagctccaacaggccgaagaggccctcgtggctaagcaggaagttatcgataagctgaaggaagaggcagagcagcataaaattgtaatggaaactgtgcccgtgttgaaggcccaggcagatatttacaaggccgacttccaagcagagcgccaggctagagagaagctggccgagaaaaaagaactgctccaggagcaactggagcagcttcagagggaatattcaaagctgaaggccagctgtcaggagtcagcacgtattgaggacatgaggaaaaggcacgtagaggtgtcacaggctcccctgccccctgctccggcatacctgtcgagcccactagctcttccttcacagcgcaggtccccaccagaggagccacctgatttttgctgcccaaaatgtcaataccaggcgccagatatggatacactgcagattcatgtgatggaatgtatcgaatag

SEQ ID NO: 226766 - DNA, 1464 bp, synthetic construct
  misc_feature 1..1464: note = Description of Artificial Sequence: Synthetic coding sequence
  source 1..1464: mol_type = other DNA
atggcgctggttattcaggttggaaagcttcggccaagagaggttagaactcctcaaaccattaacccttcgctgttcccatctcttcccgttaaactcagcagcatcattgaggtcccctccgggggagaaagatgctgtagccgcagaacgctagtttataaggcccgagcattttggaaaggagcgccactgccgtgctggatgaataggcatctgtggaaatctcagctctgtgagatggttcaaccaagtggagggccagccgcagatcaggatgtccttggcgaggagtctccactaggaaagcccgctatgctccatctgcccagcgaacaaggcgctccagagacgctgcagcgctgcctggaggagaaccaggagctccgagacgctatccgacaatctaaccagatactgcgggagagatgcgaggaactactgcactttcaggcttcccaacgagaggaaaaggaatttcttatgtgtaaatttcaggaagctcggaagctcgttgagcggctgggactggaaaaactggacctgaagaggcagaaggaacaggcattgcgagaagtggaacacctgaagagatgtcagcagcagatggccgaggataaggcgtcggtgaaagcccaggtaacctccttgctgggtgagctccaggaaagtcaaagccgcctcgaagctgctactaaggaatgtcaggccctcgaaggaagagcacgggcagctagcgagcaagcacgacagttagagtcagagcgggaggccctccagcaacagcactccgttcaggttgatcaactcaggatgcagggccagtccgtggaagcagccctccgcatggagcgacaggccgcaagcgaggagaaacgaaaattagcccagctgcaagtggcttatcatcagcttttccaagagtatgacaatcatatcaaatccagtgtggtaggaagtgagaggaagagagggatgcaactcgaagatctgaaacagcagctccagcaagctgaagaggcactcgtggctaaacaggaggtaatcgataagctgaaggaggaggctgagcagcataagattgttatggaaaccgttccagttctcaaggcgcaggctgatatatacaaggccgatttccaagccgaacgacaagccagggaaaagcttgcggaaaaaaaagaactgttgcaagagcagctcgagcagcttcagcgggagtactctaaattgaaagctagctgccaggaatctgcacggattgaggatatgcgtaagagacacgttgaggttagtcaagctcctcttcccccagctcctgcctacctgtcctctccgctggcattgccctctcagagacggtccccaccagaggagcctccggacttttgttgtccgaagtgccaataccaggccccagatatggacactctgcagattcatgtcatggagtgcatcgagtag

SEQ ID NO: 226767 - DNA, 621 bp, synthetic construct
  misc_feature 1..621: note = Description of Artificial Sequence: Synthetic coding sequence
  source 1..621: mol_type = other DNA
atgaatcgtcacctatggaaaagtcagctatgcgaaatggtccaacctagcgggggacccgcagcagaccaggatgtgttaggcgaggagagtcctcttggtaagccagctatgctacacctgccctcggaacaaggcgcacccgagacccttcagcgctgcctcgaagagaatcaggaactcagggacgcaatccggcaatcgaatcagatactgcgtgaaaggtgcgaagaactcttacacttccaggccagccaacgggaagaaaaagaatttctcatgtgcaaattccaggaggccagaaagcttgttgaacggcttggcctagaaaagctggatctaaagaggcagaaagaacaggcgctccgagaggtcgagcatcttaaacggtgccagcagcagatggcagaagataaggcttcagtgaaagcccaggtcacatcactgctgggtgagctccaggagtcccaatcccggctggaggccgctacaaaggagtgtcaggcactggagggccgagcccgagcagcctcagaacaagctaggcagctggaatcagaacgggaggcccttcagcaacaacacagcgtgcaggtggatcagttgcgcatgcagggctag

SEQ ID NO: 226768 - DNA, 756 bp, synthetic construct
  misc_feature 1..756: note = Description of Artificial Sequence: Synthetic coding sequence
  source 1..756: mol_type = other DNA
atgaacagacatctttggaagtcacagctctgcgaaatggtgcagccatctggaggccctgccgctgaccaggacgttttgggtgaagaaagtccccttgggaaaccagccatgcttcatctgccttctgaacagggggctccagagacactgcagaggtgtctcgaggaaaaccaggaactcagggacgctatccgtcaatccaatcagatattgagggagaggtgcgaggagcttctgcacttccaggcttcccagcgagaagaaaaggagttcctgatgtgcaaattccaggaggctaggaaactcgttgaaagactgggacttgaaaagctagacttgaaacggcagaaggagcaggctctgcgggaggtcgaacacttgaaacgctgccagcagcagatggcagaggacaaagccagtgtaaaggcgcaggttacctcattgctgggcgagctccaggagagccagtccaggctggaggccgctaccaaggagtgccaggccctagaaggcagagctcgggctgcctcagagcaggctcggcagcttgaaagtgaacgggaagctctccagcagcagcattccgttcaggtggatcagctacgaatgcagggacagtccgttgaagccgctttgcgcatggagagacaagcagcttctgaagaaaaaagaaagctggcgcagcttcaagttgcctaccatcagttattccaggagtatgataaccatattaaatcctcagtcgtgggttag

SEQ ID NO: 226769 - DNA, 417 bp, synthetic construct
  misc_feature 1..417: note = Description of Artificial Sequence: Synthetic coding sequence
  source 1..417: mol_type = other DNA
atgaatagacatctttggaagtcccaactttgtgagatggtgcagccctcggggggacctgcggcagaccaggacgttctgggagaagaaagtcccctgggcaaacccgctatgctgcacttgcctagtgaacagggggcacccgaaactttgcagagatgtctggaagaaaaccaggagctgcgggacgccatcaggcaatccaaccagatcctgcgggaacggtgtgaagagctcctgcatttccaagcttcccagagggaggagaaggaatttctcatgtgcaagttccaggaggcgcgtaaactagtggagaggctgggtctggagaagctagatctgaagaggcagaaagagcaagcactgcgagaagtggagcatctgaagaggtgccagcaacaaatggcagaagactag

SEQ ID NO: 226770 - DNA, 1257 bp, synthetic construct
  misc_feature 1..1257: note = Description of Artificial Sequence: Synthetic coding sequence
  source 1..1257: mol_type = other DNA
atgaaccgacatttgtggaaaagccaactgtgtgagatggtacagccgagcggcggtccggctgccgatcaggacgtgttgggggaggagtctcctctcggaaaacccgctatgttgcacctgccatccgaacagggagcccctgagaccctgcaaagatgcctcgaagaaaatcaggaactacgagacgccatccggcagtcgaatcaaattctgcgggaacggtgcgaggagctgttgcacttccaggcctctcagagagaggaaaaggagttcttgatgtgcaaattccaggaggctaggaagctcgtggagagactcggactggagaagctcgacctgaagcgccagaaagagcaggctctgcgcgaagtggagcatttgaagaggtgtcaacagatggccgaggacaaggcatccgtgaaagctcaggtgactagcctgttgggggagcttcaggagtctcagagtcgactcgaggccgcaaccaaagaatgtcaggctttggagggcagggctagggctgcatcggagcaggcccgtcagctggaatcagagcgggaggccctgcagcagcagcattccgtccaagtggatcagctgagaatgcaaggccagtccgtcgaagctgccctccggatggagcgccaggccgcatctgaagaaaagagaaagcttgcccagctccaggtcgcgtatcaccagctgttccaggagtacgacaatcacatcaagagcagtgtcgttggctccgagaggaagcgtggaatgcagctcgaggatcttaagcaacaactccagcaggctgaagaggccttggtggccaagcaggaggtcatagacaagctgaaagaggaagccgagcagcacaagatagttatggagacggtcccagtgctcaaggcacaggctgatatttacaaggccgacttccaggcagaacgtcaggccagggaaaagctcgcagagaagaaggaacttttacaagagcagttggaacaattgcagcgagagtactccaagctaaaagcatcttgtcaggaaagcgcacgcattgaagatatgcgcaagaggcatgtggaggttagccaagctccacttccgcctgcccctgcgtaccttagttctccacttgcgttgccctctcagcgccgatccccaccagaggaacctcccgacttctgttgcccaaaatgtcaataccaggctccagacatggacactcttcagattcacgtgatggagtgtattgaatag

SEQ ID NO: 226771 - DNA, 2181 bp, synthetic construct
  misc_feature 1..2181: note = Description of Artificial Sequence: Synthetic coding sequence
  source 1..2181: mol_type = other DNA
atgctgcgggcatgccagttaagcggcgtaactgccgcagcccagagctgtttgtgtggcaagttcgtccttagaccactgaggccatgccgtcgctattctacttcagggtcttctggtctgaccaccggcaagattgcaggcgcaggtctgctgtttgttggaggcggaattggaggcaccattctctacgcaaaatgggacagccacttccgcgagagtgtcgaaaagacaattccatactctgacaagctgttcgagatggtcctgggcccagcggcatacaatgttcctctgcccaagaagtctattcaaagcgggcctctcaaaatatcctccgtcagcgaagtgatgaaggagtctaaacagccagcatcacagctgcagaaacagaagggtgacacacccgcatcagcgactgcgccaaccgaagcagcacagatcatttcagctgctggtgacacattgtcagttcccgctcccgcagtgcaacccgaggaaagtctgaagaccgaccatccagaaatcggagagggaaaacccacacccgcattaagcgctctggctaagtccttagaggatgccctgcgccagaccgcgagtgttacactgcaggccattgcagcgcagaacgctgccgtgcaggcagtcaacgcccacagcaatatcctcaaggctgccatggataactctgaaattgccggtgagaagaaatccgctcagtggcgcacagtcgagggtgccctgaaagagcgaagaaaagctgttgatgaggcagcagatgctctgcttaaggcaaaggaagaactggagaagatgaaatccgtcatagaaaacgccaaaaaaaaagaggtcgccggtgctaagccacacattaccgctgccgaaggaaaacttcacaatatgatcgttgacctggacaacgtggtcaaaaaggtacaggccgctcagtcagaggcgaaagtcgtctcacagtatcacgaattggtcgtgcaggccagagacgatttcaaacgggaactggacagcatcacccctgaagtattgcccggttggaaaggcatgtccgaatataatctggctgataaattaagcacagacgacctaaatagtctcatcgcccacgctcaccgtcgaatcgaccagttgaaccgtgagctggcagaacaaaaggccacagaaaagcaacacattacattagcccttgagaagcaaaaacttgaagaaaagagggccttcgatagtgctgtggccaaggccttggagcatcaccggagcgagattcaagccgagcaagatcgaaagattgaagaggtcagggacgccatggagaacgaaatgagaacacagcttagaagacaggctgccgctcacactgatcaccttcgggatgtgctgcgagtgcaggagcaggaactgaagagtgagttcgaacaaaacttatctgagaagctgtccgagcaggagttgcaatttaggcggctgagtcaggagcaggtcgacaactttaccttagacatcaataccgcctatgctcgactgcgcggtatagagcaggccgtacagtcccatgctgtggcagaggaggaagcgaggaaagctcaccagctgtggctcagcgtcgaggctcttaagtatagtatgaagacgagcagcgccgaaacgcccacgatcccattaggctctgcagtcgaggccataaaggccaattgctccgataatgaatttacgcaggcgttgacagctgccatccccccagaaagtcttacccggggagtttattccgaggaaacacttcgagcgaggttttatgctgtgcagaaacttgcccgtagagtggcaatgattgatgagacccgtaactcactgtaccaatactttctatcatatctgcaatccttactgctgtttccacctcagcaattaaaacctcccccagaactgtgtcctgaagatataaatacttttaaactcttatcttatgcttcatactgcattgagcatggggacttagagctcgccgctaagttcgttaaccaactgaagggcgaaagcaggagggtcgcgcaggattggttaaaagaggccaggatgacacttgagactaaacagatcgtggagatcctgaccgcgtacgcctccgcagtgggcatcggaaccacgcaggtgcagcccgagtag

SEQ ID NO: 226772 - DNA, 1119 bp, synthetic construct
  misc_feature 1..1119: note = Description of Artificial Sequence: Synthetic coding sequence
  source 1..1119: mol_type = other DNA
atgctacgtgcatgccagttgtccggggtgactgctgccgcacaatcctgcctgtgcggaaagttcgtcctacgaccccttagaccctgccgacggtattccaccagcgggtcaagtggattgacaacggggaaaatcgccggtgctggactcttatttgtcggcggtggaatcggtggcacaatattatacgctaagtgggattctcattttcgcgagtctgtggagaagacaattccctattctgataaactgtttgaaatggtcttgggcccagctgcctataatgtgccactgccaaaaaaaagcatacaaagcggtccattgaagatttcatctgtgagtgaggtaatgaaggaatctaaacaaccagccagccagctgcaaaagcagaaaggggacaccccggcatctgccaccgccggagatacattgagcgtgcctgcaccagcggtgcagccagaagaaagcctgaaaactgaccatccagagattggggaaggaaaacccacaccagccctgtcagaggcttcgtcctcaagtatcagggaaaggcctccagaagaggtcgccgctagactggctcaacaggaaaaacaggagcaagtgaagatcgagtctctggcaaaatcccttgaggacgcacttcggcagacagctagcgtaaccctgcaagccatcgctgcgatacccccagaaagtcttactaggggcgtgtactcggaagagacactgcgagcaagattctacgctgtccaaaagctagcgagaagggtagcaatgatagatgagacccgaaacagcctgtaccagtacttcctttcctatttgcaaagtctgctgctttttcccccacagcagttaaagccacctccggagttgtgtcctgaagatatcaatacttttaagctgctgtcatatgcatcatattgcattgagcacggagatctggaactcgccgcaaagttcgttaatcagctgaagggggaaagtcgaagagtcgcacaggactggttgaaagaagctcgcatgaccctcgaaactaaacagatcgtagagattctcaccgcctatgcctccgctgtgggcattgggaccacccaggtccagcccgaatag

SEQ ID NO: 226773 - DNA, 1980 bp, synthetic construct
  misc_feature 1..1980: note = Description of Artificial Sequence: Synthetic coding sequence
  source 1..1980: mol_type = other DNA
atgctgcgagcttgccagctatccggcgtgacggctgccgcacaatcatgcctgtgcggcaagtttgtgctgcgccctctccgcccatgccgacgttactctaccagcggctcctctggcttaaccaccggaaagatagccggtgctggtttgctttttgtggggggaggtattggtggaaccattctgtatgcaaaatgggatagccatttccgggaatcagtcgagaaaacgatcccctacagcgacaaactgtttgaaatggtccttggcccagcagcatacaacgtgcctttgcccaaaaagtctattcagtcaggtcctctcaagataagtagtgtttctgaggttatgaaagagagcaagcagcctgctagccagctccaaaaacaaaagggggacacccccgcatccgccacggctctcgctaaaagtttggaagatgcccttagacagactgctagtgttaccttgcaggctatcgccgcacagaatgcggcagtgcaagccgtgaacgctcacagcaacatcctgaaagctgctatggataacagcgagattgccggtgaaaaaaaatctgcacaatggcgtacggtcgaaggagccttgaaggagcgccgaaaggccgtcgatgaggctgccgatgcgctgctcaaggcaaaggaagaactggagaagatgaagagcgtcattgagaacgctaaaaagaaagaggtcgccggagcaaagccgcacataaccgccgctgaaggtaagctccacaacatgatagtggatctcgataacgtggtgcaggccagagatgactttaaacgcgagctggacagtatcacccctgaggtgctgcccggatggaaaggcatgagtgtgtctgacctggccgacaagttgtctacggatgacctaaattcgctgatagcgcacgcccacaggcgaatcgaccagcttaaccgagagttggccgaacagaaggcaactgagaagcaacacatcacattagcactcgaaaaacagaaattggaagaaaaacgagcctttgactctgccgtcgcaaaagccctggagcaccaccggtcagagattcaggcagaacaggaccgcaaaattgaggaagtgagggacgcgatggagaatgagatgcggacacagctgagacggcaagccgctgcgcatacggaccatctgagggacgtgctgagggtgcaggagcaggagctcaaaagtgagttcgagcagaacctgtctgagaaactgtctgagcaggagctccagttccggagattgagccaggagcaggttgacaacttcaccctcgacattaatactgcctacgcaagactgcgaggcatcgaacaggccgtccagtctcacgccgttgccgaggaagaagcacgtaaggcacatcaattgtggctgtccgtggaagccctcaaatattccatgaagacttcatccgccgaaacacctaccattccattgggatccgcagtggaagctattaaagcaaactgcagcgataacgaatttacccaagctctgaccgccgcaatcccaccggagtccctgactcgtggggtatacagcgaggagacactgagagctcgcttctacgctgtgcaaaagctcgcacggagggtggcaatgatcgatgagacacgaaacagcctgtatcagtatttcctgtcttaccttcagagcctgctgctgtttcctccgcagcagttaaagccaccaccagagctgtgccccgaagacatcaatactttcaagcttctgtcatacgcgtcgtattgcattgaacatggggatcttgagctggcagcgaagttcgttaaccagctcaagggagagtcgaggagggtggcccaggattggctcaaagaggctagaatgacacttgagactaagcaaatagtcgaaatcctgacagcctatgcgtccgctgtaggtataggaaccacccaggtgcagcccgagtag

SEQ ID NO: 226774 - DNA, 2277 bp, synthetic construct
  misc_feature 1..2277: note = Description of Artificial Sequence: Synthetic coding sequence
  source 1..2277: mol_type = other DNA
atgctcagggcttgtcagctgagcggtgttaccgcagcagcgcaatcctgcctttgcgggaaattcgtgcttagaccactacgaccttgcaggagatactcgaccagcgggtcaagcggactgaccaccgggaaaattgctggagctggcttgctttttgtcggtgggggtattggcggaacaattctgtatgccaaatgggacagccatttccgggagtcagtggagaagacaatcccctactccgacaaacttttcgagatggtgctcggtcctgccgcttacaatgtccccctcccaaaaaagtcaatccagagtgggcctctgaagattagctccgttagcgaagtgatgaaggagtcaaagcagccggcatctcaactgcagaagcagaagggtgacactcctgccagcgcaaccgcgccaaccgaggcggctcagattatctccgccgcaggagataccctgagtgtcccagcacccgcagtgcagccggaggaatcccttaagaccgatcaccccgaaatcggagagggtaagccgacaccagccctgtccgaggaggcaagcagcagctcgatacgggaacgccctcccgaagaagtggctgctcggctagcccagcaggagaagcaggaacaagttaagatcgaatccctcgccaagtccctggaagatgccttgaggcagacagcatcagtgacgctccaggcaattgcagcgcagaacgccgctgtgcaggctgtgaacgcgcactccaacattttaaaagcagccatggataattccgaaatcgcaggcgagaaaaagagcgcccaatggaggaccgtggagggtgctttgaaggagcgtcgcaaagccgtggatgaggccgctgacgctctcttgaaggccaaggaagagttggagaagatgaagagcgttattgaaaatgcgaagaagaaggaggtggcgggagcgaaaccacacattacggcagcagaagggaaactccataatatgatcgtcgacctggacaacgtggtaaagaaggtgcaggcagctcagtccgaggccaaagtggtgagccagtatcacgagcttgtggtccaagccagagatgacttcaaacgggaattggactcaattacccccgaggtgctccccggatggaagggaatgagcgtcagcgatcttgctgataaactgtcaacggacgacctcaatagcttgatcgcacacgcccatcgccgaattgatcaactaaacagggaacttgccgaacagaaagctactgaaaagcaacacataacccttgcgctggaaaaacagaaattggaagagaagagggcgttcgatagtgcagtagccaaagccctcgaacatcatcgctccgagatccaagccgaacaggatcggaaaatagaggaggtgcgcgatgcgatggaaaacgaaatgaggacacagttacggcgacaagccgctgcccatacagaccatcttcgggacgtgctgcgtgttcaggagcaggaactgaaaagcgagtttgagcaaaatctgtcagagaagctgtcggagcaagagttgcagtttcgacgtctgagtcaagaacaggtggataactttactcttgatatcaatacagcatacgccaggctgcgcggtattgagcaggctgttcaaagccacgcagttgccgaggaagaggctcgcaaagcacatcagctgtggctgagcgtcgaagccctgaaatatagcatgaaaacctctagcgccgagacaccaaccatccccctcggcagtgccgtggaggctatcaaagcaaattgttccgataacgagttcacccaggccctcaccgctgcgattcctccagaaagtctcacgaggggcgtctattcagaggagactctgcgagccagattttacgctgtacagaagctggcacgcagagtggccatgatagacgagacaagaaatagtctgtatcagtactttctttcatacttacagagcctccttctgttccctccccagcagttaaagcctcctcctgagctgtgccccgaagacatcaacacatttaagctcctttcctatgctagttactgtattgaacatggggacctcgagctggcagccaaattcgttaaccagctgaagggagagtcccggagggtggctcaggactggttgaaggaggcacgaatgaccctggagacaaagcagattgtcgagatactgaccgcctatgcaagcgctgtgggaatcggcacaacacaagtccagcctgaatag

SEQ ID NO: 226775 - DNA, 2274 bp, synthetic construct
  misc_feature 1..2274: note = Description of Artificial Sequence: Synthetic coding sequence
  source 1..2274: mol_type = other DNA
atgctgcgggcttgccagctgtcaggtgttacagcggcagcgcagagctgcctatgtggaaaatttgtcctgaggcctcttaggccatgccgacgctacagcacctcaggctccagtggcctgactacaggcaagatcgccggagcaggcctgttattcgtcggaggcggtataggcggtacaattctttacgcgaagtgggactctcactttcgcgaatctgtggagaagaccataccatactcagataagctgtttgagatggtcctgggcccagccgcttataatgtgccacttcctaagaaatcaatccagtctggccctctcaagattagctctgtgtctgaggtgatgaaggaaagcaagcagccggcttcccagctgcagaagcagaagggagacactcctgccagcgctactgctccaacagaggccgctcagatcatctctgctgctggagataccctgtctgtacccgcacccgcagttcagcccgaggaatcccttaaaacggatcatccagagattggagagggaaagcccacgcccgctctgtccgaagcctccagctcttcgataagagaaagaccccctgaagaggtggccgcacggctggcccagcaagaaaagcaggagcaagtgaagatcgagagccttgcgaagtccctagaagatgcattgagacagaccgcctccgtgactttacaagccattgcggcacagaatgcggctgttcaggccgtcaacgcccatagcaatatcctgaaggcagctatggataactcagagattgccggagaaaagaagagcgcccagtggaggacagtggaaggcgcattaaaagagcgccgtaaagcagttgacgaggcagcagacgctttactgaaggccaaagaggagttagagaagatgaagtccgtcatagagaatgctaaaaaaaaagaggtggcaggtgccaagccgcacatcaccgccgctgagggaaaacttcacaacatgatagtcgaccttgacaacgtggtaaaaaaggtgcaagccgctcagtcagaggctaaagtggtctctcagtaccacgaactggttgtgcaagcgagagacgacttcaaacgtgaattggactccatcactcccgaagttctgcccggttggaagggtatgagcgttagtgacttggcggataaactgtcgactgacgaccttaattcccttattgctcacgcccaccggagaatcgaccagttgaatcgggagctagcagaacaaaaagcgactgagaagcagcacatcactctggcccttgaaaaacaaaaactggaagagaagagggcttttgacagcgccgtggcgaaagcactggagcaccacaggtctgagattcaagcagagcaggataggaaaatcgaggaggtgcgcgatgcaatggaaaatgaaatgcggacacagctccgcaggcaggccgctgctcacaccgatcatttacgagacgtgctgcgtgttcaggagcaggagttgaaatccgagttcgagcagaatctgtccgaaaagctgagcgagcaggagctacagtttaggagactcagccaggaacaggtagataacttcacactggacatcaacacagcttatgctaggctcagaggaatcgaacaggcagtacagtcacacgcggtcgcagaggaggaagcaaggaaagcccaccagctgtggttaagcgtcgaggcactgaagtatagcatgaaaacatcttcagccgaaacccctactattccgcttgggtccgcggtggaggctatcaaagccaattgctcagacaacgaatttactcaggcactcactgctgccatcccacccgagagtctgacccgcggagtctatagtgaggagaccttgagggcacgcttttacgccgtccaaaagcttgcgagaagggtggccatgatagacgaaactcgcaatagtttatatcagtactttctttcctatcttcagtcactgttgttgtttccgccacagcaactgaaaccacctccagagctgtgcccggaagacatcaacacattcaaattacttagctacgccagttattgtattgagcacggtgatctcgagcttgctgcaaagttcgtgaatcagcttaaaggcgagtcccggagggttgcccaggactggctgaaagaggccagaatgacgctggagaccaaacagatagtggagatcctgacagcctatgcctcagccgtggggattgggacaactcaggtacagcctgaatag

SEQ ID NO: 226776 - DNA, 2244 bp, synthetic construct
  misc_feature 1..2244: note = Description of Artificial Sequence: Synthetic coding sequence
  source 1..2244: mol_type = other DNA
atgcttagggcatgtcagctgtctggagtcaccgcagcggctcagtcttgcttgtgtggaaaatttgtgctgaggcccctacgaccttgtagacgatactccacatccggtagttccgggttgacaaccggcaagatcgctggcgcaggcttgctgttcgtggggggtggaattggaggtaccatactgtacgctaaatgggactcacattttagggaaagtgtcgagaagactatcccctacagcgacaagttgttcgaaatggtgttggggccagcagcgtataatgtgccattgccaaaaaagtctattcagtccggtccgcttaagatctcctcagtctcagaagtgatgaaggaaagcaagcaacccgctagtcagcttcaaaagcagaagggggatacccccgctagtgcaaccgctggagacacgctctccgttccggcaccggcagtgcagcccgaggagtcattaaagacagatcacccagaaataggagaggggaaaccaacgccggctctgagtgaagaagcctcttcttctagcatacgagagcgccctccagaagaggtggcagcaaggctcgctcagcaggagaaacaggagcaggtcaagattgaatctctcgcaaaatcactggaggatgccctacgtcaaacggccagcgtaactctccaggccatcgccgctcagaatgcagccgttcaggccgtaaacgctcacagcaacattttaaaagccgcaatggataacagcgagatcgccggtgagaagaagagtgctcaatggcgtaccgtagaaggcgctctgaaggaacggcgtaaggccgttgatgaagccgctgacgccctactgaaagccaaggaggagctggaaaagatgaagtcagtgattgaaaacgccaaaaagaaagaagtggctggcgcaaaacctcatattaccgccgcagaaggaaagctgcacaatatgatcgttgacctggataacgtggtgaagaaagtgcaggccgctcaaagcgaggcaaaggtcgtcagtcagtaccacgaactcgtcgtgcaggcccgagacgatttcaagcgggagctggattcgatcactcccgaagtgctgccagggtggaagggcatgtccgtctctgacctggctgacaaactgagcacagatgacctgaattctctcattgcgcacgcccacagacgcatcgatcagttgaatagagaactggctgaacaaaaagccactgagaagcagcacatcaccctcgcactcgagaagcagaagctcgaggagaaacgcgcattcgacagcgcagttgccaaagctttggagcaccatcgttcagaaatacaggccgagcaggacaggaagatcgaagaggtacgagatgctatggagaatgagatgcgtacccagctgaggagacaagcggcagcacacacggatcacctgcgggatgtcctaagggtgcaggaacaggagctgaaatcagaatttgagcaaaacctttcagaaaagctgtctgaacaagagctgcagtttaggagattatcccaggagcaggtcgataactttactttagatatcaacacagcatacgccagactcagaggcatcgagcaggcggtgcagagccacgcggtggctgaggaggaggccaggaaggcccatcaattatggctgtcagtcgaggctttgaagtactccatgaagacatcctcagcagaaactcctactattcccctggggagcgcggtcgaagctattaaggcaaattgttctgataacgaatttacccaggctctgactgccgcaataccacccgagtctctgactcgaggtgtatattccgaggagacactccgcgctcgtttctacgctgtgcagaaactggcgagacgagtcgccatgatagatgagactcgtaattctctttaccagtacttcctaagctatttgcagtcactgttgctgtttcctcctcagcaattaaagcctccgcctgagctctgtcccgaggacatcaacacatttaagctactgagttacgcgagctattgtatcgagcacggggatttggagctcgctgcgaaattcgttaaccagctcaagggggagagccgcagagtggcccaggattggctaaaggaagctcgaatgactttagagactaagcagatcgtcgaaattctcacagcatacgcctctgccgtggggattggaacaacccaggtgcaacccgagtag

SEQ ID NO: 226777 - DNA, 2244 bp, synthetic construct
  misc_feature 1..2244: note = Description of Artificial Sequence: Synthetic coding sequence
  source 1..2244: mol_type = other DNA
atgctgcgagcctgtcagctctctggcgttaccgccgctgcacaaagctgtctgtgtggtaagttcgttctgaggccactgcggccatgtagacgatacagtacctccggcagctccgggttgacaaccggcaagattgccggtgcgggtctgctttttgtgggcggaggtattggtggcacaatcctctacgctaagtgggacagccattttcgcgagtctgttgaaaaaacaataccttactcggacaagctcttcgaaatggtacttgggccagccgcttacaatgtacccttgcccaagaagagtatacagagcggacccctcaagatatcctcggtctcagaggtaatgaaagagagcaaacaacctgcgtctcaattgcaaaaacaaaagggcgataccccggctagtgctactgccggagatactctttccgtacccgctcctgcagtccagccagaagagagtctgaaaactgatcatcctgagattggcgaagggaagcctacaccagccctttctgaggaggcgagttcttccagcattagggagcgccctcccgaggaggtcgccgctagacttgcccagcaggagaaacaggagcaggtgaaaatagaatcgctcgccaagtcccttgaggatgcactgcggcaaaccgcctcggtgactctgcaggcaatcgctgcccaaaacgccgcagtccaggctgttaatgcccactctaacattctgaaagccgctatggataacagtgagatagcaggagaaaaaaagtccgcccagtggcggaccgtagagggcgctcttaaggagcgcaggaaagcagtcgacgaggccgcagatgcccttcttaaagcaaaggaggaactggaaaagatgaagagtgtcatagagaacgccaagaagaaggaagttgctggcgcaaagccccatatcacggccgctgaagggaagctgcataacatgattgtggatctagataacgttgtcaaaaaggtccaagccgcacagagtgaggccaaagtggtctctcaataccacgaacttgtggtacaagcccgagatgactttaaacgggaactggattctattaccccagaggtgttaccgggttggaagggcatgtctgaatataacctcgctgacaagttatctactgatgacttgaacagcctcattgctcatgcacaccgtcgcatcgaccagctcaaccgagagctcgccgagcagaaggccacagaaaagcagcacatcacactcgctctggagaagcagaaactggaggagaagcgagcatttgactccgccgtggctaaggcactcgaacaccacaggtcagaaattcaggcagagcaagaccgaaagatagaagaggttcgtgatgctatggagaacgagatgaggacccagctccgaaggcaagctgcagctcatacagatcacctgagggatgtcctgagagtccaagaacaagagctgaaatcagaatttgaacagaatctgagcgagaaactctccgagcaagaattgcagtttcgtaggttatctcaggaacaggtggacaattttacactggatattaacactgcatatgcgagactaagaggtatcgagcaggcggttcagagccatgccgtcgcagaagaggaggctaggaaggcccaccagctgtggctgtccgtggaagccctgaagtacagcatgaagacctcttccgccgaaacaccgacaatcccgctggggtctgccgttgaggccataaaggccaattgcagcgacaatgaatttactcaggcgcttaccgcagccattccacctgagagcctcaccaggggtgtgtacagcgaagagactttacgggcacgtttctacgcagttcaaaagctcgccagaagggtggcgatgattgatgaaacacgaaattctctgtaccagtatttccttagctaccttcagtccctgctgctgttcccacctcagcagctaaagcccccacctgagttgtgcccagaagacattaataccttcaaattactcagctacgcctcttactgcatcgagcacggcgacttggagctggctgctaaatttgttaaccagctcaaaggagagtcgaggagggtcgcccaagattggctgaaagaggcccgtatgaccctggaaaccaagcagatagtcgagatactcacagcttatgctagcgcggttgggatcggcactactcaagtgcagccggagtag

SEQ ID NO: 226778 - DNA, 579 bp, synthetic construct
  misc_feature 1..579: note = Description of Artificial Sequence: Synthetic coding sequence
  source 1..579: mol_type = other DNA
atggaccgagcccaccgccttggacaaacaaaacaagtaactgtctaccggctcatatgcaagggcacaatcgaggaacgcatcctgcagcgggcaaaagagaaaagtgagattcaacgtatggtcatttctggcggtaattttaaacccgacacactgaagccaaaagaggtcgtgtctttgctgttggacgatgaggaacttgagaagaaacttcgcctgaggcaggaagaaaagcgccaacaagaggaaacaaaccgagtcaaggagcggaagaggaagagagaaaaatatgcagagaaaaagaagaaagaggatgagctggacgggaagcggagaaaggaaggagtcaacctcgtgatccctttcgtgccgagcgctgataattccaacctctcggctgatggggacgactcctttatttctgtggatagcgcaatgccctctccattcagtgaaattagcatctccagcgagctccatacaggttccatccccctggacgaatccagtagcttagcccctgattcgctggtccggaagcaggggaagggtactaatcccagcggcggtaggtag

SEQ ID NO: 226779 - DNA, 4671 bp, synthetic construct
  misc_feature 1..4671: note = Description of Artificial Sequence: Synthetic coding sequence
  source 1..4671: mol_type = other DNA
atggcatccgagctaggtgccagggacgatgggggatgcactgagctcgctaagcccctctatctgcaatacctagaacgcgctcttcggctcgaccatttcctccggcagaccagcgcaatttttaatcgcaacattagttcagatgacagtgaagacggacttgacgacagcaaccctttgcttcctcagtcgggcgatccccttatccaagtgaaagaagaaccacctaactctctgctaggggagaccagcggcgcagggtctagcgggatgctcaatacatacagtctgaacggagttcttcagagcgagagcaaatgtgacaagggcaatctgtacaatttctcgaaactgaagaaatcgagaaagtggctcaagtcaatactgttgtccgacgagtcctcagaagcagattcccagagcgaggacgacgatgaggaggagttgaatttgtcccgggaagagctccacaacatgctgcgcctgcataagtacaagaaactgcatcagaataagtatagcaaggataaggaattgcagcagtaccagtactactctgcagggctgctgtccacatacgacccattctacgaacagcagagacaccttttgggtccaaagaaaaagaaattcaaagaagagaaaaagctgaaggccaagctgaaaaaggtgaaaaaaaaaaggcggagggatgaggagcttagtagcgaagagtccccacggaggcatcatcaccagactaaggtgttcgccaaattttcacatgatgccccacctcccggtacaaaaaagaaacacctttccattgagcagctgaatgcaaggcgtcgaaaggtttggctatcgattgtgaagaaggaactgcccaaggcaaacaagcagaaggccagtgctcggaacctgttcctcaccaatagccggaaactggcccatcagtgcatgaaggaggtgagaagggccgctctccaggctcaaaaaaattgcaaggagacccttccaagagctcgacgcctgacaaaggagatgttgctgtattggaaaaaatatgaaaaagtcgagaaggaacatcgaaagcgggctgagaaggaggctctcgagcagcggaaattagatgaagagatgcgcgaggctaaacgacagcagagaaagttgaatttcctgatcacccaaacagagctctatgcacactttatgagcaggaaacgggatatggggcacgatggtattcaggaagagatcctaaggaagcttgaggactcctcaacacagagacagatcgacataggcggaggtgttgtggtgaacatcacccaggaggattatgatagcaaccacttcaaggcacaggccctgaagaatgccgagaacgcttaccacattcaccaggctcgcacccggagttttgacgaggatgccaaagaaagcagggccgcagctctgagggctgccaacaaaagcggaactggattcggtgagagttactctctcgccaatccaagtattagagctggagaggatattccccagcctactatctttaacgggaagctgaaaggctaccagctgaagggaatgaactggttagctaacctgtacgagcaaggaatcaatggaattcttgccgacgagatggggttggggaagaccgtgcaatccatcgccctcctggcccatttggctgaacgcgagaatatctggggcccattcctcattatctctcccgcttctactctaaacaattggcatcaggaattcacccgattcgtgccgaagtttaaagtgcttccttattgggggaacccccacgatcgaaaagtgatcaggcgcttctggagccagaagactctgtacacccaggacgccccatttcatgtggttatcaccagctatcagctggtcgtacaagatgtaaaatattttcagcgcgtcaaatggcagtacatggttctagatgaggcacaagccctcaaatcttcaagcagcgtgaggtggaagatcctactgcagttccagtgcaggaacagactgcttctgacaggtactcctatccagaacaccatggccgagctgtgggcccttctgcatttcatcatgccaaccctgttcgattcccacgaagagtttaacgaatggtttagtaaggacattgaaagccatgctgagaataaaagcgcaatagatgagaatcagctatctcgactgcatatgatcctgaaacccttcatgctccggaggatcaagaaagacgtggagaatgagttatctgacaaaattgagattctcatgtactgccagctgacatcacggcagaagctattgtaccaggctctgaagaacaagatcagtatcgaggatctgttgcaatcaagcatggggagcacccagcaagctcagaacacaacttccagtctgatgaatctggttatgcagttccgtaaggtttgtaaccatcctgaactcttcgagaggcaggagacttggagcccctttcacatttcacttaaaccatatcacatctctaagtttatctaccgccatggacagattagagtcttcaatcattctagggaccgctggctcagggttctatccccgtttgccccagactacattcagcggtcgctgtttcatcggaaaggaattaatgaggagtcatgtttttctttcctgaggtttatcgacatatctcccgctgagatggctaacctgatgttgcaagggctcctcgcccgatggctcgccctgtttctctctctgaaagccagctacagattgcaccaactacgatcatggggtgctcccgaaggcgaatcccaccagcggtatctgcgaaataaggactttctcctcggtgtcaatttcccccttagctttccgaacctgtgcagctgcccactcttaaagtcactcgtgttcagcagtcactgtaaggcggttagcggctacagcgaccaggtagtccaccagaggagatctgccacctcttctctgagacgatgcctcctgaccgagctgccttctttcttatgcgtggcatccccaagggtcaccgccgttccactggactcttattgcaacgacaggagcgctgaatacgaaagacgggtgctgaaggaaggaggaagcctagcagctaagcagtgccttctgaacggcgcacccgagctggccgcagattggctgaatagaaggtcccagttctttcccgaacccgcaggcggtctctggagcatcaggccgcagaatggttggtccttcatcagaatcccaggaaaagagagccttatcacggatagtggcaaactctatgcgcttgacgtattgctcacacggctaaagtcccagggacatcgggtgcttatctattctcaaatgacccgtatgatagacctgttagaggaatatatggtataccgaaaacacacgtatatgaggttggatggctccagcaagatttcagagcgcagagatatggtcgctgactttcagaacaggaacgacattttcgtctttctgctgagcacccgcgctggcggactcggcataaatcttaccgccgctgacactgttattttttacgactccgactggaacccaacggtggatcagcaagcaatggatcgggcacatagactgggccagaccaagcaagttacagtctatcgactgatctgcaaaggcaccatcgaagaacggattctccaacgcgctaaggagaaaagcgaaattcaacgcatggtgatttcaggcggtaacttcaaaccggacaccttgaaacctaaggaggtggtcagtctgcttttggatgatgaagagcttgagaaaaagctaaggctgcggcaagaggaaaaacggcagcaggaagagactaatcgggtcaaggaaaggaagaggaagcgcgaaaaatacgccgaaaaaaaaaaaaaggaggatgagctggacggcaaaagacgcaaagaaggcgttaacctggtgattccctttgtgccctcagctgacaactctaatcttagcgccgacggagacgatagcttcatcagcgtggattctgccatgccgtctcccttcagtgagattagtatctcttcagagctgcataccgggtcaattcccctggatgaatcctcctccgacatgctcgtgattgtcgacgaccctgctagctccgctcctcagtcgcgcgcaactaattctcccgcatccatcaccggctctgtatccgatacagtcaacggcatctctatccaggagatgcctgccgcaggcagggggcactcagcccgttcccggggacgccctaagggcagtggtagcactgccaaaggtgccggaaagggaaggtcgcggaaaagcaccgccggaagcgccgcagcgatggctggcgctaaggcaggggctgctgcggcttccgctgcggcatacgctgcctatggctataacgtgtctaagggtataagcgctagcagtcccctgcagactagcctcgtgcggcctgcaggccttgctgacttcggcccatcaagcgccagctcacccctctcctcacctctaagcaaaggaaataatgtgcctggcaatcccaaaaacctgcacatgacctcttccctggcacctgactctctcgtgcgaaagcagggcaaggggacaaatccaagcgggggtcgatag

SEQ ID NO: 226780 - DNA, 4671 bp, synthetic construct
  misc_feature 1..4671: note = Description of Artificial Sequence: Synthetic coding sequence
  source 1..4671: mol_type = other DNA
atggcctctgagcttggcgctcgtgatgatggcggatgcacggagttggcaaaacccctgtacctgcagtaccttgaacgtgccttgcggcttgaccattttcttcgccagacatcagctatctttaatcggaacatctcttctgatgacagcgaagacggactggatgacagtaaccctcttctgcctcagtcaggagatcccctgattcaggttaaagaggaaccaccaaatagccttttgggtgagactagcggggctgggtcctccggaatgcttaatacatacagcctaaatggagtgctccaaagcgagtcaaagtgcgataaggggaacctgtataactttagtaagcttaagaagagtcgaaaatggctaaaatccatcctcctgtctgacgagagttcggaggccgattcacagagcgaagacgatgatgaggaagaactgaatttgagcagggaagagctgcataatatgctgaggctgcataagtacaaaaaattgcaccagaacaagtactcaaaagataaggaactccagcagtatcagtactattccgctggacttctgtcaacctatgaccctttctacgaacagcaaaggcatctgttggggcctaagaagaaaaaatttaaggaggagaagaagctgaaggctaagctgaaaaaggtaaagaaaaaaagaagaagggacgaggaactgagctccgaggaatcccctcggaggcatcaccaccagacaaaggtctttgctaagttcagtcacgacgccccacctccagggacaaagaaaaagcatctgtccatcgagcagctgaatgctaggcgtcgcaaggtatggctgtcaatcgtaaagaaagagctgccgaaggctaacaagcagaaggctagcgcccgaaacctgtttctcacaaattcacgcaagctggcccatcaatgcatgaaggaagttcggagagctgccctgcaggcacagaaaaattgcaaggagacactgccccgagcccgtagactgacgaaagaaatgctcctgtactggaaaaagtacgagaaagtggaaaaggagcatcgtaagcgcgctgaaaaggaagctctggagcaacgtaaactggatgaagagatgcgagaagcaaagaggcaacaacgtaaactcaatttcctcatcacccagacagagctctatgctcatttcatgagcagaaagcgggatatggggcatgatggcatccaagaggaaatcctgcggaagctggaggactctagtactcaacggcagattgatattggagggggagttgtagttaatatcacacaggaagattacgattcaaatcacttcaaagcccaggcactcaaaaacgctgagaatgcctaccacattcatcaagcgcgtaccagaagtttcgacgaagatgccaaggaatcccgagccgctgccctccgggcagcaaacaagagtggcaccggatttggagagtcctattcccttgcaaacccttcaatccgggcaggcgaggatatacctcaaccaacaatatttaacggcaagttgaagggctaccagttaaaggggatgaattggttggcaaacctctatgagcaagggatcaacggaatcctggctgacgaaatgggtctgggaaaaaccgttcagagtatcgccctattagcccacctcgcagaacgcgaaaatatctgggggccattcctgattatatccccagcatctaccttgaataactggcaccaggaattcaccagatttgtccccaaattcaaagttctgccatattggggtaatccacacgataggaaagtgatccggcgattctggagccagaagaccttgtacacccaagacgccccatttcacgttgttattacttcctatcaactcgtggtccaggacgtaaagtacttccaacgtgttaagtggcagtatatggtcttggacgaggcccaggcgctgaagtcatccagttcagttcggtggaaaatacttctgcaattccagtgccgcaatcggttgctcttaaccggcacccccatccagaacaccatggccgaactgtgggcattgttgcatttcataatgccaactctgtttgacagccatgaagagttcaatgaatggttttcaaaagatatcgagtcgcacgccgagaacaaaagcgcaatcgacgagaaccagcttagcagacttcacatgatcctgaagccctttatgctaagacgaattaagaaagacgttgaaaacgagctttctgataagatcgaaatattgatgtattgtcagttgacctcccgccagaagctcctataccaggcgctgaagaataaaatctccatcgaggatttactgcaatcctccatgggcagtacccagcaggctcagaacacaacaagctccctaatgaacctggtaatgcagtttcgcaaagtgtgtaaccatcccgagctcttcgagagacaggagacctggagccccttccacattagccttaaaccatatcacatctcaaaattcatctatagacacgggcagattcgggttttcaaccattctcgggaccgctggttgcgggtgcttagtccgttcgccccagattacatacagcgctcactattccatcgcaaaggcattaacgaggagagctgcttcagctttttgaggttcatcgatatctcccccgcagagatggctaacctgatgctgcagggtttgctggctcgctggctggccctgtttctcagtctgaaggcttcttataggctccaccagctgcgcagctggggcgcacctgagggcgaaagccaccaaaggtatctgaggaataaagatttcctgcttggtgttaatttccctctgtctttcccaaatctctgctcctgtccgctgttgaagagtctcgtcttcagttcgcactgtaaagccgtgagcggatactccgaccaggtggtgcaccaaaggaggtctgccacttcgtccttacggaggtgcttactaacagagcttcctagcttcctttgtgtggcaagcccacgggtcactgctgtacctcttgactcctactgtaatgatagatctgcggagtacgagaggcgggtactgaaagagggcggatccttagccgctaagcagtgcctgttaaacggtgctcctgagttggccgcagactggctgaacaggaggagccagttttttccagaacctgctgggggactctggtctataaggcctcagaatggctggagctttattagaattcctggtaaggaatcactgataacggacagcggcaagctatacgccctggatgtactgctgacaagactcaagtcccaagggcatcgcgtgctcatttatagccagatgacaagaatgatcgatctcctggaggaatatatggtctatagaaagcacacgtatatgcgactggatggatccagtaaaatcagcgaacgcagggatatggtcgccgattttcagaatcgcaacgatatttttgtgtttctgctgagcacccgagcaggtgggctggggattaacctgacagccgcagataccgttattttttatgacagcgactggaatcctacagttgaccagcaggccatggatagagcacaccgacttggccagaccaagcaggtgacagtttaccggctgatctgtaaggggacaattgaggaacgtatcctgcagagggcgaaggagaagtcagaaattcagcgtatggttatcagcggtggcaatttcaagccagatactctgaagcccaaggaggtcgtgagcctgctgcttgatgacgaggagctggagaagaaactgcgactgcgtcaagaggaaaagcgacaacaggaagagaccaaccgcgtaaaggagagaaagagaaagcgcgaaaagtacgccgagaagaaaaaaaaagaggatgaactggatgggaaaaggcgaaaggaaggcgtgaaccttgtgattccatttgtaccttctgcggataacagcaacctgtcggcagatggcgacgactcgttcatttccgtagatagcgccatgccaagcccgttcagcgagattagcatctcatcagaactacacactgggagcattccccttgatgagtcctcatctgatatgttggtaatcgtcgacgatcctgcatcgtccgcgccacagagtagggctaccaattcaccggcttcaatcacaggcagcgtttctgatactgtgaatgggatatcgatacaggaaatgcccgctgcagggagaggccacagcgcacgatctcgaggcaggcctaagggttctggatccacggccaaaggagcaggcaaggggcgatccagaaagtccaccgctggcagcgccgctgctatggctggagctaaggcgggagctgccgcagcctctgctgccgcatacgctgcctatggatacaatgtctccaaaggaatcagtgctagtagcccacttcaaacctctctggtcagaccggcaggtctagccgattttggaccttcgagcgccagctctcccctgagtagtccccttagcaagggtaacaatgtgcctggaaaccccaaaaacctgcatatgacctcttcactcgctcctgatagtctggtgcggaaacaagggaaaggcacaaacccgtccgggggtcgctag

SEQ ID NO: 226781 - DNA, 585 bp, synthetic construct
  misc_feature 1..585: note = Description of Artificial Sequence: Synthetic coding sequence
  source 1..585: mol_type = other DNA
atggcagcttccctcgtaggaaagaagatcgtatttgtgaccggcaatgccaaaaagcttgaagaggtggtgcagatccttggggataaatttccttgcactctggtggcccagaaaattgacctgccagagtaccagggcgagcctgacgaaatctccattcagaagtgccaggaagcggttcgccaggtccaaggccctgtactggtagaagacacctgcctctgcttcaatgcccttggcggtcttcctggaccatacataaagtggttcctcgaaaaactgaaaccggaaggtctccatcagctgctcgccggattcgaagacaagagcgcctatgcactctgcacatttgctctgagcacaggcgacccgagtcaacctgtccgtctgtttcgcggacgaacctccgggagaattgtagctcccaggggttgccaggatttcggttgggacccatgctttcaaccagacgggtatgagcagacttacgccgagatgcctaaggcggagaagaacgccgtttcccacagattccgtgccctcctagagctgcaagagtatttcggaagcttagccgcttag

SEQ ID NO: 226782 - DNA, 462 bp, synthetic construct
  misc_feature 1..462: note = Description of Artificial Sequence: Synthetic coding sequence
  source 1..462: mol_type = other DNA
atggccgcttcactggttggaaagaagatcgtgtttgtgaccggaaacgctaaaaagttagaggaggtccaaggcccagtcctggtggaggatacttgtctgtgttttaacgctctggggggtctcccgggaccatacattaagtggttcttggagaagctgaaacctgaggggctccatcagcttttggctgggttcgaggataagtccgcatacgccctgtgtacattcgctctaagcactggtgaccccagccagccagtgagactgtttcgaggcagaacatcggggagaatagtcgctccaagaggctgtcaagactttggctgggacccctgcttccagccagatgggtacgagcaaacctatgccgagatgcctaaagctgagaagaatgcggtcagccaccggttccgggctctattggaattacaggagtatttcggtagcctcgcggcttag

SEQ ID NO: 226783 - DNA, 534 bp, synthetic construct
  misc_feature 1..534: note = Description of Artificial Sequence: Synthetic coding sequence
  source 1..534: mol_type = other DNA
atggccgcttctttagtagtgcagatcctgggagataagttcccctgtactctagttgctcagaagatagatctccccgagtatcagggcgaaccagatgaaatctctatccaaaagtgccaagaggcagtgaggcaggtacaaggtccggtgctggtggaagatacctgcctgtgttttaacgcactgggaggccttcccggaccatatattaaatggttcctggaaaagctgaagccagagggactgcaccagctgctggccggattcgaagataagtcagcctatgccttgtgtacttttgccttatctactggtgacccgtcccagcccgtgcgactgtttagaggcaggacttcagggagaattgtggctccaagaggatgccaagattttgggtgggacccttgcttccagcccgatggctacgagcagacttacgcagagatgcccaaggccgagaagaacgccgttagtcacaggtttcgggcactgctggagctgcaggagtattttggttctctcgctgcatag

SEQ ID NO: 226784 - DNA, 8231 bp, synthetic construct
  misc_feature 1..8231: note = Description of Artificial Sequence: Synthetic coding sequence
  source 1..8231: mol_type = other DNA
atgtccgataaaatgagtagtttcctgcacatcggggatatatgcagtctgtatgcggaaggctcaacgaatggctttataagcactctgggcctcgtggacgacaggtgcgtggtgcagccagagactggcgatttgaataatcctcctaagaagttccgcgattgcctgtttaagctgtgcccaatgaaccgatacagtgctcagaaacagttttggaaagccgctaagccaggcgcaaattctacgaccgatgctgtcctgctcaataagcttcatcatgctgcagatttagaaaagaagcagaatgaaacagaaaatcgaaaattgctgggcacagtcatccagtacggcaatgtgattcagctgctgcaccttaaatcgaacaaatatttgaccgtgaataagcggttacccgctctactcgaaaaaaacgcaatgcgtgtgaccttggacgaggcaggaaacgagggatcctggttctacatccagccattctacaaactgaggtcaatcggggatagtgtggtgataggagataaagtggtgctgaacccagtgaacgctggtcaacctctgcacgccagcagccatcaactggtggacaaccccggttgcaatgaagtcaactccgttaactgcaatacttcatggaaaatagttctgtttatgaagtggtcagataacaaggacgacatacttaaaggcggagatgtggtacggctctttcacgccgagcaagagaaattcctgacatgtgacgagcacaggaaaaagcagcacgtgttccttcggactacaggacggcagtccgcaacatcggctaccagctccaaagccctctgggaagttgaggtggtacagcacgatccttgtagaggcggagctggctattggaacagtctatttaggttcaaacacctggcaactggtcattatcttgccgctgaggtggaccctgaccaagatgcgtcccgcagtaggctgcgcaacgctcaggagaagatggtctactccctcgtatcagtgccagagggcaatgacatcagtagtatatttgagctcgatcctacaaccttaagaggcggagatagcctggtacctaggaactcatatgtgcgtttgcggcatttgtgcaccaatacgtgggttcacagtacaaatattcccattgataaagaggaggagaaacctgtgatgctgaagatcggcacctctcccgtgaaggaggataaggaagctttcgccatagtgcctgtgtcaccagccgaggtgcgagaccttgactttgcaaatgatgcgtcgaaggtgctaggaagtattgctgggaaattggagaaaggcacaataacgcagaacgaaaggcgcagcgttacaaagctcctggaagatctagtttatttcgtgacgggcggtaccaattctggccaagacgtgttggaggtcgtcttctccaaaccgaacagggagcggcagaaactgatgcgcgaacagaacatccttaagcagatattcaagctactccaagcacctttcaccgactgtggcgatggaccaatgctgaggctcgaagagcttggcgaccagcggcacgcccctttccggcatatctgccggctgtgctatcgggttctgcgtcatagccagcaagattatcggaagaatcaggagtatatcgccaaacagttcggctttatgcagaagcaaatagggtatgacgtactcgctgaggacaccatcaccgcactcttacacaataacaggaagttactggagaaacatattacagctgcagagatcgacaccttcgtgtcattggtgaggaagaatagggagccccgtttcctggactatctgtccgatctgtgcgtgtctatgaacaagtcaataccagtcacccaggaattaatctgcaaagccgtcctcaatccaaccaacgcggatatactcatcgaaaccaaactcgtgctatctcgattcgagtttgagggcgttagttccacgggagagaacgccctggaggcaggcgaagacgaagaggaggtttggcttttctggagagactcaaataaagagatcagatcaaaaagtgtgagagaactcgcgcaagacgctaaagaggggcaaaaagaagaccgggacgttcttagctattatcgctatcagttgaatctgttcgccaggatgtgccttgatcgccagtatctggctatcaacgaaattagcggtcagctggatgttgatctgatcctgcggtgcatgagtgacgagaatctcccatacgatctgagagcatcattctgccgactgatgttgcacatgcacgtggaccgcgacccccaagaacaggtgaccccagtcaaatatgcgaggttgtggtccgagataccgtctgagattgccattgacgactatgactcaagcggcgcttccaaggatgagataaaagaacgctttgcccaaaccatggagtttgtggaggagtatctgagagacgtagtgtgccagcgattcccgttctcggacaaggaaaaaaacaagctgacatttgaggtggtgaacctagccaggaaccttatttatttcggcttttataacttcagcgatctccttcggttaaccaagatattgctcgctattctggattgcgtccacgtgacaacaatatttccaattagcaagatggccaagggtgaggaaaataagggaaataacgacgttgagaagctgaaatcctctaacgttatgagaagcattcatggtgtgggcgagctgatgacacaggtggtgctcagaggaggtggctttttgcccatgacccccatggcggctgcaccggaagggaacgtaaaacaggccgagcccgaaaaggaggatataatggtcatggacactaagcttaaaatcatcgagattcttcagtttatactgaacgtaaggctggattatcggatttcctgccttctgtgcatttttaagcgggagttcgatgagagcaactcccagacatcagagacatcgtccggcaattcttctcaggaaggaccctcgaatgtccccggagcccttgatttcgagcatatcgaagagcaggcagaagggatttttggcggatccgaggaaaataccccccttgacctggatgatcacgggggacgcacgttcctgcgggtcttgctgcatctgactatgcacgattatccacccttagtttccggagctcttcagcttctcttcagacatttttcccagaggcaagaagtactgcaggcctttaaacaggtacagcttctggtgacctcgcaggatgttgataattacaagcaaataaaacaggatttggaccagctcagatcaatcgtggaaaagtcagagttatgggtatacaagggccagggtcccgatgagacaatggatggcgcatctggcgaaaacgagcacaagaaaaccgaggagggcaacaataaaccccagaagcacgagtctacctccagctacaactaccgtgtggtgaaggagatccttattcgtctgtcaaaactctgcgtgcaggagtctgcctctgttcgcaagtctagaaagcagcagcagcggttgctgagaaacatgggcgcacatgccgtggtcctagaactgttgcagattccttatgaaaaagcagaagataccaaaatgcaggagatcatgagacttgcccacgagtttctacaaaacttctgtgcgggtaaccaacagaatcaagccctgctccataagcatatcaatctgttcctaaacccgggaatactggaggcagtaactatgcaacacatctttatgaacaacttccagctgtgttctgaaataaatgagcgcgttgttcagcacttcgttcactgtatcgaaacacacggtcgcaatgttcagtacattaagtttttacagaccattgtgaaggctgagggcaagttcatcaaaaagtgtcaggatatggtaatggcagaactggtgaacagcggcgaggacgtcctggtgttctacaatgaccgcgctagcttccagactctgatacagatgatgcgaagtgagcgagatcggatggacgaaaactcacctctgatgtaccacatacacctggtggagctgctggctgtgtgcactgaggggaaaaatgtgtacaccgaaattaaatgtaattcactcctcccgcttgacgatatcgtgcgtgttgtcacacacgaggactgtattcccgaagttaagatcgcctatatcaattttctaaaccactgctatgtagacacagaggtagagatgaaagaaatatatacttccaaccatatgtggaagctgttcgagaatttcctggttgatatttgccgtgcatgcaataacacgagtgatagaaaacacgccgattctatcctcgagaaatacgtcaccgaaattgtcatgagtattgtaacaacgttcttcagctcccccttctccgatcagagcacaaccttacagactcggcaaccagtcttcgtccagttactgcagggcgtattcagggtctatcactgcaattggctgatgccttcccagaaggctagtgtggaatcatgcatcagagttctgtccgacgtggcgaagtctagagccattgcaatccccgtcgacctggactcacaggtgaataatctgtttctcaagtctcatagcatcgtccagaagacagcaatgaattggagactgtcagcccgaaacgctgccagacgtgattctgtgctggctgcttcccgggactatagaaacataattgagcgtttgcaagacatcgtaagcgcactggaggatcgactgagacccctagtgcaagcagaactctcggtcctggtcgatgtcctgcacaggcccgaactgctcttccccgagaacactgacgctcgcaggaagtgtgaatccggaggcttcatctgtaagttgattaagcatactaaacagctgttagaggagaacgaagagaaactgtgcattaaggtgctacaaacacttcgggagatgatgacaaaggacagagggtacggagaaaaactcatttcgatagatgagctggataacgccgagttaccacccgctcctgactcagagaacgctacagaggagctggagccctcacccccactgagacaactggaggatcacaaacgaggtgaagcactcaggcaagtcctggtgaacaggtactacggaaacgtaagacccagcggaaggagggagtcactaacatctttcgggaatggtcctttgagcgccggaggaccaggcaaaccaggcggtggcggtgggggatctggatcttcgtctatgagcagaggagagatgagcctggccgaagtgcagtgccaccttgacaaagaaggagcctccaacctagtcattgatctgattatgaatgcgtcttccgatagagtgttccacgaatcaattctgttggccatcgcactgttggaaggtggcaacactactatccagcattcattcttctgccgactgacggaggataagaaaagtgagaagtttttcaaagtcttttacgacagaatgaaggttgctcaacaagagatcaaagccacagtgaccgtcaacacgtcggatttaggcaataaaaagaaagacgatgaggtagatcgagatgccccttcccggaaaaaggcaaaggagcccacaacccaaatcaccgaagaagtgcgggatcagctgttggaagcttcagccgcaacacgcaaagcctttaccaccttccggcgagaggccgacccagatgaccactatcagccaggcgaaggaactcaggccacagcagataaagccaaggacgatctcgaaatgtccgccgtgattaccatcatgcagccgatactgagatttctacaattactgtgcgaaaatcacaacagagatctacaaaactttctgagatgccagaacaataaaaccaattataacctggtgtgcgagactctgcagtttctggactgcatatgtgggagcactacgggaggcttgggcttgctgggtctctatattaacgagaagaacgttgccctcattaaccagactctggaatccttaaccgagtattgtcagggcccatgtcacgagaaccagaattgtattgcaacccatgaaagtaatggtatagacatcatcactgctctgattctgaacgatatcaatcccttggggaagaagcgcatggatctggtgcttgaactgaagaacaatgcctctaagttgctgctggctattatggaatcccgccatgatagcgagaacgctgagaggatcttgtataatatgcgccctaaagaactggtggaggttattaaaaaggcatacatgcaaggagaggtggaatttgaggacggtgaaaacggcgaagacggggcagcttcaccgcgaaacgtcggccataatatctatatcctagcacatcagctggcgagacataataaggagctgcagtcgatgctaaagcccggaggtcaagtagatggggacgaagccttagaattttacgcgaagcacaccgcacagattgaaattgtcaggttggacagaaccatggagcagatcgtgtttcctgtaccgtcaatctgtgagttcctgacaaaagaaagcaaactgcgaatatactacaccaccgaaagagacgagcaaggcagcaagattaatgatttcttcctcaggtcagaagacctcttcaacgagatgaactggcagaagaagttacgagctcagcccgtgctatattggtgtgctcgcaatatgtccttttggagctccattagttttaacctggctgtgctgatgaacctattagttgcctttttctacccatttaagggggtgcgcggaggaacgctcgagccgcactggtccggcttgctctggaccgctatgctcatcagccttgcaatcgtgatcgccttacctaaaccccacggaatacgcgctctcatagcctcgacgatcttgcggctgatattttccgtgggtctacaacccaccctgttcctgctcggagcctttaatgtctgcaataagataatcttcctcatgagtttcgtgggcaactgtggtacgttcactagggggtaccgagccatggtgttggacgtagagtttctgtatcatctgctgtacttagtcatttgcgctatgggccttttcgtccacgagtttttctactcactgttactgttcgacctggtttatcgggaagaaactctgttgaacgtgattaagagtgtgacaaggaacggacgaagtatcatcttgacggcagtccttgctctgattctcgtgtacctcttctctatcgtgggctacctgttctttaaggacgacttcatcctggaggtagatcggttaccgaatgagacagccgtcccggagacaggggagagtctggcttctgaattccttttcagtgatgtatgtcgcgtagagagtggtgagaactgctccagccctgcaccccgtgaagagttagtacctgccgaagaaacggagcaggacaaggagcacacgtgcgagactcttttgatgtgcattgtgacagtactgtcacatggcctcaggtcaggaggtggggtcggcgacgtgctgcgtaaaccatccaaggaggagcccctctttgctgccagagtaatatacgatctgctcttcttctttatggtcattataatcgtcttgaatttaatttttggcgtaatcatcgataccttcgcagacctccgctctgagaagcaaaagaaggaggagattctcaagactacctgcttcatatgcggcctcgaaagggacaaatttgacaataaaacagtaacttttgaggagcacattaaggaggagcacaacatgtggcattatttgtgttttatagtgttggttaaggtgaaagatagcacagaatacacaggacccgagagttatgttgccgagatgattaaagagaggaatttggattggtttccaaggatgcgggctatgagccttgtaagctctgatagtgagggtgagcagaatgaactacggaatctccaggagaaactcgaatcgaccatgaaactggtcactaatctgtccggccagctgagcgaactcaaagatcaaatgaccgaacaaaggaaacaaaagcagcgaattgggttgctcgggcatcccccacatatgaacgttaatccccagcagcccgctta

SEQ ID NO: 226785 - DNA, 8231 bp, synthetic construct
  misc_feature 1..8231: note = Description of Artificial Sequence: Synthetic coding sequence
  source 1..8231: mol_type = other DNA
atgtctgacaagatgtcctctttcctgcatatcggagatatttgttccctgtacgcagagggctcaaccaatggatttataagtacactgggactagtcgacgatagatgcgttgtgcagcctgaaacgggtgacttaaacaaccctccaaagaagttccgcgactgcctctttaagctgtgtccgatgaaccggtatagcgcacagaaacaattctggaaagccgctaagccaggcgcaaattctaccaccgacgctgtcttgttaaataagctgcatcacgccgcagacctggagaagaaacagaatgaaacagagaaccgtaagctcctcgggactgtgatccagtatggcaatgtgatccagttactacatctgaagagcaataaatacctcacagttaataaaagacttcccgcattgcttgagaagaatgccatgcgggtgacgttggacgaagccggaaacgaggggtcctggttctatatacagcccttttacaagttgagatccataggcgactccgtggtgatcggggacaaagttgtactgaacccagtgaacgccggacagccgttgcacgcttcctctcatcagttggtggacaatcctggatgcaacgaagtgaattccgtgaactgtaacacctcctggaagatagtattgttcatgaaatggagcgataataaagacgacatactgaagggcggtgacgttgtgcgcttgttccacgctgagcaggagaagttcctcacctgcgacgaacatagaaagaagcagcacgtctttctgcggacaactggacgccaaagtgcaacctcagcaacaagctctaaggccttgtgggaagtcgaggtcgtccagcacgatccatgcagaggcggtgctggatattggaattcgctctttagattcaaacatctcgcaacaggtcactatttagctgctgaagtagacccagacttcgaggaggagtgcttggaattccaaccgagtgtggacccagatcaggatgcatctcggagccggcttagaaatgctcaggagaaaatggtctacagcttggtttccgtgcccgagggtaacgatatcagttccatctttgagctagatccaaccacacttcgaggaggcgactccctcgtgccacgcaattcttatgtccgacttaggcacctgtgcacaaacacatgggttcatagcactaacatacctattgacaaagaggaagagaaacccgtgatgctgaagattggtaccagccctgttaaggaggataaagaggcgttcgcaatcgttccggtcagtccagccgaggtgagggacttggacttcgccaacgacgcatctaaggtgcttggtagcatagccggtaaactggagaagggaacaataacccagaatgaacggcgatccgtgacgaaactgctcgaggacctggtttactttgtgactggcggtaccaactcaggacaggacgttctcgaggtggtctttagcaagccaaaccgggagcgccagaaacttatgagagagcaaaatattctcaaacaaatttttaagctactgcaggcgccttttactgactgtggcgatggcccaatgctcagacttgaggagcttggagaccagaggcacgcccctttccgtcatatttgtcgcctgtgctatcgtgttttgagacattcacagcaggactaccggaaaaaccaagaatacatcgctaagcaattcgggtttatgcaaaagcagattggttacgatgtcctggctgaggataccattacagctctgctccataataatcgcaagcttttggagaagcacattaccgctgcggagattgatactttcgtgagcctagtaagaaaaaacagagagccacgcttcctcgactatctctccgacctctgcgtgtccatgaataaaagcatcccagtgacccaggaattaatatgcaaggccgtcctgaatccaactaatgctgacatactgattgagacaaagttggtgttgtctcgattcgagtttgagggggtgtcctccactggagagaatgccctggaggccggagaagatgaagaagaagtatggctcttctggagggacagcaacaaagagatcaggagcaagtccgttcgggaactcgcccaagatgccaaagaaggccagaaggaggatcgagacgtgctgtcttattaccgctaccagctgaacctgttcgcgcgaatgtgtctggacaggcagtacttggcgatcaatgaaatatccggccagctagatgtggatctgattctcaggtgtatgtccgacgagaacctgccttacgacttaagagctagtttttgccggttgatgctccacatgcacgttgacagggatccccaggaacaggttacacccgtgaaatacgcgcgtctgtggtccgaaatcccatctgaaattgccattgacgactatgactcttctggagccagcaaggacgaaataaaggagagatttgcccaaactatggaattcgtggaggaatatctgagagatgtggtctgccagcgcttccccttctccgacaaagaaaagaataagcttaccttcgaagtagtgaatctggctcggaatctgatatatttcggcttctacaatttctccgatttgctccggctgactaagatcctactagccattctggactgcgtccacgtgaccaccattttcccaatctctaaaatggccaagggcgaggaaaataaaggaaacaatgacgtggagaagttgaaaagctctaatgttatgcggtccatccatggagttggcgagttgatgacgcaagtggtcctccgcggtgggggttttctcccaatgaccccaatggctgccgcaccagaggggaacgtgaaacaggctgagccagagaaggaagacataatggtgatggatacaaaactgaagattattgagattcttcagtttattttgaacgtgagacttgattatagaatttcctgtctcctgtgtatctttaaacgcgagtttgatgagtccaattcacagacctctgaaactagttccgggaactcaagccaggagggcccaagcaacgtgcctggggctttggacttcgaacacattgaggaacaggctgaaggcatttttggcggaagtgaagagaatacaccactggatctcgacgatcacggcggtagaacatttctgcgtgtactgcttcaccttacgatgcacgattacccacccctggtgtctggagctttgcagctactgttccgccacttcagccagcggcaggaagtactgcaggcctttaaacaggtccaactgctggtgacaagtcaagatgtggataactataagcaaataaaacaggacttagaccagctcaggtcaatcgttgaaaagagtgaactctgggtgtataaaggccagggaccagacgagactatggatggggcaagtggcgaaaatgaacataagaagacagaagagggcaataacaagccgcagaaacatgagtctacaagtagttacaactatcgtgtcgtgaaggaaatcttaatcaggctctcaaaactgtgcgttcaggaatctgcaagcgtgaggaagagcagaaaacagcaacagcggctgctcaggaacatgggggctcacgcggtggtgctggagttgctgcagattccttatgagaaagctgaagacacgaagatgcaagaaatcatgaggctagctcatgaatttttgcagaatttctgtgctggtaatcaacaaaaccaggcccttcttcacaagcatatcaatctcttcctgaatccgggtatccttgaggcagtgactatgcaacatatctttatgaataacttccagctctgttcagagatcaacgagagagtcgtgcagcattttgtccactgtatcgagactcacggaagaaatgtgcagtacatcaagttccttcagacgatcgtgaaagcagaaggcaagtttatcaagaaatgccaagatatggttatggcggagctcgtaaattccggggaagacgtgctcgtattctataacgatagagcttcatttcagacactgattcagatgatgcggtctgaaagagaccgcatggacgaaaactccccacttatgtatcacattcacttagtggaactgctggcggtgtgcactgaggggaaaaacgtatacacggaaattaagtgcaactccctgctccccctcgacgacattgtacgggttgtgactcatgaggactgcattcccgaagtgaagattgcttatatcaacttccttaatcactgttatgttgatactgaggtcgagatgaaagaaatctataccagtaaccacatgtggaagttgtttgagaacttccttgttgacatatgcagggcttgcaataatacttcagatcgaaagcatgccgatagtatcctggagaagtatgtaactgaaatcgtgatgtctattgttactactttttttagctccccattttctgaccaatccaccaccctgcagacgagacagccagtgttcgttcagctcttgcagggagtattccgcgtctatcactgtaactggctcatgcccagtcagaaggccagtgtggaatcgtgcattcgggtattgtcagacgtggctaagagccgggctattgctatcccggtggatctcgattcccaggttaacaacctgtttctgaagtcacactcaatcgtgcagaagaccgccatgaactggcgcctgagtgccagaaatgccgctaggagggactctgtgcttgcagccagcagggactatcggaatattattgagcgcttacaagatatcgtgagtgccctcgaggacagactgcgccctttagtgcaggccgaactgtcagtactggtagacgtcttgcacagaccagaattacttttccctgagaacaccgatgcccgacggaaatgcgagagcggaggatttatatgcaagttgattaagcacaccaagcagctcttggaggaaaacgaagagaagctgtgcattaaggttttgcagacactgagggaaatgatgaccaaggatcgcggatacggcgagaagctgatcagtatagacgagctggacaatgccgaattaccccctgcacccgattccgagaacgcgacagaaaaaggggaagcactcagacaagtgctggtgaaccggtactacggaaacgtgaggccatccgggaggcgggaatcactgacttcgtttggcaacggaccgctatccgccggagggccagggaaaccaggcggaggcggaggagggtctggaagctccagcatgagccggggagagatgtctcttgccgaagtacaatgccatttagacaaggagggggcatctaacctcgttatcgatttgattatgaacgcatcttccgacagagtcttccatgagagcattctccttgctatcgcccttctggagggaggcaacacaacgatacaacactcttttttctgtcgcttgactgaggataagaagtcggagaagtttttcaaagtcttctatgatagaatgaaggtggctcagcaggagataaaagcgaccgtgacagtaaacacttctgatcttgggaataagaaaaaagatgacgaggtggatcgagacgctcccagcaggaaaaaggccaaggagcccacaacacagattacagaagaggtgcgtgaccagctgttagaggcaagcgctgctactagaaaagcattcaccactttccgtcgtgaagcagatcccgacgaccactatcagcctggtgagggtactcaggcaaccgccgacaaagccaaagacgatctcgaaatgagcgcggtcattacaattatgcagccgattctgcggtttcttcagctgctgtgcgagaaccacaatcgcgacctccaaaattttctgcggtgccagaataacaaaaccaactacaaccttgtgtgcgaaacattacagttccttgattgtatctgcggatccacaacaggaggtctaggactcctgggattgtacatcaacgaaaagaatgtggctctaataaatcagactctggaatcgctgacagaatactgtcagggaccctgtcacgaaaaccaaaattgtattgctactcacgaaagcaatgggatcgacattataactgcgttgatcttaaatgacattaatccactcggcaaaaagaggatggatctggtgctggagttaaagaacaacgcaagcaagcttctgctggccatcatggagagtcgccacgattctgaaaacgctgaaaggatcctatataacatgagacccaaggagctggtggaggtgattaaaaaggcatatatgcagggcgaggtggagtttgaggatggggagaacggcgaggatggcgcagcatcgccgaggaacgtgggccataacatctatatcctggcccatcagctcgctaggcacaacaaggagctgcagagcatgctcaagccgggaggacaagtagatggcgacgaagcactggagttctatgccaaacacacagcccagattgaaattgtgagactagaccgcacaatggagcagattgtgtttcctgtgccctccatttgcgaattcctaactaaggagtctaaactgcgaatctattatacaacagaacgagacgaacaggggtctaagataaacgactttttcctcaggtctgaagatctcttcaacgagatgaattggcagaaaaagttaagggcccagcccgtgctctattggtgcgcaaggaatatgtccttttggagcagcatcagctttaacttggcggtcttaatgaatcttctcgtggcgttcttctatcccttcaaaggcgtcagaggtggcacactcgaaccccattggtccggcctactgtggacagctatgctaataagccttgcgatcgtgattgcactgcccaagccccatggcatccgcgctctgatcgcatccacaatactgcggttaatcttttccgtcggcctacagcccactctctttctgttgggtgcatttaatgtttgcaataagattatcttcctgatgtctttcgtgggcaattgcgggacgttcacccgcggttatagggccatggtgctggacgtggagttcctgtatcatctgctgtatctagtaatctgcgccatggggttgttcgtgcacgaattcttttactcgttgcttctattcgatctagtctaccgtgaagaaacactactcaatgtcataaagtcagtcacaagaaacgggaggagcattattctgactgcagtgcttgccctgatcctggtctatctgttttctatcgtagggtacctgtttttcaaagacgactttatcttagaggtggaccggcttccaaatgagacagctgtgccggagacgggtgaatccctggcatcagagttcctctttagcgacgtctgccgggttgaatccggggaaaactgtagcagtccagctccaagggaggagctggtccctgcagaggaaactgagcaggacaaagagcacacttgcgaaacgttactgatgtgcattgttaccgtcctgagtcatgggctgcggtccggagggggagttggggacgtgcttcggaagccaagtaaggaggagccccttttcgccgcaagagtgatttacgacctcctttttttcttcatggtgattattatcgtgctcaatctgattttcggagtaattatcgatacttttgccgaccttcggagtgagaagcagaaaaaggaggagatcctgaaaaccacttgctttatctgcggtctagagcgggacaaatttgataataagacagtgacttttgaagagcacatcaaagaggaacacaatatgtggcactacctttgctttatcgtactggtcaaagttaaagattctactgaatataccggtcctgaatcttacgtggcagaaatgattaaggaaagaaatcttgattggttcccccgaatgagagcaatgagccttgtgagtagcgacagcgagggcgagcaaaacgagttgcggaacctacaagagaagctagaatccacaatgaaactcgtgacaaacctaagtggccaactgtcggaactgaaggatcagatgaccgaacaacggaagcaaaagcagagaataggactgctgggtcatccccctcacatgaatgtaaacccccagcaaccggcata

SEQ ID NO: 226786 - DNA, 8276 bp, synthetic construct
  misc_feature 1..8276: note = Description of Artificial Sequence: Synthetic coding sequence
  source 1..8276: mol_type = other DNA
atgagtgacaagatgagttccttcctgcatattggtgatatatgtagcctgtatgctgaggggtcaacaaatgggtttatatccacactggggcttgtggatgatcggtgcgtggtccagcctgagaccggagatctgaataacccaccgaagaaattccgggactgcctgtttaaactgtgtccaatgaacagatacagcgcccagaagcagttctggaaggccgctaagcctggcgctaactccacgactgatgcggtgctgctaaataagttacatcatgcagcagaccttgagaagaagcagaatgagaccgaaaaccgtaagttgctgggaacagtgattcagtacggcaacgtgattcaactgctacatctcaagagtaataagtatttaactgtgaataagcgattacccgcactccttgaaaaaaacgccatgagagtcacgctcgatgaggcagggaatgagggctcctggttttatatccagcctttttataagctccgttccatcggggactcagtagtcatcggggacaaggtggtgctgaaccccgtcaacgccggtcagcccctacacgccagttctcatcagctggtggataacccaggctgtaacgaggtgaatagtgtgaattgtaatacgtcctggaaaattgtactgttcatgaaatggtcagataacaaggacgacattcttaaggggggtgacgtggtcagattatttcacgccgaacaggagaaatttctaacttgcgacgagcaccggaagaagcagcatgtgtttctgcgcaccaccggcaggcagagtgccacatctgccacgagcagtaaagcactgtgggaggttgaagtagttcagcacgatccatgccgcggaggtgcgggatattggaattctctgtttcggttcaagcacctggccacgggccactacttggcggcagaggtggaccccgattttgaagaagagtgtcttgagttccagccgagtgtggaccctgaccaagatgctagtaggtcaaggctccgcaacgctcaggagaagatggtttacagcttggtgtccgttcccgagggtaacgacatcagttccatcttcgagctggatccaacaaccctgagaggaggcgattctctggtgcccaggaactcctacgtgcgcctgagacacctctgcacaaacacatgggtccactctactaacatacctatcgataaggaggaggagaagccagttatgttaaagattggcacaagtcctgtcaaggaagacaaggaagcgttcgcgatcgtccctgtgtcccccgctgaggtgagagaccttgatttcgccaacgatgcttctaaagtactggggagtatcgcaggaaagttggaaaagggaacaattacacaaaacgagaggcgctccgtcactaaattgttagaagatctggtgtacttcgttaccgggggtactaattccggacaggacgtgcttgaagtggttttctcaaagcctaacagggagaggcagaagctcatgcgggagcagaatattctcaagcagattttcaagctgttacaagctccttttacggactgcggtgatggacctatgctgcgacttgaggaactgggtgatcagcggcacgcccctttcaggcacatctgtcgtctttgttatcgcgtgctaagacatagccagcaggattatagaaaaaatcaggagtacatagccaagcagtttggatttatgcagaaacagatcggatatgacgtgctggctgaagataccataactgcccttctgcacaataatcgtaaactgttagagaagcacattaccgctgccgagattgacaccttcgtgtctctcgttcgcaaaaacagggaaccccgattcttggattatctgtctgacctctgcgtcagcatgaacaaatctataccagtgacccaagaactgatctgtaaagccgtactcaatcctaccaacgctgacattcttatcgagacaaagctggtcctttctcggttcgaattcgagggagtaagcagtacaggcgaaaacgcactcgaggctggcgaggatgaagaggaggtctggttgttctggagagacagcaataaggagattagaagtaagtccgtccgcgaactggcccaggacgccaaagaggggcagaaggaggacagggacgtcctgtcgtactataggtatcagctcaatcttttcgctagaatgtgcctggatagacaatatctggctatcaatgagatctctggtcaactcgatgtggacttgatactgaggtgcatgtccgatgagaatcttccctatgatctaagggccagtttttgccggcttatgcttcacatgcatgtggaccgtgacccccaggaacaggtaacacccgtgaagtatgccagactgtggagtgaaatacctagcgagattgctattgatgactatgactcttccggcgcttctaaggatgagataaaggaacgcttcgcgcagacgatggaatttgtggaagaatacctgagggatgtagtgtgccaacggttccccttctccgacaaggagaagaataagctgaccttcgaggtcgtcaacctcgcgcgaaatctgatctatttcggtttttataactttagtgacctgttgcgactaactaagattctactggccatcttggactgtgttcatgtcacaaccatttttccaatttctaaaatggcaaagggcgaagagaacaaggggaataacgacgtcgagaagctgaagagttccaatgtcatgcgttctatccatggggtgggagaactaatgactcaagtcgtcctgcgagggggtggtttcctgcctatgacccccatggctgccgctccagagggcaatgtgaaacaagctgaacctgagaaggaggacatcatggtcatggataccaaactgaaaattattgaaattcttcagttcattctgaacgttcgcttggactacagaatttcttgtttgctctgcatattcaagagggaattcgatgagagcaattcacagacaagcgaaacgtcttccggaaacagttcccaggaaggcccttccaacgtcccgggagccttagactttgaacacatcgaagaacaagctgagggaatttttggcggatctgaagagaatacaccattggatttggatgatcacggcggaaggacgttcctgagggttcttctccacctgacaatgcatgattatcccccacttgtgtctggagcactacagttgcttttccgacattttagccagcgccaggaagtgttgcaggcgtttaaacaggttcaactcttagtgaccagtcaggatgtagataactataagcagatcaaacaggaccttgatcagttgagaagcatcgtggagaagtccgagctctgggtctacaaaggacagggacccgacgaaaccatggatggcgcttctggggaaaatgaacacaagaaaactgaggaagggaacaataaaccacaaaagcatgagagtacgagttcctataattacagagtcgttaaggagattttgatcaggctcagcaagctgtgtgttcaagagagcgcctcagtgcgcaagtctagaaaacagcagcaacgcttgctgcgaaacatgggcgcacacgctgttgtgctcgagctgttacagattccctacgagaaggcggaggatactaagatgcaagaaattatgagactggcacacgaatttttacaaaacttttgcgctggcaatcagcaaaaccaggccttactgcacaaacatattaatctgtttttgaacccgggaatcctagaggcggtgaccatgcaacatatcttcatgaataattttcagctgtgttccgagataaacgagcgggtggtccagcatttcgttcactgcatcgaaacacatggtaggaatgtgcagtatattaaatttttgcagacaattgtgaaagccgaggggaagtttatcaaaaaatgccaggatatggtgatggcggaacttgtgaacagcggggaagatgtcctggtgttttacaatgaccgcgcaagctttcagactctcatacaaatgatgagatccgaacgcgatcggatggatgagaattctcccctcatgtatcatatccatctggtggagctgcttgccgtttgtaccgaggggaagaacgtgtacacggagataaagtgcaacagcctcttgcccctagacgacattgtgagagtggtcacccacgaggattgcattcccgaggtcaagatcgcctacatcaactttttgaaccactgttacgtcgacactgaagtggaaatgaaggagatttatacctctaaccatatgtggaagttgttcgaaaactttctggtcgacatctgccgcgcatgcaacaatacctctgaccgaaaacacgcagactcaattctggaaaagtacgtgaccgagatcgtgatgagcatcgtcaccacatttttttcatcccccttctctgatcagagcaccactctccagaccaggcagcccgtgtttgttcagttactccaaggcgtctttcgggtttaccactgcaattggctgatgccctcacagaaggcatcagttgagtcatgcattcgggtactgagcgacgtggcaaaatctcgagccattgctatcccggtcgaccttgattcacaggtaaacaatctctttttgaaatcccatagcatcgtccagaagacagctatgaactggcggctgtccgctagaaacgctgcacgacgcgacagtgtgttggccgcaagcagagattacagaaacattatagaacggcttcaggacattgtgtctgccctggaagataggctgcggcctctggtgcaggcagaactgagtgttctggtggatgtacttcacagacctgagttgctgttcccggaaaacaccgacgcccgacgtaaatgtgagagcggaggttttatttgcaaactaattaagcatactaaacagctcctggaagagaatgaggagaagctgtgtattaaggttctccagacactgcgagagatgatgacgaaggacaggggttacggcgagaagctcatctccattgatgagctagataacgccgagctcccgcctgcacccgattctgagaacgctaccgaagaactggaaccatcacccccacttcgacagctggaggatcacaagcgaggtgaggcattgagacaagtgttggtgaatcgatactatggtaatgtgaggcccagtggaaggcgggaatctttaacaagtttcgggaatgggccactctcagcaggtggccctggtaaacctggtgggggaggcggaggttctggcagtagctcaatgagcaggggagagatgtcacttgccgaggtccagtgccacttagacaaggaaggcgcttcaaatctggtcatagacttaattatgaacgcctcatctgatcgtgttttccacgaatctatcttattggccatagcccttttggagggcggtaacactacaatccagcacagttttttttgccgattaaccgaagacaagaagagcgaaaagttctttaaggtattttacgatcggatgaaggtggcgcaacaggagatcaaagccacagtcaccgtgaatacctcagatctgggcaacaaaaaaaaggatgatgaagtcgaccgagatgcaccttcgcggaaaaaagccaaggagcccaccacccagataaccgaggaggtgcgagatcagctgctggaggcgtcagctgccacaagaaaagctttcactacttttaggcgggaagcggacccagacgatcattatcagccgggagaaggcactcaggctaccgctgataaagcgaaggatgaccttgaaatgtccgccgtgattacgattatgcagcctatcctacgattcctacagctattgtgcgagaatcacaatagagacctgcagaacttcttgcgctgccagaataataagaccaactacaatctggtctgtgaaaccctgcagtttctagactgcatttgcggttcaacgacaggaggcctgggcctgttaggcctttatattaacgagaagaatgtagccctgatcaatcagacattggaatccttgacagagtattgtcagggaccctgtcacgagaatcagaattgcatcgccacccatgaatccaatggtatagatatcatcacagccctgatactcaatgacatcaatcccctgggtaaaaaacgcatggatctggttctcgagcttaagaacaatgccagtaagttactgctggcgatcatggagagtagacacgactccgaaaatgccgagcgcatcctctataacatgcgccctaaagaactcgtagaagtgattaaaaaggcatatatgcagggagaggtcgagttcgaagacggagaaaatggagaagatggcgctgccagcccaaggaacgtcgggcataacatttatattctggctcatcagctcgcaagacataataaagagcttcagtctatgctgaaacctgggggacaggtcgacggtgatgaagccctagaattctacgctaaacatacagctcagatcgagatcgtccgactggacaggaccatggagcagatagtcttccccgtccccagtatttgtgagtttttaactaaggagtctaagctgcggatctattacaccacagaaagagatgaacagggcagcaaaattaatgatttctttttgcgctctgaggatctattcaacgagatgaactggcagaagaagttgagggcccagcccgtcctgtactggtgcgcgaggaacatgagtttctggagctccatctcattcaatctcgccgtgctcatgaacctgctggttgcattcttctatccttttaagggcgtgagaggaggtaccctcgagccccattggtcgggcctgctctggaccgccatgctgatatccctggcgatcgtcattgccctacccaaaccccatggaattcgggctctgatagcttccaccatcctccggttgattttctctgtgggcttgcaacctaccctatttctcttaggagccttcaatgtgtgcaacaagattatttttctcatgagtttcgttggtaactgtggaacctttacacgtggttatcgcgctatggttctggacgtggagtttctctatcatctcttgtacctcgtaatttgcgccatggggttattcgttcacgagttcttttattctctcttgctgttcgatctagtctacagagaggagaccctccttaacgtgataaaatctgttacacgcaatggcaggtcgatcatcctgaccgctgtcctggccttgattctcgtatatctctttagcatcgtgggttatctgttctttaaggacgatttcatcctcgaggtggatagactgcccaacgaaacagccgttcctgagactggtgagagcctcgctagcgaatttttattctcggacgtgtgcagagtcgagagcggcgaaaactgctcaagccccgctcctcgcgaagagcttgttcccgcagaggagactgaacaggataaggaacatacttgtgaaaccctgttaatgtgcatagtcaccgtgctgtcacacggtctgcgctccggcggaggggtgggcgacgtgcttcgaaagcccagtaaggaggaaccgctcttcgccgctcgagtgatctacgatttgctttttttctttatggtgataataatcgtgcttaacctgatcttcggcgttattattgatacatttgctgatctacggtctgagaaacagaaaaaggaggagatcctgaaaacgacctgttttatttgcgggcttgaacgtgataagtttgataataaaactgtgacgttcgaagagcacatcaaagaggagcataatatgtggcactacctttgcttcatagtcctagtgaaggtcaaggactcaacagaatacacagggccagaatcgtatgtcgccgagatgatcaaagaacgtaatctggattggtttcccaggatgcgggcaatgagtctcgtcagttcagactctgagggcgaacagaacgagctcagaaatctgcaggagaagcttgagtccaccatgaagttggtgactaacttgagcgggcagctttcagagctgaaggaccagatgacagagcagagaaagcaaaaacagagaattggattgctcggacaccctccacatatgaatgtgaacccccaacaacccgcata

SEQ ID NO: 226787 - DNA, 8132 bp, synthetic construct
  misc_feature 1..8132: note = Description of Artificial Sequence: Synthetic coding sequence
  source 1..8132: mol_type = other DNA
atgtcagataagatgtccagcttcctgcacataggcgacatatgttctctgtatgccgagggatcaacaaacggttttattagcacccttggtctggtagatgatcgatgcgtagtccaacctgaaaccggcgacttgaataaccctccaaagaagtttagggattgcttgttcaagctgtgccctatgaaccgatactcagctcagaaacaattctggaaagcagccaagcctggtgccaactccacgactgacgctgtcttactaaacaagctgcaccacgctgctgatctcgaaaagaagcaaaatgagacagaaaaccggaagctgctggggaccgtgattcaatatggtaatgtgattcaattactgcacctgaaatccaacaagtacctgacagtcaacaaaagacttcctgcacttcttgagaaaaacgcaatgcgtgtaaccctcgatgaagctggcaacgaagggagctggttctatatccaacctttctacaagctaagaagcatcggcgattcagtcgtcatcggagacaaagtcgttttgaaccctgttaacgcaggccagccattgcacgcttctagtcaccaactggttgataaccctgggtgcaacgaggtcaattcagttaactgtaacacctcgtggaaaatcgtactttttatgaaatggagcgacaataaggacgatatattaaaaggaggagacgtggtacgtctctttcatgccgagcaggaaaagttcctcacctgcgatgaacacagaaagaagcagcacgtgtttctgcgcacgacaggtcgccagtccgcaacttccgccacttcttcgaaagctttgtgggaggttgaggtcgtgcaacacgatccatgccgtgggggagcgggttattggaacagcctctttaggttcaagcatttagcgactggtcattatttggccgcagaggtggatccagacttcgaggaggagtgcctggagttccagccttcagtggatccagaccaagatgctagtcggtcccgactccgaaacgcacaagaaaaaatggtctactctctggtgtcagtgcccgagggcaacgatattagcagcattttcgagctcgatcccacaaccctgagaggcggagactcacttgtgcctcgaaattcctatgtgcggctaaggcatctctgtacaaacacgtgggttcacagcacaaatatcccaatcgacaaggaggaggagaaacccgtgatgctgaagattggtacgagcccagtaaaggaggataaagaggcctttgctatcgtacccgtgtcgcctgccgaagtgcgcgatctagacttcgcaaacgatgccagtaaggtgctgggatctatcgcaggaaaactagaaaagggcactattacccagaacgagcgcagatcagtcaccaaactgctcgaagacctggtgtattttgtgactggcggaacaaatagcgggcaagatgtactcgaggttgtcttttccaagccgaaccgggaacggcagaaactgatgagagaacagaatatcttaaagcagatatttaagctcttgcaggccccttttactgactgcggcgacgggccaatgctgcgtctggaagagctgggcgaccagaggcatgcaccctttagacatatttgccgtttgtgttacagggtcctgcgccattcccaacaggactatcgcaagaaccaggagtatattgccaagcaattcgggttcatgcagaaacagatcgggtacgatgtccttgctgaagatactattacggccctgcttcacaacaatagaaaactcctggaaaaacacatcaccgccgcagaaatcgacactttcgtttctcttgtgaggaaaaatagagaacctcgtttcctagactatcttagtgacctttgtgtaagcatgaacaaatccattccagtgacgcaagaacttatctgcaaggctgtacttaacccaaccaacgctgacattttgatcgagactaagctggtgcttagtcgtttcgaatttgagggcgtatcctctactggagagaatgcgctggaggccggtgaggatgaggaggaagtctggctgttctggcgtgactctaataaagaaatacggagcaaatctgttagagagcttgcacaggacgctaaggaagggcagaaggaggatagggatgtcctttcttactaccgataccagttaaatctgttcgcacgcatgtgtttggaccgccagtatctggcgattaacgagattagcgggcaattggatgtggatcttattcttcgctgcatgtccgatgagaacctgccttacgatttacgcgcatccttctgccggttaatgctgcacatgcatgttgacagggaccctcaggaacaggtgactcccgttaaatatgcaaggctgtggtccgagatcccatccgaaatcgccatagacgactacgactcgtccggagcttctaaggacgagattaaggagaggtttgcccagacaatggaatttgtggaggagtacctgagggatgtggtctgtcagcggtttccattcagcgataaagagaaaaataagctgaccttcgaggtagttaatctcgccaggaatttaatttactttggtttctacaatttttccgacttactccgcctcaccaaaattctactggccattctggactgtgtacacgtcaccactatattccccatcagcaaaatggccaaaggggaagaaaacaagggcagtaatgtgatgcgctccatccacggggtgggagagctgatgacccaagtcgtgttacgcggagggggtttcctccccatgacgcccatggcggctgcaccggagggtaatgtaaagcaggccgaacctgaaaaagaggatataatggtgatggataccaagctcaaaatcatcgagattctccaatttattttaaacgtgcggcttgactatcgcatcagctgcttgctgtgcattttcaagagagaattcgatgaatccaactcacagaccagcgagacgagttccggtaatagcagccaggagggtccctcaaacgtcccaggcgctctcgacttcgagcacatagaggaacaggccgagggaattttcggcggaagcgaggaaaacactcctttggacttagatgatcatggaggcagaacattcctgcgcgtgctattacatttgacaatgcatgactatcccccactagtcagcggggctctgcagctgctcttcagacacttcagtcagagacaggaagtactccaggcttttaagcaggtgcagcttctggttaccagtcaagatgttgacaactacaagcagatcaagcaggacctcgaccagcttcggtccattgtggagaagagcgagctttgggtatacaaaggacagggtcccgatgagacaatggatggtgcctccggcgaaaatgaacacaagaagaccgaagaagggaacaataagcctcagaagcacgaatccacctctagttataattacagagtggtcaaagaaattctcatcagactgtccaaactatgtgttcaggagtcggcaagtgttaggaagtctagaaagcagcagcaaagactcctgcgcaatatgggcgctcacgctgtagttctggagctcctgcagatcccttacgagaaagccgaagacaccaaaatgcaggagattatgcggctggctcacgagttcctgcagaacttctgcgccggaaaccagcagaatcaggctcttctccataaacatatcaatctgtttctgaatcccggtattctggaggctgtgactatgcagcatatattcatgaataactttcagttgtgtagcgagataaacgagcgagtggtacagcatttcgttcactgcatagagacgcacggccgaaatgtccagtatattaagttcctccagaccattgtgaaagcagaggggaaatttatcaagaaatgccaggatatggtcatggctgagttagtgaatagtggcgaagacgtcctggtgttctataatgacagagcctcattccagacgttaatccaaatgatgaggagcgaaagggatcgcatggatgagaactccccactcatgtaccatattcacctggttgagctcctggcggtgtgtacagaggggaagaacgtttacactgaaatcaaatgcaactccttgcttccactcgatgacattgtgagggtggtgacacacgaagactgtattcctgaagtgaaaattgcatacatcaactttttgaatcactgctacgtagataccgaggtggagatgaaggagatctacacttcgaatcacatgtggaagctgtttgaaaatttccttgtagacatctgtagggcctgcaacaacactagcgatcgcaaacacgcagattctattttggagaaatatgtgacagaaatcgtgatgtctattgttaccaccttcttcagctccccgtttagcgatcagtccacgacattacagacacgccagccagtctttgtgcagcttcttcagggcgtcttcagggtgtaccattgcaactggctcatgccctcccagaaagcttccgtcgagagctgcatacgcgttttatcagacgtggccaagtctcgggcaatagcaattcccgtggatttggactcccaagtgaacaacctgttcctcaaatcccacagcattgtccagaaaaccgccatgaattggcgcctttccgcaaggaatgcggcaagacgtgacagtgtcttggctgctagtagagattatcgcaacatcatcgagagactacaggacatagtttctgcactggaagatagacttcggccacttgtgcaggccgaactgagcgtgcttgtggatgtccttcaccgcccagaattgctgttccctgagaacaccgatgccaggaggaagtgtgaatccggcggattcatatgcaagctgattaagcacactaaacagctcctcgaagagaacgaggagaagctgtgcattaaggttctccagacgctccgagagatgatgacaaaagaccgtggctatggagaaaaaggggaagctctcagacaagttttggtgaatcggtactatgggaatgttaggccttcaggcagaagagagtcactgactagctttggaaatggccctctatcagccggtggaccaggcaaacccggagggggagggggtggctcaggctcctcaagcatgagtcgcggagagatgagcctcgctgaagtgcagtgtcaccttgacaaggaaggagccagcaatctcgtcatagacttaattatgaacgccagcagcgatagagtgtttcacgagagcatccttttagcaatagctctcctcgaaggagggaacaccaccatacagcacagcttcttctgcaggctcacagaggataaaaaaagcgagaaattttttaaagtgttctatgatcggatgaaggtagcccagcaagaaataaaagcaaccgttaccgtgaacacatctgatttgggcaataagaagaaggatgacgaggtcgaccgcgacgcccctagcagaaaaaaggctaaagaacccactacacaaatcaccgaagaggtaagggatcagctccttgaagctagtgcagccacgagaaaagctttcactacctttagacgagaggctgacccagacgaccattaccagcctggcgaaggcacccaggcgacggctgataaggctaaggatgatctcgagatgtccgccgttatcacaattatgcaaccaattttaaggttcctgcagctcctgtgtgagaaccataacagggatctgcagaacttcctcaggtgtcagaacaataaaacaaactacaatctcgtgtgcgagactcttcagttcctggattgcatctgcggctcaacaaccgggggactcgggctcctgggtctgtatatcaatgaaaaaaatgtcgcactgattaaccagactcttgagtctctcacagagtactgtcagggtccctgccacgaaaatcaaaattgtatcgctactcacgagagcaatggcatcgacatcattacagccctcattctgaacgacattaatcccctgggaaagaaacgtatggatcttgtgctagaattgaagaacaacgcctccaagctattactggccatcatggaaagtcgacacgacagtgagaacgccgagcggattctatataacatgcggccaaaggagctggtggaagttattaagaaagcctatatgcagggggaggtggagtttgaggatggagagaacggcgaggacggagccgcaagtccacggaacgtcggacacaatatttatatcttggcccaccagctcgcccgacacaacaaagagctgcaaagcatgctgaagccagggggacaggtagacggagacgaagccctcgaattctatgcaaagcacaccgcccagatcgagatagtccgcctggacaggacaatggaacagatcgtctttccggtgccgtctatctgtgaatttctgacaaaagagtccaagctgagaatatactacactacagaaagagatgagcagggcagtaagatcaatgatttttttctccgcagcgaggacttgttcaacgagatgaattggcagaagaaactgcgcgctcagccagtcctctactggtgcgctcgaaacatgagtttttggtcctcaatttctttcaacctcgcagtgctgatgaatttactggtcgccttcttttaccccttcaagggagtgagaggaggcaccctcgaaccccattggtccggtctcctgtggacggcaatgttgatttctctggccatagtgatcgcattgccaaagccccacggaattcgcgctctcatcgcctcaaccatcctacggctgatattctccgtggggctgcagcctactctgttcttgctaggggcatttaatgtgtgcaataaaatcatattcctaatgtcttttgtgggtaactgcgggaccttcactaggggctaccgggcaatggtgctggacgttgaatttctctaccatcttctctacctggttatttgcgccatgggactctttgttcacgagttcttctacagcctacttctatttgaccttgtgtacagagaggaaacgctcctgaacgtaattaaaagcgtaactcgtaatggacgcagcatcattcttacggctgtactggccctgattctggtgtaccttttttcaattgtgggctacctgttctttaaggacgatttcatcttagaagttgataggctgcctaacgaaaccgccgttccagaaaccggcgagagccttgcatcggagttcctgttcagcgacgtgtgtagagtggagtctggtgaaaattgcagttccccggcacctcgagaggagttggtgcccgctgaagaaacagaacaggacaaggagcatacttgcgagacactgctgatgtgcatcgtcaccgtcctatctcatggcctcagaagcggcggaggtgtcggggacgtgttacgtaagccatccaaggaagagcctctgtttgcagcaagagttatctacgacctgttgttctttttcatggtgatcattatagttcttaatttgatttttggagtcatcatagatacattcgcagacctccgctccgaaaaacagaagaaggaagaaattttgaaaacaacttgctttatttgtggcttagagagggataaattcgataacaaaactgtcacgtttgaagaacacattaaggaagagcataatatgtggcactatctgtgcttcattgtgctggttaaagtgaaggacagcacggaatacaccggcccagagtcgtacgtcgcagagatgatcaaggaaaggaacctggactggtttcctcgcatgcgtgcaatgagcctcgtgagctctgactctgagggggagcagaacgaattgagaaaccttcaggaaaaactggaatcaacaatgaagctggttacgaatttgtccggtcaattgagcgaactgaaagaccagatgacagagcagcgaaagcaaaagcagcggatcggactgttgggccatccaccccacatgaacgtgaatccacagcagccagccta

SEQ ID NO: 226788 - DNA, 8132 bp, synthetic construct
  misc_feature 1..8132: note = Description of Artificial Sequence: Synthetic coding sequence
  source 1..8132: mol_type = other DNA
atgtctgataagatgagttcttttttgcacatcggggacatttgctccctctatgccgaaggctccactaatggatttatatccacgttggggctggtggacgacaggtgcgtcgttcagccagaaacaggggacctgaataatccacccaagaaattcagagactgtttgtttaaattgtgtccaatgaatcgctactcggcacagaagcaattctggaaagcagccaaacccggtgccaactctacaaccgacgccgtcctgttaaataaattacatcacgcagccgatctggaaaaaaagcagaatgaaactgaaaacagaaagttattggggactgtgatccaatacggcaatgtgatccaacttctgcacctgaagtcaaataagtacttgacagtcaacaagcgcttaccagcacttttggagaaaaacgcaatgcgcgtgaccttagatgaagctgggaatgaaggcagctggttctatattcagcccttctataagttgcggtcaatcggggactcagtcgtgatcggggacaaggtggtgctgaaccccgtcaacgcaggtcagcctctgcacgcttcctcacaccagctggttgataatccgggatgtaatgaagtcaatagcgttaattgtaatacgtcttggaaaattgtcctgtttatgaaatggagcgacaacaaggacgatatcttgaagggcggagacgtggtcagactctttcatgccgaacaggaaaaattcttgacctgcgatgaacacagaaagaagcaacacgtctttctgagaacaactggccgacagtccgccacctctgccacctctagtaaagcgctatgggaagtggaggtggttcagcatgatccctgtagaggaggtgcgggatactggaacagcctgtttcggtttaaacacttagccacgggccattatcttgccgctgaagtggacccagacttcgaggaggaatgcttggagtttcaaccaagtgtggaccccgatcaggatgcttctcggagtcgactgaggaacgcacaggagaagatggtctacagtcttgttagcgttccagaaggaaacgacatcagttccatttttgaattagaccccaccacacttcgaggcggagacagcctggtgcccaggaattcctatgtgcgcctccgacatttgtgtactaatacttgggtccactccaccaacatccccattgacaaggaggaggagaagccggttatgctgaagattggcacttcgcctgtgaaagaggataaggaggcctttgctatcgtccctgtgtcccctgctgaagtcagagacttagatttcgcaaatgatgccagcaaggtcctcggatcaattgctggtaagttggagaagggaacgattacacagaatgagcgcagaagcgtaaccaagctgttggaggatttagtatacttcgtaactggcggaactaattccggacaggatgtgcttgaggtggtgttcagcaaacccaatagggagcgccagaagcttatgcgggagcaaaacatcctaaaacagatcttcaaattactgcaagcgccttttactgattgcggagatggtcctatgctccggctggaagagttaggtgatcagcggcacgcccctttcagacatatctgccggctttgttacagggtgttgagacatagtcagcaggactatcgtaaaaaccaggagtatatagccaagcagttcggcttcatgcagaagcagatcggatatgatgtgctcgctgaggataccatcacagccctccttcataataatcggaagttactggagaagcacattacagcagccgagatcgacacgttcgtttctctggtgcggaagaatagggaaccgcgatttttggactacttgtccgatctgtgtgtgagtatgaacaagagcattcctgtgacccaggagctgatttgtaaagctgtgctcaatccgacaaacgcggacattttgatagagactaagctcgtcctcagcaggtttgagttcgagggggtcagttccacaggggagaacgcccttgaagccggtgaggatgaggaggaagtctggctgttttggagagattccaacaaggaaattcggagtaagagtgtaagagaactggcccaagacgccaaagaaggccaaaaggaggatcgcgacgtcttgtcttattacagataccaattaaatctgtttgctcgtatgtgtctggacagacagtacctggccatcaatgaaatctccggacagctcgacgtcgacctgatccttcgatgtatgtctgacgagaatctgccttacgatctgcgcgctagcttctgtcgactaatgctccacatgcacgttgatcgtgacccacaggagcaggtgacacctgtaaagtacgcacggctgtggtctgaaattccctctgagatcgccattgacgattatgattccagtggggcttcaaaggacgagatcaaggagcgcttcgcccagaccatggaattcgtggaggaatatttacgcgacgtcgtgtgtcagcgcttcccattcagcgataaggagaagaataagctaacctttgaggtggtcaacctcgctcggaatctgatctacttcggattttacaatttttccgacctgttaagactgactaagatactgctagccattctggattgcgtgcatgtcactacaatctttccaattagcaaaatggccaagggggaagaaaataagggtagcaatgttatgagatcaatccacggtgttggcgagctgatgacgcaagtggtactgagagggggaggattcctccccatgactcccatggcagcagccccagaggggaacgtgaaacaggccgagcctgagaaggaagatatcatggtgatggataccaaactcaaaatcattgagattttacagtttatccttaatgtgagactggactacaggatatcctgtctgctctgcattttcaaaagggagtttgacgagtccaactctcagacttcagagactagttctggcaattcaagccaagagggacctagcaacgttcccggtgccttggatttcgagcacatcgaagagcaggctgaaggcattttcggagggagaaaggaaaacacgcctctggatctcgatgatcatggcggaagaacttttctgagagtcctgctccacctcacaatgcacgattaccctcctttggtgtcaggagccttgcaactcctatttaggcacttctcacagaggcaggaagtgctccaggctttcaaacaggtgcaactgctggttacttcgcaggacgtggataactataaacagataaagcaggacttggatcagctccgctcaattgtcgaaaaatccgaactttgggtctataaagggcagggacccgatgaaacaatggatggtgcttctggagagaatgaacacaaaaaaaccgaggaggggaacaacaaaccacaaaagcatgagagcactagttcctacaattatcgggtagtgaaagagattctgatacggctatccaagttatgcgtgcaggagagcgcgagcgtgagaaaaagccggaagcagcaacagcgcctgctaagaaacatgggcgcacatgctgtagttttagaactcctgcaaatcccgtatgagaaggccgaagatacgaaaatgcaggaaatcatgaggcttgcgcacgagttcctccaaaatttttgcgccggtaaccagcagaatcaggccctgctccacaaacatataaatctttttctgaacccaggcatccttgaggctgttacaatgcaacacatcttcatgaacaacttccagctgtgctctgaaattaatgaaagggttgtccagcatttcgtccactgcatcgagacgcatggtcgcaatgtgcagtacattaaattcttgcagaccatagtaaaggcagagggaaaattcatcaagaagtgccaagatatggtgatggcagaactcgtgaacagtggggaggacgtgttggtcttctataacgatagagcctctttccagacccttatacaaatgatgcgatctgaacgcgacaggatggatgagaactccccattgatgtaccacatccacctggtggagttgctggcagtctgcacagaggggaagaacgtgtacactgagattaagtgcaatagtctgttgccacttgacgacatagttcgcgtcgtcactcacgaggattgcatcccggaggtgaagattgcttatatcaactttctgaatcactgttacgtcgacactgaggtcgagatgaaagagatctatacatccaaccacatgtggaagctgttcgaaaacttcctggtggacatttgcagagcgtgtaacaatacttccgacaggaagcacgccgactctattttagaaaaatatgtaactgagatcgtgatgagcatagtgactaccttcttcagttctccttttagcgatcaatcaaccacactgcagacacggcagccagtattcgttcagttgttgcagggagttttcagggtttaccattgcaattggctgatgcctagtcaaaaggcatccgtggagtcgtgtattagagtcctgagcgacgtggccaaaagtagggccattgccattcctgtcgatctggactcccaagtcaataacctgttcttaaaatcccacagcatcgtgcagaagacagccatgaattggcgacttagtgcgagaaatgccgcacgtcgcgactccgtcctggcggcatctcgggactaccgtaatatcattgaacgcctgcaggacattgtctcagcactcgaggaccggctcagacccctggtccaggccgaactgtctgtcctggtggacgttcttcaccgcccagaactgctgtttcctgaaaatactgacgcacggagaaagtgtgagtcaggtggcttcatttgcaagctgattaagcacaccaaacagctcctagaagagaacgaagagaagctatgcattaaggtgttgcagactctcagggagatgatgacaaaagaccggggatacggagagaagggagaggcccttagacaagtgcttgtgaacaggtattatggcaacgtccgtccttcaggtcgccgtgagtcacttacatcgttcggaaacgggccactttcagctggtgggccaggcaagcctggaggaggtggtgggggttctggctcctcttcaatgtcacgcggagagatgtcgctggccgaggtacagtgccatctggacaaggagggggcaagcaacctcgttatagacctgattatgaatgcctctagcgaccgagtctttcacgagtccattttacttgctattgctctgctcgagggcggtaacaccacaatccagcatagcttcttttgtcgcctcaccgaggataaaaagtccgagaagttcttcaaggtattttatgataggatgaaagttgcacagcaggagataaaggcaacagtgacagtcaataccagtgacctaggcaacaagaagaaagatgatgaggtggacagagatgctccctcccgcaaaaaagctaaagaacccaccacgcaaatcactgaggaggtgagagaccaactgctggaagcctctgcggctacgcgaaaggcctttactactttccgacgtgaggccgatccagacgaccactatcagccaggagaagggacccaggccacagctgacaaagctaaagatgatctcgaaatgagcgccgtcattaccatcatgcaaccgattttgcgctttctgcaactactctgtgagaatcataatcgggacctccaaaactttctgcgttgtcagaacaataagactaattacaacttagtgtgcgagaccctgcagttcctcgactgtatctgcggctcaaccactggtggtcttggtctgctgggcctgtacatcaatgaaaagaacgttgctctgatcaaccagactctggagtctctgacggagtactgtcagggaccctgtcacgagaaccagaactgcattgcaactcatgaaagtaacggaatcgacatcatcaccgcattgatcctgaatgacattaacccacttgggaaaaagcgcatggatctcgttctcgaactaaaaaacaacgcgagtaagctcttgctggccataatggaaagccgtcacgatagcgaaaacgctgaacgtatattgtacaatatgaggccgaaagaactggtcgaggtgatcaagaaggcttacatgcagggagaggtggaattcgaagatggtgagaatggtgaggacggcgctgccagccccaggaacgttggacacaatatttatatcttagcccaccagctcgcccgtcacaataaggagctgcaatcgatgctcaaaccaggcggacaagtggacggagacgaagcactcgagttttatgccaagcataccgcccagattgagatcgttaggctggaccgcaccatggagcagatagtctttcccgtaccctctatctgcgaatttcttaccaaagaatctaagctgcggatttactacacaaccgaaagggatgaacaaggatctaagattaacgacttctttctccgctctgaggatttattcaacgagatgaattggcaaaagaagctcagggcgcagccggtattgtattggtgtgccaggaacatgagcttctggtctagtatctctttcaatctggctgtgctgatgaacctcctggttgccttcttttaccccttcaagggcgtgcggggtgggacattggagccccactggagtggcctcctgtggaccgccatgctgattagccttgccatagtcattgcgttgcctaaaccccacgggatcagggcgttgattgcgtcaacaattctgagattaatcttttccgtcgggctccagccaactctgtttctgttaggtgcatttaacgtgtgcaataaaatcatttttctgatgtccttcgtaggaaactgtggaacatttaccagaggctaccgggcaatggttttggacgtcgagtttctgtatcacctgttatacttggtaatctgcgctatgggcctttttgttcacgaatttttctactccctgctgctgtttgacctggtgtatcgcgaagaaaccctgttgaatgtgattaaatccgtgacgcgtaatggacgttcaataattttgaccgcagtgctcgccctgatcctcgtttatctgttttctattgtaggctacctattcttcaaggatgacttcatcctcgaggtggatcgcctgcccaacgagactgccgtgcccgagaccggcgaaagcttggcaagcgagttcctgttcagcgatgtgtgtagggtcgagtcaggcgaaaattgctcctcacccgctcctagggaggaactcgttcctgccgaggagacggagcaggacaaggaacatacgtgcgagacgttgctaatgtgtatcgtgaccgtcttgtcccatggcctgaggtccggaggtggggtgggggacgtcctgagaaaaccatccaaggaagagccattgttcgccgctcgcgtgatttatgacctgttattcttctttatggttatcattattgtcctgaatctgattttcggggtcatcatagatacatttgctgatcttcgcagcgaaaaacagaaaaaggaagaaatcctgaaaactacctgcttcatctgtggcctggagcgggataagtttgataataaaaccgtgacattcgaagaacatatcaaggaggaacacaacatgtggcattatctttgttttatagtgctggtcaaagtaaaagactccacagaatacacggggcctgaaagctacgtggcggagatgattaaagagcgcaatttagattggtttcccaggatgcgggctatgagcttggtatccagcgattcagaaggggagcaaaacgagcttcggaacctacaggagaagctcgaaagcactatgaaactggtcaccaacttgtccggccaactgagcgagttaaaggatcagatgaccgagcagcggaaacagaaacagcggattgggctgctggggcaccccccacacatgaacgttaacccccagcaaccagcata

SEQ ID NO: 226789 - DNA, 3615 bp, synthetic construct
  misc_feature 1..3615: note = Description of Artificial Sequence: Synthetic coding sequence
  source 1..3615: mol_type = other DNA
caggaaccaggccattgccattccaggggtccaggccagcctagccagcagccactctcacaagttcctcagcactgtgcggaagctatgaactggaggctgtcggctcgcaacgccgcacgcagggactctgtgctagctgcatcaagggactacaggaacatcatcgagcgcctccaggatatcgtgtccgctctcgaagaccggctccgaccgctggtacaggcagagctcagtgttttggtcgacgtgcttcatcggcctgaacttctttttcccgaaaataccgatgctcggaggaagtgcgagtcggggggttttatttgcaaactgatcaagcataccaagcaacttttggaagagaacgaagagaagctctgtattaaggtcctgcagaccttaagggagatgatgactaaagacaggggctatggcgaaaagcttatctcaattgacgagctcgataacgcagaactgccaccagcaccagactctgagaacgccacagaagagcttgagccctccccacccctgcgtcagttggaagatcacaaacgaggcgaggcccttcggcaggtcctggttaacagatattacggaaatgtaaggccgagtggcaggcgagagagcttgacctcatttggcaatggtcccctctcagctggcggtcctggtaaaccagggggaggaggagggggatccggttcatcctccatgagccgtggggagatgtcactggcagaggtgcaatgccacctagataaggagggggcaagcaacctggtgatcgaccttatcatgaatgcatccagtgaccgcgtgtttcacgaaagtatcctcctcgcgatcgctctccttgaaggaggaaacaccactatccagcactcttttttctgccgcctcacagaagacaagaaatcggagaaattttttaaggtgttctatgacagaatgaaagtggctcagcaggagataaaggctaccgtgaccgtaaatactagtgaccttggcaacaagaaaaaagatgacgaagttgatagggatgctcccagccgtaaaaaagcaaaggaacctaccactcagattactgaggaagtaagagaccagctccttgaggccagcgctgcgactaggaaggccttcactacttttcggagggaggctgacccggatgaccattaccagccgggtgagggaacacaggccaccgcggataaagctaaggacgaccttgagatgtccgcagtgatcacaattatgcaacccatcctgaggtttttacagttgttatgcgaaaaccataatcgcgatctccagaattttctgcggtgtcagaacaataaaaccaactacaatttggtgtgcgagactctccagtttcttgactgcatatgcggaagtacaacaggtggactcggcctacttggactttacattaacgagaagaatgtggccttgatcaatcaaaccttggagtcactcacagagtactgccagggaccgtgccatgagaatcaaaattgtatcgccactcatgaaagcaacggaattgatatcatcactgcactcattctgaatgatatcaaccccctcgggaaaaagagaatggacctggtcctggagttgaaaaacaatgcctctaaacttctgcttgcaatcatggaaagcagacatgattccgaaaacgccgagcgtatcctgtacaacatgcgacctaaggagctggtggaggtgattaaaaaggcttacatgcagggcgaggtggaattcgaagacggcgaaaacggggaagatggagcagcttctccacgcaacgtgggacacaacatctacatcctcgcgcatcaattggcacgccacaataaagagctccagtcaatgctcaaacccggaggccaggtcgacggggacgaggctctcgaattttacgcgaagcataccgcccagattgagatcgtacgattggatcgcacaatggagcaaatcgtgttcccagtaccttctatttgcgagttcctgaccaaagagagtaaactgcgcatttactataccacagagcgcgatgagcagggctccaagatcaacgatttcttcctgagatcagaggatttgttcaacgaaatgaattggcagaaaaagctgcgcgcacagcccgtactgtattggtgcgccagaaacatgtccttttggtcttcaatctcttttaatttggccgttctgatgaatctactcgtcgcctttttctaccccttcaaaggagtgagaggtgggacgctcgaaccccattggagcgggctgctgtggacagctatgttgatttccctggccattgtaatcgctctgccaaaaccacacggcattcgggcactgatcgcttcaaccatcttaagattgatcttttcagtcgggttacagcctacactattcctcctcggggctttcaacgtgtgtaataaaattattttcctcatgagctttgtgggtaattgcggtacctttactaggggttacagggccatggtattggatgtggagtttttatatcacctgctgtacctcgttatctgcgcaatggggttatttgtgcacgagttcttctacagtctgctcttgttcgacttggtgtacagggaggagactcttctaaatgtcatcaagtctgttaccaggaacggtcgatctattatccttaccgctgtgctcgcactgattctggtgtatctgttttctatagtgggctatctgtttttcaaggacgacttcatcttggaggtggacaggttacccaatgagaccgcggtgcctgaaacaggcgaaagcctagcttccgagttcctattcagtgacgtctgccgtgtcgagtctggcgagaattgctcatcccctgctcctagggaagagctggtaccagcagaagagaccgagcaggacaaagagcatacatgtgagactctgctaatgtgtatagtgaccgtgctttctcatggccttagaagcggcggtggagtcggcgatgtgttaagaaaaccatccaaggaagagccgctgtttgcagccagagttatctatgacctcctgtttttctttatggtcattatcatcgtgcttaacctaatcttcggcgtgattatcgatacttttgccgacctgcgaagcgagaaacagaagaaggaagagatccttaagactacatgcttcatctgtgggctggagcgcgataagttcgataataagaccgtgacattcgaggaacacataaaagaggaacataatatgtggcactacttgtgcttcatcgtactcgttaaagtgaaggactctactgagtacactggtcctgaaagttacgtcgcggaaatgatcaaagagcggaacctggactggtttccccgtatgagagcaatgagtctggtgtcaagcgactctgaaggcgagcaaaatgagttgcggaatttgcaggagaagctcgagtccaccatgaagctggtaacgaatttaagcggccaactaagtgaactgaaggaccagatgaccgagcagaggaaacaaaaacaaagaatcgggctgctcggccacccaccacacatgaacgttaatcctcagcagccagcttag

SEQ ID NO: 226790 - DNA, 8231 bp, synthetic construct
  misc_feature 1..8231: note = Description of Artificial Sequence: Synthetic coding sequence
  source 1..8231: mol_type = other DNA
atgagcgacaaaatgagctccttcctccacataggcgatatttgctccctttacgccgaaggtagcaccaacggatttatttcgactttgggcctggtggacgacaggtgtgtagtgcagcccgaaaccggagacctgaacaatcctcccaaaaaattccgcgactgtctctttaagctttgcccaatgaaccggtatagcgctcagaagcagttctggaaggctgcaaagcccggagccaattccactacggatgccgtgcttctcaataagctacaccatgccgctgatctcgagaagaagcaaaatgaaactgagaacagaaagctgctcggtaccgttatccagtacgggaacgtcatacagctgttgcacctgaagtcgaacaagtatctgacagtgaataagcgactgcctgcactcctcgagaaaaatgcaatgcgcgtcactcttgatgaggccggaaacgaaggatcttggttttatattcagccgttttataagctgagaagtatcggggattccgtcgtgatcggggacaaggtggtgctgaatccagttaacgctggccagcctcttcacgcatcttcacaccaattagtggacaacccaggctgtaacgaagttaacagtgtcaattgcaacacaagttggaaaatcgtgctcttcatgaagtggtccgacaacaaagacgacatactgaagggcggagatgtggtccgcttgtttcacgcagaacaggagaagtttcttacctgtgatgaacaccgtaagaaacagcacgtgtttctgcgcacaacagggagacaatctgccactagcgcgacttctagcaaggcactgtgggaagttgaggtggtgcagcacgacccgtgtaggggcggagccggttactggaatagcctgtttaggttcaagcacctcgccactggacattatctggccgcagaagtagacccagaccaagacgcctctagaagccgcctccgaaacgcccaagaaaagatggtgtacagtctggtctccgtccccgagggcaacgacatttcttctatattcgaactggacccaaccactctgcgcggtggcgactcgctcgtgccaagaaactcctacgtgcgtctccggcacctgtgtacaaatacgtgggtacactccacgaacatcccaatagacaaagaagaagaaaagccagtgatgctgaagatcggaacatcacctgtgaaggaagacaaggaagccttcgcaattgtgcctgtgtcccctgcagaagtgagagatcttgacttcgcaaacgatgcaagcaaggtgttaggctccatagccggtaaactggagaaaggaacaattacgcagaatgaacggaggagtgtcaccaagctgcttgaggatctagtgtacttcgtgactggcggaacaaattccggtcaagatgtcttagaggtggtgtttagtaagcctaatcgcgaacgccagaaactgatgcgagaacagaatatccttaaacagatctttaaactgctgcaggctcctttcaccgactgtggagacggccctatgctccgcctggaggagttgggggatcagagacatgccccattccgacatatttgccggctctgttacagagtgttgaggcatagtcagcaggattaccgaaaaaaccaggagtatatcgcaaaacagttcggattcatgcagaagcagattggctacgacgtgctcgccgaagatacaatcaccgctctgcttcataataatcggaagctgctggagaagcacattaccgccgcagagattgacacgttcgtgtcgctggtgcgtaagaaccgagagcctcggttcttggattacttgtccgacctttgtgtgtcaatgaacaaatccatacctgtaacgcaggagctaatctgtaaggcagtcctaaatccgacaaatgctgacatcttaatcgagacaaaactcgtgctaagccgatttgagtttgagggtgtttcctctaccggggagaatgcattggaggccggagaagacgaagaggaggtgtggctgttctggcgcgacagtaacaaagagatccggtcaaaatctgtgagggagctggctcaggacgccaaagaaggacagaaagaagacagggacgtgctgtcttattaccgttaccagttgaatctgttcgcccgaatgtgcctggaccgccagtatttggccattaacgaaatcagcggccagctcgacgtggatcttattctcagatgtatgtccgacgagaacctgccttatgacttgcgggcatcgttttgtcggctcatgctgcatatgcacgttgacagggacccacaggagcaggtgactcccgtgaagtatgctcggctttggtctgaaattccctccgaaatcgccattgacgattacgacagttcaggggcatccaaggatgaaatcaaggaaaggttcgcccagacgatggagtttgttgaagaatatctgcgggacgttgtatgtcagcggtttcccttctctgataaagagaaaaataagttgacattcgaagtcgtgaaccttgccaggaacctgatctactttgggttttataacttcagtgacctgctacggttaaccaaaatactgctcgccatacttgattgcgttcacgttacaaccatctttcccatatcgaaaatggctaaaggggaagagaacaaaggcaacaatgacgtggaaaaactgaagagtagtaacgtgatgcggtctatacacggcgtgggcgagcttatgacccaggtcgtattgcgaggcggaggttttcttccgatgactcctatggcggcagctcccgaaggcaatgtcaagcaagccgagccagaaaaagaggacatcatggtgatggataccaagctgaagattattgagattctgcagttcatattgaacgtaaggcttgactatcgcatatcatgtctgctgtgcatcttcaagagggagttcgatgagagcaatagtcagactagtgagacttcttcaggcaactcttcccaggaaggacctagtaatgtgcctggggcacttgactttgagcatatcgaggagcaggcagaaggcatctttggcggatccgaagagaataccccgcttgacctcgatgatcacggaggtaggacttttctccgcgtgctgctccacctcacaatgcacgattacccacccctggtctcaggtgcactgcagctcctttttaggcatttctcccagcgccaggaggtcctgcaggcttttaagcaagtacagttgctcgtaacatcacaggatgtggacaattataagcagatcaagcaagaccttgaccagttgcgtagcattgtggaaaagagtgagttatgggtctataaggggcagggccctgatgagactatggacggagcaagcggggagaacgaacataagaagaccgaagagggaaataataagccccagaaacatgagagtacttctagttataactacagagtagtgaaagagatccttatcaggctgtctaagctttgtgtccaggaatcagcgagtgtgagaaaatccagaaagcagcagcagcgattgctgcgcaatatgggtgctcatgcagtcgtgttggagctactccagataccttatgaaaaggccgaggacacgaagatgcaggaaattatgaggctcgcgcatgaattcctccaaaatttttgtgctggaaatcagcagaaccaggcactgctccacaaacacattaacctttttctcaaccccggtatcctggaggccgtcaccatgcaacatatctttatgaataacttccagctgtgtagcgagattaatgaacgtgtggtacagcactttgttcactgcattgagacccacgggcgaaacgtgcagtacattaagtttctgcagaccattgtgaaagctgagggcaagtttatcaaaaagtgccaggatatggtaatggccgaattagttaactccggcgaggacgtcctggtgttctataacgatcgggcatccttccagactttaattcagatgatgcggagcgaaagagaccggatggacgaaaacagcccgctcatgtatcacatccacctcgttgaattgctagctgtatgtacagaaggcaagaatgtgtataccgaaataaagtgcaactcgttacttccactagatgacattgtgcgtgttgtaactcacgaagattgtattccggaagtgaagatcgcatatattaacttcctgaatcattgctacgtcgacactgaagtcgagatgaaagaaatttacaccagcaatcatatgtggaaacttttcgagaactttctggtggatatttgtcgggcatgcaacaatacatctgatagaaaacacgcggattccattctggagaagtacgtgaccgagatcgttatgtccattgtaacaacttttttcagctctcctttctcagatcaatccaccacattacaaactcgccaacctgtgttcgtgcagctgctgcagggcgttttcagagtgtaccactgcaactggcttatgcccagtcaaaaagcctccgtggaaagctgcatccgcgtgctttctgatgtggcaaaaagtagggctattgcaatccccgttgatctggactctcaagtgaacaacttatttctgaaatcacatagtatagtccagaagaccgctatgaactggagattaagcgcaaggaatgccgctcgacgggactctgtacttgccgcaagccgcgattataggaacattatcgagcgccttcaggacattgtgtccgccctggaggacaggcttaggcccttggtgcaggctgagttgagcgtgctggtggatgtcttgcatcggccagagctattgtttccagagaacaccgacgctaggaggaaatgtgagagcgggggatttatttgcaagctaatcaaacacactaagcagctgcttgaggaaaatgaagagaagctttgtatcaaggtcttacaaacactccgagagatgatgaccaaagaccggggatatggagaaaaactaatatcaattgacgaactcgacaacgcagaactcccacccgcacccgattccgagaatgcaaccgaggagctcgaaccctctcctcccctgcggcagctcgaggaccataaacgaggagaagctcttcggcaggttcttgttaaccgatactacggcaacgttaggccatccggcagacgagaaagcttgacttctttcggaaacggacccttgtccgcgggtggcccaggcaaaccaggtggaggcggtggaggcagtggatcctctagcatgtcgcgcggtgagatgtccctcgcagaggtgcagtgccacctcgacaaggagggagcctctaacctagtcatagacctaattatgaacgcaagtagtgaccgcgttttccacgagagcatcctgctggccatcgcattgctcgagggaggcaatactaccatccagcatagctttttttgccgcctcactgaggataagaaatccgaaaaatttttcaaggtattctacgataggatgaaagtagctcagcaggagatcaaggccacggtaacagtgaatacaagcgatctcggcaataaaaaaaaggacgacgaggtggaccgggacgctccctctcgcaagaaagccaaggagccaacaacccagataactgaagaagtgagggaccagctgctggaagcctccgccgctacaagaaaggcattcactactttcagaagagaagctgaccccgacgaccactatcagcctggagaggggacccaggccacagcggacaaggcaaaggatgacctggagatgagcgccgttatcaccatcatgcagcccatcctgcggttcctgcagctcctttgcgagaaccacaaccgcgatctgcagaattttctgcgctgtcagaacaataaaacgaactataacctggtgtgcgagaccctccagtttcttgattgcatatgcggcagcactactggcggactaggtctgctgggtctgtacatcaatgagaaaaacgtggcactcattaatcaaacactggagtctctgacggagtactgccagggcccatgccatgaaaatcagaattgcatcgctacacatgagtccaacggcatcgacataatcacagcccttatcctcaatgatatcaatcccctcggtaagaagcgaatggatctagtattggaactgaaaaacaacgcaagtaaactattgctggcaattatggagtcgaggcacgactcggagaacgccgaacgtatcttgtacaacatgcgcccaaaggaactggtagaagttattaagaaggcctacatgcagggagaagtggaattcgaagatggcgaaaacggtgaagatggcgcagcttccccgagaaacgttggtcacaatatctatatcctcgcacaccagctggctaggcacaataaggagctgcaatccatgctgaaaccaggcggacaggtggatggcgacgaggctttggagttttatgccaagcatactgctcagattgaaatagtacgcctggatcggactatggaacagatcgtattccctgttccctctatttgcgagtttcttacaaaagagagcaagcttaggatctactacaccactgagcgcgatgagcagggttcaaagatcaatgacttctttcttcgcagcgaagatcttttcaacgaaatgaattggcaaaaaaagttgagggctcagcccgtgctgtactggtgtgccagaaatatgtctttctggagctccatctctttcaatcttgccgtgctgatgaacctgctggtggccttcttctaccctttcaaaggggtgagagggggaaccctggagcctcactggtccggattattgtggaccgccatgttgatttccctggctattgtgatcgcccttcctaagccgcacgggattcgagctttaatagctagtacaatattacgcctgatcttttccgtcggactgcaacctacccttttcctgctgggtgcgtttaatgtgtgtaataagattatattcctgatgtctttcgtgggtaattgtggtacatttactcggggttatcgtgccatggtcttggatgtggagttcttgtaccacctgttatatctggtaatttgtgcaatgggcctcttcgtccatgagttcttctactctctgctgctgttcgatttggtctacagagaggagaccttgctcaatgtgatcaagagtgtgacacggaacggcagaagcattatattaaccgcagtgctagccctgatcctggtgtacctgttttctatagtgggctacctgttttttaaagatgatttcatcctagaagtagatcgcttgccgaatgagactgcagtgcctgagaccggggagagccttgcttccgaatttctgttttccgatgtgtgtcgcgtggaatcgggggagaattgttcgtctcctgcccctcgcgaagagctggtgcctgccgaggaaaccgagcaggacaaggagcatacctgtgaaactctgctcatgtgtatcgtcacagtcttaagccatgggctgcggagtgggggtggtgtaggagatgtgttgagaaaaccctcaaaggaggaaccgctgttcgcagccagggtgatatatgacctcctctttttttttatggtcatcatcattgtacttaatctgatctttggagtgatcattgatacatttgccgatcttcggtccgagaaacaaaaaaaggaggagatcctcaaaactacatgtttcatctgtggcctggaacgcgacaagttcgataataaaacagttaccttcgaggagcatatcaaagaagagcacaatatgtggcactatctgtgcttcattgtgctagttaaagtgaaagactccacagaatacaccgggccagagtcctatgtagcagaaatgattaaagaaaggaatttagattggtttccaaggatgcgagcaatgtcgctcgtgagtagcgatagtgagggggagcagaatgaattacgtaacctccaggaaaagctggagtctactatgaagctagtgacgaacctgtccggtcagttatctgaactcaaggatcagatgacagagcagaggaagcagaaacaacgcataggcctccttggtcaccctccacacatgaatgtgaacccccagcagccggcata

SEQ ID NO: 226791 - DNA, 8087 bp, synthetic construct
  misc_feature 1..8087: note = Description of Artificial Sequence: Synthetic coding sequence
  source 1..8087: mol_type = other DNA
atgtccgacaagatgtcaagctttctgcacattggggatatttgtagcttgtacgccgaggggtccactaacggattcatctcgacactgggtctggtggacgaccggtgcgtggtgcagcccgaaaccggtgatttgaacaacccccctaagaaatttcgggactgcctgttcaagctctgccctatgaataggtattctgctcagaaacagttctggaaggcagccaagcccggtgccaacagtacaaccgatgcggtgttactgaacaagctacaccatgctgccgacctcgagaaaaaacagaacgaaacagaaaaccgcaagttgttaggcacagtgatccaatatgggaatgtgattcagttacttcacttaaagtccaataagtatctgacagtcaacaagaggctacccgcactcctggaaaaaaatgccatgagggtgactctggatgaagccggaaatgaaggaagttggttttacatacagccattctacaaactgcgatccattggagattcagtcgtgatcggcgataaagtggtgctaaatcctgtgaatgcaggtcagccccttcacgcatcctcccatcagctggttgacaaccctggttgtaacgaggtcaactctgttaattgtaacacatcctggaaaatcgtgctgtttatgaaatggtccgataataaggacgatatcctgaaaggcggtgatgtggtgagactgttccacgcagaacaagagaagttcctgacgtgtgacgagcataggaagaaacaacatgtgtttctccgaaccacagggaggcagagcgcgacctccgcaacaagctccaaagccctctgggaggtggaggtagtgcagcacgacccatgccgcggaggagctgggtattggaatagccttttccggttcaagcacctcgccacggggcattatctagcagctgaagtagatcccgaccaggacgcgagtcggagccgtctgcgtaatgcgcaagagaagatggtttattcacttgtcagtgtccctgagggcaatgacattagttccatattcgagctcgaccccactactctgagagggggagactccctcgtccccagaaatagctacgttcggttaaggcacctgtgcacgaacacttgggtccactcgaccaacattcccatagataaagaagaagagaagcccgttatgctgaagataggcacttctcccgttaaggaggacaaggaggccttcgcaatcgtacccgtcagccccgcagaagtccgcgatctggactttgctaacgatgccagcaaagtgcttgggagtatagccggtaagctcgagaaagggacaattacccagaacgagaggcgaagtgttaccaaactgcttgaagacttggtctactttgttactgggggaacaaactccggccaggatgtgttggaagtcgtgttctccaagcccaatagagaacgccagaaactgatgcgcgagcagaacatactgaagcagatcttcaagttgctgcaggcaccgttcactgactgcggcgatgggccaatgctccgcctcgaggagctcggggatcagagacatgctcccttcagacatatctgccgtctgtgctacagggttctgaggcattcccagcaggattaccggaaaaatcaggaatatatcgccaaacagtttggttttatgcagaagcagataggttacgacgtcctcgctgaggacacgattactgccctcttgcacaataatagaaaactcctcgagaagcacatcacggctgccgagatagacacctttgtctccctggtccggaagaacagagaaccccgtttcttagattacctttcagacttgtgtgttagcatgaacaaatctataccggttactcaagaactcatctgcaaggccgtccttaacccaaccaacgccgacattctgatcgagactaagcttgtgctctcccgcttcgagtttgagggagtttcttcaactggcgaaaacgcactcgaggccggtgaagatgaggaggaggtgtggttgttctggcgggacagtaataaagaaatccgcagcaaaagcgttagagagctcgcccaagatgccaaagaaggtcagaaggaagaccgggacgttctgtcttactaccgctatcagctcaacctatttgcccgaatgtgtctcgacaggcagtatctagccattaacgagatcagtgggcagctggacgtcgatctcatccttcgatgcatgtctgacgagaaccttccctacgacctgagggcctccttttgtcgcctcatgttacacatgcacgttgacagagatcctcaagaacaggtgacacctgtgaaatacgcgaggctttggtccgagattcctagtgagatcgccatagacgactatgactctagtggcgcaagtaaggacgagataaaggaacgctttgcgcaaacaatggagttcgtagaggaatacctacgggacgtggtgtgccagcggtttccattttcggacaaagagaaaaacaagctgacctttgaggtcgttaacctcgctcggaaccttatctatttcgggttttataacttctctgatttactccgacttaccaagatcctgctggccattctcgactgcgttcacgtgacaacgatattcccgataagcaaaatggctaagggagaggagaacaaggggtctaacgtgatgcgatctatccacggagtgggcgagctgatgacgcaggtagttttaagggggggtgggtttttgcccatgaccccgatggccgctgctcctgaaggaaacgtgaagcaggccgagcctgaaaaggaggacattatggtgatggacacgaaactgaaaataatcgaaattctacagtttattctgaatgtcagactcgactatagaattagttgcctgctttgcattttcaaaagagaatttgatgaaagcaactcccagacttccgaaactagtagcggaaactcttcccaggagggtccatcgaacgtgcccggagccctcgactttgaacacatcgaggaacaagccgaaggaatctttggtggatcagaggagaatactccactcgacttggacgatcacggtggtcgaacctttcttagggtgcttctgcacttgaccatgcatgactaccctcctcttgtttctggtgctctccagctgcttttccgtcatttttcccaaaggcaagaagtcctccaggcctttaagcaggtgcaacttctggtcacttcacaagacgtagataattacaaacaaatcaaacaggatttggatcaactgaggtcgattgtggagaaaagtgaactctgggtctataaaggccagggccctgacgagaccatggatggggcttcaggagagaatgaacataagaaaaccgaggagggcaacaacaaaccacagaagcatgagtccacctcgagttataattatagggtggtcaaagagatactcatccgattgtctaagctctgtgtgcaggagagcgcgtccgtgcgtaagtctcgaaaacagcagcagagactgttaagaaacatgggggctcacgcggtcgtcctggagttacttcagattccctatgaaaaggctgaagacactaagatgcaagagataatgaggcttgcacacgagttcctccaaaatttctgtgccggtaaccagcagaaccaagcccttctgcacaaacatattaacttgttcctgaacccagggatcctggaagcggttacaatgcagcatatctttatgaataatttccaattgtgtagcgaaatcaacgaacgcgtggtgcagcactttgtgcattgcattgagacccatgggcgtaatgtccaatatattaaatttttgcagacgattgtgaaggctgagggcaagtttatcaagaaatgtcaagatatggtgatggccgaacttgtgaacagcggcgaggacgtgttggtgttctacaacgatagagcctccttccaaaccctgattcagatgatgcgatcagagagggacaggatggatgagaacagtcctctgatgtaccacatccacctcgttgagctcctggccgtgtgtactgagggcaagaacgtgtacacagaaattaaatgcaattcactcttgcccctagacgatatagttagagtggtaacacacgaagattgtatccctgaagtcaaaattgcttatattaacttcctgaatcattgttatgtcgataccgaagtggaaatgaaggagatctacacctctaaccacatgtggaagctgttcgagaacttccttgtcgacatttgtcgtgcttgcaataacacaagcgacagaaaacacgccgatagcatcctcgagaaatatgtaaccgagatcgtgatgtccatagtaacaacctttttttcttccccgtttagtgaccagtctactacgcttcagaccaggcaaccagtatttgtccagcttcttcaaggagtgtttcgggtgtatcattgcaactggctcatgccaagccagaaggcaagcgtggagagttgtatcagagtgctgtcagatgttgcaaagtctcgggctattgctatccccgtagatctggattcccaggtaaacaatctgtttctcaagagccatagcattgtccaaaagactgctatgaactggagactgtcagcgaggaacgccgcaagacgggattctgtgctggcagcctcaagagactaccggaacattatagaacggctccaggatatcgtgagtgccttggaagatcgcctgaggcccctagtgcaagcggaattgtccgtcctggtggatgtcctgcatcgacccgaattactgtttcccgagaataccgatgccaggagaaagtgtgagtcaggcggttttatctgtaagcttatcaagcacaccaaacagcttctcgaagagaatgaggaaaagctgtgcataaaagtcctacaaacactgagagagatgatgacgaaagacaggggatacggagaaaagggtgaggccctgcgacaggtgctcgtgaataggtactacggaaatgtaaggccgtctggacgaagagagtcactgacaagcttcggtaacggacctctcagcgctggagggcctgggaagcccggtgggggaggtggtggctccggatcttcgtcaatgtcaagaggggagatgtctctcgccgaagtgcagtgccatctcgacaaagaaggggcatctaatctcgtcatcgaccttattatgaacgcatcaagcgatcgagtctttcacgaaagcattttgctagccatagcactgctggagggcggaaacacaacaatccaacattccttcttttgtcggttaacagaagataaaaagtccgaaaaattctttaaggtcttctacgaccgcatgaaggttgcacagcaggagataaaagcgaccgtgactgtgaataccagcgacctggggaacaagaagaaagacgacgaagtcgacagggacgctccatcccgcaagaaagctaaggaacccaccactcagatcactgaagaagtgcgagaccagcttctcgaggctagtgctgccacacgtaaagctttcaccaccttccggagggaggcggacccggatgaccactaccagcctggagagggaactcaggctaccgcagacaaggcaaaggacgatctggaaatgtctgccgtcataaccataatgcaaccaatactgagatttttgcagctactgtgtgaaaaccataaccgcgacttgcagaatttcctgcgctgccaaaataacaaaaccaactacaatctggtatgtgagacgcttcagtttctggattgcatttgcgggtcaaccactggcggattggggctgctcggcctgtatataaatgaaaaaaacgtggctctgattaaccagacactggagtccctgacagagtattgtcagggtccttgccacgaaaaccagaactgcatcgcaacccatgaatcaaacggaattgatattatcacggccctcatattgaacgacatcaatcctttggggaagaaacgcatggacctcgtgttggagctgaagaataacgcttccaaacttttgctagctataatggaatcacgacacgacagcgagaacgctgagagaatactgtacaatatgcggccaaaggaattagtcgaagttattaaaaaggcatacatgcagggagaagtggaattcgaagacggtgagaacggtgaagacggcgctgctagtccacgcaacgtggggcacaatatttacattctggcccaccaattagccagacacaacaaggagctccaatctatgcttaagccaggaggacaggttgatggagatgaggccttggaattttacgccaagcacacagcacaaatagagattgtcagacttgacagaaccatggagcagatcgtgttccctgtccctagcatctgcgaattccttactaaagaatctaaacttcgcatttactatacaacggaacgggatgaacaggggtcaaagataaatgacttttttttgagaagtgaggatctgtttaacgaaatgaattggcaaaaaaaacttcgagcccagccagtgctttattggtgcgctcggaacatgagcttctggtcatctataagtttcaacctggctgtgttgatgaacctgctcgttgccttcttctatcctttcaagggagtgaggggcggaaccctagagccacactggtcgggccttctctggaccgcaatgctgatctccttagcgatagtgattgccttgccaaaaccacacggtataagagccttgatcgcatccacgatcttaaggcttattttttccgtggggcttcagccaacactattcctgctcggagcctttaacgtgtgtaacaaaatcattttcctcatgtcctttgtggggaattgcggcactttcactaggggttaccgcgctatggtgttagatgttgaattcttgtaccacctgctctacctggtgatctgcgcaatggggctttttgtccatgagttcttctactccctacttctgttcgacctggtgtacagagaagaaacactgctgaacgtcatcaaaagcgttactcgcaacggacggagcatcattcttactgccgtgcttgccctgatactggtctatctatttagtatagtaggctatctgttctttaaggacgactttattctggaggtcgatcggctaccgaacgaaacagcagtcccagaaacaggggagtctctagcttctgaattcctcttctctgatgtgtgcagagtagagagtggtgagaactgctcctcccccgcaccgagagaggaactggtccctgctgaagagaccgaacaggataaggagcatacctgcgaaactctgttgatgtgcatagtgactgtactcagtcatggcctgcgctccggcggtggcgtaggcgacgtgctccgaaagccttcaaaagaggagcccctcttcgccgctagagtgatttacgacttgctcttcttctttatggtgataattatagtgctgaatcttatttttggggtgattatagacacctttgcagaccttagatccgagaagcagaagaaagaagagatcctcaaaacgacgtgcttcatctgtggactggagcgggataagtttgacaacaagaccgtgactttcgaggaacacataaaagaagaacataacatgtggcattacctctgttttatcgtactagttaaggtgaaagactcaactgaatatactggccctgaaagctatgtggccgagatgataaaagaacggaatctagattggtttccccgtatgagagcgatgagtctggtgagctccgactctgagggtgaacagaacgaactcagaaacttgcaggagaagctggaatcgacaatgaagctagtaaccaacctatcggggcaactgagcgagcttaaggaccaaatgaccgaacaaagaaaacagaagcagcgcataggcctgctggggcatcccccacacatgaatgtgaacccccagcaacctgccta

SEQ ID NO: 226792 - DNA, 2166 bp, synthetic construct
  misc_feature 1..2166: note = Description of Artificial Sequence: Synthetic coding sequence
  source 1..2166: mol_type = other DNA
atgtctgataaaatgagttccttcctccatatcggagacatctgctccctttacgcggaaggaagcacgaatgggtttatctccacccttggcttggtagacgatcgctgcgtagtgcaacctgagactggcgacctgaacaatccccctaaaaagtttcgggattgtctcttcaagttatgcccaatgaatcgttactctgcccagaaacagttttggaaggcagcaaagcccggtgcgaactctacgaccgacgccgtcctcctcaacaaactccatcacgctgctgacctagagaaaaaacagaacgaaacagagaatagaaagctactgggaactgtgatccagtatggaaacgtgatacagctgctgcacctcaagagtaacaagtatctcacagtaaacaaacgcttacctgcactgctcgagaagaatgcaatgcgcgtgactctcgacgaggcagggaacgaggggtcctggttttatattcagcctttttacaagttgagatccatcggagattccgtggttatcggcgacaaagtcgtcctgaatcctgttaatgccggacagcctctgcatgccagctcccatcagcttgtggataaccctggctgcaacgaagttaacagcgtaaattgcaacaccagttggaaaattgtcctgtttatgaagtggagtgataataaggacgacattctgaaaggtggcgatgtggtgagactgtttcatgcagaacaggaaaaatttctgacctgcgatgaacacaggaagaaacagcacgtcttccttaggactacagggcgtcagtccgctacgtccgcaacctccagtaaggcactgtgggaggttgaggtagtacagcacgacccttgcagaggaggtgcaggatactggaactcactctttaggttcaaacacttggcaacaggccattatctagccgctgaagtggatcctgacttcgaggaagagtgtctggagtttcaaccctcggtgtgcaataaaataatatttcttatgagtttcgtgggaaactgtggcacttttactagaggatacagagccatggtgcttgacgtggagtttctctaccatcttctctatctggtaatatgtgctatgggtctgttcgttcacgaattcttctacagtctattactgtttgacctcgtctacagggaagaaacactcttaaacgtgatcaaatccgtgaccagaaacggccgtagcattattttgaccgctgtgctggctctcatactcgtttatctgttttcgatcgtgggttatctgttcttcaaggatgatttcatattagaagtggatcggctcccaaatgagactgcagtgcctgagacgggtgagtccttggctagtgaatttctgtttagtgatgtttgtcgcgtggaaagcggtgaaaactgctctagtcccgctcctcgcgaggagttggtgccagctgaggagaccgaacaggacaaggagcacacatgcgagactctcctgatgtgtatagtaaccgtactttctcacgggttgcggtccgggggaggagttggggacgtgcttcgcaagccctcaaaggaggaaccattatttgctgccagggtaatctatgatttgctgttcttcttcatggtcattatcatcgtcttgaatctgatatttggcgttattatcgacacgttcgctgacttgcggtctgaaaagcagaaaaaagaggagatcctgaagactacttgctttatctgcgggcttgaacgtgacaaatttgacaacaaaacggtcacctttgaggagcacataaaagaagaacataacatgtggcattacttatgttttattgtgttagtgaaggtcaaggattcgaccgagtatacaggcccagaaagttatgtggccgagatgatcaaggagagaaacctcgattggttcccgcgaatgcgtgctatgtccctcgtgagttctgactcggagggcgagcagaacgaacttcgaaatttgcaggaaaagttggagagtacaatgaaattggtgactaatctctccggacagctgtcagaactgaaggatcagatgactgaacaaagaaagcagaaacagaggatcggtctgctcgggcatcctcctcacatgaacgtcaatccccagcagcctgcttag

SEQ ID NO: 226793 - DNA, 546 bp, synthetic construct
  misc_feature 1..546: note = Description of Artificial Sequence: Synthetic coding sequence
  source 1..546: mol_type = other DNA
atgacagagaaaatgagttcattcttgtatatcggggacatcgtttccctgtacgctgaagggtcagtgaacggattcatttctacgctgggactggtggacgataggtgcgtggtgcacccggaggcaggtgacttggcgaatcctcccaagaagttcagggattgcttgtttaaggtgtgtccaatgaataggtattctgcacaaaagcaatattggaaagcaaaacaagcaaagcagggcaaccatacggaagctgccctgctcaagaaactacagcacgccgctgaactggagcagaagcaaaacgaatcagagaacaagaagctcctgggtgaaattgtcaaatatagtaacgtcattcagctcctgcacataaagagtaacaagtacctgacagtgaacaaaaggctgccagctttgctggaaaagaacgccatgcgcgtctccctcgatgcagctggtaatgagggctcatggttttatatccacccattttggaaactacgctccgagggcgataacgacgcatcattttggatttag

SEQ ID NO: 226794 - DNA, 8105 bp, synthetic construct
  misc_feature 1..8105: note = Description of Artificial Sequence: Synthetic coding sequence
  source 1..8105: mol_type = other DNA
atgaccgagaaaatgtcctccttcctctatattggagatatcgtgagcctctacgcggagggctccgtgaacggttttatatccacgctggggcttgtagatgaccgttgcgtggtgcacccagaggccggagatctggcaaaccctccgaaaaagtttagggattgcttatttaaggtctgtcctatgaacaggtatagcgcccagaagcagtactggaaagcgaagcaggccaaacagggcaatcacaccgaggcggcactcttaaaaaaattgcagcatgccgctgagctggagcaaaagcaaaacgagtcagagaacaaaaaactcctcggagagatcgtgaagtactccaatgtcattcagctcctccacatcaaatctaacaagtacttgacagttaacaaaagactgcccgctctcctggagaagaacgccatgcgggtgtcactggacgccgctggaaatgagggcagctggttttacatacacccgttttggaagcttcggagtgaaggtgacaatattgtggtgggcgacaaggtcgtgctgatgcccgtaaacgccggacaacctttacacgcctctaacatagagctcctggacaatccgggttgtaaagaagtgaacgccgtaaactgcaacacttcctggaagattactctgtttatgaagtactccagctacagagaggacgtgttgaagggaggggacgtggtcaggctattccatgccgagcaggaaaagtttcttacatgtgatgaatacgagaaaaagcagcacatcttcctgagaacaaccctgaggcagtctgctactagcgccacaagctccaaagctctctgggagatcgaggtggtgcatcatgacccttgtaggggaggggctgggcagtggaactccctcttcaggtttaagcacctggctaccggtaattaccttgccgctgagcttaatccagattatcgcgacgcccagaacgaagggaaaaacgtgcgagatggtgtccctccgacctcaaaaaagaagagacaggcaggggagaagattatgtatacactcgtgtccgtaccccatgggaacgacatagcaagtctgtttgagctcgatgctactacactgcagagagctgattgtctggttccgagaaattcctacgtcaggctgcgacacctctgcaccaacacctgggtgaccagcacttccatacctatcgatactgatgaagagagaccagtcatgctgaaaatcggcacctgccagacgaaggaggacaaggaagcattcgccattgtgtctgttcctctgagcgaagtccgagacctggatttcgccaatgacgctaataaagtcctggccacaacggtaaagaagctggaaaacggcacaatcacacagaatgagaggcggttcgtgaccaaactgctcgaggacctgattttctttgtggctgatgtgccaaataatggccaagaggtgttggacgttgtaatcacaaaacccaaccgggaacggcaaaagctgatgagagaacagaacattctggcacaggtgttcgggatcctgaaagctccattcaaggagaaggccggagaaggctcgatgctgcgccttgaagatcttggagatcagaggtacgcaccatataaatatatgttgcgactctgctatagagtcctgcggcatagccaacaggactatcgaaagaatcaggagtatattgcgaagaacttctgcgttatgcagtctcagataggatacgatattctggccgaagatactataactgcgctgttgcataacaatcgcaaactgctggaaaagcacatcaccgctaaggaaattgagacattcgtgtccttgttgaggcgtaacagagaaccacggtttctggactacctgtccgatctgtgcgttagcaacactaccgccattcccgtgacccaggaactgatttgtaaatttatgttatctcctgggaatgccgacatcctgattcagacaaaggtcgtatctatgcaggcagataaccccatggagtcctctattctcagtgatgatatcgacgacgaggaagtgtggctctactggattgactccaacaaagaaccacacggcaaggctattcgtcacctggcacaggaggccaaagaagggacaaaggcggacctggaagtattaacatactatcgttaccagctgaacctcttcgcaagaatgtgcctggatcgacaatacctggcgatcaatcagatctccacccagctcagcgtggatctgatcttaaggtgcgtgagtgacgaatccttgcctttcgacctccgagcatcattttgccggctcatgctccacatgcacgtcgatcgagatcctcaggaaagcgtggtgcctgtgcgatatgcgagactctggacagaaatcccaacaaagattaccattcacgagtatgactcgatcaccgactcgtctcgcaatgacatgaaaaggaaattcgccctgaccatggagttcgtggaggaatacctcaaggaagtggtaaatcagccctttccattcggcgataaggaaaagaataaattaacctttgaagtggtccacctcgccagaaatcttatttatttcggcttttacagtttttctgagctactccgcctgactcggaccctgctagcaatcctcgacattgtccaggccccaatgtccagctactttgaaagattgtcaaaattccaggatggtggcaataatgtgatgagaaccatccacggcgtaggcgagatgatgacccagatggtgttgagcaggggatccattttcccaatgagcgtgccagacgtgccgccatccattcatccaagcaaacaggggtcacctaccgagcatgaggacgtcaccgttatggatacaaagctgaaaattattgagattctacagttcatcctctccgtaaggcttgactatcgcatctcgtacatgctgtccatatataagaaggagttcggggaggacaatgacaacgctgagaccagcgccagcggatctcccgatacactactaccttcagctattgtacctgacattgatgaaatcgccgctcaggcagaaaccatgttcgctggtaggaaggaaaagaatcctgtccagctggacgatgagggtggcaggacttttttacgggtgttaattcacctgatcatgcatgattatcctcctctgctttccggggcactccagctactgtttaaacacttctctcagcgggctgaggtgctgcaagcttttaaacaggttcagctgctggtatccaatcaagacgtggacaactacaaacaaatcaaagcagatctggaccagctaagactgacagtggaaaagtccgagttatgggtcgaaaaatcttctaattacgagaacggagagataggtgagagccaggtgaaaggaggggaggagccgattgaggagtctaatatcctatctccagttcaggatggcaccaagaagccccagatcgatagcaataaatcaaacaactaccgaattgtgaaagagatccttattagactcagcaaactgtgtgtgcaaaataaaaagtgtagaaatcaacaccagagactgctgaagaacatgggagcccacagcgtggttctcgacttgctgcagatcccttacgaaaaaaatgatgagaagatgaatgaagtgatgaatctcgcacatacgttcctgcagaatttttgtcggggaaaccctcaaaatcaggtcttattgcacaaacacctcaacctgtttctcacccctgggttactcgaagccgaaaccatgaggcatatatttatgaataactaccatctttgtaatgaaatttctgagcgcgtggtccaacactttgttcactgtattgagacccacggaaggcatgttgagtatttgagattcttacagacaattgttaaagcagacggcaagtacgtaaagaaatgtcaggacatggtgatgaccgaactgatcaatgggggtgaagatgtgttgatcttctacaatgatcgcgcatcttttcctattcttctgcacatgatgtgcagcgagagggatcgcggagatgagtccggcccactggcttaccacatcacccttgttgagttgctggcagcctgtaccgagggcaaaaatgtctacacagaaatcaagtgtaacagcctgctgcctttggatgatatcgtgcgagtggtaacacacgatgattgcatcccagaggttaagattgcttatgttaattttgtgaatcactgctatgtcgatacagaggtcgaaatgaaggagatttatacctcaaatcatatatggaagctgttcgagaatttcttggtcgacatggcaagggtctgcaacaccaccactgatcgaaaacacgccgacatctttttggagaagtgtgtcactgagagtattatgaacattgtctctggctttttcaattctccatttagcgacaattctacctctctccagacacatcaaccggttttcatccagttattgcaaagtgcttttaggatctataactgtacttggcctaatcctgctcagaaagcctctgtggagtcctgtataaggaccctggcagaagtggctaaaaatcggggtatagcaatccctgtcgacctggacagtcaggtaaacactctgttcatgaagtcccattcaaatatggtacagcgtgccgctatgggctggcggctgtcagcccgtagtggcccaaggttcaaggaagccctaggcggtccagcttgggattatcggaatatcatcgagaagctccaggatgtggtggcctcactggaacatcaattttctccaatgatgcaagctgagtttagtgtcttggtggatgtcctgtatagtcccgagctgctttttcccgaggggagcgacgctcgcattcgctgtggcgcatttatgagcaagttaattaaccatactaagaagctcatggaaaaggaagaaaaactttgtattaagatcctgcaaacgctgagggagatgctagaaaaaaaagattcttttgtagaggaagggaataccctgagaaagatcctgttaaacagatatttcaagggggactatagtatcggcgtcaatgggcacctgtctggggcatactctaagaccgcacaagttggaggcagctttagtggccaggattccgacaagatgggcatttccatgagcgacatccagtgcctgctggataaagagggggcaagtgaactcgtgattgatgtgatcgttaatacaaagaacgaccgaattttctccgagggtatatttctcgggattgctctcttggaaggaggcaacactcagacccaatattcattttaccaacaattgcacgaacagaaaaagagcgagaagttcttcaaagtgctttacgatcgaatgaaagccgcacaaaaggagatccggtccacagttactgtgaacaccattgatttgggcaacaagaaacgagacgacgataacgagttgatgacgtccggcccacgcatgcgtgttagagattctacactgcatcttaaggaaggaatgaagggccaactgacagaggccagtagcgcaacatcaaaggcctactgcgtgtaccggagggagatggatcccgaaatcgacatcatgtgcacaggccctgaggccggaaatacggaagaaaagagtgctgaagaggtcacaatgtccccagcaattgccataatgcagcccattcttcgctttctgcaacttctgtgcgagaaccacaaccgcgaattgcaaaactttcttaggaaccagaacaacaaaaccaactacaaccttgtatgcgaaactctccaatttctagattgcatctgtgggtccactacaggaggcctgggtcttctgggtttatatattaatgaaaaaaatgtggctcttgttaaccagaacctggagtccctgaccgagtactgccaagggccttgccacgagaatcagacatgtatagcaactcacgaaagcaatggaatcgatataatcatcgccctgatactgaatgatataaatcctttgggcaaatacagaatggatctcgtgctccagctgaaaaataatgcctctaaactcctattagcgatcatggaatccagacatgattctgagaacgctgaaagaatcttgttcaacatgcgtccgagggagttagttgacgttatgaaaaacgcctataatcaaggcctggaatgcgaccacggggatgatgagggaggcgatgacggagtcagccctaaggacgttggccataatatctacatcttggcccatcagctcgcaagacacaacaagctgttgcagcagatgctgaagcctggaagcgatcctgatgagggcgatgaggccctcaagtattatgcgaatcatacggctcaaatagaaattgtgcgccatgaccgcaccatggaacagatagtcttcccagtccctaatatctgcgagtatttgacgagggaaagtaagtgcagggtgttcaacaccacagagcgagatgaacagggaagcaaagtgaacgatttttttcagcagacagaggatctctacaacgagatgaaatggcaaaaaaaaattcggaataacccagcactattctggttctcaagacacatttccctgtggggcagcatcagcttcaaccttgccgtctttattaatctcgcggtggctctgttttacccattcggtgatgatggggacgagggtaccctctctcccttgttctcggtgctgctgtggattgcagtagctatttgtacatccatgctcttcttcttcagcaagccagtggggattcgaccattcctggtctcaatcatgttaaggagcatttataccatcggcttagggccaacattgatcctccttggcgcagctaatctgtgtaataaaatcgtgtttctggtgtcctttgtaggcaaccggggaacatttacacgtggatatcgggcagtgattcttgatatggcattcctgtatcacgtcgcctacgttttggtgtgcatgttagggctgtttgttcacgaattcttctacagttttctcttattcgatctggtttatagggaggaaacactccttaatgttatcaaaagtgtcacgcgcaatgggagatccattatattgactgcagttctggctctgatattggtgtacctcttcagtataatcggatttcttttcttaaaagatgactttactatggaggtggaccgattaaaaaaccgcactcctgtcactggcagtcaccaggttccgacaatgacgctgaccactatgatggaagcttgtgcaaaggaaaactgcagcccaacgatccccgcaagtaatacagccgacgaggaatacgaagatggcatcgagaggacttgtgacactctgcttatgtgtatagtcactgtacttaatcaggggctaaggaatggcggtggtgtgggcgacgtgctgagacggccaagcaaggatgaaccattgttcgctgccagagtggtttacgacctgctgttctacttcatagtcatcatcatcgtactgaacttgatcttcggcgtcatcatcgacacgttcgcagatctgaggagcgaaaagcagaaaaaagaggaaattctgaagactacctgtttcatctgtggcctggagagggacaaattcgacaataaaacagtgagcttcgaagagcacattaagagcgagcataacatgtggcattacctttattttatcgtcctggtcaaggtcaaagatcctaccgaatataccggccctgagagctacgttgcacaaatgattgtcgaaaaaaaccttgattggtttccacgtatgcgcgcaatgagcctggttagcaacgagggagattccgagcagaacgaaatcaggagtctgcaagaaaagctggagagtactatgtcactcgtgaagcagttgagcggacagttggccgaactgaaagagcagatgaccgagcagcgaaagaacaaacaaagactggggttcctcggcagcaataccccacatgtgaaccatcacatgcctccacacta

SEQ ID NO: 226795 - DNA, 8015 bp, synthetic construct
  misc_feature 1..8015: note = Description of Artificial Sequence: Synthetic coding sequence
  source 1..8015: mol_type = other DNA
atgtctgagatgtctagtttcctacatattggtgatatcgtgagcctgtatgccgaagggtcagttaatgggtttatctctactttagggttggtggacgacagatgtgtggtggaaccagctgctggggaccttgacaatcccccaaaaaaattccgcgactgcctttttaaagtgtgtcccatgaaccgctactcagcccagaaacagtactggaaagccaagcagacaaaacaggacaaggaaaagattgccgacgtggtactcctgcaaaaactccagcacgcagcccagatggaacagaaacagaatgatacggagaacaagaaggttcacggcgacgtggtaaagtatggatcagtgatccaactgcttcacatgaaatcgaataaatacctaaccgtgaacaagcggttacctgccttgctggagaaaaacgccatgagggtgaccctggacgctacaggcaatgaaggcagttggttgtttatacaacctttctggaagctgcgcagcaacggagacaacgttgttgttggggacaaggtaattctgaaccccgtgaacgccggacagcctctgcatgccagcaattacgaactgtccgataacgccggatgtaaggaggtaaattcagtgaactgcaacacatcctggaaaatcaatctgtttatgcagttccgcgaccacctagaggaagtgctgaaggggggagacgtggtaaggctgttccacgccgagcaggaaaaatttctgacatgcgacgaatataagggcaaacttcaagtgtttttaaggactaccctgaggcaatcggcaacctctgccacatcaagtaacgccctgtgggaggtggaagtggtgcaccacgatccttgccgcggtggggctggtcattggaatggactctatcggttcaagcatctggccaccggcaactatctcgccgctgaggaaaatcccagttataaaggggatgcttcggatcccaaagccgctgggatgggtgcacaaggcaggacaggacggagaaatgccggtgagaaaatcaaatactgcctcgttgcagtgccccatggaaacgatatcgcatctctgtttgagctggaccccaccactctccagaaaaccgactcctttgtcccgagaaactcatacgtgagactacggcatttgtgtacaaatacgtggattcagagtacaaacgtgccgattgacatcgaggaggagaggcccattcgtctgatgctgggtacttgtcccacaaaggaggacaaagaagcctttgcaatcgtctccgtacctgtgtctgagatccgggacctggacttcgcaaacgacgcgtctagtatgttagccagcgccgtagagaaattgaatgagggatttatttctcagaatgacaggcgttttgtgatccagttgctcgaagacctggtgttttttgtttctgatgtgcccaacaatggccagaacgtgttggatattatggttactaaacctaacagggagcgccagaaactgatgcgggagcagaacatcctcaaacaagtctttggaatccttaaggctcctttcagagaaaagggtggagagggacccctggtgcgccttgaagaactgtcagatcagaagaatgccccttatcagcatatgttccgactgtgttatagggtccttcgccacagccaggaagactatcgtaagaaccaggaacatattgccaaacagtttggaatgatgcagtcccaaattggctacgatatcctggctgaggacacaataaccgccctactccacaataaccgtaaactgttagagaagcacatcactaagactgaagtggaaactttcgtttccctggtgcgcaagaaccgcgagccaaggtttctggattacttgtctgatctgtgtgtaagcaaccacattgctattcctgtaacccaggagctaatctgcaaatgcgtcctggatccaaagaacagcgacattctgattagaactgagctgcgtccagtgaaggagatggcccagtcccacgagtacctgtctattgagtacagtgaggaagaggtctggttgacttggaccgataaaaataatgagcatcacgagaaatctgtgcgccagctggcacaagaggcccgtgccggaaacgcacatgatgagaatgtcctcagctattatcggtaccagcttaaactgttcgccagaatgtgtctggatagacagtatctcgcaatcgatgagatctcacagcagttaggagttgatctcattttcctgtgcatggcagacgagatgctccccttcgaccttcgtgcgtcgttctgccacttgatgttgcacgttcatgttgaccgggatcctcaggagttggtgaccccagtcaagttcgccaggctgtggacggagatacctaccgccataaccatcaaggactatgattcaaatttgaatgctagccgagatgacaaaaaaaacaagttcgctaatactatggaattcgttgaagactatctgaataatgtggtaagcgaagccgtcccatttgctaacgaagaaaagaataagttgacattcgaagtggtcagtctagcccacaatttgatatacttcggattctatagcttctcggaactccttcgcttgactaggaccttactgggcataatcgactgtgtgcagggtccccctgccatgctgcaggcttacgaagacccgggtgggaagaacgtgagacgatcaatccagggcgttggacacatgatgagcacaatggtgctcagtcggaaacagtccgttttcagcgcaccaagcctgagtgccggagcatctgccgcagaacctctggacagatctaagtttgaggaaaacgaagatattgtcgtaatggagactaagctgaagattcttgagatccttcagttcatacttaacgtccggctcgattatcggatatcgtatctgctgagcgttttcaagaaagaattcgtggaagtgttccctatgcaggactccggtgccgacggtaccgcacccgctttcgacagtaccactgccaatatgaatttagaccgaattggggaacaggcggaggctatgttcggggtgggtaagactagcagcatgctggaggtggacgatgaaggcggtcggatgttcctgcgggttctgatccatctgaccatgcacgattatgcaccacttgtgtcgggcgctctccaactgttgttcaagcatttttcccagcgccaggaggcaatgcacacctttaaacaagttcaattattgatcagcgcccaagatgtggagaattacaaagtcatcaagtccgagctggaccggctccgaacgatggtggaaaagagcgagctctgggtggataaaaagggcagcggcaagggggaggaagtagaagccggagctgccaaagataagaaagagcgtcccaccgacgaagaggggttcctgcaccctcctggcgagaaaagttctgagaattaccagatcgtgaaaggcattctggagaggctgaacaagatgtgcggcgtcggcgaacagatgcggaagaaacaacagcgcctcctgaagaacatggacgcccacaaggttatgctggatctgctccagattccctatgacaaaggggacgctaagatgatggagatcctgagatacacccaccagtttctgcagaagttctgtgccggtaatcctgggaatcaagctttgctgcataagcatctgcatctatttctcacccctgggctgctggaggcggagaccatgcagcacatctttctgaacaactaccaactgtgctccgagattagcgaaccagtactacaacacttcgtgcacctcttggcaacacacgggagacacgtacagtacctggactttctgcacactgtgatcaaagcggagggcaagtacgtcaagaagtgccaagacatgattatgaccgagctgactaacgccggagacgatgtagtcgtgttctacaatgacaaggcctctctcgctcatctgttggatatgatgaaagcagctcgcgacggggtagaggaccacagccctttaatgtatcatatctcgcttgtggacctgctggccgcttgtgctgagggcaagaacgtgtatacagagattaagtgcacttctttgctgccactggaagacgtggtgtccgtggtgacacatgaggactgtattaccgaggttaaaatggcgtacgtcaatttcgtgaaccattgttacgtggatacagaagtggagatgaaggagatctatacttctaaccacatttggacactgtttgagaactttaccctcgatatggcgcgagtatgttccaagagagaaaagcgagttgcggaccccactctggaaaagtacgtactttccgtggtactggatactatcaacgctttcttttcctcacctttttccgagaattcgacaagcctacagacacaccagaccattgtagtccaattgctccagtccactacaagacttctggaatgtccctggttgcagcagcagcacaaagggtccgtggaagcctgcatccgaacactggccatggtcgccaaagggagggccattctattgccaatggatctggacgcccacatctcttccatgctgtctagcggtgccagttgcgccgcagccgcacaacggaatgcctcatcctataaagctaccactagggccttcccaagggtcacgcccaccgcaaaccaatgggactacaaaaacatcattgagaagctgcaggacatcataaccgctctggaggagcgactgaaacccctggtgcaggctgagctgtctgtgctggtcgacgtgttgcactggccagaactcctatttctggagggaagcgaagcctaccagagatgcgaatctggaggattcttgtcgaaactgatccaacacacaaaagacctgatggaatctgaggagaagttatgtattaaagtgttaagaacactacagcagatgttactcaagaagacgaaatatggcgatcgtgggaaccagctgcgcaagatgctcctccagaactacctgcaaaaccgtaaatccactagtaggggcgacctccccgatccgatcggcacgggccttgatccagattggtccgccatcgctgctactcagtgtcggctcgacaaagagggggctaccaagctggtatgtgatctcatcacttccactaagaacgaaaaaatctttcaagagagcataggcctggctattcacctactggatggcggtaatacagagatccaaaagtctttccacaacttgatgatgtcggataagaaatccgagcgtttcttcaaggtgcttcacgatagaatgaagagggctcaacaggagacgaagagcaccgttgcagtgaacatgaacgacctcgggtcccaaccccacgaggaccgtgagcctgtcgaccccactactaaaggacgcgtagcgtcattttctatccctgggagctccagtaggtattccttaggaccatccctgcgtcgaggacacgaagtgagcgaacgggtgcagtcatcagaaatggggacatccgtgctcatcatgcagccaatcctcaggtttctccagttactgtgcgagaaccataaccgagacctgcagaacttcctgcgatgtcaaaacaacaagacaaattacaatctggtttgtgagacactgcagttcctcgatatcatgtgtggcagcacgaccggcggattgggactcctaggcctttatatcaacgaagacaatgttggccttgtgatccagactttagagactttaacagaatactgccaggggccatgtcatgagaatcagacatgtatcgtgactcacgaatcaaacggcattgatataatcaccgccctgatcctgaatgatatttctcctctttgcaagtatagaatggatctggtcctccagctaaaagataacgcaagcaagctgctgcttgcacttatggaatcccgacacgacagtgaaaacgctgagcggatcttgatttcacttagaccacaagagctagttgatgtgatcaaaaaggcctacttgcaggaggaggagcgcgagaacagcgaggtgtcccctagggaggttggacacaacatttacattttagccctgcaactcagcagacacaacaagcagctgcagcacctcctaaagccagtgaagcgcatccaggaggaggaggcggaaggcatttctagcatgctaagcctgaataacaaacaactgagccagatgttgaaaagttctgctcctgcccaggaggaagaagaagacccactcgcctactatgaaaaccacacttctcagatcgagatcgtgagacaagatagatccatggagcaaatcgtgtttccagtcccgggtatttgtcagttcctgacagaggaaacaaagcaccgactcttcacaacaactgagcaggatgaacagggatcaaaagtgagcgacttctttgaccagtcctctttcctccacaacgagatggaatggcagagaaagctccggagcatgccactgatctattggttttctaggcggatgacattatgggggtctatctctttcaatttggccgtgtttatcaacattatcatcgcgttcttttacccgtacatggagggcgcttctactggtgtccttgactctcctctgattagtctgctcttctggattttgatttgcttctccatagccgctctgttcactaagcgctatagtattaggcctctgatcgtggccctaatactgcggagtatctactatttgggcattggtcctacactgaatattctgggtgcactcaatctcacaaacaagatcgtgttcgtcgtttcttttgttggcaaccgaggaacatttatcagagggtataaggcaatggttatggatatggaatttttgtatcacgtaggttacatattgacctccgtgctgggcctgtttgcacacgagcttttttactctatcctcctgttcgatctgatttacagggaagagacactctttaatgtgataaagtcggtgactagaaacggaaggtccattctcctgaccgcgctgctggcactgattctggtttatctcttctctatagtcgggtttctttttcttaaggacgattttatcctggaggtcgacaggttgccaaataatcacagtacagctagccctctggggatgcctcatggcgctgcagcttttgttgatacctgttccggcgacaagatggactgcgtctctggattgtctgtaccagaggtactcgaggaggacagagagcttgattccacggaacgtgcatgcgatacgctgttgatgtgcatagtgacagtgatgaaccatggcctccgcaatgggggtggggttggtgacatcttgcggaagcccagcaaagatgagtcactgtttcctgccagagtagtttatgatctactgttcttctttattgtgataatcatcgttctgaaccttatttttggagtaatcattgacacctttgctgatctgcgaagcgaaaagcagaaaaaagaggagattctgaaaaccacttgttttatctgcgggctggagcgcgataagttcgacaataaaacagttagcttcgaggagcacattaaactggagcacaatatgtggaactacctctacttcattgtgctagtgcgagtcaaaaacaaaacagactacacgggcccagaaagctacgtggcccagatgatcaagaacaagaatttggactggttccctcggatgagagccatgagtcttgtctctaacgagggggagggtgaacagaatgagataagaatacttcaagataaactcaacagcacaatgaagctggtctcacatttgacagctcagctgaacgaactgaaagaacagatgaccgaacagcgcaagaggcgccagaggcttgggttcgtggatgtgcagaattgtatctctcgtta

SEQ ID NO: 226796 - DNA, 1326 bp, synthetic construct
  misc_feature 1..1326: note = Description of Artificial Sequence: Synthetic coding sequence
  source 1..1326: mol_type = other DNA
atgtgtgtctgtcagacgatggaagtaggtcagtacgggaagaacgcctcccgagccggtgataggggtgtgcttctagagccattcatccaccaggtgggcggacactcctctatgatgcggtacgatgaccacacagtttgtaaacccctgatttcccgcgaacagaggttctacgaaagcttgcctcccgagatgaaggagttcacacctgagtataaaggagtggtgagcgtgtgctttgaaggcgactccgatgggtacattaacctggtcgcatacccatacgtggaaagtgaaactgtggaacaggatgacactactgagcgtgaacagcctagacgcaaacattctagacggtccctacacaggagcggctcgggatctgaccacaaagaggagaaggcctcactatccttagagaccagcgagtcttcccaggaagctaagtctccaaaagtagagctacatagccactccgaggttccctttcaaatgttagacgggaatagtggcctaagtagtgaaaaaatctctcacaacccttggtcccttagatgccataagcagcaattgtccagaatgagaagcgaatcaaaggaccggaaactttacaagtttttgctcctagagaatgttgtccatcacttcaaatacccatgcgtgctcgatctcaagatgggaacacgccagcatggagacgacgcgtctgctgaaaaggccgcaaggcaaatgcggaagtgcgagcagtctacaagtgccaccttgggggtccgcgtctgcggcatgcaggtctaccagctggataccggacactacctttgtcggaacaagtattacggcagagggctcagcattgagggatttagaaacgctctgtatcagtatttacataacggtctagatttgagaagggacttgtttgaacccattctttctaaactccgcggactcaaagctgtgctggagcgtcaggccagttataggttctacagcagtagccttctggtgatctacgacggaaaagaatgtcgcgcagaatcatgtcttgatcgccgaagcgaaatgagactcaagcatcttgatatggtgctccccgaagtggcatcctcatgtggaccctctacaagcccaagcaatacgtcgcctgaagcaggcccaagctctcagcctaaggtggatgttaggatgattgacttcgcgcattctacgtttaagggcttcagagatgatcctacagtgcatgacggaccagaccgtgggtatgtctttggactcgagaatctgatctctatcatggagcagatgagagatgagaaccagtag

SEQ ID NO: 226797 - DNA, 831 bp, synthetic construct
  misc_feature 1..831: note = Description of Artificial Sequence: Synthetic coding sequence
  source 1..831: mol_type = other DNA
atgttagatggtaatagtggcttgtcatctgaaaagatctcacacaacccgtggtctctgcgttgccacaagcaacagctgtcccggatgcgctcagaatcaaaagatcgaaagctgtacaagttcctcctgcttgagaatgtggttcatcacttcaaatacccatgcgtcctggatctgaagatgggaactagacagcacggggacgacgcctcagccgaaaaagccgcaagacaaatgagaaagtgcgaacagtccacatcagccactctcggagtacgggtctgcggcatgcaggtgtatcagttggatacaggtcactacctttgtcggaacaaatattacggcagaggcctgagtatcgaggggttccgtaatgccctatatcagtacctccataacgggttggacctcagaagggacctgttcgagcctattctctccaaactgcggggactcaaggccgttctcgagagacaagcctcctatcgattctacagctcatccttattagtgatctacgatggcaaggaatgcagggcagagagttgcttggatagaaggtccgagatgaggttaaaacatttggacatggtgcttcccgaggtcgcatcctcatgcgggccttctaccagcccttcgaatacctcgcctgaagccggtccatcctcacagcccaaggtggatgtccggatgatcgacttcgcccactctaccttcaaagggttccgagacgaccctaccgtccacgatggacccgaccggggatacgtgtttggcttagagaatctcatctctataatggagcagatgagagatgagaatcagtag

SEQ ID NO: 226798 - DNA, 831 bp, synthetic construct
  misc_feature 1..831: note = Description of Artificial Sequence: Synthetic coding sequence
  source 1..831: mol_type = other DNA
atgctggacggcaattccgggctctcttcagagaagattagtcacaatccttggtcgttgcgctgtcacaaacagcagctgagccgaatgagatccgaatcgaaagacagaaaactgtataagttcctgcttctggaaaatgtcgtccaccatttcaagtacccatgcgtattggacttaaaaatgggaacccggcagcatggcgacgacgcctccgcggagaaggccgcacgacagatgaggaagtgtgaacaatctacatctgcaaccttgggcgtgagggtatgcggaatgcaggtctaccaactagatacgggtcattacctctgtaggaacaagtactacggtagaggcctgtctatcgagggcttccggaacgccctgtaccagtacttgcacaacggcctggatttgcgccgagacttattcgaacccattctgtctaaacttcgcggtttgaaggccgttttggagagacaagccagctatcgcttttatagctcctctctgttggtcatctatgacggtaaagagtgccgtgccgagtcgtgcttagaccggagatccgaaatgcgactgaagcatctggatatggttctccctgaggttgcaagtagttgcggcccatctactagcccgtcaaatacctcccctgaagctggaccctcctcccagccgaaagtggacgtccgcatgattgattttgctcactccacctttaagggcttcagggatgaccctactgtccacgatgggcctgatcgaggctacgttttcggcttagagaacctcatctctatcatggagcagatgcgggacgagaatcagtag

SEQ ID NO: 226799 - DNA, 1281 bp, synthetic construct
  misc_feature 1..1281: note = Description of Artificial Sequence: Synthetic coding sequence
  source 1..1281: mol_type = other DNA
atgtctcctgcctttcgggcaatggatgtggagcctcgcgctaaaggtgtcctgctagaaccatttgtgcaccaggtcggtggccatagttgtgtacttcgatttaacgaaacgacgctgtgtaaaccccttgtgccacgagaacatcaattctacgagactctcccggcagaaatgaggaaattcacacctcagtacaaaggcgtggtttccgtgaggttcgaggaggacgaggatagaaacctctgcctaatcgcttaccccctgaaaggggatcacggaattgtagatattgtcgacaacagtgactgtgaacctaagagcaaactcttacgctggacaactaacaagaaacaccacgtactggaaaccgaaaagaccccaaaggattgggtcaggcagcacaggaaagaagaaaagatgaagagccataagctcgaagaggagttcgagtggcttaaaaagtccgaggtactctattatacagtggagaaaaaaggtaatatcagttcacagctgaagcattataacccttggtctatgaaatgtcatcagcagcaacttcagcggatgaaggagaatgccaaacatcggaatcaatacaaattcattctcttagagaacctcacatcgcggtacgaagtgccctgcgttctggacctgaagatggggaccagacagcacggggatgacgcttccgaagagaaggcagcaaaccaaatcaggaagtgtcagcagagcacatcagcagttatcggtgttcgcgtgtgcgggatgcaggtctatcaagccggaagcggccagctcatgtttatgaacaagtatcacgggcgaaagttatctgtccagggttttaaagaggcactgttccaatttttccataacggtagatacttacggagggaactgctgggcccagtgctaaagaagcttaccgaactgaaagcagtgcttgaacgtcaagaatcttacaggttttacagtagctctctcttggtgatttatgatgggaaggaacgaccagaggttgtgcttgattctgacgctgaagacctcgaagacctgtcagaggaatccgcggatgagtcagcaggcgcatatgcctacaagccaatcggagcgtccagtgtggatgtgcggatgatagactttgcccatacaacgtgccggctatacggagaagacactgttgtgcacgaagggcaagacgccggttatatttttggtctgcagtctcttattgatattgtcacggaaatttcagaggagtcgggcgaatag

SEQ ID NO: 226800 - DNA, 294 bp, synthetic construct
  misc_feature 1..294: note = Description of Artificial Sequence: Synthetic coding sequence
  source 1..294: mol_type = other DNA
atgtctccagctttcagggctatggacgttgagcccagggcaaagggggtcctgctcgagcccttcgtgcatcaggtgggaggtcacagctgcgtcctgaggtttaatgaaaccaccctgtgtaaacctctggtgccccgtgaacaccagttctacgagaccctgcccgctgagatgcgcaagtttaccccacagtataaggggcagagccagcggccactggtgtcctggccttccttgccccacttttttccctggtcctttccactgtggcctcagggttctgtagcatag

SEQ ID NO: 226801 - DNA, 294 bp, synthetic construct
  misc_feature 1..294: note = Description of Artificial Sequence: Synthetic coding sequence
  source 1..294: mol_type = other DNA
atgtcaccagcgttccgtgctatggacgtggaacctcgggctaagggtgtactattagagcctttcgtccaccaagtggggggacacagttgtgtgctaaggttcaacgaaacaacattgtgcaagcctttggtccctagagaacatcagttctacgaaactttacctgccgaaatgaggaagttcacaccacagtataaggggcagagccaaagacccctggtgtcatggcccagcctgcctcacttctttccgtggagtttccctctgtggccccagggatcagtggcctag

SEQ ID NO: 226802 - DNA, 558 bp, synthetic construct
  misc_feature 1..558: note = Description of Artificial Sequence: Synthetic coding sequence
  source 1..558: mol_type = other DNA
atgagcctgaatctgccggaggcctctctcctctccagggccagctggccagagcaggccaaagagccgcgacgagagggccacaccgataagcagcagacagaggacgtattggccgcagggctgcgatgtcttccacacctgccagctatttgtgcccgacggatgagtcccgcttttcgggctatggatgtagaacccagagccaagggcgtgctgctggagcctttcgtgcatcaggtaggcggtcactcctgcgtgctccggttcaatgagactacattgtgcaagccattggtgcccagggagcatcaattttacgaaaccctgccggctgagatgcgaaagttcacaccgcagtacaaggggaagtcacaacttttggaaggccttccccactggcgcggagacgtgagggataggggccatgggaggccgtggcagccaagcctagagccaagcctgccacccaccctgtgctttccgtcactctctagtttctcaagcagttggccttctgcgcaacatcttaccccaagcgtgtttaacccatggtag

SEQ ID NO: 226803 - DNA, 264 bp, synthetic construct
  misc_feature 1..264: note = Description of Artificial Sequence: Synthetic coding sequence
  source 1..264: mol_type = other DNA
atgtctcctgctttcagggccatggacgtcgaaccccgagccaaaggggtgctgctcgaacctttcgtccaccaggtgggcggtcactcttgcgtgctgaggttcaacgaaactactctgtgcaaacctctggtcccccgagaacaccagttttacgaaaccctccctgctgagatgcgcaaattcactccccaatataaaggagatatctcttcccatcagcatggcggagtatttgtcggggaatgggggtcattgctgtag

SEQ ID NO: 226804 - DNA, 567 bp, synthetic construct
  misc_feature 1..567: note = Description of Artificial Sequence: Synthetic coding sequence
  source 1..567: mol_type = other DNA
atgaacctctgccaatctccttttcaggaaggttgccagtctttgttggcctcgtggcctgagcaggccaaggaacctagacgagagggacatacagacaaacagcagacggaggatgttcttgccgctggcctgaggtgcctaccccatctgccagccatctgcgcaagacgaatgagcccagctttccgcgcaatggacgttgaaccccgtgctaagggggttctcctggagccatttgtacatcaagtcggaggccactcgtgtgtcctcagattcaacgaaacaacattgtgtaaacctctggtgccaagggagcatcagttctacgagacactgcccgcagagatgcgaaagttcaccccccagtacaaagggaagtcgcaactgcttgaagggcttcctcattggaggggtgacgtacgagatcgcggacacggcagaccctggcagccatccctggagccctcattgccacccaccctttgcttcccctccttaagcagcttctcctccagctggccctccgcccagcaccttactccatcagtgttcaacccgtggtag

SEQ ID NO: 226805 - DNA, 1233 bp, synthetic construct
  misc_feature 1..1233: note = Description of Artificial Sequence: Synthetic coding sequence
  source 1..1233: mol_type = other DNA
atggttgttcaaaattccgccgacgccggagacatgcgtgcaggtgttcagcttgagccattcctgcatcaggttggtggccatatgtccgtgatgaagtacgacgaacacaccgtctgcaagccgcttgtcagccgcgaacaaagattctatgaatctctccctctggccatgaaacggttcactccacagtataaagggacggtcaccgtgcatttgtggaaagacagtacggggcacctgtcactggtggctaaccctgtgaaggaaagccaggagccttttaaggtaagcaccgagtcggcagctgtcgctatatggcaaaccctgcagcagacaaccggtagcaacggttcagattgcaccctggctcagtggccccatgcccagcttgcacggtccccgaaagagtcaccagcaaaggcgctcctcaggtccgagccccacctcaataccccagccttctcgctggttgaggacaccaacggaaatcaggtggagcggaagtccttcaacccctgggggctgcagtgccaccaggcacatctgactcgcctctgctcggaatacccggagaacaagaggcaccgattcctgctgctggagaatgtcgtgagccagtacacccacccatgcgtcctggacctgaaaatgggcactcgccagcatggtgacgacgctagtgaagagaagaaagctagacatatgcgtaagtgcgcccagagcacaagtgcatgtctgggcgtgagaatttgcggaatgcaggtatatcagacagacaaaaaatactttctctgcaaagataagtattatgggaggaaattatcggtggaaggttttagacaggccctgtatcagttccttcataatggcagccacctaagacgcgaactcctagagccgattctgcatcagttgcgggctttgctcagcgttatacgcagccaatcttcataccgtttttactccagtagcctgctggtcatctatgacgggcaggagccaccagagagagctcctggctctccccatccacatgaagcgcctcaggctgcccacggctctagcccaggcggtctgacaaaggtagacatccgtatgatcgacttcgcccacacgacgtataagggatactggaacgaacacaccacatatgacgggccagatcctggatacatttttgggctggagaatctcatccgcatactccaagatatccaggagggcgagtag

SEQ ID NO: 226806 - DNA, 1233 bp, synthetic construct
  misc_feature 1..1233: note = Description of Artificial Sequence: Synthetic coding sequence
  source 1..1233: mol_type = other DNA
atggtggttcagaattccgctgacgctggtgatatgcgtgcaggggtccagttggagccatttctgcaccaggtgggcggacacatgagcgtcatgaaatatgatgagcatacagtgtgcaaacccctggttagtcgggagcagcggttttacgagagcctccctctcgctatgaaaaggtttactccccagtacaaaggcaccgtgactgtgcacctctggaaggactctaccggacatctttcactggtggccaatccagtgaaagagtcacaagagccatttaaggtcagtaccgagagcgccgcagtcgcaatctggcagaccctgcagcagactaccggatctaatggctccgactgcactctggcacagtggcctcacgcccaacttgctcggagccccaaagagtctccggcaaaagccctcttaaggagtgaacctcatctcaacacacctgcgttctccctcgtggaagatacgaacggaaaccaggtggagcggaaaagttttaacccatggggactgcaatgtcatcaggcccacttgacgaggctgtgttctgagtaccctgaaaacaaacggcacaggttcttgctcctggagaatgtggtcagccagtatacccacccttgcgtgttggacctgaaaatgggaacacggcagcacggcgacgatgcctccgaggaaaagaaagctaggcacatgcgaaagtgtgcacagagtacttcggcttgtctgggcgtcaggatatgtgggatgcaggtgtatcagaccgacaaaaaatactttctctgtaaggataagtactatgggagaaagctcagcgttgagggcttccgccaggctttatatcagttcctccataatggctctcacttgagacgcgagctgctggagccaattctccaccagctgcgggctctcctgtctgtcattcgaagtcagagctcctataggttctatagtagcagcctattggtcatctacgacggtcaggaaccgccagagagggccccaggctccccgcatccccatgaagcacctcaggccgctcacggcagttctcctgggggacttacgaaggtagatataagaatgatagattttgcccacactacttataagggttactggaacgagcacactacgtatgatggtcccgatcctgggtacatctttggactggagaatctgattcggatcctccaggacatccaagagggcgaatag

SEQ ID NO: 226807 - DNA, 1080 bp, synthetic construct
  misc_feature 1..1080: note = Description of Artificial Sequence: Synthetic coding sequence
  source 1..1080: mol_type = other DNA
atggcgcctatgggaatccggttgagccctctcggggttgccgtgttttgccttctgggactgggagtcttgtaccatctgtatagcgggtttttagccggaaggttctccctttttggtctggggggagagcctgggggaggagctgccggacccgcagctgccgctgacggcggtactgtggacttgcgagagatgctggccgtgagtgtcctggctgctgtgagagggggtgatgaggttcggcgagtgagagagtcaaatgtgctgcatgagaaaagcaaaggcaagacccgagaaggagctgaagacaagatgacctccggcgatgttttgtcaaatcgaaaaatgttctacttgctgaagactgcctttccctcagttcaaatcaataccgaggagcacgtagacgccgcagaccaggaagtgattctgtgggaccacaaaatacccgaagacatcctgaaggaagttacaacgcccaaggaggtccccgcagaaagcgtcactgtctggattgatccccttgacgccactcaagaatacacagaagacctgaggaagtatgtcactacaatggtgtgcgtggctgtgaacggcaagccaatgctcggggtcatccacaagccattctctgaatatactgcatgggctatggtggacggagggtcaaatgtcaaagcaaggtcttcttacaacgagaagacgccacgaatagttgtgagccgttcccactccggcatggtcaagcaagtagcgttacagacatttgggaatcaaaccaccatcattcccgctggcggagcgggttataaagttctagcgctcctggatgtaccagataagagccaagagaaagccgacctttatatccacgttacatacatcaaaaagtgggatatctgcgccggaaacgctattctcaaggctcttggcggtcatatgaccacactcagcggcgaggagatcagttacaccggatccgacggcatcgagggcggactgctcgcttcaatccgcatgaatcatcaagcgctggtgcgcaaactccccgacctggaaaagaccggccacaagtag

SEQ ID NO: 226808 - DNA, 1251 bp, synthetic construct
  misc_feature 1..1251: note = Description of Artificial Sequence: Synthetic coding sequence
  source 1..1251: mol_type = other DNA
atggcgacagagccgccttcccctctgcgcgttgaggccccagggcctcccgagatgcgaacatccccagccatagagagtactcctgagggcaccccacagccagccggaggacgcctgcggtttcttaatgggtgcgttccactatctcaccaagtcgccggacatatgtatgggaaagataaggtcggaatcctgcaacacccggacggcacggtgctgaagcagttgcagccccctcccaggggacctagagagctagaattttacaacatggtctacgctgccgactgctttgatggagtgctcctggagctgaggaagtacttgccaaaatattacggaatctggtccccacctacagcccctaatgatctttacctgaagcttgaggacgttactcacaaatttaacaaaccttgcattatggatgtcaaaatcggccagaagtcctatgacccgttcgcaagttctgaaaaaattcaacagcaagtgtcaaaatacccactgatggaagagatcggcttcttggtcctgggtatgcgggtatatcatgttcactctgactcttatgagacagaaaaccaacattacggacgtagtcttaccaaagaaacaatcaaagatggggtgtctcggtttttccataatggctactgcctgaggaaggatgccgtggctgcatccatccagaagatcgaaaaaattttacagtggtttgaaaatcagaagcagcttaacttctacgcaagctccctgctgttcgtgtatgaaggctccagccagcctaccacgacgaaactgaacgatagaactctggccgaaaagtttctctcaaagggtcaactaagcgataccgaggttctcgagtacaacaataattttcatgtcctttcatccactgcaaatgggaaaatagagagttcagtaggtaaatctctgagtaagatgtacgctcgccacaggaaaatttataccaaaaagcatcacagccagaccagcctgaaagtggaaaacttagaacaggacaatgggtggaagtcaatgtctcaagagcacctcaacggaaacgtgctttctcagctggaaaaagtgttctatcacctccccacaggctgccaagaaatagccgaggttgaggtgcgcatgattgacttcgcccacgtgtttccgtcaaacaccatcgatgaagggtacgtttacggcctgaagcacctcatttccgtgctgcgttctatcctggataactag

SEQ ID NO: 226809 - DNA, 3777 bp, synthetic construct
  misc_feature 1..3777: note = Description of Artificial Sequence: Synthetic coding sequence
  source 1..3777: mol_type = other DNA
atggctagcgcctgtggggcacccggaccgggaggtgcgttaggatctcaggccccatcatggtaccaccgggacttgagtcgggctgccgcagaagaactgcttgctagggcgggtcgagatggatcctttctcgtgcgcgactctgagagtgtggctggagcatttgccttgtgcgtgttataccaaaagcacgtgcacacttaccgcatcctgcccgatggtgaggatttcctggcggtgcaaacctctcaaggggtcccagtccggaggtttcagacactcggcgaactcattggactttatgctcagcccaatcaaggcttggtgtgtgcactgctgctgcccgtggaaggtgagagagagccggatccccctgacgatagggatgccagcgatggcgaagatgagaagccccctttgcctccaagatccggatccacgtctatttctgcacccaccggccctagctccccactgcctgcacccgagacacccaccgcccctgccgctgagtctgccccaaacgggctgagtactgtctcccatgattatcttaaaggttcttacggactagacctggaagctgtcaggggaggcgcatctcatctgccccacctgaccaggacgcttgcaacttcttgcagacgcctgcatagcgaagtcgacaaggtgctatccggattggaaatcttgtcgaaagtgttcgaccagcagtccagcccaatggtgacacggctgctacagcagcagaacctgccacagacaggagaacaggaactggagagcctggtactcaagctgtcggtcctgaaggacttcctctccggaatccagaaaaaggccctaaaagccctccaggacatgtcctcaacagcccctcccgctccacagcccagcacaagaaaggccaagacgatcccagtgcaagctttcgaggttaaacttgacgtgactctgggggaccttaccaaaatcggcaaaagtcagaagtttacactgtcagttgacgtggaagggggtcggttagtcttactgagacggcagagagattctcaagaggattggactactttcacacatgaccgaataaggcagcttataaagtcccagagagtgcagaataaattaggcgtggtgtttgaaaaagagaaggataggacccagcggaaggatttcatcttcgtctccgctcggaaacgtgaagcgttctgtcaactcttacagttgatgaaaaataagcacagcaaacaggatgaacctgatatgataagtgtattcattggaacatggaacatgggatcagtgcccccacctaaaaacgtgacatcatggtttacgtcaaaaggcttaggaaaaacgctcgacgaagtcaccgtaaccattcctcatgatatttacgtatttgggacacaagaaaatagcgttggtgatcgcgagtggctcgatcttctccgcggaggtttgaaggagttgacagacctagattacaggcccattgcaatgcaaagcctgtggaacatcaaagtggctgtcctggtgaaacccgagcacgaaaaccgtatttctcacgtctcaacctcctctgtgaagacaggaatcgccaataccctaggcaataagggtgcggtcggcgtttcatttatgtttaacggcacctccttcggctttgtgaattgtcacctgacgagcggaaatgagaagactgctcgcaggaatcagaattatctggacatcctgcgactactaagcctgggtgataggcagttaaatgcttttgatatctccctccgatttacgcatcttttctggttcggagatcttaactataggttggatatggatattcaggaaattctgaattacataagccggaaggaattcgagccgctgctcagagtcgaccagctgaacctcgaacgtgagaaacacaaggtttttctgaggttttcagaggaggagatttcattcccacctacgtatcggtatgagagaggatcgcgggatacctacgcttggcacaaacaaaaacctactggtgtccgcacgaacgtaccttcatggtgtgaccgcattctctggaaaagttaccctgagactcacattatatgtaatagttacggatgtactgatgatatagtgacctctgaccactccccggtatttgggacattcgaggtaggtgttactagccagttcatttccaaaaagggcttgtctaagacttctgaccaggcttacattgaattcgaaagcatcgaagcaattgtgaaaaccgcgtcacgcacaaagttcttcatcgaattttactcaacttgtttagaggagtataagaaatccttcgagaatgacgcacagtcttcagataacatcaactttcttaaagtgcaatggtcttctaggcaacttcccacactaaaacctatcctcgctgatatcgaatacctccaggatcagcacctgctacttaccgttaaatctatggatgggtatgaaagctatggcgaatgtgtcgtggcattgaagtcgatgatcggaagtacagctcaacagtttctgaccttcctgagtcatcgcggagaagagactggcaacatacggggatctatgaaggttagggtgcctacagaacggctgggaactcgcgaaagattatatgaatggatcagcatcgataaagatgaggccggtgccaagtcaaaggccccttcagtgagccgaggctcacaggagccccgttccgggtccaggaaacccgcatttacagaagcctcatgccccctcagccgtctattcgaggaacccgagaagcctccacctaccgggagaccgccagccccacctcgcgctgccccaagggaagaaccactgaccccaagattaaagccagagggagccccagagcccgagggcgttgctgcgccaccccctaagaattcctttaacaaccctgcttattacgtgcttgagggcgtaccccaccagctgctccctcccgaacctccatccccagcgcgagctcctgtcccttctgccacaaagaataaggtggcaatcaccgtgccagctccccaactgggacatcacaggcatccacgggtgggagaagggagctcctccgatgaggaaagcgggggtaccctacctccccctgacttcccaccgcctcccttgccagatagcgctatctttctgccgccttcccttgaccctctgcctggccctgtcgtgagggggagggggggagctgaggctagaggtcccccacccccaaaggctcatcccaggcctccactgcccccagggccaagccctgctagcacctttctgggagaggtggcaagtggcgatgatagaagctgcagcgtgttacagatggcgaagacactgtccgaagttgactacgcccctgcaggaccggctaggagtgctctcctgccaggacctctggagttgcaaccacccaggggactgcccagcgactacgggagacccctgtcttttccacctccccgtataagggaaagtattcaggaagatctcgctgaggaagccccttgtctgcagggcggacgggcttccgggctcggcgaagccggtatgtctgcatggctccgggctattggtctcgagagatacgaagaaggacttgtccacaacggctgggatgatctagagttcctgtccgacattactgaagaggatctggaagaagccggagtacaggaccctgctcataagcggctcctcctggacacactgcagctatcgaaatag

SEQ ID NO: 226810 - DNA, 105 bp, synthetic construct
  misc_feature 1..105: note = Description of Artificial Sequence: Synthetic coding sequence
  source 1..105: mol_type = other DNA
atggttactagacttttacaacagcaaaatctgcctcaaactggagaacaagagctcgagagtctagtcctgaagcttagcgttctcaaagatttcttaagttag

SEQ ID NO: 226811 - DNA, 3051 bp, synthetic construct
  misc_feature 1..3051: note = Description of Artificial Sequence: Synthetic coding sequence
  source 1..3051: mol_type = other DNA
atggtgacaagactactccagcagcagaatctcccgcagacaggcgagcaagaattggagtccctggtgctgaagttgtccgtcttgaaggactttctcagcggtattcagaagaaggctctgaaggcccttcaggacatgtcgtccacagcccctccagcccctcagccctccactcggaaggcgaaaaccatacccgtgcaagccttcgaggtgaagctggatgtgacactgggggacctcacaaaaattggaaaaagccaaaagttcaccctgtccgtggacgtagagggcggtcggcttgtactgctgcgccgtcagcgggattcccaagaggattggaccactttcacccacgacagaatccggcagttgatcaaatcacagcgggtgcagaacaaactgggcgtcgtgtttgagaaagagaaagaccgcacccagcgcaaggactttatttttgtgtctgcaagaaagcgagaggccttttgtcagttgctgcaactgatgaagaataaacactctaagcaggatgagcccgatatgataagcgtgttcatcggaacatggaacatgggcagcgtccctcctcctaaaaacgttacttcttggttcacctcaaaggggctgggaaagacactcgatgaagtcactgttactattcctcacgacatttacgtgttcggcactcaggagaattctgtgggagacagagaatggttggacttgctcagaggaggcctgaaagaacttacggacctggattataggcctatcgccatgcagtccctttggaacatcaaggtggcggtccttgtgaagccagaacatgagaacagaatatcacatgtatcgacctccagtgttaaaacagggatcgcaaatactttgggcaataaaggcgctgtcggagtctcctttatgttcaacggtacttcgttcgggtttgtcaattgccacctgactagcggcaacgagaaaaccgcacgcagaaatcagaactatcttgacatcttgcgattactttctctaggagataggcagttgaacgccttcgacattagcctccgattcacccatctgttttggttcggagatctgaattatcgcctagacatggatattcaggagatcctaaattacatcagtcgaaaggagttcgagcccctcctgagagtggaccaattgaatcttgagcgcgagaagcacaaagttttcttaagattctctgaggaggaaatcagtttccctcctacctatagatatgagaggggcagccgagatacatacgcttggcacaagcagaaacccacaggcgtgcggacgaatgttccaagctggtgcgatcggatcctctggaagtcctatcccgaaacccacattatttgtaattcctacggctgcaccgacgacattgtcaccagcgatcactcaccagtgtttggaactttcgaggttggcgtgacctcgcagtttatcagcaagaagggcctttcgaagacctcggaccaagcctacatagaattcgaaagtatcgaggccattgtgaagacagcctctagaaccaaattttttatcgagttttatagtacttgtctcgaagaatataaaaaatctttcgaaaacgacgcccagtcctcagacaatataaacttcttgaaggtgcagtggagttcacggcagctcccaacactcaagcccattctagccgatattgagtatctgcaggatcagcatcttctgcttactgtcaagagcatggatgggtatgagtcctatggtgagtgcgtggtcgcactgaaaagcatgattggcagtacggctcaacagtttcttacctttctctcccaccggggtgaggaaacaggtaacataagaggcagcatgaaggtcagggttccaacagaacggcttggcacccgcgagcgactctacgaatggatttccattgacaaagacgaggcgggagctaaatcaaaggcgcctagtgtgtctagagggagtcaggaaccccgttccgggtctaggaagcctgcttttacagaggcttcttgtccgctatcaaggttgtttgaggagccagagaagccaccccctacgggaagaccacccgctcccccacgcgcagccccacgggaggaacctctcactccacgactgaagcctgagggagccccagaaccggagggagttgccgctccccctcccaagaacagttttaataatcccgcatactatgtgctagaaggagttccacaccagcttctccctcccgaacccccaagtcccgcaagggcccctgttcccagcgccacaaagaacaaggttgccataacggtccccgcaccccagttggggcaccatcgccaccccagagtcggggagggctcttcgtctgacgaggagtcaggcggaactctccctccacctgattttccccctcctcccttgcccgactcagccattttcctgccaccatctttagacccactccccggtcccgtcgttaggggcagggggggtgcagaggccaggggcccaccccctcctaaagcacatccccgacccccactccccccaggtccaagtcccgcatccactttcttaggagaagtagcttcaggggatgaccgctcctgcagcgtactacagatggcgaaaactctgtccgaggtggattatgcacctgccggaccagcccgatcagccctgctccccggacctctcgagctccaacctccacgcggacttcctagcgattatggacggccactctcctttcctccacctaggatcagggagagcatccaggaggatctcgcagaagaagctccttgcctgcagggagggagagcctccggtttaggcgaagcaggtatgtctgcatggctgcgggcaatcgggctcgagagatatgaagaaggactcgtccataacggatgggatgacctcgaattcctttctgatataacagaagaagacttggaggaggctggtgtccaggatccagcccataagaggctcctgctcgataccctccagcttagcaaatag

SEQ ID NO: 226812 - DNA, 69 bp, synthetic construct
  misc_feature 1..69: note = Description of Artificial Sequence: Synthetic coding sequence
  source 1..69: mol_type = other DNA
atggcgtctgcttgcggggcaccaggccctgggggagcactcgggtctcaagccccaagttggtattag

SEQ ID NO: 226813 - DNA, 3051 bp, synthetic construct
  misc_feature 1..3051: note = Description of Artificial Sequence: Synthetic coding sequence
  source 1..3051: mol_type = other DNA
atggtgacaaggctgctgcagcagcagaaccttccacagactggagagcaagaactggagtccttggtactgaagttaagcgtgctgaaggatttcctttcgggaatccagaaaaaagctctcaaggccttgcaggatatgtcatccacagcccctcctgcacctcaacctagcacacggaaagctaagaccataccagtacaggctttcgaagtgaagttggatgttaccctgggcgaccttaccaagatcgggaaatcccagaagttcactctgtcggtcgatgtggaaggcggacgtctggtgctcctacgacggcaaagagatagccaggaggactggaccacatttacgcacgataggattaggcaactgatcaagtcacagagagttcagaataaattgggggttgtttttgagaaagagaaggatcgtacacagagaaaggattttatcttcgtgtccgcacggaaaagggaagccttttgccagctcttgcaactcatgaaaaataaacacagcaagcaggatgaaccagatatgatcagcgtgttcatagggacgtggaatatgggtagcgtgcctccaccaaagaatgtgacaagttggtttactagcaaagggctgggtaagactctggacgaagttaccgtgacgatcccccacgacatctacgtgtttggaactcaggaaaacagtgtgggggaccgagagtggctcgatctcctcagaggagggttgaaagagctcaccgatctcgattaccggccaatcgcgatgcaatctctgtggaatatcaaggtagcagtgctggtgaaacctgagcacgaaaaccggattagccatgtgtccacctcatccgtgaagacaggaattgcaaatacgctgggcaacaagggcgcagttggcgtcagtttcatgttcaatgggacaagctttggctttgttaactgtcatttaacatcaggaaacgagaagactgctcggagaaatcagaattacctggatattctccggctgttatccttaggcgataggcagctcaatgcttttgatatatccctacgatttacgcacctcttttggtttggcgatctcaattatcgcttggatatggatatccaggaaattctgaactatatctcccggaaagaatttgagccgctactgcgagtggatcagctgaatctggagcgggaaaaacacaaagttttcttgagattttccgaagaagaaatatcatttccccctacctaccgctacgagcgaggcagccgggatacatacgcatggcataaacagaaacctaccggagtccggactaacgtgccgtcgtggtgcgaccgaatcctatggaagagttatccagaaacgcatataatatgcaactcctacggctgtacagatgatatagtgacaagcgaccactctccggttttcggcacgttcgaggtgggagtgacaagtcagtttatcagtaaaaagggcctttcaaaaacatctgaccaggcatatattgagtttgaatctatagaggcaattgtgaagactgcttctcgaacgaagtttttcatagagttttattctacctgcctcgaggaatacaaaaagagcttcgaaaatgacgcccagtcttccgataatattaacttcttgaaagtccagtggagctccagacagctgccgaccttaaaacctattctggctgatatcgaatatctccaagatcagcaccttttactcaccgtaaaatcgatggacggatacgaaagttacggagagtgcgtagtggcgttgaagagcatgatcggatctacagcacagcagtttctaaccttcctctcacatcggggagaggaaaccggaaacatccggggttccatgaaggtgcgcgtacctacagagaggctgggaacccgtgagcgcctctacgagtggatctcaatcgataaggatgaagctggagctaaatccaaagcgccttccgtcagcagaggatcacaggagcctagaagtggatcgcgaaagcccgcatttacagaagccagctgtcccttgtctcggctcttcgaagaaccagagaaaccccctcccaccggtagacctccagctccgcctagggcagcccctagggaagaaccactgacacctcgcctgaagccagagggagcgccagagccagagggggtggctgctcctcccccaaaaaattcctttaataatccagcctactacgtcctggagggtgtgccccatcagctgctccctcccgagccaccctcccccgctcgggctccagtgccgtcagctacgaagaataaagtcgccatcacagtacctgccccacaactgggccaccatagacatccccgagtgggggaaggctctagcagcgacgaagaatcaggcggaacactgcccccacccgatttcccacctccgccactgcccgactcggccatctttctgcctcccagtctggaccccttacccggtccggtggtcagaggcagagggggagcagaggccagaggccctcccccacctaaagcacacccgagaccacccctgcccccaggcccaagtcccgcatcgacctttttgggggaggtcgcttctggcgatgatcgttcctgctccgtgctgcagatggccaagacactctccgaggtagactatgccccagccggtcctgcacggtcggccttactgcccggtccactggagctgcaacctcctcgaggcttgccctccgattacggcaggccattatcgttccctcctccgaggatcagggagtccattcaggaggacctggcggaggaagctccttgtctgcaggggggtcgagccagcggtctgggagaggccggaatgtccgcttggctccgtgcaataggactcgagaggtacgaggagggcttagtgcacaacggctgggacgatctggaatttctgagcgatataacagaggaggacctggaagaagcaggggtacaagatccagcccacaagaggttgctacttgacacgctccagctgtctaagtag

SEQ ID NO: 226814 - DNA, 57 bp, synthetic construct
  misc_feature 1..57: note = Description of Artificial Sequence: Synthetic coding sequence
  source 1..57: mol_type = other DNA
atggcatccgcatgcggtgctccaggacccggaggggcacttggatctcaggcttag

SEQ ID NO: 226815 - DNA, 474 bp, synthetic construct
  misc_feature 1..474: note = Description of Artificial Sequence: Synthetic coding sequence
  source 1..474: mol_type = other DNA
atggtgacacgactgctgcagcaacagaatttaccccagactggggagcaggaattagaaagtctcgtgctcaaactgtccgtgctgaaggattttctgagtggaattcaaaaaaaagctctcaaggctctgcaggatatgtccagcaccgcacccccagcgccacagccttcaacgcgtaaagccaagactatccccgtacaagccttcgaagtcaagctagacgtgaccctcggcgatctgaccaagattggaaagtcccagaaattcacgctgagtgtggacgttgaaggaggcagactggtgttgcttcggagacagcgcgatagccaggaagactggaccacttttacacatgatagaattaggcagcttattaaatcccaaagagtccagaataagctaggcgtcgtgttcgagaaagagaaggacagaacccagagaaaggatttcatatttgtgagcgctcggtag

SEQ ID NO: 226816 - DNA, 1200 bp, synthetic construct
  misc_feature 1..1200: note = Description of Artificial Sequence: Synthetic coding sequence
  source 1..1200: mol_type = other DNA
atgtcagacatattgcgggaactcttgtgcgtgagcgagaaagccgcaaatatcgcaagagcttgtcggcagcaagaggccctttttcagttgctcatcgaagaaaaaaaagagggcgagaaaaataagaaatttgccgtggatttcaaaactctggcggatgtgttggtgcaggaagtgatcaaacagaacatggagaataagtttcccggtctggagaaaaacatcttcggggaggagtcaaacgaatttaccaacgattggggcgaaaaaatcacactaaggctctgcagcacggaagaggagactgctgagctgctctctaaggtgctgaatggaaataaggtggcgtctgaggctttagcaagggttgtgcatcaggacgtcgcctttactgaccccacactcgattccactgagattaacgttccacaggacattctgggcatatgggtggatcccatcgattcaacttaccagtacattaaagggtctgccgatatcaaaagtaaccagggcatcttcccttgtggactgcagtgcgtgactattctgatcggggtgtatgatatacagaccggggtgcctctcatgggcgtgattaaccaacccttcgtcagtagggatccaaataccctgcgttggaagggacagtgttactgggggctaagttatatgggaaccaacatgcactctttgcagctcacaatctcccgcagaaatgggtcagagacccacactggcaacacaggtagtgaggccgcattttccccttccttctctgccgtgatctctacttccgagaaagaaactatcaaggccgctctctcccgcgtctgcggagaccggatcttcggggcagcgggagccggatacaaatctctgtgcgtagtgcagggcctcgtcgatatttatatcttttccgaggataccaccttcaagtgggacagttgcgctgctcatgccattcttcgggctatgggagggggtattgtggatctgaaagagtgcttagaaaggaacccggaaacaggtctggacctgccccagctggtttaccacgtggagaatgaaggagccgcaggcgtggaccggtgggctaataaaggaggactgattgcctaccgaagtcgcaaacggctggaaacattcctctcgttactagtccagaatctggctcctgcagagacccatacctag

SEQ ID NO: 226817 - DNA, 1200 bp, synthetic construct
  misc_feature 1..1200: note = Description of Artificial Sequence: Synthetic coding sequence
  source 1..1200: mol_type = other DNA
atgagtgacatcctccgcgagctgctgtgtgtttccgagaaggccgctaacattgctcgagcttgccgtcaacaggaggctcttttccaattgttaatcgaggaaaagaaggaaggagagaaaaacaaaaagttcgcagtagacttcaagactctggcagacgtcctggtgcaagaagttattaagcagaacatggaaaacaagtttcccggactggagaaaaatatcttcggtgaggaatcaaatgagttcaccaacgactggggcgagaaaatcactctccggctgtgcagcacagaggaggagacggcggaactgttgtccaaggtcctcaatggcaacaaggtagcgagcgaggcattagcaagagtagttcaccaagacgtggctttcacagatcccaccctggatagcaccgaaatcaatgtgcctcaggatatacttggaatctgggtcgaccctattgactctacttatcagtatatcaagggaagtgccgacatcaagtcaaatcagggtatttttccttgcgggctgcagtgcgtgacaatcctgatcggagtgtatgacatccaaacgggtgtgcccctgatgggagtcatcaaccagcccttcgtcagccgggatcccaatacattgcgttggaagggacagtgttattggggcttatcctacatgggcacgaacatgcacagcctgcagttaactattagccgaagaaatggatctgagacacacacaggaaacactggttcagaagctgcttttagtccgagtttctctgcggtgattagcacctcagaaaaggaaactatcaaggccgcactgtccagagtgtgcggagatagaatctttggggctgccggagccggttacaaatccctctgcgtggttcaggggttggtggacatctatatcttcagcgaggataccactttcaagtgggattcctgtgctgcccacgcgatactgcgcgcaatgggcggtggcatagttgatcttaaagaatgtctggagagaaaccccgaaacaggcctggatctgcctcaactggtctatcatgtggagaacgaaggtgccgcaggggtcgaccggtgggccaacaagggcggtctgatcgcctatcgcagtcgtaaacgcctcgagacatttctgtcgctccttgtccagaatttggcccctgctgaaacacacacctag

SEQ ID NO: 226818 - DNA, 468 bp, synthetic construct
  misc_feature 1..468: note = Description of Artificial Sequence: Synthetic coding sequence
  source 1..468: mol_type = other DNA
atgagtgatatcctccgggagctactctgtgtgagcgagaaagcggctaacattgccagagcatgcagacagcaggaagcgctgttccagctcctgatcgaggagaaaaaggaaggcgaaaagaacaagaaattcgccgtggacttcaagacactcgccgacgtcctggtgcaggaagtcatcaagcagaatatggagaataaattccctggcctggagaagaacatattcggcgaggagtccaacgaatttactaacgactggggagagaagattactctgcgcttatgctccaccgaggaagagaccgccgagcttctatctaaggttctgaatggcaacaaagtcgcaagcgaggctctcgctcgggtggtgcaccaggatgtagcgtttaccgaccccactctggactctacagaaatcaatgtgccccaagatatcctgggcatttgggtcgaccccatctag

SEQ ID NO: 226819 - DNA, 267 bp, synthetic construct
  misc_feature 1..267: note = Description of Artificial Sequence: Synthetic coding sequence
  source 1..267: mol_type = other DNA
atgtccgacatcctgagagagctactgtgcgtgtccgaaaaggcggcaaacattgccagggcttgtcgccaacaggaggctctgtttcaactgctgattgaggagaagaaagagggcgagaagaataaaaagtttgctgtggactttaagacgcttgccgacgtcctggtgcaggaggtgattaaacaaaacatggagaataagtttccgggactcgagaagaacatcttcggcgaggaatctaatgagttcactaatgattggtag

SEQ ID NO: 226820 - DNA, 639 bp, synthetic construct
  misc_feature 1..639: note = Description of Artificial Sequence: Synthetic coding sequence
  source 1..639: mol_type = other DNA
atgagcgacattttgagggaattgttatgcgtttctgagaaggccgctaacattgctagagcctgccgccaacaggaagcccttttccagctactcattgaagagaaaaaagagggagagaagaacaagaagtttgctgtggacttcaagacgctcgccgacgtgctcgtccaggaggtgatcaaacagaatatggaaaacaagtttccagggctcgaaaagaacatctttggggaggaatccaatgaatttaccaatgattggggcgagaaaattacattgcggctctgcagcactgaagaagaaactgccgaactgctgagcaaagtgcttaacggcaataaggtcgcctctgaggccctagcgagggttgtgcatcaggacgtggcttttactgacccgacccttgattctactgaaatcaacgtcccccaggatatcctcggcatttgggtagatcctatcgactctacgtatcagtacatcaaaggatcagcggacattaagtctaatcaaggtattttcccgtgcgggctgcaatgcgtgacaatcctgattggagtatacgatattcagactggcgtgccattaatgggggtaataaaccagcccttcgtatcccgggatccaaatacatag

SEQ ID NO: 226821 - DNA, 30 bp, synthetic construct
  misc_feature 1..30: note = Description of Artificial Sequence: Synthetic coding sequence
  source 1..30: mol_type = other DNA
atgagcgatattcttagagagctgctctag

SEQ ID NO: 226822 - DNA, 642 bp, synthetic construct
  misc_feature 1..642: note = Description of Artificial Sequence: Synthetic coding sequence
  source 1..642: mol_type = other DNA
atgagtgatatattaagggagctgctttgtgtctccgaaaaggcagccaacatcgcaagggcgtgccgccagcaggaggcgttgtttcagctgcttatcgaggagaaaaaggaaggggagaaaaataagaagttcgccgtggattttaagacgctggcggatgtattggttcaagaggtcataaaacaaaatatggagaataaatttcccggtcttgagaagaacatatttggcgaagaatccaacgagtttaccaatgattggggggagaagattacattgagattatgctctacagaagaagagactgcagaattgctttctaaggtattgaacggcaacaaggtagcctctgaggccttggctcgggtggttcaccaggatgtggcttttaccgatcccacattggacagtaccgaaatcaatgttccccaggatattcttgggatctgggtggatcccatcgactctacctaccagtacattaaggggtccgccgacattaagagtaatcagggaatcttcccctgtggcctccagtgcgttacaattctaatcggcgtgtacgacattcaaaccggcgttcccctcatgggtgttatcaatcagcctttcgtgagcagggatccaaataccctgtag

SEQ ID NO: 226823 - DNA, 573 bp, synthetic construct
  misc_feature 1..573: note = Description of Artificial Sequence: Synthetic coding sequence
  source 1..573: mol_type = other DNA
atgagtgacatcctgagagaactgctatgcgtgagtgagaaggcggctaacattgcacgcgcttgccggcaacaggaggctctttttcagctcttgatcgaggagaaaaaggaaggggaaaagaacaaaaagtttgcagtggacttcaaaactttagcagatgtgcttgtccaggaggttataaagcagaacatggaaaataagtttcccggactggaaaagaacatcttcggcgaggagagcaatgagtttacaaacgattggggggagaaaataacactcaggctgtgttctactgaggaggagaccgcggagctattgtctaaggttctgaacgggaacaaagtagccagcgaagctctcgcgcgagtggtccaccaggatgtggcgtttaccgaccctacactggactctaccgagattaacgtgcctcaagacatcctgggtatctgggtggaccctatagattctacttaccagtacatcaaagggtctgctgatatcaaatccaatcaaggaatctttccgtgtggcctacagtgcgtcactatactcattggtgtctacgactag

SEQ ID NO: 226824 - DNA, 93 bp, synthetic construct
  misc_feature 1..93: note = Description of Artificial Sequence: Synthetic coding sequence
  source 1..93: mol_type = other DNA
atgtctgatattctgcgagagctactgtgtgtgtccgagaaggccgctaatattgcaagggcttgtcgacagcaggaggccctgtttcagtag

SEQ ID NO: 226825 - DNA, 207 bp, synthetic construct
  misc_feature 1..207: note = Description of Artificial Sequence: Synthetic coding sequence
  source 1..207: mol_type = other DNA
atgtctgatatcctgagagagctgttatgtgttagcgagaaggctgccaatatcgcaagagcctgtcgtcagcaggaagcactcttccagctcttgatcgaggagaaaaaggaaggtgagaagaacaagaagtttgccgtcgacttcaaaactctggccgatgttttggttcaggaagtgatcaagcagaacatggagaacaagtag

SEQ ID NO: 226826 - DNA, 432 bp, synthetic construct
  misc_feature 1..432: note = Description of Artificial Sequence: Synthetic coding sequence
  source 1..432: mol_type = other DNA
atgtccgacatcctgagggagctgctttgcgttagtgagaaagccgctaatatagcccgagcctgcagacagcaggaagcactttttcagctgctgatagaggagaagaaagagggggagaaaaacaaaaagttcgccgtggactttaagacgctcgctgatgtactcgtgcaagaagtgatcaaacagaatatggagaacaaatttccaggcctggagaagaatatattcggcgaggaatctaacgagtttacgaacgactggggggagaagatcacacttcgtttgtgtagcacagaggaagagactgctgagctgctcagtaaagtactgaacggcaataaagtggcttctgaggctctggcacgtgtcgtgcatcaggacgttgcgtttacagatcccactctggacagtactgagataaacgtatag

SEQ ID NO: 226827 - DNA, 1200 bp, synthetic construct
  misc_feature 1..1200: note = Description of Artificial Sequence: Synthetic coding sequence
  source 1..1200: mol_type = other DNA
atgtccgatattctgcgtgaactcctctgcgtaagcgagaaggctgccaatatagctcgcgcttgccggcagcaggaagcgctcttccagctgcttatcgaggaaaaaaaagaaggggagaaaaataagaagttcgccgttgatttcaagaccctagccgatgtcctggtgcaggaagtgattaagcagaatatggaaaataagttccccggacttgagaagaatatcttcggagaagagtctaatgagtttaccaacgactggggtgaaaagataacattacgactctgcagtaccgaggaggagacggccgaactactgagcaaagtcctgaacggcaacaaggtagcttctgaagctctggccagggttgtccaccaggatgtagcttttacagaccccactttagattccaccgagatcaacgttcctcaggacattcttggaatttgggtagatccaatagacagcacataccaatacatcaaggggtctgcggacataaaaagcaaccagggaatatttccgtgcggtctacagtgtgtcacgatcctcattggagtgtatgatatccagacaggcgtgcctctaatgggcgtgataaatcagccctttgtgagtcgggacccgaacacattaaggtggaaggggcaatgttactgggggctttcgtacatgggaacaaatatgcacagtctgcagctgaccatctccagaaggaatggcagtgaaacgcacaccgggaataccggtagcgaggccgcttttagcccttcttttagtgccgtcataagtacctccgagaaggaaaccatcaaggcagcgctttcccgggtgtgtggcgaccggattttcggtgctgccggtgccggttacaaatcattgtgtgtcgtgcagggattagtggatatctacatcttctcagaggataccaccttcaagtgggactcttgcgcagcacacgcaatcttgcgtgccatgggcggagggattgttgaccttaaggagtgtctggaacggaatcccgagaccggtctggatctccctcaacttgtctaccacgttgaaaacgaaggcgctgccggagtggaccggtgggcaaacaagggcggactgatagcctaccggtcccgaaagcgcttggaaacatttctgagcctgctggtgcagaacctcgcgcctgcggaaacccacacatag

SEQ ID NO: 226828 - DNA, 2934 bp, synthetic construct
  misc_feature 1..2934: note = Description of Artificial Sequence: Synthetic coding sequence
  source 1..2934: mol_type = other DNA
atgaccgctcgtgagcatagtcctagacatggcgcacgggctcgcgcaatgcaaagagctagcacgatagacgtcgctgccgatatgctggggctgtcgctcgctggaaacatccaggatcccgacgaacctatcctggaattctctctggcgtgttctgagctgcacacaccaagcctggacagaaagcctaatagcttcgtggctgtgtcagtgacaacaccgcctcaggccttctggaccaaacacgcacagacagaaataattgaagggaccaataaccccatattcctgtcaagcatcgccttctttcaagatagtcttatcaaccagatgacacaggtcaagctgtccgtctatgatgtgaaggataggagccaggggaccatgtacctgctgggcagtggtaccttcattgttaaggatctgctgcaggatcgccaccacaggcttcatctcacactccgtagcgcagagtccgatagggtcggcaatattaccgttatcggctggcagatggaggaaaaatctgaccagcgccctcccgtaactcggagcgtggataccgtcaacggacgtatggtgctgcctgtggacgaatctctgacagaggcactcgggattaggtctaaatacgcgtctctgaggaaggacacacttcttaaaagtgtgttcggcggagcgatatgtcgcatgtaccggttccccaccacagacgggaaccacctgcggatactcgaacagatggcggagagtgtactgagtttacacgttcctcggcaatttgtgaagttgttgttagaggaggacgccgctcgcgtgtgtgagctggaagaattgggggagctttccccctgctgggagagcttgagaaggcagatcgtaacacaataccaaactataatactgacctaccaagagaacctgacagatttgcaccagtacaggggaccctcttttaaagcttcttccctgaaggcagacaagaagttagagttcgtccctactaatttgcatatccagaggatgcgcgtccaggacgatggcggatcagaccagaattatgatatcgtgacaatcggcgcacctgctgctcactgccaaggctttaagagtggcggactccgcaaaaagctgcacaaattcgaagaaactaagaaacatttcgaggaatgctgtacctcttccggatgtcagagtattatttatatcccacaggacgtcgtgagagctaaagagatcatcgcacagatcaatacattaaaaacacaagtgtcttattacgccgagagactgtctagggcagcaaaggaccgaagtgccactggattagagagaacgcttgccatcctggcggacaagacacgtcagttggtgaccgtgtgtgactgtaagctcctcgctaactcaattcacggcctgaatgcagctcgcccagattacatcgcatcaaaagccagccccactagcacggaggaggaacaggtgatgcttagaaacgatcaggatacactcatggcacggtggaccggcaggaatagtagaagctccctgcaggttgattggcatgaggaagagtgggagaaggtctggctcaatgttgacaaatctctggagtgcattatccagagggtggataagcttttgcagaaagaacgccttcacggagaaggctgcgaagacgtcttcccttgcgctggttcttgtacttccaagaagggaaacccagattcgcacgcgtattggataagacccgaggacccattctgcgatgtgcccagcagcccctgtccaagcaccatgccctcaacagcttgtcacccccatctgacaacacactgctccccccctcccgaagagtccagccccggtgagtggtctgaggccctgtacccactcctaacgactctgacagattgcgttgccatgatgtccgacaaggcaaaaaaagcaatggttttcttgctcatgcaagattctgcaccgacgatcgccacttacttatcacttcagtacagacgagacgttgtgttctgtcagacactgactgccctaatctgtgggttcatcatcaaattgcgcaactgtctccacgacgacggcttcctgcgacagctgtatactatcgggctgcttgctcagttcgagtccctgctcagcacctacggggaagagctggccatgcttgaggatatgagtctcggaattatggacctgcggaacgttaccttcaaagttacacaagctactagctcagctagtgccgatatgctcccagttatcacaggaaaccgcgatggttttaacgttcgggtccctctgcctggtccgctctttgatgccctgcccagagagattcagtcaggcatgctgctccgggttcagccagtgttgtttaatgtcgggattaacgagcagcaaacactggccgaacgctttggagatacgtcactccaggaggttattaatgtagagagtctagtccgcttaaactcttactttgagcagtttaaagaagtgcttcccgaggattgtttgcccaggtcacgcagtcaaacatgtctgccagagctcctgcggtttctgggtcagaacgtgcacgcgaggaaaaacaaaaatgtggatatcctgtggcaggcagcagagatctgccggcgactgaatggggtaagatttacatcttgcaagtcagccaaggacaggaccgcaatgagcgtgaccctagagcaatgcctgatactccagcacgagcatggtatggctccccaggtgtttactcaagctctcgaatgcatgagatcagaaggttgtcgaagagaaaatactatgaagaacgtggggagtaggaaatacgcctttaatagtctgcagctcaaagccttcccaaagcattatagaccaccagaaggaacatatggtaaggttgagacttag

SEQ ID NO: 226829 - DNA, 2817 bp, synthetic construct
  misc_feature 1..2817: note = Description of Artificial Sequence: Synthetic coding sequence
  source 1..2817: mol_type = other DNA
atgacagcacgcgagcattcacccagacacggtgcccgtgctcgtgctatgcagcgcgcatctaccattgatgtagctgctgatatgctcggtttgagcctagcaggcaatattcaggatccggacgaacccattcttgaattctctctggcctgtagtgaactgcacacaccttccctagaccgaaagccaaattcctttgttgccgtgtccgtgacaactcccccacaagctttttggaccaagcacgctcagactgagataatagagggcacaaacaatccaatattcctgtcaagcatcgcctttttccaggactctctgatcaatcagatgactcaagtgaaactctccgtgtatgatgtgaaagatagaagtcagggtaccatgtacctcctgggaagtggaacctttatcgtcaaagacttgttgcaggaccggcatcatcggctccacctcaccctcaggagtgctgagtcggatcgcgtgggaaatatcactgtgattgggtggcagatggaggaaaagtcggaccaacgtcccccagtcactcgatccgtcgacaccgttaatgggagaatggttttgcccgtggacgagtctctgacggaggctctggggataaggtcaaagtatgccagtctccgtaaggatacattactcaagagtgtgtttgggggagctatttgtcggatgtaccgctttccaactacggacggcaatcacctgaggatcctggagcagatggctgaatccgtgctcagccttcacgtcccccgtcagttcgtgaaactcctgctcgaggaggacgctgccagggtgtgcgaattggaagaattgggcgagttaagtccctgttgggagtctctcaggcgccagatcgtgactcagtaccagaccataatcctgacttaccaggaaaatctaacagacctacatcagtatcgcggaccctctttcaaggcctcctcactcaaagctgacaaaaagctcgagttcgttccaaccaatctgcatatacaacgcatgagggtgcaggatgacggcggttccgatcagaattacgatatcgtgactatcggcgcacccgctgcacactgccaaggatttaaaagtggcggattacgaaagaagcttcacaaattcgaagagactaagaaacacttcgaagaatgctgtacaagctccgggtgtcagagtatcatctacatcccacaagatgtcgtgagagcaaaggagattatcgctcagatcaacacactcaagacgcaggtgagctactatgccgagcgattatccagagctgcgaaagaccggtcggcaacagggctggagcgcactcttgccattctggctgataagacacgccagttggtgacagtgtgcgactgcaagctcttggccaacagcatccacgggctgaatgcagctagaccggattatatcgccagcaaggccagccccacgagtacagaggaggaacaggttatgctgcggaatgatcaggacaccttgatggctcgctggaccggtaggaatagtagatcaagtctccaggtggattggcacgaagaagagtgggagaaggtatggctgaacgtggacaagtctttagaatgtataattcagcgcgtggacaagttgctgcagaaagagagactgcacggagagggatgcgaggacgtctttccttgcgcaggatcatgtacgtctaagaaggattgctctccacccccagaggagtcatcccctggagagtggagcgaggccctgtaccccctcctcaccacactcactgactgcgtggctatgatgtcagacaaagctaagaaggccatggtcttcctgttgatgcaagacagtgctcctacaattgcaacctacctatctcttcaatacaggcgagacgtcgtcttttgtcagaccctgactgcgcttatttgcgggttcatcattaagctccggaattgtctgcacgacgatgggttcctcagacagctttacaccattggtcttctggctcagtttgagagtctgctgagcacgtatggggaggaactggcaatgctggaggacatgagtttgggcattatggacctgcggaacgtaacattcaaagtcactcaggccacttcaagcgcctccgcagatatgctgcctgtgattactgggaacagagatggattcaatgtcagggtgcccctgccgggacccctcttcgatgcgctccccagagagattcaatcagggatgttgctccgcgttcagcctgtgctgttcaatgtgggcattaatgaacaacagacactcgccgaacggtttggcgacaccagccttcaggaagtcatcaacgtagagtctctcgtcaggctgaattcttacttcgaacagtttaaggaggtgctcccagaggattgtctgcccagaagtagaagccagacgtgcttacctgaactgttgcgattcttaggtcagaacgttcacgctaggaaaaataagaatgttgacattctttggcaggcagccgagatatgcagaagactgaacggagtgcggtttacaagctgtaagtccgcaaaggacaggaccgcaatgagtgtcacactggagcagtgtttaatactgcaacacgaacacggaatggccccacaagtgttcacccaagctctcgagtgcatgcggtccgaagggtgtagacgcgagaatactatgaaaaacgtcggtagcagaaaatacgcttttaattcactacagctgaaggcttttcccaagcattatagacctccagaaggcacatatggcaaggtggaaacctag

SEQ ID NO: 226830 - DNA, 2865 bp, synthetic construct
  misc_feature 1..2865: note = Description of Artificial Sequence: Synthetic coding sequence
  source 1..2865: mol_type = other DNA
atgacagcgagggagcacagcccaagacatggggcaagagctcgcgcaatgcagcgcgcaagcacaattgatgtcgctgccgatatgcttggcctcagtctggccggtaacatccaagatcccgatgagcccattctggagttttccttggcctgctctgaacttcataccccctctttagacagaaagcccaactccttcgtcgcggtgtctgtaaccactcccccacaggccttctggacaaaacacgcccagacagagattattgaaggcaccaacaaccccatttttctgtcttccatcgcctttttccaggatagcttgataaaccagatgacccaggtgaaattaagtgtgtacgacgtgaaggaccggtctcagggcaccatgtacctgttgggcagtggaacctttatcgttaaagacttgctgcaggaccggcatcacaggctgcacttgacgctgcggtcagcggagtctgacagagtgggtaatatcacagtgatcggatggcagatggaagaaaagtccgaccagcgccctccagtcacccggagcgttgacaccgtgaatgggcgaatggtgttgcctgtcgatgagagtctcaccgaggctctaggcatcagaagcaaatatgcaagtcttaggaaagatactctgctaaagtccgtgtttgggggagcgatctgtaggatgtaccggttcccaaccactgatgggaaccatttaaggattctcgagcaaatggccgaaagcgtgttaagtctgcatgtcccccgacagttcgtgaaactgcttctggaagaggatgctgcaagggtgtgcgaattagaagaattgggggagttgagcccgtgctgggagagtctacgtaggcagatcgtcacacagtaccagacaataatcctcacctatcaagaaaacttaaccgatcttcaccaatacagagggccaagttttaaggccagcagcctaaaggccgacaaaaaattggagttcgtgcccaccaatcttcacatccagcggatgcgcgtacaggacgatggagggtctgaccagaattacgatattgttacaatcggggctcccgcagctcactgccaagggttcaagagcgggggtctgcgaaagaaactgcacaaattcgaggaaaccaagaaacacttcgaggagtgttgtaccagcagcggctgtcagagcatcatctatatccctcaggatgtcgtgcgcgctaaagagatcatcgcacagatcaatactctgaagactcaagtaagctactacgctgagcgcttgtctagggcggcaaaggatagatctgccacggggctagaacgtaccctggccatcctggccgataagaccaggcaattagttaccgtgtgcgattgtaagttgctggccaatagtattcacggcttaaatgctgcaagacctgactacattgccagtaaggcctcccctacatccacagaggaggaacaggtcatgctgcggaatgaccaggataccttaatggccagatggactgggaggaattcccgttctagtcttcaagttgattggcatgaggaagagtgggaaaaggtgtggctcaacgttgacaagtccctagaatgcattatccagcgggtcgataaacttctgcagaaagagaggctccacggggaaggatgtgaagatgtgtttccatgcgccggaagctgtaccagcaagaaggactgtagcccacccccagaggagtcaagtcctggtgaatggtcggaggctctgtatccattactgacaaccctgaccgactgcgtcgcaatgatgagtgacaaagctaagaaggccatggtgttccttctgatgcaagactccgcgccaacgattgccacctatctgagcctccagtacagaagggatgtcgtcttttgccagactttgactgcactgatttgtggtttcatcataaaattgcgaaattgtttgcatgatgatggcttcctgagacagctgtacaccattggcctgttggcgcagtttgaatccctcctgagcacgtatggagaagaactcgcaatgctcgaggatatgtcactaggcatcatggacctgaggaacgtgacattcaaagtgactcaagctacctcatccgcttctgctgatatgttgccagtgattacgggtaacagggatggtttcaatgtacgagtacctcttcctggtcccttgtttgacgctcttcccagagagattcagtctggaatgctcctcagagttcagcccgtgctgttcaatgtgggcatcaatgagcagcagaccctggctgagcggtttggtgatacctcactgcaagaggtcatcaatgtcgaaagcttagtgcggctgaacagctattttgagcagttcaaggaagtgctcccagaggactgtttgcctaggtctagaagccaaacatgcctgcctgaactgctgcgcttcctaggacaaaacgtgcacgcaagaaaaaacaaaaacgtagacatcctgtggcaggccgcagaaatctgccggaggctgaatggagttcggttcacctcctgcaaatctgcaaaggacaggacagcaatgtctgtcactctcgaacagtgcctgattctgcaacacgagcacggtatggccccacaggtgttcactcaagcactggagtgcatgcggtccatcggaaccagagaagtggtcacccaaaagaatctgtctggcttggtcccaattcgagacttgagactcgacccatccctgctgtgctcgatccctctgctggctctgtccccgaacctcttaatagtatggctctttctgagtatcgcctatttggtcaccaagctgagatgcaagtag

SEQ ID NO: 226831 - DNA, 2919 bp, synthetic construct
  misc_feature 1..2919: note = Description of Artificial Sequence: Synthetic coding sequence
  source 1..2919: mol_type = other DNA
atgactgcgagagaacatagtcctcgacacggcgcaagagctcgggcaatgcagagggcctcaacaatagacgtggctgcagatatgctaggattatccctggccggaaatattcaggatccggacgagccaatcctcgaattctcactggcctgcagcgaacttcacactccaagtttggacaggaagccgaattctttcgtcgcagtcagcgtgacgacgccacctcaggccttttggaccaagcatgcccagactgagattattgaggggaccaacaacccgatttttttgtcttccatagccttctttcaggatagtctgattaaccagatgactcaagttaaactgagcgtctatgatgtgaaggatcggtcccaagggacgatgtacctgcttgggtctggcacttttattgtcaaggatctgttgcaggaccgccaccacaggctgcatctcacactccgaagtgcagaaagcgatagggtgggaaacatcaccgtgatcggttggcagatggaggaaaagtccgaccagcgcccacccgtgactaggagtgttgatacagtcaatgggcgtatggtactgccggtcgacgaatctctaaccgaagccctcggcatccgcagcaaatacgctagccttaggaaagacacactgttaaaaagtgtcttcggcggtgccatttgtcgtatgtacagatttccaaccacagatgggaaccacctccgcatcctcgagcagatggccgagtctgtgctctctctgcatgtgcctcggcagtttgttaagctactcctcgaggaagacgccgcacgagtctgcgagttggaggagctcggtgaactgagtccctgttgggagagccttaggcgacaaatcgtgacgcagtaccagacaattattctcacttatcaagaaaatttaaccgacctccatcaataccgcggtccttcctttaaagcctcttcgctcaaagccgacaagaagctagaattcgtgccgaccaatctgcatatccaacgcatgagggtacaagatgacgggggaagtgaccaaaactatgacatagtcactattggggctccagccgcacactgccaaggtttcaaaagcggtggcctgaggaagaaactgcataagtttgaagagacaaagaaacatacatcttcgggctgtcagtccatcatctatattccacaggatgtggtccgcgctaaagagataattgctcagataaacactctcaaaactcaggttagctattatgcggagcggctttcccgggcagccaaagacagaagcgctactgggctggagcggacactggcgatattagctgacaagacccgccagctggtgacggtctgtgactgtaaactcctggctaattccatacatggattgaatgcagctagacctgattatatcgcctcaaaggcttctcctacaagtaccgaggaggagcaggtaatgctcaggaacgaccaggacaccctgatggcacgctggaccgggagaaacagccgttctagcctgcaggtagattggcacgaggaggagtgggagaaggtttggctgaacgtggataaatctctggaatgtataattcagagagtggataagcttttacagaaagagagattacacggtgaagggtgtgaggacgtcttcccttgtgcagggagttgtactagcaagaagggaaaccccgatagtcatgcatattggattagacccgaagaccccttctgcgacgtgccaagtagtccttgtccatctactatgccttctaccgcttgtcacccacatctgactacacattgcagcccacctccggaggagagcagtcccggagaatggagtgaagccttataccccctcctaactaccctaacagactgtgtagccatgatgtccgataaagcgaagaaagcaatggtgttcctcctcatgcaggactccgcgcctaccatagctacttaccttagcttgcagtaccgcagggacgtggttttctgtcagactctcaccgctctcatctgtggttttattataaaactgagaaactgcctgcatgacgatggctttctgagacaactgtacacaattgggctcctcgcacaattcgaaagcctcctttccacctatggcgaagagctggccatgctcgaagacatgtctctgggcattatggacctgagaaacgtgacttttaaagtcacacaggcaacaagctcggccagcgcggacatgctgcccgttattaccggcaatagagatggcttcaacgtccgggtcccacttcccggaccactctttgatgcgctgcctcgcgagattcagtctggcatgctcctgcgtgtgcagccggtgctgtttaatgttggcatcaacgaacagcagaccttggcagaaaggttcggcgatacatccctgcaagaagtgatcaacgttgagtccctggtgcggctgaattcctacttcgagcagtttaaggaggtccttccggaagattgcctccctaggtctcggtcccagacctgcctgccggagctcctccgtttcctgggtcaaaacgtccacgcaagaaagaacaaaaatgtagatattctttggcaagccgctgaaatctgccgacgtctcaacggagtgcgatttacgagctgtaagtcagcaaaagacagaaccgcgatgtctgtcactctcgaacaatgtctaattcttcagcatgagcacgggatggctccccaggtgtttacacaggcattagagtgcatgcgtagcgaggggtgcagacgggagaacactatgaaaaacgtcggcagcaggaaatatgcattcaactccttgcaactcaaggctttccccaaacactaccggccacccgagggcacatatggcaaagtggagacatag

SEQ ID NO: 226832 - DNA, 2934 bp, synthetic construct
  misc_feature 1..2934: note = Description of Artificial Sequence: Synthetic coding sequence
  source 1..2934: mol_type = other DNA
atgactgccagggaacactcaccgaggcacggggcaagagcaagggcgatgcaaagggcgagtaccattgacgtggcagccgatatgttggggctgtcactagccggtaacatacaggatccagatgagcccattctggaattctcactggcatgttccgagctgcatacacccagcctcgatagaaaacccaacagcttcgtggctgtgtccgtcacaactccccctcaggcattttggaccaagcacgctcagacagaaatcatagagggaacaaacaatcctatctttctgtcgtccatcgctttctttcaggattctcttataaaccagatgacccaagtcaaactctccgtctatgacgtgaaagacaggtcccaggggacaatgtacctgctcgggtcaggaacatttattgtgaaggacctgctgcaggaccgccatcacagactccacctgacattgaggtctgcagaatcagacagggtaggcaacataactgtcatcggctggcaaatggaggaaaagtcagaccagaggccccctgtgacacggagcgtggataccgtcaatggaagaatggttctgcctgtcgatgaaagcctgaccgaagccttgggaatccgttctaagtacgcaagtctgaggaaggataccttactaaagagcgtctttggcggtgcgatctgccgaatgtaccggtttccaacaacagacggcaaccatcttcgtatactggagcaaatggcagagtctgtcttgagtttgcacgttccgagacagttcgtcaagctgctcctcgaagaggacgctgccagagtctgtgagctggaggagctgggggaattgagtccgtgttgggaaagcctgcggagacaaatagtgacacagtatcagaccatcattttgacgtaccaggagaatttgacagacttgcatcagtaccgagggccttctttcaaggcttcgtcactcaaagctgacaagaaacttgagtttgttcctaccaatttgcacattcagcgcatgcgggtccaggacgacggagggtccgaccaaaactatgatattgtcaccattggggcacccgctgctcattgccagggcttcaagtcagggggtctccggaaaaagttgcataaattcgaggaaaccaaaaagcatttcgaagaatgttgcacatctagcggctgccagtcaattatttacataccacaggatgtggtgagggccaaagaaattattgctcagatcaataccctgaagacccaggtcagttattatgcagaacgccttagtcgcgctgctaaggatagatcggccaccggcctcgaacggaccttggctatcttagccgacaagacccgccagttggtaaccgtgtgcgactgtaagttgctcgccaattctattcacggtttaaacgcagcacgcccagattacattgcttcaaaggcctcccccacgagcacagaagaagaacaagtgatgttacggaacgaccaggatacacttatggcaagatggaccggaagaaattctcgctctagcctgcaagtagattggcacgaggaagagtgggagaaggtgtggcttaacgtggacaagtctctggagtgtattattcagcgggtcgataaactgctacaaaaagagaggctgcatggagaagggtgtgaggacgtatttccttgtgctggctcctgcactagcaaaaaaggtaatccagatagccatgcctattggatcaggccggaggaccctttctgcgacgtgccctcctctccttgcccatccacaatgccttccaccgcatgtcatcctcatcttaccactcattgcagtcctccaccagaggaaagtagcccaggagagtggagcgaagcgctgtatccactgcttacgacgctgaccgattgcgtggcaatgatgtcagacaaagcaaagaaagccatggtgttcctgctaatgcaggactcagccccaacgatcgcgacctacctttcactgcaatatcggagagacgtggtgttttgtcagactctgaccgccctgatctgcggtttcattatcaagttgcgcaactgtctgcatgacgacgggttcctgcgacaactatacacaatcggtctgctggcacagtttgagtcactgctgtcgacttacggagaggaattagccatgctggaggacatgtccctggggatcatggatcttaggaacgtgacatttaaggtgacacaggccactagcagtgcctcagccgacatgctgccagttataaccggcaacagggacggcttcaatgtgagggtcccactgcccggtccactgtttgacgcgctgcccagagaaattcagtcaggcatgctgttaagagttcagcccgttttatttaacgtcggcattaatgaacagcagactctcgctgagagattcggagacacatctctgcaagaggtgatcaacgttgaatctctggtgcggctaaactcctattttgaacagttcaaagaagtattgcccgaggattgcctaccacgatctcgcagccagacctgcttgcccgagttgttacgtttcctcgggcaaaatgtccatgctcggaagaataaaaacgttgatatcctttggcaagccgctgagatatgccggagactgaatggggtgaggtttacctcctgtaaatccgccaaagacaggaccgccatgtcagtcactctcgagcagtgcttaatccttcaacacgagcatggcatggctccccaagtgttcacccaagccctcgaatgtatgagatcagagggttgcaggagggaaaacacaatgaaaaacgtcggtagcagaaagtacgccttcaactcactgcagctaaaggcctttcccaagcactatcgacctcctgaagggacctacggtaaagtagagacctag

SEQ ID NO: 226833 - DNA, 2817 bp, synthetic construct
  misc_feature 1..2817: note = Description of Artificial Sequence: Synthetic coding sequence
  source 1..2817: mol_type = other DNA
atgactgctcgcgaacattcgccacgacatggcgctcgcgcacgggcaatgcaacgggcatccaccatcgatgtggctgctgacatgcttggactgtctttggcgggaaatatccaggacccagatgaacctattctggagtttagcttagcctgctcggagctgcacactccgtcactggaccgcaaacctaattcttttgtggccgtgtccgtgaccactcccccacaggctttctggacaaaacatgctcagaccgagatcattgaaggtacaaacaaccccatttttctttcctccattgctttctttcaagattctctgattaaccagatgacccaggtgaagctctctgtgtacgacgtcaaagaccggtcacagggaacgatgtatctgctgggctcaggcacctttattgtcaaggatctgctgcaggacaggcatcatagactccatctgactcttagaagtgccgagtcggacagagtcggtaacataacggtcattggatggcagatggaagagaagtcagatcagcgtcctcctgtgacccgctctgtggacaccgtgaacgggagaatggttctacccgttgatgagtccctcacagaagctttgggcattcgaagtaagtacgcaagtctgagaaaggacaccttgctgaagagcgtgttcggaggggcaatttgtcgaatgtatcgattcccgaccactgatgggaatcaccttagaattctggaacagatggcggaaagtgtgctttccctgcacgtccctagacaatttgtgaaacttctgcttgaggaagacgcagcaagggtgtgcgagctggaggaacttggagaactgtctccgtgctgggaatccctgcggaggcagattgtgacccagtatcagacaataattctgacttaccaggaaaatctgacggatctgcatcagtatagaggtccctcttttaaagcgagctccttaaaagctgacaaaaagcttgagttcgtgcccaccaatctccacattcaacgcatgcgtgtacaggatgacggcggatctgaccagaattatgacattgtcaccattggtgctcctgctgcacattgtcagggttttaagtcagggggattgagaaaaaaattacataaattcgaagaaacaaagaagcagcaagaagaatcccgtacgtcctcaggctgccagagtattatctacatcccccaggatgttgttcgcgcaaaggaaattattgctcagatcaataccctcaaaacccaggtgtcctactatgcggagcgactgtcccgcgctgccaaggaccggtcggcgaccgggctcgaaagaaccctggctatactggcagataaaactaggcagcttgtgacagtctgtgattgcaaactgctggccaacagcattcatgggctgaacgcggcacgcccagactatatagcctctaaagccagccctacttccaccgaggaggagcaggtcatgttgcgtaatgatcaggatactctgatggctaggtggacaggaagaaacagcaggtccagcctccaagtggactggcacgaggaagagtgggagaaggtgtggctaaatgttgataagtcactcgagtgcatcatacaaagggttgataaattactgcagaaagaacgcctgcacggggagggctgcgaagacgtatttccttgcgctgggtcctgtacttcaaagaaggactgttcgccacctcctgaggaatcttcacccggtgaatggagtgaagcactttacccactgctgaccacactgaccgactgtgtggcgatgatgagtgacaaagcgaaaaaggccatggtgttcttgctgatgcaggacagcgcacccaccatcgccacttacctctcactgcagtaccgacgagatgtggtgttttgccagacactgacagctctcatttgtgggtttattatcaagcttcgtaattgcctgcatgacgacggcttcctacggcagctatacaccatcggcctgctggcccagttcgagtcactgctgtctacttacggcgaggagcttgcgatgctagaagacatgtcactcgggatcatggacctacggaacgtcacctttaaggttacacaggccacctcatctgcatcagccgacatgctgccggtaattacaggcaatagggatggttttaatgttcgggttccactgcctgggccactcttcgatgcactcccgagagagatccagtcagggatgcttctccgagttcaacccgtcctgttcaacgtagggataaacgaacagcagactctggcagagaggttcggcgacacgtccttgcaggaagtgataaatgtcgagagcctggtgcgattgaatagctacttcgaacagtttaaggaggtcctgcctgaggattgcctgcctcggtcccgaagccagacctgccttccagagcttctgagattcctgggtcagaatgtgcatgccaggaagaacaagaacgttgacattctttggcaggccgctgaaatttgcaggagattgaacggtgttcggttcacctcttgtaagtcggccaaggacaggaccgcgatgagcgtgactctggagcagtgtctcatccttcagcacgagcacggaatggcccctcaagttttcactcaggctctagagtgcatgcggagtgagggctgcagacgcgaaaacactatgaagaacgttggctccaggaagtacgccttcaacagcttgcagctgaaagcatttcccaaacattatcgaccaccagaaggaacatacgggaaggtggaaacatag

SEQ ID NO: 226834 - DNA, 3021 bp, synthetic construct
  misc_feature 1..3021: note = Description of Artificial Sequence: Synthetic coding sequence
  source 1..3021: mol_type = other DNA
atggaggggcagtcgagccgtggctcccgtcggcctggtactcgtgctggcctaggctcgctcccaatgccacaaggagttgctcagacgggcgcacctagtaaggtggacagttccttccagctaccggcaaagaagaatgcagcgctaggaccctctgagcctcgcctcgcattagctccagtcggaccaagggctgctatgagcgcatcaagtgagggccctagactggcactggcttcaccaaggccaatcttggcccctctctgcacaccggagggacagaagaccgcaaccgcacaccgatctagcagcctggcccctacttccgtgggacagttagtgatgtctgccagtgccggtcctaagcctcccccagcaaccactggttctgtgctagcaccaacttctctgggcctggtgatgcctgcgtcagccggtccaagaagccctcccgtgaccctaggtcccaacctagctccaacttcacgcgaccagaagcaggagcctcccgcttcggttggacctaagcctacgctggctgcatcaggcctgtctttagctctggcctcagaggagcaacctcccgaacttcccagcacgcccagtcctgtgccgtctccggtactttcccctactcaggaacaggctctggcccctgcttctacggcttctggggcagccagcgtagggcagacgtccgctcgaaaacgggacgccccagcacccagacctttgcctgcatccgagggacatctccaacccccagcacagactagtggccctactggctctccaccatgcatccaaacctctccagaccctagactgtctccttcattccgcgctagacccgaagcccttcacagcagtcccgaggacccagtgctgccgaggcctccccagacactccctctggacgtcggccagggtccaagcgaacccggtacgcattcgcctggccttttgtcacctaccttccgtcctggagcgccatccgggcagaccgtgccgccacctctaccgaaacctccgaggtctcctagtagatcccccagccatagtccaaatagatctccctgcgtccctcctgctccggatatggcacttccccgactaggaactcaatcaactggcccaggacgctgcctttcacccaatcttcaggcccaagaggcaccagccccagtaaccacatcttcttccacatctactctatcatcctcgccgtggtcagctcaaccgacctggaagtctgaccccggatttagaatcaccgttgtgacttggaatgtcggcacagccatgcctcccgacgacgtgacatctctccttcacctggggggtggtgacgactcagacggagcagacatgatcgctattggacttcaggaggtgaatagcatgctgaataagaggctgaaggacgctctgtttaccgatcagtggtctgaattattcatggacgcactcggccctttcaattttgtgctcgtctcatccgtacgcatgcagggcgtgatcctgctactgtttgccaaatactatcacttgccttttttgcgagacgtgcaaaccgactgcactcggaccggtctgggcggatactggggaaacaagggtggtgtctctgtgcgtctggcggcatttggccatatgctttgctttctcaattgccacttacctgcacacatggacaaagccgaacagcgcaaagacaactttcagactatcctttccctgcaacagtttcagggcccaggggctcagggcatccttgatcacgacctagtcttttggtttggcgatctgaattttaggattgaaagctatgatcttcatttcgtcaaattcgcaattgattctgaccaactgcaccagctatgggaaaaagaccagctgaatatggcgaagaacacatggccaatcctcaagggcttccaggagggccctctgaatttcgcaccgacttttaaatttgatgtgggcactaacaagtacgatactagcgcgaagaaaaggaaaccagcctggactgatagaattctgtggaaagtcaaagcccctggaggaggaccgtccccctccgggcgaaagagtcacagactgcaggttacccagcattcatatagatcccacatggagtacactgtctctgaccataaacctgttgcggctcagttcttattgcagttcgcattccgagatgatatgcctctggtcaggctcgaagtggccgacgaatgggtacgacctgagcaggcagtggtgcggtatcgcatggaaacagtgttcgcacgaagtagttgggactggatagggctgtatagagtaggctttaggcattgtaaagactacgttgcttacgtgtgggccaagcatgaagacgttgacggtaatacataccaggtcacatttagcgaggaatcgctgccaaaaggccatggcgactttatcctcggttattatagtcacaatcacagcatcctgattggaatcaccgaaccattccagatatcccttccctctagcgagttagcttccagttcaactgactcttccggaaccagcagtgagggcgaagacgactctacactcgaactgctcgcccctaaatcccgcagccccagcccagggaagtctaaaagacatagaagtcgttcaccgggactcgcaagattccccggacttgcgctccgaccaagctccagagagaggcgcggtgccagccggagtcccagcccccagtcccggcgtctgtctagggtcgccccagaccgctcttctaacggtagctcacgtgggagctccgaagaaggtccttccggcctcccaggcccatgggcttttcctccggctgtgccacggtccttgggtttattaccagcactacgtttggaaactgttgatccaggtggtgggggttcctggggcccagaccgagaggctcttgccccaaatagcctcagtccatccccgcagggccaccgagggctcgaagagggcggtctgggcccttag

SEQ ID NO: 226835 - DNA, 1920 bp, synthetic construct
  misc_feature 1..1920: note = Description of Artificial Sequence: Synthetic coding sequence
  source 1..1920: mol_type = other DNA
atggcgctgcctcgccttggtacccagtccactggacccggacgctgcttgagccccaatttgcaggcgcaggaagcccctgcacccgttactacttctagctccactagcaccctgtcttccagcccttggagcgcccaacccacctggaagagcgaccccggtttcagaataactgtggttacttggaacgtgggtaccgcaatgccccctgatgacgtaacttccctgctgcacctaggcggaggcgatgatagcgatggggcagacatgattgcaatcgggcttcaggaggtcaatagcatgctgaacaagaggctcaaagacgcgttgttcaccgaccagtggtctgaactgtttatggacgctcttgggcctttcaacttcgttcttgtgtcctccgtacggatgcaaggggtcatattactgctgttcgctaaatactaccacctgcctttccttagagatgtgcagacagattgtactagaactggtcttggaggctattgggggaacaaaggtggggtgagcgtgaggctggccgcatttggacacatgttgtgctttcttaattgtcatctaccagcacatatggataaagccgaacagcgcaaagacaattttcaaactatactgtccctccaacagttccagggacccggagcccaaggcatactggaccacgacttggttttttggttcggagacctaaattttagaattgagtcttatgatcttcacttcgttaaattcgctattgactctgaccaactccaccagctgtgggaaaaagaccaactgaatatggccaagaacacatggccaatcttgaaaggctttcaagagggaccccttaactttgcgcctacattcaaattcgatgtaggcacaaataagtacgacaccagcgctaaaaaaagaaagcctgcctggacagacagaatcctctggaaggtgaaggctcctggtggaggtcctagcccgtcaggacggaagagccacagactacaggtcacacagcatagctaccgaagtcatatggagtataccgtatccgaccacaagccggtcgccgctcagttcttgctgcaattcgctttccgagatgatatgccacttgtccggctagaagtggcggatgagtgggtgcgccctgaacaggccgttgtaagatatcgcatggagaccgtgttcgcaaggtcgagctgggattggatcgggttatatagagtgggattccgccactgcaaggactacgtggcttatgtctgggctaagcacgaagacgttgatgggaatacctatcaggtaacctttagtgaagagagccttccaaaggggcatggggatttcatactggggtattactcacacaatcactcaattttaataggcataacggagccttttcaaatttccctgccttctagcgaactcgccagctcaagcactgactcttcaggaaccagttcagagggggaggacgattcaacgctggagctgctggctcccaaatctcgaagcccctctccaggtaagtcaaaaagacatcgatcaaggtctccaggactggccaggttcccaggactcgccctcaggccttcgtccagggaacgcagaggggcatcgcgatcaccaagtccacagtctaggcgtttgagcagagtcgcaccagaccggtcctcaaacgggagtagtcgcggatccagtgaggagggaccatctggattgcccggaccgtgggcttttcccccagcagtgcctcggtcattaggcctgctccctgccctacgactggaaaccgtggacccaggtggaggaggaagctggggaccggatagggaggctttagccccaaactcactgagtccctctccacagggacacagaggcttagaggagggtggccttggcccttag

SEQ ID NO: 226836 - DNA, 1917 bp, synthetic construct
  misc_feature 1..1917: note = Description of Artificial Sequence: Synthetic coding sequence
  source 1..1917: mol_type = other DNA
atggagggccagtcatcccggggatcccgtagacctggtacaagagccggattgggcagtctgcctatgccacagggagtggcacagactggcgcacccagcaaagtcgattcctcctttcaacttccagcaaaaaagaacgcagccctggggccttccgagccccgaattacagtggtgacctggaacgtgggcaccgctatgcccccagatgacgtgacaagcctcctacatctgggtggaggggacgattccgacggggctgatatgatcgccattgggttgcaagaggttaattccatgctgaacaagcgtctgaaagacgccttatttaccgatcagtggagcgagctgtttatggatgccctgggcccattcaactttgtgctagttagcagcgtccgcatgcagggcgtcatcctccttctgttcgctaaatactaccatctgccattcctgagggacgttcagactgactgcactcggactggtctgggtggttactggggaaataaggggggtgtgtctgtgcgtcttgccgcttttgggcacatgctctgctttttgaactgtcacctgcctgctcatatggataaagcagaacaaaggaaagataactttcagaccattttgagcctacagcagttccagggacctggcgcacagggcattttggaccacgacctggttttctggtttggggatctaaattttagaatcgagtcatacgatctccattttgtgaagttcgctatcgattctgaccagctacaccagctttgggaaaaggaccaattaaacatggccaaaaacacctggccgatactaaaaggattccaggagggccctctcaactttgctccaaccttcaagtttgatgtggggaccaataaatacgatacaagcgcaaaaaagaggaagcccgcatggacagaccgcattttgtggaaggttaaagccccaggagggggtccgagcccttccgggagaaagtcccatagactccaggtgactcaacactcgtatagatcacacatggaatacaccgtgtctgatcacaaacctgtggcagcccaattcctcctgcagttcgcgttcagagatgacatgccccttgtacgcttggaggtggccgacgagtgggtccgcccagaacaggccgtggtgaggtaccggatggaaacagtgttcgctaggtcctcgtgggactggatcggattataccgcgttggttttcgacactgcaaggactatgtggcctacgtgtgggccaaacatgaggacgtagacggaaacacttatcaagtaactttctctgaagaatccttacccaagggccacggagattttattcttggctattattctcacaaccactctattctgataggcatcacggagccctttcaaatttcactaccctccagcgaactggcctcctcttcaaccgactcctctgggacctctagtgaaggtgaggacgattcaacactggaactcttggctccaaaaagccgatctcctagtcctgggaagtccaaacgacaccgttctcgcagccccggactcgcacggttcccgggactggctctccggcctagttctcgagagagacggggagcctcacggagcccaagcccacagagcagaaggctttccagagtggcccctgatcgctcttcaaacggctcctcccggggttcaagcgaggaaggtcctagtggactgccgggaccttgggccttccccccagccgtgcccagaagtctaggcctcctgccggctctccgactcgagacggtggatcccggaggcggaggaagttggggcccagaccgcgaggccctggccccaaactctctcagccccagtccgcaaggacacagaggattagaggaggggggacttggaccctag

SEQ ID NO: 226837 - DNA, 1920 bp, synthetic construct
  misc_feature 1..1920: note = Description of Artificial Sequence: Synthetic coding sequence
  source 1..1920: mol_type = other DNA
atggcactgccaagactaggcacccagagcacagggcctgggcgatgcctatcccccaatctgcaggcccaggaagcgcctgccccagtgacgacctccagttcaaccagcaccttaagctcaagcccatggtcagcccaaccaacctggaagtctgatcccggattccgtatcaccgttgttacctggaatgtggggactgcaatgccccctgacgacgtcacttctctgttgcatctaggcggaggagatgactcagacggcgcagatatgatcgcaatcggactgcaggaggttaactccatgcttaacaagcgactgaaagacgctctctttactgatcagtggtccgagctgttcatggatgcgctcgggccttttaatttcgtgctggttagctctgtgaggatgcaaggggtgattctgctgctgttcgccaagtactaccatctcccctttttgcgggacgtgcaaaccgactgtacccggaccgggttggggggatactggggtaacaaaggaggagtgtcggtacgcctggcagcattcggacatatgctgtgtttcctgaattgtcaccttcccgctcacatggacaaggcggagcaaaggaaagacaatttccagacaattctctctcttcagcagtttcaaggtcccggagcacagggaatcctggaccacgatctggtgttctggttcggcgacctgaactttcgaattgagagctatgacttacactttgtgaaattcgcaattgactcagatcagttgcaccaactgtgggaaaaagaccagctgaacatggccaagaacacatggcccatacttaaggggtttcaggaaggaccgctcaacttcgccccaactttcaaatttgatgtaggaaccaataagtacgacacttccgccaaaaagaggaaaccagcctggaccgacagaatcctctggaaggtcaaagcacctggaggcggaccgtccccatctgggcgaaaatcacatcgcctgcaggtgacacagcatagttataggtcacacatggaatataccgtgtctgaccataagcctgtggccgctcagttcctgctgcaattcgccttccgggatgatatgccattggtgcggctggaggtcgccgacgagtgggtgaggcccgaacaggccgtagtgaggtaccgtatggaaaccgtatttgcacgttcatcttgggactggataggcctctatcgtgtcgggttcagacactgcaaagattatgtagcgtacgtatgggccaaacacgaagatgtggatggaaacacataccaggtgaccttttcagaagaaagcctacctaagggtcacggcgactttatcctgggttactacagtcacaaccactccatcttaattggtatcaccgaaccctttcaaatctctttgccaagttcggaattggcctctagttcaaccgatagttccggaacatcttccgagggagaggatgacagtactctggaacttttagctccaaagagccgtagcccttctcccggaaaatcgaagcggcacagaagccggagtccgggtcttgctcgcttcccaggtctcgcactaagaccctcctctcgtgagcgaaggggagcaagtaggagcccatccccccagtcccgacgcctatcccgcgtggctccagataggtcctcaaacgggagtagcagaggcagcagcgaagagggcccaagcggcctccctggcccttgggcttttccaccagctgtaccaaggtcgctcggccttctgcccgcattgcgactggaaacagtcgatccaggaggaggcggttcgtggggccctgacagggaagccctggcacctaatagcctgtctcccagcccacaggggcatcgtggcctagaagaaggtggacttggaccttag

SEQ ID NO: 226838 - DNA, 2820 bp, synthetic construct
  misc_feature 1..2820: note = Description of Artificial Sequence: Synthetic coding sequence
  source 1..2820: mol_type = other DNA
atgagcgcgtcctctgaagggcctcgcttggccctcgcctcaccgaggccaattctggccccattgtgtacacccgagggccaaaagactgctaccgctcaccggagttcgtctttggcgcctacctcggtcgggcagctcgtgatgtccgccagtgccggacctaaacccccacccgctaccaccgggagcgttcttgccccaacttctttggggctggtgatgccggcatctgctggtccgcgaagtccaccagtgacactcgggccaaacttggcaccgacatctcgagaccaaaaacaagaaccccctgcgtccgtgggtcccaagcctacgctggccgcatctggtctgtccttggcattagcctccgaagagcaaccacctgaattaccatctactccatctcccgtgccgtcaccggtgctgtctcccacgcaggaacaggctcttgcccctgcatctaccgcatcaggcgcagcctcagtgggccagacctcagccagaaagcgcgatgctccagcacccagacccctgcctgccagcgagggacacttacagccgcctgctcaaacatcaggtcccacagggagtcctccgtgcattcaaacttctcccgatcctcgcctctccccttcctttcgggctagacccgaggccctgcactctagccccgaagacccagtactgcctagacctccccagacactgccactggacgtggggcagggcccaagcgagccaggcactcactcccccggattgctcagccccacttttcgacccggtgcacctagcggccagactgtgccaccgccattgcctaagcccccaaggagtcccagtcgcagtcccagccattctccaaacaggtccccttgcgtcccgcctgctcccgacatggctctcccaaggctcggaactcagagcacgggtcccggtaggtgtctcagccccaacctgcaagcccaggaagctcctgcccctgttactacttcatcctcaacttcaacccttagctctagtccctggtccgcccaacccacgtggaaaagtgacccaggcttcaggatcacagttgtgacgtggaatgtgggcactgccatgcctcctgatgatgtgacttcactgttacatctcggcggtggggacgattccgacggggctgatatgatagctattggcttgcaggaggtgaactccatgctgaacaagcgactgaaagatgccctctttacagatcagtggtccgaactgttcatggacgccctagggcctttcaactttgtgttggtgtctagtgttcgcatgcagggcgtgatcctcttgctgtttgctaagtactatcatcttcccttcttgcgggacgtgcaaacggattgcactcggactggcctcggcggttactggggcaataagggcggtgtcagcgttcggttggccgcattcggacacatgctgtgtttcctaaattgccatcttcctgcccacatggataaagccgaacagcgtaaagacaattttcaaaccattctgtcactccagcagttccagggtcctggggcacaaggaatcctcgatcacgatctggtgttctggttcggggacttaaactttcgtatcgagtcatacgatctacacttcgtaaagtttgctattgactccgatcaattgcaccaactgtgggagaaagatcagctgaacatggccaagaatacttggcccatcctgaaggggtttcaagaggggccattaaacttcgcacccacatttaagtttgacgtaggaactaataagtacgatacatctgcaaagaagagaaaacccgcatggaccgatcgaatcctctggaaagtgaaggcgcctggcggaggcccatctccaagtgggcgaaaaagtcatcgtctccaagtgactcagcattcatataggagccatatggaatataccgtttcagaccataagcctgtagcagctcagtttttgctgcaatttgcatttcgggatgacatgcctcttgtacgactcgaggtggcagatgagtgggttcggcctgaacaggccgttgtcaggtacaggatggagaccgtgttcgcgagaagcagctgggactggattggcttatatcgggttggctttcgccattgcaaagactacgtggcctacgtgtgggcgaaacacgaggatgtggacggcaatacctatcaggtgacgttctctgaggagagcctccccaagggtcacggtgacttcatcttggggtactactcacataaccatagcattttgattgggattacagaaccttttcagatcagcttaccttctagcgagctggcgtcctccagtacagacagttcgggaacttcatccgagggggaggatgatagcacccttgagttgcttgctccgaaaagtaggagcccatccccaggcaagagtaagcgtcataggtcccgctccccgggactcgcaaggttccctgggctggccctgcggccttcgagtagagagaggaggggcgcatcaagaagcccgagtccgcagagccgcaggctgtcgcgtgttgcgcctgacagatcgtctaatgggtcctcgagaggatcctctgaggagggcccttcaggccttccagggccatgggcctttccccctgccgtgccccgatctttagggttgcttcctgccctgcgtttggagaccgtcgaccccggaggtggtggaagttgggggcctgatcgggaggccttagctcctaacagcttaagcccttctccacaaggccatagaggactcgaagagggcggtctgggaccttag

SEQ ID NO: 226839 - DNA, 3534 bp, synthetic construct
  misc_feature 1..3534: note = Description of Artificial Sequence: Synthetic coding sequence
  source 1..3534: mol_type = other DNA
atggtcccatgctggaatcacggaaacataactcggtctaaggccgaggagctgttatcccgcacagggaaagacgggtcttttcttgtcagggcgtcagaaagtatttcccgggcttatgcactttgtgtcctttaccggaattgtgtgtacacctatcgcattctgcctaacgaagatgacaagttcaccgttcaagcctcagaaggcgtgagcatgcgatttttcactaagctcgatcagcttatagagttctacaagaaagagaacatgggtctcgtaacgcacctgcagtatccggttcccttagaggaggaggataccggagatgatcccgaggaagacactgtcgaaagtgtcgttagcccgcctgaactccctcccagaaacatacccctgactgcttcatcatgtgaagccaaagaagtgccgttcagtaacgagaatcccagggcaactgagacctcacgcccatctctcagcgagacactattccaaaggctgcaaagcatggatacgagcggcctgcccgaggagcatctcaaagcaatccaggactacctgagcacccagctagctcaggactccgaatttgttaaaaccggctctagtagcttaccacacctgaagaagttgactactctgctgtgcaaggagctgtacggccagatgctgcggactgtgccgggtatcgggaaggtgaaggaggaggatcacgtgcccggagaggccaaccctatcaacatggtaagtaagctgtcccaactgacaagcctcctgtcttccatcgaagacaaggtgaaagcactgctgcatgaaggccctgaatccccccaccgccctagcctcattcccccagtgaccttcgaggtgaaagctgagagtctggggatcccacagaagatgcagctgaaagtagacgtggaaagtggaaaattgatcatcaagaagagcaaggacggctcagaggataagttctatagtcacaaaaagattctacagctcatcaaaagtcaaaaatttctgaacaagttggtcattttggtcgagacagagaaagaaaagatcctccgcaaggagtatgtgttcgccgatagcaagaaacgagagggcttttgccagctcctacagcagatgaagaataagcactcagagcagcctgagccagatatgataaccatctttatagggacatggaacatggggaatgcaccccctcctaaaaaaatcacctcatggttcttgtcgaagggtcagggtaagactcgggacgattcggccgattatatcccccatgacatctacgtcatcgggactcaggaagaccccctgtccgagaaggagtggctggagattctgaaacacagcctgcaagagattacctcagttacttttaagacagtcgccatccacaccctgtggaacatcagaattgtggtcctcgcaaagcccgaacacgagaaccgaatcagtcatatttgtacagacaacgtgaagaccggcatcgcgaatacgctgggaaacaagggggctgtaggcgtgtcatttatgtttaacggcactagtctggggttcgtcaactctcatcttacctctggctctgagaagaaactccgacgcaaccagaactacatgaatatcttgagattcctggcccttggcgacaaaaagctcagtcccttcaacattacacacaggtttactcacctgttctggttcggtgatctcaactaccgcgttgatctccccacctgggaggccgaaacaattattcagaagattaaacagcagcagtatgctgacctgctatctcatgaccaactccttaccgagagacgcgagcaaaaagtttttctgcacttcgaagaggaagagattaccttcgctcctacatacagatttgagcgtctaacccgcgacaagtatgcatacacgaaacaaaaggctacgggcatgaagtataacttgccctcctggtgcgatcgggtgctatggaaatcatatccattggtgcacgtcgtctgccagagttacgggtcgacttccgacattatgacttctgaccattcacccgtgttcgctacatttgaagccggagtcacatcccaatttgtgtcaaaaaatggaccagggaccgtggatagtcaaggtcaaattgagtttctcaggtgctacgctactctgaagaccaagagtcaaaccaagttttacttggagtttcacagttcctgccttgagagcttcgttaagtcccaggaaggcgagaatgaagaaggttctgaaggggagcttgtagtaaaattcggagagaccctgccaaagttaaaacctattatctcagaccccgagtacctgctagatcagcacatactcatcagtatcaaatcctctgactccgacgaatcttacggtgaaggctgtatcgctctgcggctcgaagcaactgaaacccagctgcccatttacacacctctaacgcatcatggagaactgactggccactttcagggcgagatcaaattgcagacaagtcaggggaaaacccgggagaagttgtacgacttcgtgaagacagaacgcgacgaatccagcggacctaagacacttaagagccttacaagccatgatcccatgaagcaatgggaagttacaagcagggccccaccctgctccggatcctctatcactgagataatcaaccctaattatatgggcgttggtcccttcggcccacccatgcctctgcatgtaaaacaaaccctgagcccagatcaacagcccacagcttggagctatgaccagccaccaaaagactcccccctcggcccatgccgaggggaatctcctccgacacccccaggtcagccacctatttctcccaagaaattcttaccttccactgcaaatcgaggccttcctcccagaacccaggaatcccgcccatccgacctgggcaagaacgctggagataccttacctcaagaagatcttccactgactaaacccgagatgtttgagaatcccctgtatggcagtctgtcatcatttccaaaacctgcaccccgtaaagaccaggagtccccaaaaatgccgaggaaagaacctcctccgtgtccagagcctggaatcctctccccctccattgtgctgacaaaagcacaggaggcagacagaggcgagggaccgggaaagcaggtgcctgccccaaggttgagatcgttcacgtgcagttcaagtgctgaaggacgcgcagccggtggcgataagtcccagggcaaacctaaaactccggtatcttctcaggcacctgtgccagccaagcggccaattaaaccttccagaagcgagatcaaccaacagacacccccaacaccaaccccacggccacctctaccagtgaaatctccagccgtcttacacctccagcattccaaaggacgggattatagggataacaccgaactgcctcaccacggcaaacatcgaccagaggaggggccacccggtccacttggccgtactgccatgcagtag

SEQ ID NO: 226840 - DNA, 2433 bp, synthetic construct
  misc_feature 1..2433: note = Description of Artificial Sequence: Synthetic coding sequence
  source 1..2433: mol_type = other DNA
aagcgcgaaggcttctgccagctcctccagcagatgaagaacaagcattcagagcagcccgagccggacatgatcaccattttcatcggcacatggaacatggggaacgccccacctcccaagaaaatcaccagctggtttctgagtaagggacagggtaaaaccagagatgattccgctgattacatacctcacgatatctatgtaatcggcacccaagaggacccactgtcggagaaagagtggctcgaaatattgaagcattctctccaagagatcacgtccgtgaccttcaagactgtggccatccatacactatggaacatcagaatcgtggtgctggccaaacccgaacacgaaaaccggatctctcacatttgcaccgataacgtaaagaccggcatcgcaaatacactcggaaataagggcgcagtcggcgttagcttcatgttcaatggaaccagccttggattcgttaacagtcacctgacatccggctccgaaaaaaagctgaggcgcaaccaaaattacatgaacattctgagattcctggccttaggcgataaaaaactttctccgttcaacatcacacaccgttttactcatcttttttggtttggtgatctgaactaccgggtggacctccctacctgggaagccgaaacaatcattcagaagataaagcagcagcaatatgccgacctcctttctcacgatcagctgctcacagagaggagggagcagaaggtcttccttcattttgaggaggaggaaataaccttcgcaccaacataccggttcgagcggcttactcgggacaaatacgcctatacgaagcagaaagccacagggatgaaatataatctgccaagctggtgtgaccgcgtcctgtggaaatcgtatccactggttcacgtagtttgccagagttatggatctacttcagacattatgacctccgaccactccccggtatttgctacattcgaagctggggtgaccagccagtttgtgagcaagaatggaccaggaaccgttgattcccagggtcagattgaattcctgaggtgctatgctaccctgaagacaaagagtcagactaaattttatttggaattccactcctcctgtttggagtcatttgtcaagtctcaggaaggcgaaaacgaggaaggcagcgagggggagttagtggtaaagtttggcgagactcttccgaagctcaaacccattatcagcgacccggagtatcttttggaccaacatatcctcatttctattaaaagctccgatagtgatgaaagctacggcgaggggtgcatagcactgcgattggaggcgaccgaaactcagctcccgatctataccccccttacccaccacggcgaactgactggccactttcagggcgagattaaactgcagacctctcagggaaagacccgcgagaagctctacgactttgtcaaaacagaacgggatgagtctagcggtccaaagacactgaagtccctgacctcacatgaccctatgaagcagtgggaggtcacttctagggcacccccttgtagcggaagctccattactgaaatcatcaaccccaactacatgggggttggccctttcggcccaccgatgcctcttcatgtgaagcagaccctgagccccgatcagcagcctaccgcctggagctatgaccagcctcccaaagatagtccactcgggccatgccgcggagaatcgccgccaacacccccaggacagccacccatctcacctaagaagttcctgccatctacagcaaaccgcggattaccacctcggacacaggaatccagaccctccgacctggggaagaacgctggagacactctcccgcaagaagaccttcccctgactaagccggagatgttcgaaaaccccctgtacggctccctaagttcatttccaaagccagccccacgtaaagatcaggaatctcctaaaatgcccaggaaggagccccctccgtgtcccgagcccggaattctgagtccctctatagtgctgaccaaggcccaggaggccgatagaggtgaagggccaggaaagcaagtcccagcaccccgtcttcgaagctttacatgttcatccagtgcggaagggagggccgcaggtggcgacaaatctcagggaaaaccaaaaaccccggtctcatcgcaggcaccagtgcccgctaaacgacctatcaaaccatctaggagcgagattaaccaacagaccccacccacgccaaccccgaggcctccactgccggtgaaatccccggcagtactgcacctgcaacatagcaagggtcgcgactacagagacaacactgaactcccacaccacgggaaacatcgacccgaggaaggcccacccggaccattaggcagaactgcaatgcaatag

SEQ ID NO: 226841 - DNA, 666 bp, synthetic construct
  misc_feature 1..666: note = Description of Artificial Sequence: Synthetic coding sequence
  source 1..666: mol_type = other DNA
atggtaccatgttggaatcatgggaatattacccggtcaaaagccgaggaacttctctcacgaaccggtaaggatggctcctttctggtgagagctagcgagtccatcagccgggcatatgcgctatgcgtgttatatcgcaactgtgtctatacatatagaatcctgcctaatgaggatgacaagttcactgtgcaggccagtgagggagtgagcatgagattcttcacaaagctggaccagctcattgaattttataaaaaagagaatatggggctagttactcatctgcagtaccccgttccactggaagaagaggacaccggggatgacccagaggaagataccgagtctgttgttagcccccctgagctgccgccacggaatatcccacttaccgcctccagctgtgaggccaaggaggttcccttcagcaatgaaaaccccagggcaactgagacttctcggccttcactcagcgaaaccctgttccagcggctgcagtctatggacaccagcggattgcctgaagagcacctcaaggccattcaggattacctctctacacagttggctcaagactctgagttcgtgaagacaggttccagtagtctcccccatctgaaaaaattgacgacactgctttgcaaggagttgtacggttag

SEQ ID NO: 226842 - DNA, 2433 bp, synthetic construct
  misc_feature 1..2433: note = Description of Artificial Sequence: Synthetic coding sequence
  source 1..2433: mol_type = other DNA
aaacgggagggattttgccagctgcttcagcagatgaagaacaaacatagtgagcaacccgaaccggatatgataactatctttattggcacctggaatatgggaaacgctcctccacccaaaaaaatcactagctggttccttagtaaaggacaggggaagacccgagatgactccgcggattatatcccccacgatatctatgttattggaacccaggaagatcccctttcagagaaggaatggctggagattcttaagcattcactccaagaaatcacaagtgtgacgtttaaaacggtggccatacacactctgtggaatattcggatcgtggtactcgccaagcctgaacatgagaatcggataagccatatctgcacagataatgtgaagacaggaatcgcaaatacattgggaaacaagggcgctgtgggtgttagctttatgttcaatgggacatccttggggtttgtgaattcccacctgacaagtgggtcggagaaaaagttgcgtaggaaccagaattacatgaacatcctgcgctttctggcgttgggggacaagaagctgagccctttcaacatcactcaccgtttcacgcacctgttctggttcggcgacctgaactatagagtggatctcccgacctgggaagccgaaaccataatacagaaaataaagcagcagcagtatgcagatttgctcagtcatgatcagcttctgaccgaacgcagggagcagaaagtatttctgcacttcgaagaagaggagattaccttcgctccaacttatcggttcgaacgtttgaccagagacaagtatgcatacaccaagcaaaaggccactgggatgaaatacaacctgccatcatggtgtgatagggtgctgtggaagagctacccccttgtgcatgtggtgtgtcagagctatggctcaaccagcgacataatgacctcggatcattcacccgtgttcgccacttttgaagctggagttacgagccagtttgtaagcaagaatggtcctggtacagtggattcccagggccaaatcgagttcctgaggtgctatgcaacccttaagaccaaatctcagactaaattctaccttgaatttcattcgtcttgtctggagtctttcgttaaaagccaggagggcgaaaacgaggaaggctcagagggagaactggtagtgaaatttggggagacactgccaaaattgaagcccatcatcagcgatccagagtacctgctggatcagcatattttaatatccattaaaagttccgatagtgacgaatcgtacggagagggatgtatagccctgagactggaggcgaccgagacacagctgcctatctacactcccctgactcaccatggcgaactgactggacactttcagggcgagatcaagcttcagacctctcaagggaagacgcgcgagaagctttacgattttgtcaaaacagagagggacgaatcctccggccctaaaactctaaagtcactcacttcgcatgacccgatgaagcagtgggaggttacttcccgcgctccaccatgctcaggatcgagtatcactgagattatcaaccctaactatatgggagtggggccatttggaccccctatgccactgcatgttaaacagaccctcagtccagatcagcaaccaaccgcgtggagttatgaccagccacctaaagatagtccccttggaccttgcagaggagagtcgcctcctacaccccctggacagccgccaatctctccgaaaaagtttctcccgagcaccgcgaaccgcggtctccctccaaggacccaggaatcaagaccttcagacttggggaagaacgccggagacacgctgcctcaagaggacctgccccttaccaaacctgagatgttcgagaatcctttgtatggcagcctgtctagcttcccgaaaccagcaccacgaaaggaccaagagagtcctaagatgccaagaaaagaaccacctccctgccccgagccaggtatcctttcgcccagcattgtactcacaaaggcacaggaggcagatcgtggcgaagggccaggcaagcaggtaccagcccctcggttgcggtccttcacatgctctagctcagccgaggggagagcagctggtggcgataagagtcagggtaagcctaagacccctgtttcatctcaggctcctgtacctgctaagcgacccatcaagccctcacgaagtgagattaaccaacagaccccccctacgcctacaccgagaccacctctgccagtgaagagtccagcagttctgcacctccagcattcaaaaggtcgagattatagggacaacactgaacttcctcaccacggtaaacatcgcccagaggaggggccacctggacccttagggagaacggccatgcagtag

SEQ ID NO: 226843 - DNA, 2433 bp, synthetic construct
  misc_feature 1..2433: note = Description of Artificial Sequence: Synthetic coding sequence
  source 1..2433: mol_type = other DNA
aaacgggaaggattttgccaattactccagcagatgaagaataagcactcagagcagcctgagccagacatgataacgatcttcattgggacatggaacatgggtaatgccccaccccctaagaagatcaccagctggttcctgagcaaagggcaaggcaaaaccagggacgactctgcagattatattccccatgatatttacgtcatcggcacccaagaagatccactgtcagagaaggaatggctcgagatattaaaacactccctgcaggagattacttctgtgacatttaaaaccgtagccatacacactctttggaacatccgcatagttgtccttgcaaagcccgaacacgagaatcgcatctcccatatctgcaccgataatgtgaaaaccggtatagctaacactcttgggaataagggcgctgtgggggtctctttcatgttcaatggcaccagcttggggttcgttaacagccatttaacaagtgggagcgaaaaaaaattgagacggaatcagaattacatgaacatactgcgattcctcgccctgggcgataagaaacttagccctttcaacatcacccatcggtttactcacctgttctggttcggggatttgaactaccgagtcgatctgcctacctgggaggcggaaaccatcatacagaagatcaaacaacagcagtatgccgacttattatctcatgatcagctacttactgagcggcgagagcaaaaagtttttctgcactttgaggaggaggagatcacattcgcccctacataccgctttgaaaggcttacaagggacaaatacgcatataccaagcagaaggccaccggcatgaagtataatctgccgtcgtggtgtgacagagttttgtggaaatcttatcccctcgtccacgtggtatgtcagagttatggctcaacatccgatatcatgactagcgatcacagccctgtcttcgctacatttgaggcaggggtgacctcccagttcgtaagcaaaaacggacctggtacagtggattcgcaagggcagattgaatttttgaggtgttatgctacgttgaaaactaagagtcagacaaagttctatctggagtttcattcaagctgtttggagagtttcgtgaagagccaggagggagagaatgaggaaggaagtgagggggagctggtagtgaaattcggtgaaacgctgccaaagttaaagcccattatatctgaccctgaatacttgctcgaccagcatatattgatcagtatcaagtccagcgatagcgacgaatcttacggagaggggtgcattgctcttagactggaagcaacggagacccagcttcccatatatacgcctctgacccaccatggggagctgacgggacatttccaaggagagataaaactgcaaacaagccaggggaaaacgcgggaaaaactttatgattttgttaagaccgagcgtgatgaatcaagtgggccaaagactctcaagagccttaccagtcacgatccaatgaaacagtgggaggttaccagccgcgctcccccatgcagtgggtcaagcattactgagatcatcaatcccaattatatgggcgtggggccttttgggcctccaatgcctttgcacgtgaagcagactttgagtcctgatcagcagccaactgcatggagctacgaccagccacctaaggattcaccgctaggcccatgccgcggagagtcccctcccacgccacccggtcaaccacctatcagtcccaaaaaatttttacctagtaccgctaatcgcggactgcctccgagaacacaggaaagccgccctagcgacctcggcaagaacgcaggggacactctgccacaggaagatctccccctcactaagcctgaaatgtttgaaaatccactctatggaagtctttctagtttcccgaagcctgccccacgcaaggaccaggagagcccgaagatgccgcgtaaagagccgcctccatgtcctgaacccggaatcctctccccctctatcgtcctgacaaaggcccaggaggcggacaggggagagggccctggaaaacaggttcccgcaccgaggcttcgttctttcacctgcagcagctcagctgagggacgggcagcaggaggagacaaatctcagggcaaacctaagacacccgtgagcagccaggcccctgtcccagccaaaagaccaattaagccaagtcgctccgagattaaccaacaaactccaccaacccctactcctagaccacctctgcctgtgaagtctccagccgttctgcacctccagcattccaaagggagggattatagagataacaccgaattgcctcaccacgggaaacaccggccagaagaaggcccaccaggcccattaggcaggaccgccatgcagtag

SEQ ID NO: 226844 - DNA, 2826 bp, synthetic construct
  misc_feature 1..2826: note = Description of Artificial Sequence: Synthetic coding sequence
  source 1..2826: mol_type = other DNA
cgtcctcaggtgccgggagaagccaaccctattaacatggtgtccaaactctctcaactgactagcctgctgagctcaattgaagataaagtgaaagctctgctgcacgaagggccagagtcccctcatcgtcccagccttatcccccctgtgacattcgaggtgaaggccgagtccctgggcatcccacagaaaatgcaactcaaagtggacgtcgaaagcggcaagctgatcattaagaagtctaaggacggatctgaggataaattttacagccacaaaaagatactgcagttaatcaagtcacagaagttccttaacaaacttgtgattttggttgagacagagaaggaaaagatcctgcggaaagagtacgtgttcgcagactcgaaaaaacgcgagggcttctgccagctgctgcaacaaatgaagaataaacacagtgagcaaccagagcctgacatgatcacaatttttatcggcacctggaacatgggaaacgcaccgcctccaaaaaagatcacatcctggttcctgagtaagggacaaggtaaaacgcgggatgattctgccgattacataccccacgacatttacgtgattggtacccaagaagacccactgtccgaaaaagagtggttggagatactcaagcactcattacaagaaattacttccgtgacctttaaaaccgtcgccattcacaccctgtggaatattaggattgtggtcttggcaaagcctgagcacgaaaacaggatatcacacatctgtactgacaacgtgaagacgggtatcgccaacaccctaggcaataagggcgctgttggcgtgtcattcatgttcaacggtacctctctcggattcgtgaactcacacctgacatctggctctgagaaaaaactgcgaaggaatcagaattatatgaatattctgcgctttctcgcactcggagataaaaagcttagcccctttaacatcacgcacaggttcacccacctcttctggtttggagatctgaattaccgagtcgatctgccgacctgggaggccgaaactatcatccaaaaaattaagcaacagcagtatgccgacctcttgtcacatgatcagctgctaaccgaacgtagggaacaaaaagtgtttctacactttgaggaggaggagataaccttcgctccaacatatcgtttcgagaggctgacccgagataagtatgcctataccaaacagaaggccacgggcatgaagtataatcttccctcgtggtgcgatagggtgctttggaagtcctaccccttggtacacgtggtatgtcaaagctacggctccacttccgacatcatgacgtcagaccatagtcccgtctttgctacatttgaggcgggagtgacctcccagtttgtgagcaaaaacggcccaggaactgtcgatagccagggacagatcgagtttctccgatgttatgctaccctgaagacaaaatcccaaactaaattctatttggagttccactccagctgcctcgagagctttgtgaagtctcaggagggcgagaatgaggagggaagcgagggggaactggtagtgaagtttggcgaaacacttcccaagctcaagcctataatatctgatcccgaatacctgttggaccagcatatacttatttctattaagagttccgatagcgatgaatcttacggagaaggctgcatcgccctgcgcttagaagcgaccgagacccaactaccaatatatacgccactgacccaccacggggaactaaccggccacttccagggcgagataaagttgcaaactagccagggcaagacacgagaaaagctttatgactttgtgaaaaccgagagagatgagtcgtccggtcctaagactctgaagtccctgacttcacacgatcccatgaagcagtgggaggttacctccagggccccaccttgttctgggtccagcatcacagagattattaatcctaactatatgggggtcgggccttttggccctcccatgccgctccacgtaaaacaaaccctatctcccgaccaacagcccactgcctggagttacgatcagccgcctaaggattctcctctgggaccatgtcggggagaatccccacccactccaccagggcaaccacccatttcacccaaaaagtttttaccttctaccgctaaccgcggtctccctcccaggacacaggaatctcggccaagcgatctgggcaaaaacgccggagacacactgccgcaagaggacctccctctgactaagccagagatgttcgagaacccgctgtatgggtcactctcttctttccccaaacccgctccgcgtaaagaccaggaaagccccaaaatgcccaggaaggaacctccaccctgtcctgaaccaggaatcctgtccccgagtattgtactcaccaaggctcaggaagccgatcgaggagagggcccaggaaagcaggtcccagctcctcggttgcggtctttcacctgctcctcgtctgccgaagggagggcggctggcggtgataaatcccagggtaagcccaagactcccgtcagctcccaggcgccagtgcctgcaaagcggcctattaagccatcacgcagcgagatcaaccaacagacaccccctactccgacgccgaggcctcccctgcctgtgaagtcccccgcagttctccacctgcagcactccaaaggtagggactaccgagacaacaccgagctgcctcaccatggaaaacataggccagaggaggggccacccggacctttggggaggactgcgatgcagtag

SEQ ID NO: 226845 - DNA, 669 bp, synthetic construct
  misc_feature 1..669: note = Description of Artificial Sequence: Synthetic coding sequence
  source 1..669: mol_type = other DNA
atggtaccctgctggaatcacgggaacattacaagaagcaaggccgaagagcttctgtcccgaactgggaaggacggtagctttctggtgagagcaagtgaatctataagccgcgcatatgctctttgtgttctgtatagaaattgtgtgtacacataccgcatcctaccgaacgaggatgacaagtttacagtgcaggcttcggagggagtgagcatgagatttttcactaagctcgatcagctaattgagttttacaagaaggaaaatatgggattggtgacccacctccagtaccctgtccccttggaagaggaagatacaggagatgatccagaggaagatacagtggagagcgtcgtctctccgcctgagctgccgcctcgcaacatacctctgacagcttcatcctgcgaggctaaagaggtcccattcagcaatgaaaatccccgagccaccgagacatcgcgcccatccctaagtgagacactattccagagattgcagagcatggacacttctgggctgcctgaagaacacctcaaggcaatccaggattacctgagcacccagttggcgcaagattctgaatttgtcaaaaccggctcctcaagtctccctcatctgaaaaagctgacaaccctcctgtgtaaagaactctatggatag

SEQ ID NO: 226846 - DNA, 2826 bp, synthetic construct
  misc_feature 1..2826: note = Description of Artificial Sequence: Synthetic coding sequence
  source 1..2826: mol_type = other DNA
ccaccacaggtcccaggcgaagccaatcccatcaatatggtaagcaaactgtcccagcttacctctcttttgtcgtcgatcgaggacaaagtcaaagcacttctgcatgaaggcccagagtccccccaccgacctagcctgattccacccgttacctttgaagtgaaggctgaaagtctcggaatcccccagaagatgcaactaaaggtggatgtggagtctggcaagctaattattaaaaaaagtaaagatggttctgaggataaattctatagccacaagaagatactccagctgataaagagccagaaatttctgaacaaactggtcattctagtagagaccgagaaagaaaagattctcagaaaagaatacgtatttgctgacagcaagaagcgcgaaggcttctgccagctgcttcagcagatgaaaaataaacatagcgaacagcctgagccggatatgattacaatctttattggtacgtggaacatgggtaacgcccctccacccaaaaagatcacctcatggttcctgtcgaaaggacaggggaagacgagagatgattccgctgactatatcccccacgacatctatgtgatcggcacccaggaagacccgttgagcgagaaagagtggctggaaatcctcaagcacagcctgcaagagataacttctgtaactttcaaaaccgtggcgattcacaccctttggaatatccgaatcgtcgtgctagccaaacctgagcacgaaaaccgcatcagccacatatgtacggacaatgtgaagacagggattgctaataccctgggcaataagggtgctgtgggtgtatcatttatgtttaacgggaccagcctgggctttgtcaattcacacctgacctctgggagcgagaaaaaacttaggaggaaccagaactacatgaacatactgcgtttcctggcacttggtgataagaagctctcaccgtttaacataacgcatcgattcacccaccttttttggttcggggatttaaactatcgggtcgatctgccaacctgggaggctgaaacaatcatccagaaaatcaagcagcagcagtatgctgatcttttatctcatgatcaactcctgacagagagaagggagcagaaggttttcctgcatttcgaggaggaggagatcacattcgctcctacctacaggttcgagagactgacacgagacaaatatgcctacactaagcagaaagccaccggaatgaaatacaacctgccttcctggtgcgatagggtattatggaagagctaccctctggtgcatgtggtatgccagtcttacgggtccacgagcgacatcatgacatccgatcattcgccagttttcgctacatttgaggctggggtgaccagccagttcgtgagcaagaacgggccaggtacagtggattcccagggccagattgaatttcttaggtgttacgctaccttgaaaactaagtctcaaactaaattctatttagagttccatagttcttgccttgaatccttcgtcaagagtcaagagggtgagaacgaggagggatcagaaggcgaactagttgtcaagtttggcgagacactcccaaagctgaagcctatcatatccgacccagaatatctcctggatcaacatatattaatttccatcaagtccagtgactcagacgaatcttacggtgagggctgcatcgctctaaggctggaggctaccgagacccagctgccgatttacactcctcttacacaccacggcgagctgactggccacttccagggtgagatcaagttgcagacatctcagggcaagacccgcgagaagttgtacgattttgtgaagaccgaaagggatgaaagttccggcccaaagacactaaagtccctgactagtcacgatcccatgaaacaatgggaagtcacttccagagccccaccctgctccggtagcagtattacagaaataatcaaccctaactacatgggggttgggcctttcgggccaccaatgcctctccacgtgaagcagactctcagccccgaccagcaaccaacggcctggagctacgaccagccgcctaaagatagccccctcggaccatgccggggtgaatcgccacccaccccacctggacagccccctataagccctaagaaatttctgccctccacagccaatcgaggtttgcctccacgcactcaagagagccgcccatccgatctcgggaagaacgccggagacacactgccgcaggaagaccttcctctgacaaagccagaaatgttcgagaaccccctgtacggctcccttagtagctttcccaaacccgcacccaggaaagaccaggagtcaccaaaaatgccaaggaaggaacctccaccgtgccccgagcccggaatcctctccccctccatagttctcacgaaggcccaggaagctgaccggggagaaggccctggaaaacaggtgccagcgcctcggttacgttcattcacatgttccagcagtgcagaagggagggccgcaggcggagataagagtcagggaaaacccaagaccccagtgtcttcgcaggccccagtgccagccaagcgtccgattaaaccatctcgatctgagatcaaccagcagacccctcccacacccacaccgagaccgccactgcccgtcaagtccccggctgtgctgcacctgcagcacagcaaaggccgagactaccgtgacaacacagaactgccgcaccatggcaagcaccgccctgaggaaggtccccctggacctctgggccgtaccgccatgcagtag

SEQ ID NO: 226847 - DNA, 1791 bp, synthetic construct
  misc_feature 1..1791: note = Description of Artificial Sequence: Synthetic coding sequence
  source 1..1791: mol_type = other DNA
atggttccctgttggaaccatggaaacattacccgatccaaagcggaagagctgttgtcccggaccggaaaggatgggagctttttagtcagagcatctgagagcatctctcgtgcctacgctttgtgtgttctctataggaactgtgtatatacatacagaatcctcccgaacgaggatgacaagttcaccgtccaggctagcgagggagtgtcaatgcgcttttttaccaaattggaccaactaatcgaattttacaagaaagaaaacatgggattggtgacacacctccagtacccggtgccattggaggaggaggacaccggagatgaccccgaggaggacacagtagagtctgtggtttcccccccagagctgccacccaggaacatccccctaacggctagttcatgtgaggctaaggaggtaccattttcgaatgaaaaccctagagctactgagacttctcggcctagtctcagtgagacactgtttcagaggctccagagtatggatactagtggcctgcctgaggaacacttgaaagccattcaagattatctgtctacacaactcgcgcaagacagtgagtttgtgaagaccggttcttcaagcctgccccatcttaagaaactgacaactctgctttgtaaggaactgtatgggtattgtctggaagtgctgctcagttatccactttctctgctgagccaagtcccaggagaagcaaatcccatcaatatggtttccaagctgtcacaacttacaagccttctcagctccatcgaggacaaggttaaggccctcctccacgaggggccagagtcaccccacaggccttccctgatacctcccgttactttcgaagtgaaggcagaaagtctgggaatcccacaaaaaatgcaacttaaagtcgacgtggagtccggaaaactgattataaagaaaagcaaggatggcagtgaggacaagttttactctcataaaaagattctgcagcttattaaaagccagaagttccttaataagctggtgatcctggtcgagacggaaaaagagaaaatcctcaggaaagaatacgtgttcgctgacagcaagaagcgggagggattctgtcagctcctgcaacaaatgaaaaataagcactcagaacagcccgagcctgacatgattaccatctttataggaacctggaacatggggaatgccccaccacctaaaaaaattactagctggtttcttagcaaggggcagggcaagacgcgagatgacagcgctgactatatccctcacgacatatatgtgatcgggacccaggaggatccgctttctgagaaggagtggctggagatcctcaaacacagcctgcaagagattacttcagtcacctttaagacggtcgctatccacacactttggaacatcaggattgtggtcttagccaagcctgagcatgagaatagaattagtcatatttgtacagacaatgtgaaaactggaatcgccaacacgctcggcaacaaaggggctgtgggagtgtccttcatgtttaatgggacttccctcgggtttgtcaacagccacctgacctcggggtctgaaaagaagctccgacggaaccaaaattacatgaacatcttaaggtttttagcactgggcgacaaaaagttaagcccgttcaatatcacgcacaggtttacgcacttattttggttcggtgacctgaactacagggtagacttacctacatgggaggccgaaacgatcattcaaaagatcaagcagcaatag

SEQ ID NO: 226848 - DNA, 837 bp, synthetic construct
  misc_feature 1..837: note = Description of Artificial Sequence: Synthetic coding sequence
  source 1..837: mol_type = other DNA
tgacagaaaaactggctgagagaattctaccaggtggttcacacccacaagccgcactttatggcactgcactgtcaggaatttggaggaaagaattatgaggcttctatgagccatgtggataagttcgtgaaagaactgctgagcagtgacgccatgaaggaatacaaccgggctcgtgtgtacctggacgaaaattacaagagccaggagcattttacagctctcggttcattttacttcctccatgagtccctgaaaaatatctatcagtttgattttaaggctaagaaatacaggaaggttgcagggaaagaaatttacagcgatactctggaatccacccctatgctggagaaagaaaagtttcctcaggactactttcctgaatgcaagtggtcaaggaagggtttcatcaggacgcgttggtgcattgcggattgtgcattcgaccttgtgaacattcatctctttcacgacgctagcaacctagtggcctgggagacatctccatcagtgtactccggaattcggcataaggccctgggttatgtcttggatcgcataatagatcagagatttgagaaggtgtcctactttgtattcggagactttaactttaggctggatagcaaatctgttgttgagttgttggaattcgacaaggagcttagcgtgttcaaggacagactgtacgaattggacatatctttccctccaagctacccatatagcgaggacgcacgtcagggggagcagtacatgaacacccgctgccctgcgtggtgtgataggattctgatgagtcctagcgcaaaggaacttgtccttcgttag

SEQ ID NO: 226849 - DNA, 1164 bp, synthetic construct
  misc_feature 1..1164: note = Description of Artificial Sequence: Synthetic coding sequence
  source 1..1164: mol_type = other DNA
atggccggaaaggctgctgcacccggaactgccgtacttctggtaacagctaacgttggctccctttttgatgatcccgaaaacctccagaagaattggctgcgcgagttttaccaagtagtgcatactcataagccacactttatggcgctgcattgccaggaattcggagggaaaaattacgaggctagcatgagccatgtggataaattcgtaaaggaacttttatcctccgatgccatgaaggagtacaatcgggctagagtgtacctcgatgaaaattacaagagccaagagcacttcactgcgttgggttcattctattttctccacgagtcacttaaaaatatatatcagttcgattttaaggctaaaaaatatcgcaaggtcgcaggaaaggagatttactcagacaccctggagtcaactcccatgcttgagaaggaaaagttccctcaagattactttccagagtgcaagtggtcacgtaagggattcattcgtaccaggtggtgcatagccgattgtgccttcgacctagtcaacattcatctgtttcatgatgcaagtaaccttgtggcctgggaaacctcaccttctgtttacagcggaattcggcataaggccctcgggtatgtgctggaccggatcatcgatcagcgcttcgaaaaagtgtcctacttcgtgtttggggatttcaactttcgcctggatagtaaatctgtcgtagagaccctatgcaccaaggccacaatgcagacagtgcgagcagccgacaccaacgaggtggtgaagctaatattcagggagtccgacaacgatagaaaagtcatgctgcagctggaaaagaaactgttcgattactttaatcaggaggtatttagagacaacaatggcacggcacttctcgaatttgataaggagctatctgtgtttaaagatcgcctctacgaactggatatttccttccctccatcatatccatatagcgaagacgcccgtcagggagagcagtatatgaacactagatgtcctgcttggtgcgatcgcattctgatgtctccaagcgccaaggagctcgtgttgcgtgtcagtgtgtgctgccctagtccaggtcacagggggatgtggtcggctggatccgggctggctcagccttggtag

SEQ ID NO: 226850 - DNA, 1239 bp, synthetic construct
  misc_feature 1..1239: note = Description of Artificial Sequence: Synthetic coding sequence
  source 1..1239: mol_type = other DNA
atggctggaaaggccgcagccccaggcactgctgtcctcctggtcaccgctaacgtcggctctttatttgatgaccccgagaacctccagaagaattggttgcgggaattctatcaggttgttcatacacataagccccactttatggccctccattgtcaggagttcggtggcaagaactacgaggccagcatgagccacgttgacaaatttgtcaaagaattactgagctccgacgccatgaaagaatacaaccgcgcacgcgtgtacctcgatgagaactacaaatcccaggagcactttaccgccttagggtccttctattttttacatgaatccctgaagaatatttatcagttcgactttaaagccaaaaagtataggaaggtagccggaaaagagatctattcggacaccctcgagtccacaccaatgctcgagaaagaaaagttccctcaggattatttccccgagtgcaagtggtcccgcaaaggctttatcagaacaagatggtgtatcgcggactgcgcttttgacctcgtcaacatacacctgttccacgacgcctcaaacttggttgcatgggaaacatccccttccgtttacagcggaataagacataaggcattaggatacgtgctcgatcgaattatcgatcagcggtttgagaaggtcagttatttcgtcttcggcgacttcaatttccgcctggattccaaatccgtggtcgaaactctatgcaccaaagccacgatgcagactgtgcgggctgcagacactaacgaagtggtaaaactgatcttccgcgagtcggataacgatagaaaggtaatgcttcagctcgaaaagaaactctttgactactttaaccaggaggtgttccgagacaataatgggaccgctctgctggagtttgacaaagagttatcggtgtttaaggaccggctatacgagctggacatctccttccccccttcttacccatacagtgaggatgccagacaaggtgagcagtacatgaacacccggtgtcccgcatggtgtgacaggatcctcatgagtccttctgcaaaagaactagtgctgaggtccgagagtgaagagaaggtggttacctacgaccacatcggcccaaatgtctgcatgggcgaccataagccagtgtttctggctttcaggatcatgccaggtgcgggtaagcctcacgctcatgttcacaaatgttgcgtagtacagtag

SEQ ID NO: 226851 - DNA, 558 bp, synthetic construct
  misc_feature 1..558: note = Description of Artificial Sequence: Synthetic coding sequence
  source 1..558: mol_type = other DNA
atggccggaaaagctgccgctcctgggacggccgtgctcttagtgacagctaacgtagggtccttatttgatgatccagagaatctccagaaaaattggctgcgagaattttatcaggttgtccatactcacaagcctcactttatggccctgcattgccaagagttcggaggaaagaactatgaggcatcaatgagccacgtcgataaattcgtaaaggaactcttgagttcagacgcaatgaaggaatacaatcgggcaagggtttacctcgacgagaactataagtcccaggagcacttcaccgcattagggagtttctatttcttgcacgaatccttgaagaatatataccagtttgacttcaaggccaaaaagtacagaaaagtggcaggcaaggagatctactctgataccctagaaagcacccctatgctcgagaaagaaaagtttccgcaagattatttcccggagcggcacgtgccccacaccagcctggaggccctgttgatactccacgaggatccgcagctcccagacccccacctacccctgtag

SEQ ID NO: 226852 - DNA, 1068 bp, synthetic construct
  misc_feature 1..1068: note = Description of Artificial Sequence: Synthetic coding sequence
  source 1..1068: mol_type = other DNA
atggccggaaaggctgctgctcccggtacagcagttctgctcgtgactgcaaatgtgggtagcttattcgatgacccggagaacctgcagaagaattggctcagagaattctaccaagtcgtgcacacacacaagccccattttatggcattgcactgccaggaattcgggggtaaaaactatgaagccagcatgagccacgtagacaagtttgttaaggaactcctgtcaagtgacgcaatgaaagagtataatagggctagagtgtatctggatgagaactataagtcgcaagaacatttcactgcgctgggcagtttctatttcctgcatgaatccctgaagaacatatatcagtttgacttcaaggctaagaagtacagaaaagttgccggaaaggaaatctattcagataccctggaatcgacacctatgcttgagaaggagaagttcccccaggattactttcccgaatgtaaatggagtcggaagggatttattagaacccgatggtgtatcgctgattgtgcattcgacctcgtcaacattcaccttttccatgatgcctctaacctggtcgcctgggagacttccccgtcagtctatagtggaattcgccacaaagccctggggtatgtgctggacaggatcatcgaccaaagattcgagaaagtgagttactttgtcttcggcgatttcaatttcagactagactccaagagtgtggtggagttattagaattcgataaagaactctcggttttcaaggacaggttgtacgaactagatatctcgttccctccatcctacccctatagcgaggacgccaggcagggtgaacaatacatgaatactaggtgccccgcatggtgtgataggatattaatgtccccatctgccaaagagttggtgctacggtcagagtccgaagagaaagttgtaacttacgaccatatcggcccaaacgtttgcatgggcgatcacaagccagtcttcttggcatttaggattatgcctggggcaggaaaacctcatgctcacgttcataaatgttgcgtggtacaatag

SEQ ID NO: 226853 - DNA, 417 bp, synthetic construct
  misc_feature 1..417: note = Description of Artificial Sequence: Synthetic coding sequence
  source 1..417: mol_type = other DNA
gtgacggccaatgtggggtctttgtttgacgatcctgaaaaccttcagaagaactggctgcgagagttctaccaggctttgggttcattttacttcctccatgaaagtcttaagaacatctaccaattcgactttaaggcaaaaaaatatcgcaaggtagccggaaaagaaatatactccgacactctggagtccacaccaatgctcgagaaagaaaagttcccccaggactacttcccagaatgtaagtggtccagaaaagggtttatccgcaccagatggtgtatcgccgactgtgcgttcgatttggtgaacatccatctgttccacgatgcatctaaccttgtcgcttgggaaacttctccctctgtgtactccggcatccgccataaagccttaggctatgtgctggactag

SEQ ID NO: 226854 - DNA, 990 bp, synthetic construct
  misc_feature 1..990: note = Description of Artificial Sequence: Synthetic coding sequence
  source 1..990: mol_type = other DNA
atgaaggagtataacagggctagagtgtacctggatgagaactacaagagtcaggaacactttacagccctgggttctttctattttttgcatgagtcactgaagaacatctatcaattcgacttcaaagctaaaaagtatcgcaaggtggctggtaaagagatatactcagatacattagagtcaacgcctatgctcgagaaagaaaaattccccctgctgccgagagtgcagatggtcaaaaagcggctccatccggacgaggtgatcgcggattgtgctttcgacctggtgaacattcacctgtttcacgacgcctccaatttagtggcatgggaaacaagccccagcgtatactcggggatccggcacaaagcattaggttacgtcttagataggataatcgatcagcggttcgagaaggtctcttactttgtgttcggggatttcaactttcgtcttgattctaaaagtgtggtggagaccctctgtacgaaggccactatgcagactgtgcgtgctgccgacactaacgaggttgtcaaactcatctttcgagagagtgataatgatagaaaagtcatgctgcaactggagaaaaaactgttcgattactttaatcaggaggtgttccgagataataacggcactgcgttgctcgagtttgataaggagctctcagtatttaaggatcgcctgtacgagctggacatcagcttccctccttcctacccttattccgaagacgctcggcaaggcgaacagtacatgaacactagatgccccgcatggtgtgaccgtatcctcatgagtccctcagccaaggagcttgtcttgcggtcggagagtgaagaaaaagtcgttacctacgaccacattggaccaaacgtgtgcatgggcgatcataaaccagtattcctagcctttcggattatgccaggcgcaggcaagccccacgcacatgtccacaagtgctgtgtagtgcagtag

SEQ ID NO: 226855 - DNA, 315 bp, synthetic construct
  misc_feature 1..315: note = Description of Artificial Sequence: Synthetic coding sequence
  source 1..315: mol_type = other DNA
ctggatatttcgttccctccgagctatccctatagtgaagacgccagacagggcgagcaatatatgaacacgaggtgcccagcctggtgcgatcgcattttaatgtctcccagcgcaaaagagctagttctaagaagcgagagtgaggagaaggtcgttacatatgaccatattggacctaatgtgtgcatgggcgatcataagcctgtcttcttagctttccgaatcatgccaggcgcaggtaaacgttgccagagacatgaacgaaccctgcgagagcctccatgctccagaggacctaacactcacagctag

SEQ ID NO: 226856 - DNA, 546 bp, synthetic construct
  misc_feature 1..546: note = Description of Artificial Sequence: Synthetic coding sequence
  source 1..546: mol_type = other DNA
gccgcagcaccgggaacagcggtactgctggtaactgctaatgtgggctcactgttcgatgaccctgaaaacttacagaagaattggcttcgagaattctatcaagtagtccacacccacaagccccactttatggcactgcattgtcaggaattcggtggaaaaaactacgaggctagtatgagccacgtcgataagttcgttaaggaactgctctcctccgacgccatgaaagaatataatagggccagagtctatctggacgagaattataagtctcaggagcacttcactgccctgggctctttctatttcctgcacgaatccctgaaaaacatctatcaatttgactttaaggctaagaagtataggaaggtagccggaaaagagatctactcagacactctggaaagcaccccaatgctggaaaaggagaaattcccgcaggattacttccctgagcggcatgttccccacacgtcactagaggccttactgatcctgcatgaggatcctcagctcccagatcctcacctcccactttag

SEQ ID NO: 226857 - DNA, 459 bp, synthetic construct
  misc_feature 1..459: note = Description of Artificial Sequence: Synthetic coding sequence
  source 1..459: mol_type = other DNA
atggcaggaaaagccgctgcgccaggcactgctgtgctcctagttaccgcaaatgtgggctctctctttgatgaccctgaaaacctgcagaagaattggctcagagagttttatcaggctctgggttccttctactttctccacgaaagcctcaaaaatatttatcaatttgacttcaaagccaagaagtacaggaaggtcgccggtaaggaaatctactccgacaccctagagtccacaccaatgcttgaaaaagaaaagtttccccaagactactttcccgaatgcaagtggagtcgtaagggattcattaggacaaggtggtgtattgctgactgtgcgtttgatctggtgaacattcacctctttcacgacgccagcaatcttgtggcatgggagacttcgccatctgtctattctggcattcgccacaaggccctcggttatgtgttggactag

SEQ ID NO: 226858 - DNA, 1935 bp, synthetic construct
  misc_feature 1..1935: note = Description of Artificial Sequence: Synthetic coding sequence
  source 1..1935: mol_type = other DNA
atgccctctaaggcggagaatcttcgtcctagtgaaccggcaccccaacctccggaaggcagaaccctccaggggcagctgccaggagccccacccgcacagcgagccggttcaccgcctgacgctcccggatccgagtcccccgcattggcttgctcgaccccagccacaccttcaggagaagatccgcctgccagggctgcccctatagctcccaggccccctgcacgaccaaggcttgagagggccttaagtctggacgacaagggatggagacgaagacgtttccgaggctcacaggaggatctcgaggccagaaacggcactagtccttcccgcggaagcgttcagagcgaggggccaggtgcaccagcacactcgtgtagccctccctgtttgtctacctctcttcaggagatacctaagtctcggggagtgctaagcagtgagcgaggatccccgtcatctggcggaaaccctctctccggcgtggcttcctcctctcccaacctgcctcaccgggacgcggctgtcgcgggttcatcacctaggctcccatcactattaccaccacggccacctccagctctctcgctggacatcgcgtctgatagcttgcgtacagcaaacaaagtggattccgatttggctgattacaagctgcgcgctcagcctttgttggtcagggcccactccagcctcgggcctggaaggccgagatcccccctggcgtgcgacgattgctctctacgatcggctaagtccagcttttcgctgctggcccctatccgctccaaggacgttcggagccgatcttacctcgaaggcagtctgctagcctccggcgcactgctcggcgcagatgaactcgcacgctatttcccagaccgaaatgtcgccctcttcgtggcgacctggaatatgcaaggtcagaaggagctccctccatcactggacgagttcctcctgccagccgaggccgattatgctcaggacctgtacgtgattggcgtgcaggagggctgttcagatagaagggaatgggagactcgcctgcaggagacactgggaccccactatgtgctgctgtcctccgccgcacacggggtgctttatatgtctttatttattcgccgtgacctgatttggttctgctccgaagtggagtgttccacggtcactaccaggattgtgtctcagatcaagacaaagggcgcactcggcatctccttcactttctttggaacttcctttctttttatcacttcccatttcacttccggagacggtaaagtagctgaaagattactcgactacacaagaacagttcaggctcttgtcctgcccaggaacgtgcccgatactaatccctatagaagctccgctgcagacgttactacacgatttgacgaggtgttttggttcggggacttcaattttcgcctaagcggtggcaggacggtcgttgatgcactgctgtgccaaggcctggtagtagatgttccagctctgttgcagcacgaccagctgatcagagaaatgcgcaaaggctccatttttaaggggtttcaggagcccgatatccatttcctgcccagctataaattcgatatcggcaaagatacctacgactcaacttctaaacagagaactccttcctatactgaccgggtgttgtaccgttctagacacaagggagatatctgcccggtgagctatagttcatgccccggtattaagacatctgatcaccgtcccgtgtacgggctctttcgggtgaaagttagacccggaagggataatattcctctcgcggcaggaaagttcgaccgcgagctttacctgctgggaattaaacgaaggatatccaaggagattcaacggcagcaggcattgcaatcccagaactcatcaaccatctgctcggtttcttag

SEQ ID NO: 226859 - DNA, 960 bp, synthetic construct
  misc_feature 1..960: note = Description of Artificial Sequence: Synthetic coding sequence
  source 1..960: mol_type = other DNA
atggatcagtccgtggccatccaggagaccctggccgagggggagtattgtgtaatcgcggtccagggcgttctctgcgagggcgattcccgacaaagtcgcctgctcggcttagtaaggtaccgcctggagcacggtggtcaggaacatgccttattcttgtatactcataggcgaatggctatcactggtgacgacgttagtctcgatcagatcgtccctgtatcacgcgattttactctggaggaggttagtccagatggcgaactgtacattttgggttcagatgtcaccgtgcagctggacacagcagagctgtcgctagtgttccagctaccctttggtagtcagactaggatgttcctgcatgaggtggcccgagcctgccctggctttgactccgcaacaagggacccggagttcttatggctgtccaggtatagatgcgctgaactggaactggagatgcctacccccagaggctgcaattccgcacttgtgacctggcctggatatgccaccataggaggaggcaggtacccatctcgtaagaagagatggggtttagaagaggctaggccccagggggcaggctctgtgctgttctggggtggggctatggaaaaaactggcttccgcctgatggagcgggctcacggcggaggattcgtgtggggcagatccgctcgtgacggcagaagggacgaggagttggaggaggccggtcgagaaatgagcgctgcggcagggtctagggagagaaacaccgccggatcggccggaggcggtaagctgggctggggcgctggccctggagctgcggtgcggcctgccctggggtgggcagggagtgcggtttggcccgttgacgccaggggtgaggaccagagtcccggagggcctttggaagccggaacgctggggcagaaattttgtgatgtcttgctgcggcgtgcgtag

SEQ ID NO: 226860 - DNA, 2982 bp, synthetic construct
  misc_feature 1..2982: note = Description of Artificial Sequence: Synthetic coding sequence
  source 1..2982: mol_type = other DNA
atggatcaatcagtggcaatacaggaaaccctagcggagggcgagtactgtgtgatcgcagtacagggcgttctctgtgaaggcgactctagacagagtaggcttttgggtcttgtaaggtataggctggagcatggcggacaggaacacgctttgttcctttacacgcatcggaggatggcaattaccggggatgacgtgagcctggaccaaatcgtgccagtatcgcgcgacttcacgcttgaagaggtaagtcctgatggagagctgtatatcctgggatcagacgttaccgtccaattggacactgccgagcttagcctagtgttccaactgccgtttggctcccagaccaggatgtttctccacgaagtcgctcgggcttgccccggtttcgatagcgccacacgcgaccctgaattcctgtggttgtctcgttaccgctgtgcagaactggaactggaaatgccgacacctcggggttgcaattccgctctggttacttggcccggatacgccacgatcggagggggtagatatccttctaggaaaaagagatggggattagaagaggcacgtcctcagggcgcaggatccgtgctcttctggggcggagctatggaaaagacgggctttaggctgatggaaagagcccacggcggagggtttgtgtggggacgcagtgctcgagatggccgtcgggatgaggaactggaagaggcaggaagggaaatgagcgccgctgccggatctcgggaacgcaacacagctggcggatctaatttcgatggtctgaggcctaacggaaagggcgtgccaatggatcaatcaagtagaggacaagacaaacccgagtccttacagccccgacagaataagagcaagtcggagatcacagacatggtccggagctccacaatcactgtcagtgataaagcccatattctcagcatgcaaaaattcggtctgcgcgataccatcgtaaaatctcacctgctgcaaaaagaggaggattacacttacatccaaaacttcaggttctttgctggtacttataacgttaacggtcaatctcctaaggaatgcctgcggctttggctgtccaacggaatccaggccccagacgtctattgtgttggcttccaggagctggatctgagtaaggaggccttcttttttcacgatacccctaaggaagaggagtggttcaaagccgtgtctgaaggcctgcatcccgacgctaagtacgccaaagtgaagctcatacgactagtgggtattatgttgctgctgtacgtaaaacaggaacacgcagcctatatcagcgaagttgaggccgaaacagttggtactggcattatgggcaggatgggcaataagggcggagtcgcaatcaggtttcagtttcataataccagtatctgcgtggttaattcacaccttgccgcacacatagaagagtacgaacgcagaaatcaggattacaaagatatctgctcgcggatgcagttctgccaacccgaccctagtctgccaccactgacaatctcaaatcacgacgtcatcttgtggctgggcgacctgaactacaggatagaagagctggatgtagaaaaagtgaagaagcttattgaggagaaagacttccagatgctgtatgcgtacgaccagctgaagattcaggtggccgctaagactgtcttcgagggcttcactgaaggagaactcacctttcagcctacttacaagtacgatacgggcagcgatgactgggacaccagtgagaagtgcagagcccctgcatggtgcgaccgaattctctggaaaggtaaaaacatcacgcagctctcctatcagtcacacatggctctaaaaacgtccgatcataaacccgtatcctccgtctttgatatcggggtgcgcgtagtgaatgatgagctttaccggaaaaccctcgaggaaattgtgcgctcgctcgacaagatggagaacgccaacatcccaagcgttagcctgagtaaaagggagttctgcttccagaacgtaaagtatatgcagctgaaagtggagtcgttcacaatccacaatggacaggtgccctgtcattttgaattcattaataagccagatgaggaatcctactgtaagcaatggctcaatgcaaacccctctaggggcttcctactgcccgactccgatgtggagatcgacctagaactgttcgttaacaaaatgactgctactaagcttaattcaggagaggataagatcgaggacattttggtgttgcatcttgatcggggtaaagactacttcttgtcagttagtggtaattacctcccaagctgttttggaagtcctatccacacgctatgctacatgcgcgaaccaatcctggatctgcccctggagactatcagcgagctgaccctgatgccagtttggaccggcgatgatggctcccaattagacagtcctatggagattcctaaggaactttggatgatggttgattatctttacagaaacgcggtgcagcaggaagacttatttcagcagccgggtctgagaagcgaattcgagcacattcgcgactgtctcgataccgggatgatcgacaacctatcggcatctaatcattcagtggccgaggccctactgcttttcttggagagccttcccgaacctgttatctgctacagcacttatcataactgcttggaatgctcaggcaattacaccgctagcaaacaggtcattagcaccctcccaatatttcataagaacgtgtttcattacctgatggcgttcttaagagagctgttgaaaaattcagcaaagaaccatcttgatgaaaacatcttagcatccatctttggatctttgctacttcgaaatcctgcaggccaccagaaactcgacatgaccgagaagaaaaaggcacaggagtttatccatcaattcctttgtaatcccctttag

SEQ ID NO: 226861 - DNA, 2742 bp, synthetic construct
  misc_feature 1..2742: note = Description of Artificial Sequence: Synthetic coding sequence
  source 1..2742: mol_type = other DNA
atggaccaaagtgtggccattcaggaaaccttggccgaaggggaatattgtgtaattgctgttcagggggtactatgcgaaggcgactcacggcaaagcagactgctgggcctggttagatacaggttagagcatggaggccaggagcacgcgcttttcctgtacacgcacaggcggatggccatcacaggggatgatgtgtcgctagatcagatcgtgccagtcagcagagatttcactctggaagaagtaagccccgacggggaactgtacatcctgggctcggatgtcaccgtgcagctggacactgccgagctcagcctcgtcttccagttgcctttcggatctcagactaggatgttcttacacgaagttgccagggcgtgcccgggattcgattctgctacgagggatccagagtttttatggctgagccgataccgttgcgccgagcttgaactcgagatgcccacgccacgtggatgcaatagcgctctggtgacatggcctggctacgctacaataggaggcggagggtctaattttgacgggctgaggcctaatggcaagggcgtacccatggatcaaagctcacgcggtcaggataagcctgaaagcctgcagccccgacagaacaaaagcaagtctgaaattactgacatggttcggtctagcaccatcacagtcagcgataaagcccatatactgtcaatgcagaaatttggattacgggacacaatcgtaaaatcacacctcctacagaaggaagaggactacacctacattcaaaatttccggtttttcgccggaacctacaatgtcaatggccagagtccaaaagaatgtctgcgcttgtggttgagcaacgggatccaggcacctgatgtatattgcgttggttttcaggagctcgatctcagcaaggaggcgttttttttccacgacactcctaaggaggaagaatggttcaaggcagtttccgagggactccaccccgacgcgaaatatgctaaggtaaaactgattagactggtggggatcatgctgctcctttacgtgaagcaagagcacgccgcttacattagcgaggtcgaggctgagacggtgggtactggcatcatggggagaatgggcaataaaggaggggtggccataaggtttcagttccacaacacaagtatctgtgttgtcaacagtcacctggccgctcacattgaagaatatgagcgcagaaatcaggattataaagatatctgttctaggatgcagttctgccagcctgatccctcacttcctccccttaccatctccaatcatgatgtgatcctgtggctgggagatctgaattacagaattgaagagctggacgtggagaaagtaaagaagctgatcgaggaaaaagattttcagatgctctacgcctacgaccagttaaagatacaggtggcagcaaagactgtgttcgagggtttcaccgaaggggaactaacattccagcctacatataagtacgacaccggttcagacgactgggacacaagcgagaagtgccgcgctcccgcatggtgcgatcggattctgtggaaaggaaagaatataacccagctgtcttatcagtctcatatggccttgaaaacatccgatcacaagccagtgagcagtgtctttgacattggggtgagggtggtcaatgacgaactctaccgaaagaccctggaggagatcgtgagaagcctggataagatggagaatgcaaatattcctagcgtcagcctctcaaagagggagttttgcttccaaaatgtcaaatacatgcagctgaaggtggaatcatttaccatacacaacgggcaggtgccatgccacttcgagttcatcaacaaacctgacgaagaaagttattgcaagcagtggctgaacgccaacccgagcagaggattcctgttgccagatagcgacgtggaaattgatctggaactgttcgtcaacaaaatgacagcaactaaactgaactccggggaagacaagatcgaagacattctggttctgcatctggatagaggcaaggattatttcctgtcagtctccggtaactacctgccctcctgtttcgggagccctatccacacattgtgctatatgcgagaacctattctggatctgcctttggaaaccatttccgagttgaccctgatgccagtttggacaggtgacgacggctcccagctggacagccccatggaaatacccaaggagctgtggatgatggtcgactacttgtatcgaaatgcagtccagcaggaagacctcttccagcagcctgggttgcgctctgagttcgagcacatccgggattgcctcgatactggaatgattgataatctatcagcttcaaaccattcggtcgcggaagccctcctgttgttcttggaaagtctgcctgaacctgttatttgctattccacatatcacaattgtttggaatgttccggcaattatacggcctcaaagcaagtgatcagtactctccccattttccataagaacgtttttcactacttgatggccttccttcgcgagctgctgaaaaactccgccaagaaccatctggacgagaatatccttgcgagtatcttcggaagcctcctccttagaaaccccgctggtcatcagaagctggacatgacagagaagaaaaaggcccaggagtttattcaccaattcctgtgtaatcctctctag

SEQ ID NO: 226862 - DNA, 2982 bp, synthetic construct
  misc_feature 1..2982: note = Description of Artificial Sequence: Synthetic coding sequence
  source 1..2982: mol_type = other DNA
atggatcagagcgtcgcaattcaggagaccctggctgaaggcgaatattgtgtgattgcagtacagggggtgctgtgcgagggggacagtcgccagagccggctgctgggtctggtccggtacagactggagcatggagggcaggagcacgccctgtttctgtacacacataggagaatggccattaccggtgatgacgtatccctggaccagatcgtccccgttagccgcgacttcaccctggaggaagtgtcccccgatggtgaactctacatacttggaagcgatgtgacggtccaattagacacagcggagctgtcactggtgtttcagctccccttcggctcacagacacgaatgttccttcatgaagtggctagagcatgccccggatttgactcagccacacgcgatcctgagttcctgtggttgagccgttacagatgcgccgagctcgaacttgaaatgcccactccacgtgggtgtaatagtgctctagtcacttggcccggatacgctactatcggaggcggacggtatccctcccggaagaagcggtggggcttggaagaggcccgaccacagggggctgggtccgtgctgttttggggcggagcgatggagaagaccgggtttcgactcatggaaagggctcacggcggtggcttcgtctggggacgttcagctcgggatgggaggagagacgaagaactcgaggaagccggacgagagatgtctgcggctgcaggctcacgcgaacgcaatactgccggaggctccaacttcgatggtctgaggccaaacgggaagggcgtcccaatggaccagtcaagtaggggtcaggataagccagagagcctccagcccaggcagaacaagagcaaatcggagattacagatatggtgcggtctagcacaattacagtcagtgataaggcacacatcctgtctatgcagaagtttgggttacgagatactatcgtgaagtctcaccttctgcagaaagaggaggattatacttacatccagaatttcaggttctttgctggtacttacaatgtgaacggccaaagccccaaggaatgtctgcgtctttggctcagcaatggcatacaggctcctgacgtttattgtgttggattccaggagctggatctgagcaaggaggcattcttttttcatgacacgccaaaggaagaggagtggtttaaggccgtgagcgaggggctgcaccctgacgcgaagtatgcaaaggtcaagctgattcgattagtcgggataatgctgctgctatatgtgaagcaggaacatgccgcatatatctccgaagtcgaagccgaaactgtcggcacagggatcatggggagaatggggaacaagggcggagtcgccattcgctttcagtttcacaacacatccatttgcgttgtcaactctcatctcgccgcacatattgaagagtatgagagaaggaaccaagattataaggacatatgtagccggatgcaattctgccaacccgacccatccctcccacctctcacaatctccaaccacgatgtcatcctttggctcggcgacctcaactatcgaatagaggaactggacgtcgagaaggtgaaaaagctcatcgaggagaaggactttcagatgctgtacgcctacgatcagctgaagattcaggtggccgctaaaactgtattcgagggattcacggaaggcgagttgaccttccagcccacttataagtacgacacaggttcagatgattgggacacctctgaaaaatgccgggcacctgcctggtgtgaccgtatactgtggaaaggcaagaacatcacccaactgtcatatcagtcacatatggccttaaaaacatctgaccacaaaccagttagctccgtgtttgacatcggagtacgcgtcgtgaatgacgagctgtatcggaagacactggaggaaattgtgcgttccctggataagatggagaatgcaaatatcccgagtgtgagcctgagcaagagagaattttgtttccagaatgtcaagtatatgcagcttaaagtggagagttttacaattcacaatggtcaggtgccctgtcattttgagttcatcaataagcctgacgaggagtcatactgcaagcaatggcttaacgcaaacccatcacggggatttcttctgccagactccgacgtggaaattgacctcgagttgttcgtcaataagatgacggcaaccaagcttaattctggggaagacaagattgaggacatacttgtgctccacctcgaccgcggtaaagattattttcttagtgtgtcgggaaactatttgccttcatgcttcggaagcccaatccacacattgtgctatatgagagaacctatcctggatctgccccttgaaaccatctccgagctcacattgatgcccgtgtggacgggggacgatgggtcacaattggattcccccatggagattccaaaagagctgtggatgatggtggactacctctaccgcaatgccgtccagcaggaggaccttttccagcagccaggtctgcggtcagagttcgaacatatcagggattgtttggataccgggatgatcgacaatctgtcagctagcaaccacagcgttgccgaagccttactcctgtttctggaatcccttcctgagcctgtcatttgctactctacctaccataattgcctagagtgctcaggaaactacaccgccagcaagcaggtgatatccactctcccaatctttcacaagaatgtgttccattaccttatggcattcctgagggaactgttaaaaaatagcgccaaaaaccatctggatgagaatattttggcttctatcttcggaagccttctactccgcaaccccgcaggccaccagaaactggatatgacggagaagaagaaggctcaggaattcattcaccagttcctgtgtaatcctctgtag

SEQ ID NO: 226863 - DNA, 2250 bp, synthetic construct
  misc_feature 1..2250: note = Description of Artificial Sequence: Synthetic coding sequence
  source 1..2250: mol_type = other DNA
atgtcagccgctgcaggctctagggaacgcaacacagctgggggtagtaatttcgacggtttgagaccgaatggaaagggagttcccatggatcaatcttcccgcggtcaggataagccagagtccttacaaccaaggcagaacaaaagcaaaagtgagatcacggatatggtacggtcttctacgattactgttagtgataaggctcatatcctcagtatgcagaagtttggtctgcgagatactattgtgaagtctcacctgctacagaaagaagaagactatacatacatccagaatttccgcttttttgcaggaacctacaacgttaatgggcagagccccaaggagtgtctgcggctctggctctcaaacggcatacaggcacccgatgtctattgtgtcggcttccaggagttggacctgagtaaggaagcgttctttttccacgatacgcccaaagaggaggaatggtttaaagcagtgagtgaaggcttacacccggatgccaaatatgccaaggtcaagctgatcaggcttgttgggatcatgctgctgctctatgtcaaacaggagcatgccgcatatatctccgaggtagaggccgagaccgtgggtacaggtattatggggaggatgggcaacaagggcggagtggccataaggttccagttccacaacacctctatttgcgtggtgaactcccatctagctgcgcacattgaggaatatgagcgcaggaatcaggattataaagacatctgttcccggatgcagttctgccagcctgacccctccctaccccctctgacaatctccaatcacgatgtgatcctctggctgggcgacctgaactatcgcattgaggagcttgatgttgagaaagtgaaaaagctgattgaggagaaggacttccagatgctgtatgcctatgatcagttaaagattcaggtggccgcaaagacagtttttgaaggcttcacggaaggcgagcttacttttcagcccacttataagtatgatacgggaagtgatgactgggatacttcggagaagtgcagagctccagcctggtgcgatcggattctgtggaaggggaagaacatcacgcagctttcatatcagagccatatggcgctcaaaacaagtgaccacaagcccgtgtccagtgttttcgatattggcgtgcgtgttgtgaatgacgaactttacagaaagaccctcgaagaaattgtcagaagccttgataagatggagaatgccaatattcctagtgtttctctttccaagagagaattctgcttccaaaacgtcaagtacatgcagttaaaggttgagtcttttactatacataacggacaggtgccttgtcactttgaattcattaacaaaccagacgaggagtcctactgcaagcagtggttgaatgctaacccatcaagagggtttctgctgcccgactcggacgtagagatagatctcgagctctttgtcaacaagatgacagccactaagctcaactcaggcgaagacaaaattgaagatatactggtgctgcatctggatagaggaaaggattatttcctctcagtgtcaggaaattatttaccaagttgtttcggtagcccgattcacacactctgttatatgcgcgaacccatcctggacctgccgctggaaaccatttctgagttaaccctcatgcctgtctggactggtgacgacggcagtcagctcgacagtcctatggaaatccctaaagaactttggatgatggttgattatttataccgcaacgctgtccagcaggaagacctgttccaacagcctggtctgcggagcgagttcgagcatattcgcgattgtctcgatacagggatgattgacaatctatccgcatctaaccactctgtggccgaggcgttactgctcttcttggagtctctgccagagccagtcatttgctacagcacctatcataattgcctggagtgctcagggaactacaccgctagcaagcaagttatttccacactgccaatattccacaagaacgtcttccactatcttatggcattcctgagagagttactgaagaacagcgcaaaaaatcatcttgacgagaacattctggcatcaatctttggatcattacttctgcgaaacccagctggacatcaaaagctagacatgacagagaagaaaaaggcgcaggaattcattcaccagtttctatgcaaccccctgtag

SEQ ID NO: 226864 - DNA, 2487 bp, synthetic construct
  misc_feature 1..2487: note = Description of Artificial Sequence: Synthetic coding sequence
  source 1..2487: mol_type = other DNA
atggaccagtcagttgctatacaggaaaccctggcagagggggagtattgtgtcatagccgttcagggtgtgctgtgtgagggggactctaggcagagccgcctgctgggactggtcaggtaccgactggaacatggcggacaggagcacgccctgtttctatatacccacagacgaatggccataactggtgatgacgtgagcttagatcagattgtcccagtaagtagagactttacgctggaggaagtaagccctgatggcgaactgtacatcctaggttccgatgtgacagtgcagctcgacaccgctgagctctctctggtgtttcagcttcctttcggcagccagaccagaatgtttttgcatgaggtagcacgtgcctgccctggcttcgatagcgctactcgcgaccccgaattcctctggcttagtaggtatagatgcgccgagctggagctggaaatgcctacccctcgtggatgcaactcagcccttgtgacttggccgggatatgccactattggaggaggacggtacccttcaagaaaaaagcgctggggcctggaggaggctagaccccagggggcaggctccgtgctgttctgggggggtgccatggagaagacagggtttaggctgatggagagggcccatggagggggtttcgtctggggccgttcagcacgcgatggcaggagagacgaggagttagaagaggctggtagggagatgtcggcagccgcaggctctcgagagcgaaacacagctggtggctctaactttgatggtctgcgacccaacgggaaaggggtgcctatggatcagagctcccgcggacaggataaacccgaatctttgcaaccaaggcagaataagtcgaaatccgagataaccgacatggtgagatcctctacaataaccgtatccgataaagcccatatcctctctatgcagaagtttggcctgcgagatacaatcgttaagtcgcatctcctacagaaagaggaagactacacctacatccagaacttccgatttttcgcaggcacttacaacgtgaacggccagagtcccaaagaatgcctgcggctctggctgtcaaacggtatccaggcaccagacgtgtattgcgttggatttcaggaattggaccttagcaaagaggcttttttcttccacgacacccccaaggaggaggaatggttcaaagccgtgtccgaaggcttgcatcccgatgccaaatatgccaaggtgaagcttattagactggtcgggatcatgttgttgctgtatgttaaacaggagcatgccgcatatattagcgaggtggaggctgagaccgttgggacaggaatcatggggcgaatggggaataaaggaggcgtggccatcagattccagtttcataatacctcaatctgcgtggttaacagccacctggcagcgcacatcgaggagtatgaacgcaggaatcaggactataaagatatatgctcccgaatgcagttttgtcagccagatccgtcactgcccccacttacgatttctaaccacgatgttatcctatggttaggtgacctgaattacagaatcgaggagctagacgtagagaaggttaagaaactgatcgaggagaaagacttccagatgctgtatgcctacgatcagctgaaaatccaggtggccgctaagacagtgttcgagggttttactgagggagaactgacttttcagcctacatacaaatacgacaccgggagcgacgactgggatacaagcgagaagtgtcgagctcctgcatggtgtgatcggatcctctggaagggaaagaacataactcagttatcttatcaaagccacatggcacttaaaacctccgaccataagccagtgtcctcagtgtttgacatcggcgtgagagtggttaacgacgaactgtatcggaaaacactggaagagatcgtcaggtccttggacaaaatggaaaatgctaatatcccttcagtgtccctctccaaacgggagttctgcttccaaaatgttaagtacatgcaattgaaggtagagtccttcactatacacaatggtcaggtcccatgccattttgaattcatcaataagccagatgaagagtcatactgcaagcagtggctaaacgctaatccaagccgagggttcctcctgccagattcggatgtggagatagatctcgaactgttcgttaacaagatgactgccactaaactcaattctggggaggataaaatagaggacatccttgtgctgcatctagacagggggaaggactatttcttgtctgtatcaggcaattatctgccctcttgctttggcagcccaattcatactctgtgctatatgcgcgagcctatacttgaccttcctctcgagacaatatccgaattgttagcttacctggcggcatactgctttgaaacgcaactcgtaacgaagagcctgatatag

SEQ ID NO: 226865 - DNA, 528 bp, synthetic construct
  misc_feature 1..528: note = Description of Artificial Sequence: Synthetic coding sequence
  source 1..528: mol_type = other DNA
atgcagaagttcggccttcgggataccattgtgaagagccatctactgcaaaaggaggaggactacacttatattcaaaactttagattcttcgcagggacatacaatgttaacggccagtcccctaaggaatgcctgcggttgtggcttagcaacggcatccaggccccagatgtgtattgtgttggctttcaagagctcgacttgagcaaagaagctttcttctttcatgacacccccaaggaagaagagtggttcaaggctgtgtctgagggcctgcaccctgacgcaaaatacgccaaagttaagctaatccgtcttgtaggtatcatgttactgctctatgtgaaacaggagcacgcggcatacatcagtgaagtcgaggcggagaccgttggcacaggtattatgggccgaatgtgtgacttagtcgctggcggaccgcagctccaagacaggcgggctggctgcgggaagtccgaaaaagctcaccgtcgagaggggttgtccaacgctgtgtgcatttag

SEQ ID NO: 226866 - DNA, 834 bp, synthetic construct
  misc_feature 1..834: note = Description of Artificial Sequence: Synthetic coding sequence
  source 1..834: mol_type = other DNA
atggctgatccttggcaggagtgcatggactatgccgtgacccttgccagacaggccggagaagtggtgtgcgaggcgatcaagaacgagatgaacgtaatgcttaagtcctcgccagtggacctggtcactgcgacagaccaaaaggtcgagaagatgctgatatcctcaattaaagagaaatatccgagtcattcattcataggagaagaaagcgtcgctgcgggagagaaatcaattttgaccgacaacccaacttggatcatcgaccctatcgatggcacgaccaactttgtccacaggtttcctttcgtggcggtttccattggattcgcggtgaataagaaaatcgaatttggcgttgtgtactcctgcgtagaaggcaagatgtacactgctcgaaaaggaaagggtgctttctgcaacggccagaaacttcaggtgagtcagcaagaagatattaccaagtcattgctggtgacagagctgggctctagtagaacacctgagaccgtgagaatggttctcagcaacatggaaaagctgttctgcatacctgtgcatgggattcggtcggttggaacagccgcagttaacatgtgtttggtggccacagggggagccgatgcctattatgagatggggatccattgctgggacgtagcaggagcaggaatcatcgtgaccgaagctggaggcgtcctgatggacgtgaccgggggaccattcgacttaatgagcaggagggtgattgcggcaaataaccgcatactggcagagcgtatcgctaaggagatccaggtgattcccttgcagcgcgacgatgaagattag

SEQ ID NO: 226867 - DNA, 597 bp, synthetic construct
  misc_feature 1..597: note = Description of Artificial Sequence: Synthetic coding sequence
  source 1..597: mol_type = other DNA
atggctgacccttggcaggaatgcatggattatgccgtcaccttggccagacaggcaggcgaggtggtgtgtgaggccatcaaaaacgaaatgaacgtcatgctgaagtcttcacccgttgacttagttacggctacagaccagaaagtggagaagatgctgattagctctatcaaggaaaaatacccgagccacagctttattggcgaggagagcgtcgccgctggtgaaaaatccattttgacagataatcccacttggatcatagacccgattgacggaaccaccaactttgttcatcgcttccctttcgtggccgtgtctatcggatttgccgtgaataagaagattgagtttggcgtggtgtattcatgcgtcgagggaaagatgtacaccgcccgtaagggcaaaggcgcattctgcaacgggcagaaactccaggttagccagcaggaaggttccggcgtactggagcagcagttgctgatatgcgccctgtggcagctggcagagcagatgcatattatgaagtgggaattcacagccggtatgctgcaagagctcgccctcctcttactgaagttagttgcttgctag
